United States Patent Application Publication US 2021/0254056 A1 - sequence listing, part 27

SEQ ID NO: 53739 - DNA, 1875 bp, Homo sapiens
tctctactaaaaatacaaaaattagccaggtgtggtggcaggtgcctgtaatcccagctactcgggaggctgaggcaggagaattgcttgaacccaggaggcaggggttgcagtgagcagagattgtgccactgcactgtagcctgggcaacaagagagaaactcactctcaaaaaaaaaaaaaaaaaaaaaaaaaaatagaattcggtacccatggcaaaactatccatgctaatttgtcaacaaaaggacagccaaggttttataaggtaagtatctaagcaaagcctgtgaataaggtcacatgccaaaggctactttttttccctttttgttattttccatgaattatataaacatgtcaagtatgttacagacacagggaaaacaaaaggaggtggggatgaaagtagagagattgtttacagagactgaaaataataaaagtgacagacactctattagtcatctaaaagtaaagtgatactgcattaagggagtagcagaaggtttattttagaaaagagattttagaattactaattgagtatgagtgagggatgatcaagaagaaagaaaaatcaaagtatgttgagccttcttaatcacttggaaaatggtagtactgcaagcaggaagtggaatgtctagaagaagtgttgtttttaagagaagagacctactgttctattaaactgtccaaaaagcatatttccagctacttcaggaatgtgagtcaagcaatcctgcaccagagctagggtttgtttgcaatgattatggcatgtattttagcctttgccctcagattccagtgaggtcaccacccacagaagattgtctgtggaagctgagtatttggcaagactcctaagaagggagctcagactcaaaccataagagacatgtcagcaaacagtttaacttcctttttgtcatgtgggtgaccatcgtaataggaagcttgtctttattttattttatgttttatttttgcaattgaagcctcatgaatactaagttctcaaaatttgctttatctcggggttgtttgggggtgggagcggggtgaaggttggggaataaatcaaccagagctccctaagaaagaaaaccaaaccgaaagtaaaaattaggaaatggaagtatggcatggtccaaaagttcagatgtagaaacacatatgggtttaaaaatgagcaatatttttctccttcaaaaagtgattgtgtagcaaagaaaaataaaatagtcttgatccagaacttttgtttcagaaaaagtatccattatatcatcaaggaagactcagctgtacacagatgggtgaaacttaaatgagtttattatttgtctctagaacactccaggatatagtcttctctaagggatcttgattaggcaagtggctgagatggagttaaaatgaaatagacacatctcttcgatcgccacaagaatcctataaaataattctctgcctaccacacgtggagatgccataccctttaaggcaacatttcctcagttcacaccatacattttgagacatcagcaacaaaaataacacttcaaaatcggagtttcactctgcacagtatccctgaaggagtcacttaaatctcagtggtccattcctgtagctcatgggaaccattagtgtgcatctcaagccttccaccatgttagtgtgagaaatgacagatacaaatgattttattgagagaggaaattaaaagagtataaatgtatagcagttgaaagttagtatgctctctgatcctatttccaacatatatgcctctggtgggaagctaagcacagtatcattttcagaatacagataatgtgaatgtttttaacacaacagggcaa

SEQ ID NO: 53740 - DNA, 1256 bp, Homo sapiens
gtcctaatactacttgaggtgtttagagactccaagccattcttggatttatttatgctaaccacttataaactcatatttgaaaaatatctatgaaagttcaattattttagagtgctttatttgctgttatttacaatagcctatatattcctcttataattagtgttttgtgagaacaataatcagatacattcacctaaactttccaatttactaattctataaataagtgtttttctttattaaatatgatttagaataataataagggccaattacttcttgctgaagggccaccattcattctcagtattccttttgctactgtggcccaagcaaccctggcagtatttcacacagcaaacattttttttttctgtctgactcaaattaacctttgccctgtatatttatctgcagcctccatgtaatcttgcaaaaactttcccaatagatacaaatttggcattctgggaacatttctcagctgtatacctgctttatgagtggtatgatgattttagagcagacaaccatttattcattagggtgtctatcagcttgtccagtagtgaccttgaccttgtcttcttgaagcattttattttgggactcttttcattatgacacacacagtgtcatttgctgtaatacctttattcactctgcttacaagcacttgcagttttgttgtgagctatctatcgatctggtttgtttttatttttaatttagaggatctaagagcatagttgctactaaatcaatgtattgcaccaatgtagatacggatcgaataatattttgccaaaatggtaagtgatggttttgtatccttccctccatccaccaaatttttcaaatctatagatcacagctgctatcctcattctctcacagtcttttcattcctttacccttgatactgtggtgcactggcaaaggtgttccgacccttcgcccactccctaattagctaattcagtcttttctctctctgacctatcttcagcttttgctttgtggactaatctggcctttacactaattgaatttttattctttgttgaataagctcccctttcccacatcctaactgtgtacattcttccatactcaatcttcaggtctttgctttctgtttcttaaaaactcagagctcagagtggctttccagaagaacccaggaagaacacactccagcccaggggtccacatcaggggcatctgtatctggggtcaggaaacccagt

SEQ ID NO: 53741 - DNA, 1134 bp, Homo sapiens
ctgctatttttgcttttgagacctctttaaacgttgatatcttcgtctgtaaaatgtggtaacaatgtttgccttgggtgattcatagggctattctgagatctgaaaaaaataatgcatatagaagttatttgaagcttctgttctgtagatatcaagcatcaaagatattttagcttttgaaagagagcaggagagctaaacagtttatccctggtagtctagtggttaggaaaacacaccacacacacacacatacacacaaacacacaccccagtttggaatattagagagatctttatattaagtaagggtcaagagttattggcctaataactgctctgtcaaaagctgggctatttctctccagttaattcacttctctgatctccaactttcttatgtgtaaatcaaaacagaggcagggacttgaacaagaagaacaattaaggtccctgccaacttgaatttctattactctctcctatttacctaccatggtagttggtatgacctccaatttcatactatttcttttccactgtaccattggccacagttgaaaaccacgctcggtctctcttgatggtttacctcagacaatagtcattgctgcttgaattttcctagaagaatgccattaaaaacaatcttgattttttttaagaaagaaatgaaaaatcaattgagccagacgtttactttggaaaacaaatggtttgttatctgtaagtgttttaattggcaaggcagaaagctgcctgtttaccaaacggaccaaaaaaatgactagtctgtgtattttcctactttttgctctttagccatcagggttattttaggacagagagctcttcctatttcagtcttctgctagttatcagaacaacttttgtcaatatgtcagttgctttagcctttatacttctaataattagcactatacactgcatatattaggagcttaataaaatgatcgtttatggtaataatagcaaatattcatagagtgtgtaatatgtacagttctaggcactttcatgtgtttaatgaggtaagacttacaatagtcctgggagatgggtactattatgtttgtgtatttcacaaataagcaaacagaaacacaaagg

SEQ ID NO: 53742 - DNA, 847 bp, Homo sapiens
ttttctccaagtattgcttgcgaggtgaattgaaggttttttttttatcaacagttgttttataagattgtttgaggactaaaagggctgattgtaatcacctgtaacatgttacccagcaagacattcctcaccaggttgaagtaaaaaaaagaaatgaagtgaaatatcaagcttatgcaagtttgaaattacaaacaagaacaaaagttaaaacacataagcccttcttatcagtaggttatctttcaggatagatcatacggttgtttctcttagtaattgcaacattgctctgttttctcattgagtaagtgagagagagagagagagagagagagtgtgtgtgtgtgtgtgtgtgtgtgtgtgtgtgtgtatgtgtgtgttggtgggcaggcagagacaaataaatgagttggaaagaaagtaaaagatgataaatgggtggcttaggtcaggttctgataattttacaatatttatgggtgaatgctaaggtggttacatagtttgtgcttgctgaaatgatccgacctagtttaactttgtaatgagttgcaaacacaaaaacaccaaaatgcaaaattaatggattttgcaatttgttttataagacatgcagaaatgcaaacatagaatataaatgtgcatcagtctgcagtgatcgttcagtttgtaactgaacttgttaggtcatttatcattgtttgcctatgtaaattgctttgtcacatgcttccacataaatcagcaaccgaggcctgtcctttttgttttggtttagtttatttcttgttcatgtaagactcttaacctgacaagatattagcaaaaagtgactaacgta

SEQ ID NO: 53743 - DNA, 649 bp, Homo sapiens
acctagacaaatgtggttcggagtttgggatgttccagagggagaggggtgttagctgtggagttaagaaaccgggtggggctcaggggaactgggcagagttagagacagggtgggggtgattgggcttgggtcggcatccatgagttccctccaggctgttctctggcaaagagggctatgatcatgggacatacttgttccctgggacaagtcaacccaaatgtaaaaaaaacacaccatttgttgcaccctgggacacgcttttaaattttctctgggtctccttgaaggtcaccagtgtgcgggaaagagtctggactgtttggttcactcccgttttccacatatctaatctttatgctgattcaaatgattacaaaactcctaacagaacagtttgactattggcaccaaagaattgttttgacaggaaatctcctaatacagcaaaacggtcggtacaggttcaaaacaagggtgttcatgctgtgtttttatcatgtgctccaaagtgcactgaagttcacgaccgatgtttgtccatggagttcccagagtgctttgtggcagagatttcgggtggagggagcctagagatgccttagaaatgataaagaaacaaaacaaaacaaaactcttctatggg

SEQ ID NO: 53744 - DNA, 1036 bp, Homo sapiens
gacatatgcctctgcctacccattgtgaattgagagatagtgttccagtgtggttaaaagcttatcgtaacttgtactttatggggctgtccctggagggtagggttatgtgtgtgtgttggtgtagagaggcagtgagacacacatcagtgaaagctttgtttacttgctatttttttaaagcacaggttctgggatcaggaggaaggagatggtgttggaggtgaggcttccttctatgagtcatgattccacttacttgactttagccttttggagtgtccctggggttgggtttgttggaggcttcatttgtgaccagtactgtgtgtgttttcactcagtacagttttgaatagatgctaccacatttactttacggcttagttgtatggaactcaagaagaagggataaacgcttgtcaccttggagagtatatatgagactcagcttagtgatttcagtggcaaaatccagctcagtgtttcaaaaactaaaacatgttttgaaagcttataaagttggtctccagtgccagaaattcccattttggactggcttcaaggcaatgaaagctcagacactgactcattgaactatttccttattaataacatagtaccaagcatttttgagggttgaaaaaataactgaactgttgtccaaaacctttgagcctctcaaatgcaaagctttttaaaattcttaattttgagacttttgtgatttcaaaggaaatctgatctatctatctctttatatgttgtttattcttaactcatccaagtgctatttggccaagattggcttatgtttaaaaaaaaaatctcttaagtcattttataagctgttcagggctttatttctttagaccaggaagttgtaaattgccagcattaagcagaaggtgtgttgttgagtgctagttttattgaaaaagaatgaggttttatgtatttttgagatttgctttattgacaatccaccccaaaatatcatttctcttagatatactgttagaaaagtctcgcctga

SEQ ID NO: 53745 - DNA, 1548 bp, Homo sapiens
tgacctcagctgattcgcccacttcggcctcccaaagtgctgagattacagatgtgagccaccatgcccagacgatagggctttttatcattctaaaaagaacccattcttggctgggcatggtggttggctcacgcctctaatcccagcactttgggaggctgaggtgggcggattgcatgaggtcaggagttcaacaccagcctggccaatgtggtgaaaccctgctctactaaaagaaaaaaaaaataaataacaacaacaacgaaaagaacccactctctagagggtagcagttttttactggggaactcaaatgggaccagagagaccccttgattcatacccaaccctcagatttctatcttggagagtcagcctaagcccccagtggtttcaaaatttcctttctgcacgtggagtaattaggttctgtttcagcaacgtgaaaggttaaatagattgtcaagagaatctccatttctttgtggaaatttgtccacaccttttaacaactgactgacaaataaatgttttaacagtaaatcttttaaaaatcatgttctaaagtgcccttggatctctttccttctgacttggaagctatttgtacacgtgccaacacacacaggattgagatcaattttttctctcttgtacaggatcagagtctaagcaatgactagcacaaagctatgagtcaggaagaaaaaaataaaacaaagctgcgtttccatccaggcactctgaaatataaccactgatacaaaaaaactgcctgttggttgcatgtcccaaggtaaaggacaagagaatagtttctgttgtaattttatgttaatgctccccacattcatttcacactgtccatattcagttccagaaaatcactttgtaggtggaactgtggtagtgcctgttattctgaaagcactgtggtgctaagtttccttggtctgcttgcacaatccagaaggaaaatttctcctccgtcctggaggatgtgtcatttgaacatcttttagtgctctcagaagagcatagatgctcatttattcatttttttttcctccctagaatttcattgctccagcccacattttttctttttttctgttttcagataaattttaagttgcccaaattcccttaatgtcatttacacagcaggcattatactcttcttaggcccaaattctaaaattccattttaggagattatttcattaagaaactgaccgaaatcaatttaaaaatgaggatgatatgtctcagttggaaacagtagaacttcagtagcaaacatttattgatttatagaaggatagaaacttccttttttccagaaacagccgggttggttttttccacttgagctctctgcaaaccgctaataaggtctttagctttgtgatcttagcataattcatggttgtcaagagaaatatttgctgacttaaaggatatgttgactcttatcaatgaaatgcaatgaagctgatatttgtactcagaatttttatttcaggcatactgggcctgttctac

SEQ ID NO: 53746 - DNA, 2062 bp, Homo sapiens
cccatgggaaggagagcttgtctggttagttagatgactttggatagatgaagagtacaaatgcatggcaggaaaaaggttttcaaggcatgatcggttttcctttgtgagctgaacttggactcttcagaagtcctgaggacgggccagcttggcaagttttctccttttcagcttccagtgtgcactccttctttccactctcacctctgaatgctgtgtggaggcgctgatctgcctaagacccaggctgtgagccaagctgtttttaatgaccgtccttaagcttcagcccaacagctgttttacaggtgcacatgattcagcaactagctcactgtgagtgtatgatttaaaaggtgcatgtaaatcatttgaaaaggtattttaaatgctccagtgggctcgctatttaaaggaatccttcagcaaatcttttttgaaagggaagactctccttctaatgccagtaatgatcaccgccccctaggtttggccttatgtatatttgatagatttaaagtggggtgagatatattttcaggccgctacgctctgcagagttccagattgaacttcaccagcttgtttatcaatgttgtcactgccttcctgccccacaggagcatcagctggtttggcaggaggaaaaggcagatcatctgtgcctctatctgactcaccctccctgccatacagagcagtttcaggcttgtctccacattccctctttctgtgaatgaagaatcacatggtcacataaaaaatattattggagcttcaaggatgaaaaattcaggaaatatacttaatgaagttgaatttcaaaacaggaaatatcttctaatttgggaagtgtgtgtgtgtgtgtgtgtgtgtgtgtttaagctaaataatgaaatcttataaaaacttcctgcctgaagaacttgcatgactgtataaacagctttttgatactgtgtatcacatgctgttcaaataacctgtcagtcccagtaggtcctaggtcaacatcccttcctgcattgttgcagtcatgatgacatagtgttcgctatttttgtcgaaatgttgacaaagtaccagaaaccagctcaattgctggtgttattcctactcctaatttatttatcaattcttccaaagggtctatttttttcactcctctatttatttttttctcatccttctccacaatccctccactttcttttctcttggcacacatgtggcttttctgatcttgaacttatcttcccttccagcctttcctttctatataccaggaccattcagtcagcccactggagttatcagggtgacaaggcttgaaatatctttcagcacgtattaaaataaacatgcactttcatagacctgccttcagcatccttcatttatgtttatttgtttcacacactatacagcgttttatgatttctctttatttttgattttctcactttgggattatgttttcttctgcaaagcaagacaccaaccatatgtactggcaatggaaggagagcaaaagatagctctccatgcaaaatgacttttaagtaaatcataatctttggatcgattatcctcatatctcatattggaggttttagttgcagaagctaaagtcagaatgttatgggaattaaaaaaaccacattctttctgagcatgtttgaacacgacactttccaaaccaaatgttcttctgaatttgttgtgctccatttaggtagtatgtcgcctttgagatatacagaatgaagttcatgactttgggtcaagtagaaagggatctggagaacaggggacgggatttggcatgttcagttaccttttgtattagtccttttatctaggacactcttgctgccacacataaaatttccctttgccaaagagaggttaggtaatattttgacaacagaagaaaatcagtgtcaaacaaacaagcacggtaccaagcatgcaagtgttgttagttaggcctgggttagacttctgggtaactcacttggtacttggagatctttgggaaactacttaactcctgtca

SEQ ID NO: 53747 - DNA, 726 bp, Homo sapiens
gaactcctgacctcaagtgatcaacctgcctcggcctcctaaagtgcttgtattaaagtcatgagccactgcacccagcaagaaacagcatcttttattattagtttgaggaacatctttggcttttgatggttggtcctgagagtggtatgaagacaaagaaatagagaagctctcagttactaaggaagtcctgacctttccgggctgactactgccaaggctgtggtgtggcttcctgaactggctgctggagaggttgcatcagagttctgtcgtcacgtacggtctgctcattgcgtgctggtacattctttctcaacctgaagtttcagttcctactttctctgagctgacaggcttatgatttttaagaaccaggcagcattctttttactgcaccacaatccctgaaatactcattatttaagaaaaaaaactcagtttcctgaagcagatattacctagtcctgcaaatagtatcaaggcatcattttgttccctcacagtgagagaaatcttcaaaagatctgaagtataggctgtgggaattcagtatatttgaaaaatacagcaatttctcaaaccccactccatggcattagctattatgtggccatggtgttggcaggctgccccaggcaggtcgcttaccaggcaacggttgatgtgtcaggagcagaagtcttatgatatctataagaggctattctgactcctgcagag

SEQ ID NO: 53748 - DNA, 832 bp, Homo sapiens
ctatataaaaggaccagcaggaaaataaaaatgttgatgcattagattcttagagaatgggcctacaggtgagttcagatttttattttcattattgttgttataaaattatttgtgcaagaattaaaaagtttaaaaacatatccctttaggttaaggggatttgatctactctggacctggtggcattacaagcatggagaatggacgctgctctacaaggcagaaatgaactgcaactacataaaagcaggtcaagtgctaaatggaaaatacatcagaggcagtgatacatcataattcattgtcctcctgccaagttctaatacatatgcagttgtgtataggtgctttttccaaattagtacaatataaccaggaaatatcataccatatatataattcatgcaaagcaacccaacagttcaaaggttggttccgctgttgcaataactagattagcctactccaaaacaaacacagattttaaaatagggctaacagtaatggaaatgtcacatatctcattgacctaagcaaaataattaagccaaaaataattcagcaactcttcgcttcccttcaaaattcccaaagtacttttcaattagatcctaactgagcaacttaatgcctattagtgttacaatcaacccagctaattattgctcaaggtttgccagccttccaatgccttaaatgttcctaaataatggctaaagaagatttcaacaaatgatacctaaaatccctttcaaaaataagttctgtgtttccctagtatcttaatatatcaaaacattgatgcacacatgtacaatttataggttct

SEQ ID NO: 53749 - DNA, 890 bp, Homo sapiens
atccaatctcttcctactctgcgttgtatccaaaaggcccagtgtggtacagaaaaacacataaccatgctctctggctccagcttatgatcatttcaactaagcccttagccatgtctggcaaccccatgacttgtcctgagtccatgactttcccattcctcagaaaaaccctttccacattactctgcctcctcaacattccatatctgtgccttcactcattttcaattgataataatttttattttactggaaaaatgggactacttagaagaaagctttagcattttcccaccaaaaaaaaattgaccaaccctctgccttgtctctgtttcaacagatgaactgtcctggctcctagctaaagccaactcctccctccattgtgcaataagtcctatccccccttgcctagccaaggactttgcccccagaattaacctctctctcctccatcatcaaattgtctctctctattgggtcactgccattagcatacacacatactgtgtcacctagatccctgtttttctgctactctatagcaaaaactcctcaaatagttatccagattcacagctttgacttctcttctcttacttgggcatgagcacactgcaagcagatgtttgtcccaccacaccatggaaaccacacttggcaaagccaccagtgaactccacattgctaaatccattgggcaattctgccatcaacttcttgggagcatttgagcagagttgaaccgacccttcttgaatgatttccttcacttgactgcatcccagtccatagagaagtgcatggcacacattaggtactcaatacatatttgctgaatgaataattggtccattgaaatttacacagttcttattttcataact

SEQ ID NO: 53750 - DNA, 542 bp, Homo sapiens
gtcacctctgtacttaaagctacaacactgtcctagagacaataatttgtacattgctgcactttaggttaacataagctatagatgcaagcacagagctagatgactcacatgtctgcttctgcaggctgaaatggtaatcctgaaatttcctactgcccaacacgcacaatgcaaacccgatgaaaagagcaaagatgtaaaactagaatatctaagcagtcagtggtgaagattctagtcgtgttctgtgtgtacacagcagctgcatatcttgtgaagtttaattttatcagtctgacttatattttatgtgccaagtttttagcatttcagcaggtgcaatgggacaaatcaatacagctaaattcttagcaactgagctaagaaaactctttcacaactcacacatcacagcgtgagagactgcagaagttaaggggaggggaaagaagaaaaaaacaatgaggtagaaagagatgatattttaaatgaaaactgttatgtatgcctaggggtgctgttagagaactctgttcctg

SEQ ID NO: 53751 - DNA, 922 bp, Homo sapiens
ccttgtacaatttattgtattttatttttgttcttggcttcttgcgtatctaccaaggagaaaagaggaaataattttttaagagtacttttattcatttagcaacaagtctttttttttttttttccattttagcagagccaaatgaagattcttcaagatatggtatcttttcacttggctgtttctgcctgggtgactcagaggataagtatttgggaaagacatgaatggtagtgccagggtccaccagcccagaagcattggacgcattttatcataggaccatgagttggacaaaattttataggtgagaaaaaaagaaatgggctggagaagggagactgtcatctctcttggcttgctctgtctcctcctctcacccatcaagtcaagggaaccagacgcccaaagccaagttcatcagtccctccatcggcactgaaaaaatccatcagtgttcataagctgctaagcttgtgtaaactgaatgccatctccaaatttccagtcttgccaacaagctgaaacaggagaaagaatatgcaaccagatgggggtcacagcattttaagtgctttcttcaagattaagagttggtagaaccaagaaaaggaaaagacatacagaatgtcttcagctcatgtatccacagatctctgtcttgttcaggtatatctaagctcatccactggaagaggagaacaatattttatcctgaaaaatctactgcttcgtaaacaaatcaatacatttcttgtgaaaatcttttataaaaatgtcctagactggtttccttagccttcattgcatgtgttactcatgatccatgaatcacacaaagttctcactgaccttcttttctacagagatattttttgcgggaaccagaaaacattttgtcgtttttgtgaaagactat

SEQ ID NO: 53752 - DNA, 1287 bp, Homo sapiens
gccgagatcacaccattgcactccaggctgggcaacagagtgagactctgtccccaaaaaaatacataaataaaatgagctcaatacaatggtgtgtcctttctgttttctatagcaataggctgacctccatttcagcatggcttaaatgagtcattttgtatattgccaggccctgggctctgcctgtactattctggttacatcattacccacaaaagatttacaaacaggtttccatggcaagctacaagaacaaatgaaagaagtccaagagaagtgtaaacagaaaagataagtctcggtcaatttctgatgaaactggaatgcaagctacccaaagcaacgacttcaatcaccacaactgaaatgattgtcattcccctgaaacacgacaggaaccgcccaataaatgaagacattggacttttttatggatgtaatagtcacagctccatgagaaagactctagtagcacaagggcagtcaccttctgtataccaatttttttccttgtttaatggtctagacaagtgttactgctgtaatttgtgaccctacgtgaaatgaacattcgtaataatctccttttgaatcttgatgttttctgtaaccctggtagctaagtgctgataacaacaattatctaaatgttgcaaaaggatgaaatcagtaacaatgggtctactgaaaagaggcaaaaatgtgagtggatatgaatttataacagcaatagggctaaagctgcagggccctttcatgtaggaggatagcaacacacacacacactcattcacatacacacacattctcactcacacgtgcacacatacgtacacacacttgtacacattcacacacactgtcacacagagagtgcagaaatgaaaggagacattttcacgcatccacacaaaagacaaagatcaaactatgactctttcctctttgcagccctacaactcttcctatcacacagcaggtcatcaataaatgctcattgaattgaaatatggtaccaaatgcagactcaggaaacccaatggtatttaataattattatgcaaataaaactgcatcttttcacacagaaataggggtgacttgttctacctcccttagtaatgagaagccattctggacatcttactgctagacctggaataatttcttgtttctcaattccctctcttaaaaattcctcccttcccaatcaatccatgaagataaactcagttcatttggtgtcctacaagattgttacaggagcgcataaatacactccta

SEQ ID NO: 53753 - DNA, 2675 bp, Homo sapiens
ccacacctgggtgacacagtgagtcagttcttcaaaacaggcaggtccactggctctcaagctctgaggctgtgccacacctggacagcgtgttgacaatacttacgcattacaatagggcttcttttcatagcctttgtagttgttcatgttgagtgccatcttgcagacctcacaatggaaacatcctttatgccaatactggaaaaaaaaaaaaaacatttaaaaatacagtacaatgccagttctcaccaggatgggcacagaaggaaggctttttagtgcatcacagtccctgtagctgaaaatattacaacaaaaagagtgtagggaactggggatgtgtttacctactttcagctaagtaaataaagcaggcagctctgaaaatggagtcttaaaggaaaacccaccgcaatacacagacgcaccatggacgaactgtcaaggttctgtcgaaacagcacttctttgagcagccagaaacgatttctgagctcggttaatgaagaaacggggcccagagagtggcttcgaaaccaaaaggaatccagttcaaagtgtctaaatgcagggtttgtaggatctcaataaatatgtgttcacccgaagtcaggcaagctgagggggctgcacgagagctatgtaagtacccctacacctgaccagcttccactaaaatgctggacctcggactctgcccgggatgactgtcaggatggcagcttgttctaaggaagcatttgtatcttcagacgcaaatttccccagaacgcccctggctggtttcaactgtcagtcactccggatcgctcctgggtgtctctctcccgggctgttcatctccgtccctgcccgggaagggcagggggcagggctggaggggcccggctacagaactacttcccctggaattccccacccggtggattagacacccgtgggtccggcttgccgcgctgagccggagctctccagcagggattattcttagcaatgcggcagcggccgccccatgacatattaattactatttgcctctccccctcgccgcggtcacaggaggcgctgcgggtgggcggtgaggtgggatcgcgggcggatctgtggggcggggggcgggggtattgtggaacacgagtggaggtggagggggcgcggctcgccgaagtgcccccctgggtgcccagcctggtccctccggggtccggggctgcgcaccgccgtgcgccctccgcagaggctctgccgatgtcgcaccgccccgcaccgcgacaaaagcccttcccggttccaacatcacaatcgccaagcgtggtctctgacactcccgctggcgtcttcgttcgcgcgccctccccccgtgccaaggcacacgcacacgcaccgacccactcattgctttccatcccaggtgccaaaacttctcgaagcaggtgcagcccctcgcccggcaggtccaggctggcccggcgccccctcgctcaccttatccaggcagttgactttctcggtgggatacacgacttttccgcaacgggcgcactgggggttcatgatcgcggttcccgggggcggcggcggcggcggctgctggctcccaggagccgctgtgacatcccccggcgagccccgcaccgcctcctggcaggcgggagggctgcgggcggcgggcgccgggtagggagtcggcgccgggccacgggtgagtgcacggggagggcgacggggcctggcgcctggggccggccgcgctctcgggctcgcaggcgctgggtctcggctccggctccggctccgcgccgctggctctgcgtcgctcgcactccaggtacgggtgactcacacagtcactcgcgcccgcccctcgcgctcactcgctcccccgcctcgccgccgccgccgcgcaggccaaacccaccggcgcgcccggaccgaagtggcagggaacgtgcacgtcgggcaccctgggagggagggcgcagcgggggagggggcgggcagagacccggaaagctccgcagaccgccgtgggtgcgactgtgcggcctggggagtgagcctcgcgccaccgccgctgcaggccggggagcccaggtgggcggcggctggggagggagggatccaggcgggggaggtgacaaacaccggtggggagagtgctcaaacccgcgtactcccttccctccctcttctcttccccagccgggggcaccctcatcccaggctgactgacgtccctggcacccaaatgtcgcggggagtgcggggccagggtgcgccctccctcctcctccagccagtgaaacccgggacagcggcacccagccccagggcggaggccgtctctgctgcgcgcagcgacgcacccaggcccaagggccgggagatccgcggggaacccggagacctgcgtcccagaggggccgagggttgcaccgcgcccgctcccacgggcctcttccgagaggacgcttctccctcgtgtccgcgggaagtcctcggatcctggatgagaaagagccttctctcaccggctcccagaccccgcgctttttaatacctgtccttgcagagcgactggtcattttaggcccgagtcgagcctctcttgattaataaatgaatatggctcgttttgttttaagtgtgcgtggatgtatacgttgtattgt

SEQ ID NO: 53754 - DNA, 742 bp, Homo sapiens
aggtatgtcttcatcagtggtgtgaaaactaatacacaggccaagcttttaatgagtgaaaaagggaagcctggcccaaatgaaaactaagctagtagtccacgtgactattacttttgttttcctatttctctgatcattttccagtgaaatatgggtgcaagcttgtccaaaggtgttttcttgtctcagataatgcaacaaaaatgtcctgtggcaatcaacaacagaagtaacccatgctaacccattgctggttgctcagtaaaggggctgagatttcactgaaagatctggaaagtggttttcccttcaggataatgactcatcaaacaagcatggagcctgctcttctaccaatattgtacaaaagtgcacggtacacaatgtgctcatcagcagtagacatcagaacaaccaagtgtccttcagcatgagtaatattaattaagtgaaatgaatgaacctggcttcatggcgatggatggagaaaagagccttcattatatgaaaaggaaacctgatcccctgctgctgctgctgctaggggaacttcatccaataaaaataggtatcaaagctcaaataaaacaaaacagagatgtcatgttggaacagagtgcctcttaaaaattaaagtgaaaaggtaaaacataatgttaaatagaattttatgacataagaagatgtttctgatactttgttaagcgaaaaaggttataaaaacatttgttcgtgatga

SEQ ID NO: 53755 - DNA, 1616 bp, Homo sapiens
attataagtgtgagccactgcccccagccttaagtgtattttaaaatatttagattctacaaagttacaataaatactgtcaagtctagcaactctttttttaatagaaaaaaagttattgaagtaagcattgataccaaaagcaagccacgtaactgtttaacaacaaatcattaaatcatagagactttgactatctaactgttcatttggaactaattactaatttttatgacctcaagttcaataactgatcacctttaaagaattattttgtaatctttgttattatgagaaatacagtgtactcacttaaatgttgtttacttaagggaagggcacctttttctaagtctcacaaagccactatatgggccagcagctgtcctgggagtggagccaagaatagagaaagggaagtcctatacccgtactttgaggccacacagagcctctccccagatctgtcctgcacaatccaattacatcagccaacaaattcctttcagttttgcataagctactttggttcaagttttcaatcatttgctacccctcgccccgccgccctgacccccaccccctgccgcaaaaaaatactaatacacagagctatgtagtcagatgtaatctgacatgactcacttcagggaaatcagaaaggaagctaatgatgtagatcaagggaaaaatgggtactgtttgtataaggcacctgtagtggggacagattcaagaggtgatcaaagccagactggatagagagaacttgaacacgaatgggacacaggagagaagtgcacgggagtcattgaaacgactcccacttctaagtacattttagaatttcacaaattattaactaataaaattagataatttcctagccctgtcaaccctcctttctcctatctagatgactgtcaaatcaatccaagcagtcaccctagaaatgtcagtagatacagtcatccttatgaaaggaagatcttcaaatttttggagagacatcactcaacaagactaaaccacaaggaagaaacagcaaatgataataaaggaggaaatacacctagctcaacttgagtgacagccataaaattaaccctacttagggtgttttctaaaaacataaatcttcaagttgtcagggtgatgttcagcctaaacatcacaacatatccagatgtacagtatattctagtaattaaattgactatctgtcaccaggaaggacttttattcccactgaatatattccatccatgaacctgccagaccggctcaaaacatgagacaggtgctttcaatgactggctaaatactggatgtcagccatttagttgcataactgtcattccaagagttgaaaaacaaactcatcttcactgtttttataccatgtaaccacatacctccctccctctctctccttagagtttaaagtatacatgcaagtaatttaaaatatacatgtgaactagtcaagtttaaaataatcacatgtatattttatactctagggatagtaaattagctctcagtaaattcaaagttaccaaaatatactacaatccaacagaaatattggtgctatttgatattaattacaagca

SEQ ID NO: 53756 - DNA, 747 bp, Homo sapiens
ttcttttaaaaaggactttttccctctatttcacttaaaaggaaatcaaggttttacattttctagtaaaagcataagaaaaacgatgaaggtatctatcttgtgaaaggaaagctcatcagcatcaaatgtaaaaatctgtataaggatagattgtttcattttgtttctttagaacataagagaatccgaatgacttacattcttggctctttttccacccacgcagggaaaccaggaggaattccagaatcaaagagaaccgcattcctctctaccacaaagtactcacacttggcaaatggcaaagatttgggtcatcattttttaaacgacagccaagcattaaagagcccaggcagagagcaagtaaaagagtctccgtggttcctcccagcgctagtctgtggcctcaacaacatagcacgttgcaggaaaaattccaaatttctgggtcccaaggggaggcattactcagcagtctcagcggtgacggcgtcagcaggacaagagccatttgctccgggaggactttgatgtttctttaaatggtttctgcatctagtccaatagaatggatacggaattatctttattacaaccacaaggatgtgcaaatttatttacagtataaatggttctttccacaagtcctagctgtcaacaactctttattttcctggagtgacttagaagccaagaatgttttgtttcttaagcttcctacctagagaggtaaaataacaa

SEQ ID NO: 53757 - DNA, 1514 bp, Homo sapiens
cgacctcccaagtagctgggactacaggtgcttgccacagcacctggctaatgattacatttttggtagagatggggtctcagactcctggcttcaagcattcctcctgcctctgttgggagcaatttatccattctttgtaaagggcctccatgtcatttacaataacctatcatcaaggacccaaagctggtgcttatatgagtctcctgtcgcctcttatcagagcccgattaagggacaggctagacagaaagatgagagaaggacaaatgtcaggctctcacttcagcctctctcctcattcaggaacagatggagcccatgccagtgtgacccagggcagaggtcaggcagctgttctgtttcgtgtgtccctggtctcctgtgccccctagggctggtggagcctcaatgtcctccaactcagacatcttctctgctgtttgttctgcagccagctgcataccgcctccatgcgggtgcccctccctagcggctgcatttgcccgggggaccagcaagctgtcacatgccaaggcaaagaggaggaagaaacaatcacttattactagcaaaacattacttctgtcttcacaggaccatgacaccttctgtctaggatcttcaaacctcccccactcatgccccaagtccaatattgtggggtgaccctgccccaccccctgtgcaccacactcagtgcagcttgatgttcagctttgtgtagccctggcatcctatgctcccaggctggctggagacttgatattctccaactcagacatactaaggccacgtatatgtggagagatttcagtgcattatctactgagaacactgatgacttgaggcaacgccagagcccttctccaaatgaatacttcacattcccacccggtgactcaggctgactcaccaggaggcccttcccctttgtctttttttttttttttttttttttttacttttattttaggttcaagggtacaagtgcaggtttgcgacataggtaaaatccttgtcatgggggtttgttatacagattatttcatcgcccatgtgttgagcctagtacccgttagttatttttcctgatcctctccctcctcccagcccccaccctccggtaggccccagtgtctgttgttcccctctatgtgtccatgtgttcccgtcatttagctcccacttacatatgaaaacatggtttttgggtttctgtttctgtgttagttcgctaaggataatggctttcagctccatccatgttcctgcaaaggacatggtcacactcttttttatggctgcataatattccatgatgtatatggactgcattttctttattcagtctaccattgatgatgccctcctcatttgactgggatccagcaggagactaaaaaggggcttcctgtttgatttacacccttttgcattcttttcacctccaatcaccaaggagtgaacagcaaaaaatgtctgagcagctattaagtctccaaccagca

SEQ ID NO: 53758 - DNA, 1397 bp, Homo sapiens
gtggaaatcaagccaggaagaaggtcagcatgttacctgacacagaacaagccccagggcagacacagaaatgaagcaacccaaagcacaagacattaagagggaataaaaaaaaaaaaaagcacagcacagtatgtgaggcaaaggacctcaaaatcatatataaaagacacaaacatgtatgagtttattaatttccgaagctgaaatctttttctcaactgagtcaaatgaattaaaaactaaattaccatattcatcaagccatctacataaaacaatttccctacatttaaaaccgactgcaacccaaattctgctagaggttgtcagtctgaagctcacacaattatcttcatatatcgggggtgaggggagtcgtaataatctagggcacaaacctgaattgcccaagggaactgactacataatcaaattatccagttcaaagggcaagttgtataattcaagaccgtaaagtaaaagtcctcctgtgttgtttaatagtaagtttccattgctgactattttcgtgtgaaattaccttgcttctccattttcttttgcatttttagacacaatcagtggaaattttttccactggaaagtagcaaagtgacaagcattcttgctaaagaaatctagtatcacacattctgacaaatctctttggaatcctcacttcattcaaagattcaagctcgcctggcagaccggtgggacaggccagcaggaatcctatttgccttagggcctgaatagcttcctgggaaattctgccacccaagggaagctctcaaaggtcagacgtcagcttggcccagtaacaatgactccctggtcccagaggaagggtgattctgagtgcagccggatctgtgaattagatttgttcactagcccagcccccatggactcatgtcagaatcttagagaggggtctaaaaaactacaacagcagtttttactaaaattcactgatcaactttgacatcactggaagtagaaagccagacattatgtgtctcttgacgaggtgcatgggaaagtccgctgcatcaccaaaaaagtaataacaataataactgaatcagaatctcatcaagcctccaggcctcattatcaccagtttacaggaatagaaggagcctaggagcattgttgaacaacaccatgataacgcaatcagccaaatccaggatgtggaaaattccacaggacaaatgatcagcttcctttaccaaatacagagttctaaaatgggatagtaagaattattgtaggtagcaagagactcaggagacataaccaactacatgtgtgtactgtctttagatccagattcaaacaaaccatctgcgcaaagatatttgtgagacaattggagaaaatggaac

SEQ ID NO: 53759 - DNA, 762 bp, Homo sapiens
ttcatctaaaaaaaaaaaaaaaaaacccaataacttatggaaaataaaatttaaaaaaatagaaaaataaaaaaataaagattgtactggatgtaactaggacaagtgatctctttcatcctacctcaccaaagaaggccccttagctgcataaacttgtttaatgaatgaatcaccaagatgattaatcaagggataggaatgacagtggttccaaatgtgcctctattttttgatagcatgagaatatccctggctaagtaaaagggtagttgtaactactgttgtaaatcacactgacttttagcaggttgtttaaagcaggatggaaagttcagccagtccaagcaccaggctagtcctctattccacacctcataaaatgaacctaaggtacctttgtaagaaagcagcatagaccatacaatgccagagtccctggggaagagagaaaatgtgaaaagcaaactataggctttaaaaaatgcaaatccagcttatgtttggattcaactattttaaaatatgtcctcttagcccactagccactccacttggaaggagacgtaatttatgtctaaggagtggcagaattcattcagaatcatcatcttctaattcagcctcgtggctctaaaaattgcctctgggtacttgcctaaaataacttttagagtctgtactccaataaagagtcctttgctgaaacttggatcaaatgctcatttattacccttacctctttatcaattaaaaaacatg

SEQ ID NO: 53760 - DNA, 3440 bp, Homo sapiens
tatagcctcggcgtgacccgtggagaggcgggaccccagtggagagagaagcacggagaagcctgggaaggagcttggtaagaggggcacagtccaggctgccccatgcgcgctggggttgtcgccgcgcctcctgcgcgccccagtgcccccagaatctccaagaaagcaatcgtgagcgcggatcagtttctgtctttcccagaaagcgggctttttattgaggggaaacttagctgggaaaagtcagctcgtacgtttgttttggtttttcgtctatttgcttcccaatttaaaagtggccgcctaggcgacaggcctgcggttttcacagtgtaaaacggatcagagggaaagctccagcccctctcgactttcgcttgcggtttgcaacccctggggtgggtctgaccccgcgcggcacttgcccaggcgagcttccctcgtcgcggcccgacccgcgcgcggactcggcttccccaggtcaggacccactaggtgggccgctcggccccaagcctggcagggcggagcctaggccgcgcgccccggggttggaggttcccacggagccgggaaactgcgcgccccaggtccgcaggccgcctcccttccctcgcgccctcgcacccgccctctgctctgccgctcccggtcctgggtgtgcgggagtcccgggggtccctctcctggacgcagaggaggaatttggagcaaaaggaagggaatttactgcggatggcaccggaacctgaattgacttgtgcgtttcctgctctgggcacgtaggtttcccctaggaatctggagttcgctgaggacacttaattccaagagatgatgggttcacataaacataccatttagttaagaaaaatatttaaaataaagaaaaaagaaaaactgaacttcgatcttcttctccacgttccctggtgtcaccaaataaacaaagcattcggacgagagtgggctgctgggggctcgggaggtgcgcgagacaaggttaccctgcgggtccgccactgcccccggcctccagcactgcactgcccacgagtttgcggggtgtgagcgccgaaggagaaccccggaccgcccagtctcagcctaaaaacttggatccaagagtcctacggttgtggatgtgccagtcctccgcgaccctttcctgctggccttctgctttttataaacgaaaataaaagtttgatttaggcttaaagaaatgtcattctggtcgttcctccctgaagcgggacttactcaacctcatatactcgcccggaattttcaatctcgcctgtcgaaatcgctagctgcgcatccgcggaagaagtcctggatgagaggtagggtgaagggatcaagcagatagcagcaggcatcagcacactccggccgttccggacggtcaggcccgccgctacagggagaagtgcggcggatggagccagggctgcgggttgcgcgcgggctgggaacccggtggtgccaccttaagagtcgggtccgcgcagcggctgcggaggcgcccggcacctgcagggggcgctgctgccccgtggtttctcccgcgccgccgcgtgcagcgggcctggcagctccggggccccggtccccggagggggtggggacgctgggggaggaagggagcgaagtgcagccgttaggtaacgaacccgaaccctcccggattcagaagcggcctcagtgaggcgtttgctggagggagctttccatcattcggccgcgagaggaaacgtggggaggcgccctcccctgcccccaccgcctgccttcctgcctccctccacctccgctccccgaccccgaccgtgcttcccagaccctttgttctcgaggttgggaacggctgggtgggggttccccggggaagaggtcccccgcgccgctcggaggggaagggactgtcgcctgccccgcaccccagccctccccagtgccgtccccctttcccccggccccttccatcgcgtccacgcgcttccgttctcactcggactcccccaactcccgagctccggctccccagcctgcacggtctgcaagcccgcctcccttcccacttccccgccacctctgaggtccccgggaagaggggaggagagggagacgtgtgggggaggagaaaccacagagccttctcggcgcggagcattcccagggacccttccaggccccgacccctgggacccgctgcagaggcagggctttcccggcgccgccgcaggtcgctagggccgcccccgccgcgtcgccctggggcccacgggtgcacggcccgggcagcaaggcaaggtgcggcctctcagcgccaggacccgagacccccagctggagagaaggggacaccgtggtccgcgccctggggaggctaattgcacacgaacgcccccctcttccccgccccccaccgtaccctctgcagcgccacccgcgtcgcctctccgccgtgcgccaccctgagggctcccgcgattgcatcttcttgagcacagttaccaatgcgttcagcttcgtttcttactcggatggagacatcgcggagggaagcgaggggacagggatgcggtagtaggggaaaggtggggcgggaaaccgagcagagaggtgggagacttggctgaggcaatggcaccaggcagggccgcccggagtcccgagtccaggtccgcgaggcaggccccggtgcagccgcgccccggccgaaccctacatgtcctctgtactgtggacacgagtccgcggagcgccagtcacacccccgcacccctgcaagctcccgccgtagagggggctcggcaccatcctggtcacaaagtacgtgcccccaccccccacccccaggtgaagaggacgcagcccggcgccgtcagctccaggctgcctggagccccctccggcctctcggcgcgaccctggtcctcaatggctcgtcgcgagctgcgctagctgctctctcggcagcgggttccccaggacacacccagtccccaccccccgagagctggcggccagctcaggatgccaggcggccaggcgggcgccctgccaaattccgcgttcctctccaggagacggggagttgcgtcccaggctcgggaaagcccgcagttcgggcttgggactcgcttacaaagccccccaaggcgccagggacgcctctgcaggttgaattcctgctccgtatcacttcaattttaattaatcttttaaaacaccgctgtcacgtcgcttgcagaaaattaatcaaacttgaatccttgttgcatagcaagaatttcgatccgagtcttttaaaaaggacttgactttgcaaagtcacgtcttttacagttccctcattccccctttagcaagggaaatactgcaaaagtcaagacatgtttgtttggttctttctatcttcaaaatga

SEQ ID NO: 53761 - DNA, 666 bp, Homo sapiens
catgatgtataacactgggaacaaaattaaaagcatctctttacatttgcatctggcaatgtgctccatgttagaaccatagccatgtgtttatggagtgcagctctcctggtcttgagatacatgctgttttttatagcctaaccagaatagctcagcacatgcagggcaagaggctgcaaagccctggcccctcaccccagcaaggaagctcaggatcactgcaggctcccacactgcttctctcagcactggtgtaagtccagatcttaccctctttccacttctggagcaaatattatgaaatatgggtatttcccaacatagccttcacctgggtgcaagggttaggtagggggaagggaagaaggggaaaagctgagagactgggaggagagagaaaacagaagatacagggaaaaggggagaaaggtaaataaacctgttcaaggcaattcccaccgtatcatgcaggtttgactttgaatggataggataactagacatctgaaagcttaaccagctactggtctgcatatttggacccaacgtagaggaagaaaacgaatctcagacatttgcaccactgacagtcagggtattcatttgaagggaggcggggggaggaaagaaagagatgagagaatgaatgtaaaatgtgtcttt

SEQ ID NO: 53762 - DNA, 3511 bp, Homo sapiens
aaagcctttcacactcaacaatggggattttctcaacaattaacaagaaacaacataataaagccatttacaaagaccttgctatttactataaattaggcactctttaagagaccagtgcgtaatttcacacactttacaactggggctgcattttaaacacccgggaaaacaagcttgttgcactttcctgtgacctagctgcggtgcacctctgtttcccctcttccccggtagcagctttgtttgcattgctgcactccaacctccccaaccgagggtggctttccaggtcactctctcacgtttcccgtttccaggccatcattccccttgcagatgcacggagaggttcccagggatggggaccacgcgccaaacccagccagccgggcctcatcccattcctcccactgtgggagttgcgcccggccctgcctgcgccccccgcgccctccccaacacccagggcctctggtcttgaaccacttcccagaaggcgttcgcggccacactggcccaggggaaagccccaaccctttgccactggcgatccacacgcgccttttggaggccttggccagccctccgcccaatgcgaagagctgggccccatttgcctggggagcggagatgaggcctgggcgagaaggtgagaaacggcgaggctgcgtgtgcgtgtgccagggtgggcgatgacttcgggacacacaaaaggagcgccaagttgaggggaggcgttccaggccccgagggccggcccccgcgcgccctgcgccccccgctcgcccctggcctggccccaaggccgactggccgagaggctgctcgggaggtgccgcggcgctggccctgccgctcgccccgggggtcgacatcgtcacccattcagaggacagcaagatctgggcgggaaaacaaaagtcacaaagaaatttgtttgccaccatgcaaaatggcggcacttaaacatctttcttgtggtggtggcccggcccagagagcccggagctgccctaggtttagcgcggtgcgccctagagctcggcggcctggggcaagcgagggggaaagggaccctgaaacccctgcggcccccaagccggcccttagcccgcagcccatcgcgcgatcagccggcccctgccttccttcccagcccgccaagcccctagcccgcgccagcagcccccggccactgaccgctgtttacaaacacagcctgggggtggggtgggccggccggagcgcgggctggcggggtgggggcggccgcgcgccccggaggacgccaccagcagagaggaacgaggagttggtgcgagagagcgggctcggcagctggaaaggactgaacgccttgtttttgaaactgtcaattccctcaacccctattgtgagggcttcatgcaaaacatctcaggccttttaaagtaggagcttgtgaggccgccacagtttgaaaagaagcgagagaggagcgggggcccagggcatgggcgaagaatgatagctgggcccccctaagccctccccacgtactctgtttttttttttttttttttttttttttttttgcaaaggagggcatgccaaacaggtaaaatgcagccctcccccacctcctagatctgccctatgtccccatcccccaggctagtttgcaaaatgccctttggcctagggagcaaaccaaaaccaaagctagcatcaaaaatagtttttccttacagggaaggggagaatcctggtatgattggggtgaccgggtggactcgctaaggtggatgccctgttcctccttgccaatttcctgaggttagttgatgggaagcatttttttccccctttcctagtttggctctgggaactcctttttacaaccttcccagcaggaagttatttttaaggtgaagcaaaactcaccacattttctttattttttagatgctaatgcttattaaaaaaaaaaaaaaaaaaacaactttaccatgaaggatttttgtttttgctctttgaaagaaaaaaaatgcttttgaggaattagtttctacatctcttcctgcatgcaaacaaaactgtcattttcatatcagcagaaactcccaattcttgttgattagaactttgaggaatttctagaccattgaaagtcgcccagacacagaaaagataaaaatccaacaccagccccatgtagtttgtgttattgttgtttagtggtggctccttgttgattttcaaataaacaaccattattgagattactccactgtaatcaagtaagccagtagaaaagaacacccactttaaaaagtaaatagtggaaaaagagcaagctgcattttctataaaggcggataacctgactgtggaagacagagtacacacacctcttaaaaaaatatttaaattttcatttcacagtcttatcaggaaattacttttataggagaccaaaaataagtttgttaacccaaaaagttagaaaaagagccttttcctgctttttttcctcatgtctgtaaatgttggactttagacacaggaatcagtcaccctggagtcatatagtgcttgtttttttgtttgtttttaattctatgccctgaaaacatctaaatgtaaaaatgtaatctatcaatggaggtaacttgtttttttctcaataaggcttaactttctgaacaaatgggacatttatagcagcttagaaaagtctagatattgtcattaatcataaaacaaccaaaataatataaacagtactgagaataattcccatatcagaatggggaaacaactaaggggctagcaggaattgaaagaataccttgtatttgcaagttactgcatactatttggtacactttccttacagaagccctaactcaggttttgctgtggttggctggcttatggtagtactgtggggtgaaatttgtgttgactatttaatttctttccttttgatggtatcactctggaaagcctcggcctccatgctgttcattctccagctcctataaactgaaactattgattctctgagggttagagactaagtgtcaaagctggaggccaatattttatgtcagaaattccacagggtatatttgttttaaattgtgcttattccatcttacagtccttccacatccaagatctgtagacttcaaatttattctcactttataatttaggaacaatgagtccttagccaacaagagaagtactagtctgcgtgtagtagtcaccgtactttgaactttcttaacttagaagtaattaaagagtagaaattacactcttccaatgtgtgtgtcacactttttacagattgatttttcaggacaacttactgcacctaaattctgtattgctttccaaagaggaaagaactgagattatgaagccaattgtttagctttctggggctttaactataacatggactggtctttggaattatatacaaacaagaattcaaggataccatccccaaattttc

SEQ ID NO: 53763 - DNA, 1388 bp, Homo sapiens
tgaatcggatgctctgcactgacacttggctggagccggagctggagtccgactcggtggacgagtcctcctcctccgagctgacttcactggaatccgaggccccgctgcccccctcctcctcctcttcctcctcctcctcctctccctcctcctcctcttcctctgaggacacagaattgctggagctggacaaactggagccaaaatccgagtcgttggccgcgtggtccgagtaggagctggactcggagtcgctgctgcagctctcgggaaagctgcccagatggggctgcggccggtggtggtgaggggggtggtgactctgctgcggcggctgggcccggtggtggtggtggtggtggtgatggtggtggtggtggtggtggtgcggaggcgggcagaagccgttgaccagatgaaacctctccaggcaagtggcccccgcggcggccgccgccgccgctgccgccgccgccgccgccgccgccgccttggctttgtaggacctgggcaacagcagcaggcgccgcgcgccggcgtgaggcgcgagcaggcagtccttggcgccgccgcgcttgcgcttgcagcggtagctcaggctccccgggcctccggcgcccgccgctgccttgggctggggcccggccgccgatacctggtaataggcggcggcggcggcggcggcggcggcggcagcagcggcggcggcggcggcggcggcggctgccgggtgtttgctgcacagcaggctccgaaaataagcagggtccgaggggaaggcgacgtagtttccctggagcggggcagtttcatagtttagagggggtttgcacggcgagcgcacgatctccgggtagtgcgagccggggtatttgctaaaaatctgaggtagatgggcggcggggcgcgcggcggcggcgcccgggcgctgggactgcgcgctgattggcaggggccgcgcggctccgctcaggccccgccaaagttggtgcttgtccttccaaaatcccgggcgggggctggcggcagcggcgcgctctggcggcggcgcctttgtggccagggcccggccgacccgcctgcgcttggtcttgaggacgcgctcggttttgcaggaggtgtagagcgcttccacgtcttcccgggagatgagcgtgcatttggcggcgtggaaggcgatgctgttaattgccttgagtttccgcaactcctccagatcgcagtggtgcttcttcactttcagatgatccatgcgcttgtgcacggtcgtcctcgggatgtttttcagcagatctgtgaagacttgggagagggcaaacatttgcttccctttaatgatgaggtagccgagcctcacgccatccacctcttcaaaacctgacttc

SEQ ID NO: 53764 - DNA, 743 bp, Homo sapiens
agaaaaaaaaaaaaaccgcaccgtatattcgcctttaaagaaatactgcctatttttttcgtttatttgcattttaccgatacagctattatcatttcaaagaaaagcatttaaaaaacattatcaagccgaaagagagataccccacccccttttccttttggaaaatggagcttaagggaaaatgtgcagaatagcctggtatttcccttacaggagtggggaaggagaccggctgggagctccaaagttaaacccgccccgtgaaccaccccagtgcggacttacgtttggaatttctctcgattttccttttttttttttttttttcctgaaatgcctttttacaaccagaaacaaagttatttgaccaaggaagcagttcaaggctccagctccgaaacactgtaacaattcaactggatttcggttctctgctggggggtggggtggggaggaggtagtttcacgtcagacccataacaaagcatagataagccagaaatgtgtacacttttccacaattaaccgtactggattggaggcgggatcgtccaagagtccccagcaaagcctttgccagggtcctgttcaccacaggtcagaattccagggagcagattgcttccttctgcagcaaagaaaagaaactgtcaaacgcccaaggtgcttccagaggttttacgtaataacaatgaaaagaaagtgctgatgtacgatgcagactgtttcagtggtttgtg

SEQ ID NO: 53765 - DNA, 960 bp, Homo sapiens
aggaattttgaaaagaattgggaatttcaagaagtgcatccggaaattaaggaagtctatttaagagagtctgtaactcaggaggttgggatttgaaaagtcagcccctgaactactgttgcactcagcacagatgtaatcgccgctcttcaacttaatcaatgtatgtacaaaccgcgatgtctagttcttgcctttgaaatctaaggctagcatttccatccaagaaatcagagctacagcaaattacatttttgtcccttgaatgaaagaaggatcattgaatggatctcgtgatatttcaggctttaaacgtaaccgagaggcagcaatgaacaatgcctcgtcacagctaataccatccagcgagttggctttcttttgcatctggatctattacaccgtgtttttctctttcactttcacaggagacaaaatgcacaaggtttaggcagaaagcgaagtttccaggaaaagcagatgctggtgtttgtttttaaaagtagaatgaccagagtctttctattgccagcaacaataatgtcgttttaaaattccttctgatgcacttatatagtactgccagccctcgccctcccacccccacccccgccattcccctcccccagctttaagaattagaccaaagagtcagccaagaaatagtaaactcagaaaaagcttttgagaagacagtacaaaaggttggctagagcatccttttttttttttctccaggtagttttagttgttctccattcctgtttatatttcctctctctctctctctctcctagtcctcctacacatagcaacatgatttagtagctatttcaaaactaccttcttttcctctctcttcctctctttccacctttaaaatattggcaatataggtggttttgaaaactagtagcatattaagttatttttttttaactaagggcataatctgttggg

SEQ ID NO: 53766 - DNA, 3487 bp, Homo sapiens
ttactctaccttaagtagtggttgctggcttgttgaactaagaatgagaaaaaagttgagaggcagatatagactaaataataataaaaaaggcttgctgtggcggatctccaccgcgccagtgtcagcaacttgcagcagaagttgctcaatgcacggaggcaaagcccaagaaataccctttgcacaccagatttcgaactcagtcatttaaatagactttcttgctgtttgaaggggtttctgcgcacaaaatgtgtaggtagtggctatgggagagatgtactatttaggtcgaaaaatgatctcatggctatctggaaaagaatttttaaaaaggaaaggggattcaagtatcacgttactgtttgctaatagaagaaatggcagcactggctgggaaaggagagggattcgtattgaaatgcatttgctttggggtacgctggttatccgcaagtctggctttgtgggtctgcgtggctgaataagtgaccaagtgccttcggcattatataaacggatcgatgtgtgcgggagtccccaaagccgtcgagcacgtgaaacgcgactttttactgccctccaagcggcgaccaagccccgctccaccccaccccgcctcaaaatccgtatattacctgccctgttacagtgacacatgtttatgtttatagtcctggtttgtagtagtgtcaagaaccgcagcaagaggaaggggaggagagaggagagggaggagtaaattcaaccacccccacttgttgttaaagcaaatttactgcgttattgcaagctcaggacggggggctgggatgagagttgagaggaagggttgagttgggaagtgtgttggcggtggaaggtgggggtggggttaagagctccgcaatggagctcctctccccagcagcccaggaaaagcagctcggtcaataggggagcatgctggcgcggtcgaaaacaaaaaggttcctcctgctcgctgcgttcacgtggggggctctgcacgcggggctccagggccgtgacccctgaccccggctcctctccgcgctctccggtgccgcgcggccactttttacccaggatccctcgcgcgggccgcgctcgtgccgagctggagtccttcctaatcctccattcccggctctcgctccccgcccccgccgccagccccgggggaggattctccggcggggaacccccgccccacccccaccccgactgccccggcggagtcggccgcagcgagtccgcgcggggcggggagggccgggccgggcctcccctaccgcgccgggcctgcgagggaggggagggacggggagccgaggggagggggcgccggcctcccggctcagctgccccactgaggcctggacctgttgactgcgattggcccgcctcatcccgcgccctctctctgctcgcagcggccccagcccttccgcggcgtcgcggggaggaaatggggatggctgtcctcctctccgcctccttctaactttcctttttttatttgggtgtgttggggggggtgctgagaaagcccaggcaactccaccgccgccccatcctgcctccgaaagtctcgtcacgcccgacccgccgccgccctcccagcccccatgacttaaaaccgcctcccctcctcgcagcggcgccccggcccggagcccgagagccctcgacgcccccgccgcgcctcccccgcctggcctggcccagcggcgtccccagcgaattgtgtcgcttttctgccctggaagctccctcggccacgttccactttttttcccagtcccaggaggcgtaagataaaacctctgatttgctgcgtgctgccgggcacattctctgccctctcgtccgaaggacgagtttaaaatggagagtttaaaataatagcatttacaggaggaaataaagagcgaggagatggttctttggccggttttaagacatacatgctttttttttcttttaatacaagatgtcttaagggttaaaagcgttctagggtttgctgtatttccttctagatttggggtttcctgaggaaatcttttccggagggaaatagcaaatcaacattaagatggaagcgagacttctcagccacttttggaaatgaagggggaaattgtaaaaatacattcagaaaagggcgcgaaggcggcggctgaggggaagaagctggagtcttgggaggaagcgcagtgggttggaatcgggggaaggagggcccgctaggtccgggcggggaagaaggcgtgcgggcggcggggcgtgcgccgggccgggcagctggaggaaggcgcggcgggactggcgagcgcgaagaggcaggcggggaaggcctcggggggcgggggccgggcgcggggccggcgcgccggaggaagcgggacctggctcctcgcgcccgccgggccgcccccattgttctgccctagcaccgctgttagccgagcacgtcctgaccgagggaggggccccgcgggccaacccgacccccgtcggcgcctccccgggctcctgagctccggccgggtcgggtcgggccggcgcggcaagttttgatggtcagactcagccagcgaggggttcccagctgaagacctcggaggaaggagcctttacagcgtgctgcgaaattgaaggaagccgggcgagcctgcaacgcacacgttatgagaaaaagggaaagcaacatagatatgtttataaagtgataaatagataagagacacccgtgggcagttattattctggatccggaaagttacagtagattatataatatttgaaatatcttgaaaagtatggattcaaaaatccatttaaaaaaaggttcaaaggaattcggaaaagcacgtttcgctatccttattactgattactcagctcttctttgtacacagaaagtctagttttaaaaggaaaggctgagctagccctttcaaaaacgggcttcctttaacgtgaagtgcgttttcaaaatagggaatttcaaaagggaaaaacgtttaatttgcttttaagccacgttttggaaacaaataattgcaatccacttaataaactctgtctgttttcctttgtgaggcatatggaagaaatatttctggccaacgtcacagttgtttttttttaaatgaagatttccaacaagtgcttgcgagtcttgtcgacaagaccaaagtcatcgtgcgtgaaaggccaagaaaaaataatttcaatcctgtggtccaaaccttactagggcaagagagtaatttcgacttaggtttatgatagactttgcggaaattccttctaaaatactcattagtagtctgtgtgttatgaagcactgtttcccaaggtagattttaaaaaaccaattagaattgatctttaatggaatattatatttacacgtcatcatgaaaacatcatttgacagagttttgaattacaagaaaggagttaacagatgatg

SEQ ID NO: 53767 - DNA, 2914 bp, Homo sapiens
acttgggttctctatgctttagcactgtgaaagtgcatcttccagatcagcacatttataatgcgaattgctgataaagaaccattttgtacctgcaaggtattaatcaaaagtcatgaattcgccttttaactgggcttgtcatttaaacaatctatgcataattctgatttcatgcgaaacttttctaattagacattttttgcttaaacatcaatattgggctttacggatgcataaggaataggcagacagtggaagattttagtttaaaagtgctcagcatccagctaattaatctatgcagataggcctaatccattttccatttgtttgtgaggtgggagctctcatctttctgccacttttaaatgacctcacatttccaagtataaatttggagaaaagacccggatcagaggaatcctccatcaaaactggacgccactgtctgatggcgttaattatgttttagcgactgactaggagggctagagttccttcttccttttggtgtaatacaactgcattttccggatcatcgtattatattgctaattccggataaaccaccatttgtcctgcacaccgagctgaggggcgccttggcgttccctctccgagtgcagccctaacacaggcttttgaccttcagcctggaatacactttcgtttgtcattggggcccacgtagtgcgaaaatgggcggcagatttggtaggacttccagcgggtgaactttgggaagagtccaggacgtgaatttaatgggtggagtggctgcggcagcactgtgaagttagcgcggccaactgcaggaagccatgcttcattacacccttcatggaagctggcacactcgccccaccctcgttttccacgggccagtcttggaggaaaaggccagcaggtaggttcccagggcacggagatgatgcccccggggactcccctctggcgattctgagaaaaccccttcccagccctgggcgtccacctcccccgccacctcccaggcctcttcccgacgctcacacgcggcccgcgccaccagcgctgcagagggcggccctaacgtccccgcccccgcgtgcgcgcccccgcgcccgttcattccggcctccgcgcgccgccggctcccctcgcgcccacccccagcacacctcggcggcggcgagcggcgcgggggagggggacggggccccggaggtaggccgggggcagccaacaggccgcggcagcgcgcacgcagggctagcctcgcccaggcctcctccctcacgccggccgcaggacgggcgcgcacgccaagtgacgctccgaggaggaagcgcagcccccttcccctccctcgctgcccctggcccagcgggagccccccctccccccagtgcgcctgtgcggaggccctcttgattatgtgtgccctctccgggcgcccgcgttagcggccgggtggaggtggggagggaagacgctgaggaggaggaggaggcggaggaggcggtggaggggaggtggggggaatcagcaaggacatggctcctgactcctgtgcggaacgtgagtgactgagcggcaaagcccgagtgagcgagcggtgggctgccgggccgggcggggggcgccggggcgggctcggggggctgtgtgggggggaagcactaatcggcttgcatgtgttttttaatggtccccccaactccctcttagatggtctctagcgaccggcccgtgtcactggaggacgaggtctcccatagtatgaaggagatgattggaggctgttgcgtttgctcagacgagagaggctgggccgagaacccgctggtttattgcgacgggcacggctgcagcgtcgcggtgcatcaaggtaaacacccaaccgcccgccggggcgcgccggcctgcgcccaacggtcaccgccgcccccacctgggccgcaaccgccggcgcccccgccccgtgccgcggccgcgggagggacgcggagggtccgcggcggggcgcggggggtgtgggccgcgcatgtgggagaaagtgcgtgtggcccggactgtcatgtgattccgctctcactctctcaagtgtcattcggccgccgcctgcgcctggggccggggtctgctgactcggcggggcggggcggggcagggcggcggccgcgccctcgagatctgggccggggtgggggcgggggcgggggcgggggcggtgcgcgcccttcccggggttcccggggccacgggggtgggtttgggagagtggagcgccctcttctcccctggcctgcagccgcctgtctgccgcagtgtttggagacttcctgtggcgtggagacgggctcgggaacgcggcgccagtgtggggaggctgggggtcgccttgcctctttagatggggagggatgcggggcccgttgcaccccgagccagaaggctcgggccctgccgccgccgcccggtagctgtctgcggaggagatggcggagtccgttgctgaccatgcgggagtggcggggctgctgcagcgcctgtggggtggccgcggcaggccaccaccagcctaggtggctgaagaggtggcggtgccaagtcacttttggggagcctcttagtttatttctggttgttaacaattgatgaggtttttggatatacaagaaggccgaggacactagtaagatacttttctggcctttgaagtggccgacttttccccatttcacgtggtaaggaatccaggacaaaacagtctatattcttttttggtggctccatgtcccttcgcatttctgaatctggcattaagcgatgcatatgtttttagtagtctgttggaaaggactaccaccaaaagggagacgaaaatttgaacatctgctaaagtgcattttgtagagaaacgaatgtc

SEQ ID NO: 53768 - DNA, 429 bp, Homo sapiens
tacacatacatatgtatgtatacatacacacatatatatacgtatgtgtgtatgtacgtgtgtgtgtgtgtgtttatatatatgtatatgtatatatacatttttttttatttttgttttttttgagatagggttcactctgtaacccaggctggagtgcagtggcgcaatcgtggctcactgcagccttgaccttctgggctcaattgatctgcccgcctcagcctgctgagtagctggtactacaggtgtgccaccaccacacccagctaattttttgtttttgttttttgtagaggtgggattttgccgtgtcgcccaggctggtcttgaacccctgggctcaagcgatctacctacctcagcctcccaaagtgctgggattacaggtgtgatccactgtgcccggcctatattactatatagtat

SEQ ID NO: 53769 - DNA, 555 bp, Homo sapiens
ctgaacaatttatctgttttttttgagactttgcttttcttttttcttcgattttcttttttttgaagcttcgctcatttgcccaggctggagtgcagtggtgcagtctcagctcactgcaacctccaccttccgggctcaagcgattctcctgcctcagcctcccaagttcctgggattacaggtatgtgccaccacgcccggctaatttttatatttttagtagagatggggtttcacgatgttggccaggctggtgttgaactcctgacctcaaatgatcctactgcctcggccttccaaagtgctgagattacaggtgtgagtcactgcacccggcatgaacagtttatcttgtttcagtatagagcttttttttctttttaaccatgttatctaatatctaatcaatcagttcttgatgcactttctgatcttctactttgatgactaactcttgtatgtatgtcattttgcttgtatacaagtatatctataggattattaatttccataggtggaaacattgagtcaaaggagttttgccgttaattt

SEQ ID NO: 53770 - DNA, 886 bp, Homo sapiens
gtatgtttaaatactcataggtcacctggcctcaggcacaagctttagaggagtgattcttagcttcattagttaagacttttgcctcaaggaaaaccagttaccaaagagttacttgtgcctcaaggggtataaatactacagctgtttgtgtaactgtcacattcattttttctatcaactgtctaaaataaatgagagaactaatcctgaagagatgatgttatttattaatagatgattccatgttaatgaagaaacaatttatatatgagaagtgatttgttttgaaaagatagaaataattttggtaactgaaagaaattacaaagtttattgacttttaagataacaaacaaaaagaaaaaaacctcaagccaaaaatattagaaaactaaataaagctacctttacaggcacattcttgatgtgtgaaacaaaactagggctcacagagaaaccaactagaaaatatgcacagaatgaccaaaacttctttcaacacgcttcttggactctttcaacactatggattatctcaaaccagaggaatgtctgctatggtatctggaccaatgccagcccttgttataaagtgaagaacactttaagagaagatcttgaatccctgtgctttgcaatctgacaagcagaggtattcaaattaaacggttaagatgagaatcaagaatggtagctaacattttaggatacagactaattccagataatacatttgaggaaagattcagaatgtaacatagcacaatttatagggttgtctggagatgtattacccccctagtgaaggacacagatatttaggctggcttttgcctaaatgtcaaatagccaggtgttgttttgttttgttttttacaggtac

SEQ ID NO: 53771 - DNA, 2029 bp, Homo sapiens
cactcaaccaccctcaatggtagaactaaaaagcaacaaatggattttacaagttaatgtcttaagctatagaagaaaacgaaatgaaacaaaaggaaaaggggaaaaaaaaacccattcctacattactgaccgggggcttctcttccaatcgcatcccaagtcctttgctgctcaaaaaacttaacacctccaacctggttagacgcttcaaattcctccagatttctaaactgcgaaagcgaaacaaacatctacctaacaggctaaaaagatgacgaagtacaaagtaagaaaaacttttgcaacacagacactggccacagtgcattcctactttcccagaagggaagaggaggggaggcagctgaaataagaataaggatgaggtaagtatcggtggaagatgacagtttagggtgagaagcggctgctctttctcacattcagggggacaggaaggcaaaaggtaggtgttaaattaaaaaaaaaaaaaagtctacccacaccactcttcgttcttcctccagcacagctggagggggaaggctcttccccagaacgccggagcagagagaaggcatcgccaccctaggctagtggcgccgtccagcctgtcactggggctgggactagaaaagttgaagcaggagtaaagatctggggaagacggacacgtccttccaaggctgaggaccccggtgacccgagctgagggcagccagagcccggggtgaccaagccctgccctacgtgtccggctgtctctgaggaaccgggtcgcctgacgcctgccctggcccctctccgcccggccccgcgcgcctccttgcttacctgctgcaccccgaggaactggtagaagttgagctgcacctcctccactaagtcaaacaactccaggtctccgctctcccagccgcgcgccggcgccacggcggccagcagcagcagcagcagccacagcagcggcgtccgcggcggcggcggcgggaacggcaccagcccgagctggcggcgtccaggaagctgcgccggctgggagcaaggagccgtcatcgcgctgggctcggaaaggtcacccgccgcgcagctccgttggccgagagctgggacgtggcgggcggcgctggctgtggggaacagcgcctgtcagtgaaaagcgcgggcaggcgcaccggagcggcccgccaggtggctggccccagacagagcgcggaggcggcgggagccggctgccggacgggcgggtgggtaggcgggcggggccgcagccagcgctacgttccgaagaccctcgcccccaggcctacacacagctgtagaggcagcgcccggcgcctgggctgcacagtgggtgaggcttcccttcgcctcagcctatcccaggcctcgcttccggtgacatcatgtctcctagcaaccgcgggaagggggcgtggccggaagcctggacgcctggcgccccagatctgggcctgggtgaaatgcctctcaatcactggcgcgcacggagcagctgtacctgcgcccacatgggctgagagacagggacggttatagccatctcgcgtccatctggaacgccccacgtggacttcccctgaaatagctactgtcttcctctcccctagctatcgaacactaaaagcatatttgaagcctgattaattgattatggcttccatgcatttaattagtccatcagcaaagaagacaggacaagttgaaccaggttctaaaaggggcaaatctagtaagtagagagaggtagagcagaaaaggaattgaaaccaaaacaaaaagtatacttctaattatgaattaagatttacaggcataataccataaaatgacctggtagaattaacagttaataatggtgactcaatcatagttggaggagaaatgtagtttatccaccttagcccacctccagttggggttcctttgaaaacagacctcaattgagatgtttctgttttaaaagacaggctaaaaacctcctctcccataacaatgtctcacc

SEQ ID NO: 53772 - DNA, 1093 bp, Homo sapiens
ccttttccgccttgatgggaagtgttgcaggcttattctattctctactaaattcaagcgttttagtagaaaaagtaaaatataatatatattcttacaatattgtccacacgaaagatttactacacaaaaattatttctgaaggcattaataccaggaacaattaatgtttaagtcgcaaacggagatgtttacgctgacagggaacagacaaaagggcggccatgcttcaacaaaatgtaggagttttcagtttgcagcttgaacttgacactgttgaaatacatgcatttcggtggccccgttacatttcacgcgtcacgaagccgagcaagaccagcccgggccgccttccccgtgtacgcgcgggcctccggggacgcgcagagctggagcggcgggcgcgcgcggcaaacgggcccgcgcggcctctgcgcgtccccgctccagcaccctggcgaggcctagaccgccgtgaagaccccggggaaggagtggccgcgctcacctgcagccgggagaggacagcgggggagaggaggccgctctgcaccggccgaaagcgaagggctcgccggctggccgcgtagtgtaagggtcggtggtttctttgcttggtccctggaaatccaccccttcttatcccggaggcctgaactcgatttctgcaaaacttcccgcgaccagctcataaaaggagagcgcgtccctgggtgggctcgaaccaccaacctttcggttaacagccgaacgcgctaaccgattgcgccacagagacttcggtgtcattttccccttctgcctcagcctttatgaagaataataaaggcagtgtgtggctgtttctgctttctgattggtactatcagaaccaaaatattttacttcacgtttccaaccctcttaattctattttccaccttttaagcatatcgcaaaattatacaacaaaatcaagcagcattgcagattgcaaaatgtattaaaatactgttgctcccccccgccaactcccatttggaacgttgtatttcaggaaaataactatttcttattagttttcttttatgagaaaatcaaagctttcatctt

SEQ ID NO: 53773 - DNA, 1923 bp, Homo sapiens
aaggtatgagcatcctaaacagtaactcacttctaataaagatcttgccattcctaactgtactttactaaggtagctgtttaataaaaacgtatttatgcagattctatagagcaactaaaacgggacccatagatgtggtgagtagcacaaaatgtgtatggcagttggctttatttgcagcggcatataaaattgttaataatcctgtcaaatctgttcatgaataatttattaatccgattgctggagtgcagtgcatacaggaactctatgtatgcgtgcatgtgtacacaccccccatgcaggaaggacactactgccgtattccagaaatgacaaaaaaaaaaaagtaaaaataagcaagaatcacataattagatgtcttacagtctcataaaagggcagtgctgcgaggttaagctggtgagctaaaaaacaaacaaaacaaacaaaaaaccacaaaagcaaaatccagttgcctgagatcggagcttcccgcaggattcgcgcagagcgaggagcggggaggacgccgtttgcgggaggcgggggccgggatcccgacaccgtccgcagtctccccggggtctctcagggaaccgagctggtggccgtccgaggtaagcgccgaaccaaggagaaagcgccgagcgcgtccacaaaacgcccgaggccgcccttctcgccaaggctcggcagctcccgcggcctgcgctggacaagcgagagctggacggaaacggtgggaggccgtaggcggcggctgggggcgcgggacccgcgcgcgggcgcggaggcgggcggggaggccccgcagcccgcgccgccgccagccgccccgagccgcgtgcgcgcgcggccgcatcagctgagcgcgcggcgcgtgtcacgtggtgtgcgtgtcgaaggtcacggcgcgctcacaatggagctctcggagtctgtgcagaaaggcttccagatgctggcggatccccgctccttcgactccaacgccttcacgcttctcctccgggcggcattccagagtctgctggacgcccaggcggacgaggccgtgttaggtaagccgctcggctcggctcggagctggatccgccggggtggaggggcgctcggagaagaggagccggcggagcgagaaggggaaagccccgggaagaggaagtctccgggctttgcccttcgctccggacggagtgttggggacgtggctctgccaggactcggagcagactctgagcattgttttggccccacttggcacctgcatagagccaactccacgttcctggcccggtttccctcccagtctctttgttcttttgtaaagccggtgttcaagtcttgtttgtggcctaaacatctaaggtgtttagccttgtctgaggctgcggctgttttgacagttggacttcatctggggagctccctgcaattcaagcttccagggctaggctagcaaaggtttaagggtctgtttccgaagtaattactaggtcagacagtgttgacatttgccaacttagagcatacctcaagttgctatgatcactccagcgctctagttcagcatgtttacacaggttctacgcctagaaccttaaactatgatgcacaatactttgttccgccccagttaccaggatgcgagtgtcttttaagcgatccggtcagtgactgcggaggtgcagtgtcagtatggattgaagacatattttaagaccgatcgcttttagatgattttcttaaatataaatatcccaacaattcaaatttttgttttttttctgtagtttcatgaactaaacacttgtacaaaaagtatgaaagtggaagttcttaaacgaaaatagtaaccaccacctgggttaatctcaaaaaaaaaatgactgtcaaaccctgaaagtactaatataa

SEQ ID NO: 53774 - DNA, 2924 bp, Homo sapiens
tgtcaaaagttaaaatcttgttgaattttaaacttgtttggaaggtgtgtcctgattttttttcttgcatctttcttgagcttggatacttctttccatgttttatcctaaaaacgtggtattgtatacacgtcttttaggacttggtggggaaacttaaagatgcttcgaaaagcctggaaagagcaactcagttgtaacttggggaagttaacgatccgcccgagtgcagaggaaaaccagaaacgccttgccttcagctgaaccaccgtttgtgcgagctggatgtccttttcagtagaaaagaattttccttttgaatttataccattcatcaattttgacactttaaaaacgtgtgaaagggttaagagggaaagatactgcccaagtatttgaatcgtttagtagtaactgtccatttatcctattttgatctttttcaagtcttctgaaaggaagtagacagtattacaccctgaataaataaggtgttgttttccacaaagagtgatgatattttgtttggatctgagttcgtgtgttattactttgtgtgaagctagataggagtagtgtgaacttttaacgatagccttttctcaggattaaagttaaacacggaggaaacgatgcgatctcctgggtttgtcgcagacccctgcttcggggctccgggggcgggcgcgggcggctgcccggcccgttacctgcgcccgagggctcgcccacagcccgaccctcggccgcccggtcccggcccggcgcggagcccctgcccggagccagccgtcgcccgcgcgcgccccgcctcggccgcccgcgggcggggaagaggccggcgcggccgcgggctggcgggcaggggcgggcgctgttgtttccgcgagcccaacttgggcgcaggttccgcgccgcggcgccggagcctgggccgcagcccgcggggccggccggggggcggcggccgcgggacgtatgcgccccgggaggaggcgggcggccgggagaaagaaagaacggggggcggggtgggctgcgcggcgtgcggggccggagcggcggccgcgcggagcagggcggcgcgtgtggcgctgtggagaaatgtctccgccgccgcggcgcggagcgagggagggggccgggcgcgcggcgcggaggggagggggcggccacgggcctgactacaccgacactaattcccaggccgcccttaaggaatgaggggagcacgtgacccgctgggggggcggcggggggagggggcgggcggactccgagccattttggagccggtgtcagtttccactctgccttcagcggtgcatttttttccaccctcccctccccctcctcccctccccccgctcgcacgcacacacacggcgccccccgcccgcccgcctcccccacagcaactatgaaataatcgtagtatgagaggcagagatcggggcgagacaatggggatgtgggcgcgggagccccgttccggcttagcagcacctcccagccccgcagaataaaaccgatcgcgccccctccgcgcgcgccctcccccgagtgcggagcgggaggaggcggcggcggccgaggaggaggaggaggaggccccggaggaggaggcgttggaggtcgaggcggaggcggaggaggaggaggccgaggcgccggaggaggccgaggcgccggagcaggaggaggccggccggaggcggcatgagacgagcgtggcggccgcggctgctcggggccgcgctggttgcccattgacagcggcgtctgcagctcgcttcaagatggccgcttggctcgcattcattttctgctgaacgacttttaactttcattgtcttttccgcccgcttcgatcgcctcgcgccggctgctctttccgggtacgtaggaggcgaggcgcccccgggacggggctgggggccggcgggggccgcgcggggctcggggcggccgcgggtggaaggggagccccccccgcgccccggccgcgccgccgggagggcgctgacagcgtgggcgcccggccccgcgccccgcgccgcccgccccgcgcctgccggccccgcgcgccgccctccccgcgcccgcgagcgcgcgcccgccgccgcccgccgactcccgcggcgccgggaccgacccgcagcccgcgccgcgccgccgccgccagcagggctcggcgccgctccagccgccgccgcccgctcagccccggcgcgccgcgcgcggccccacgttttagttccccgctcccccgggcgcccctccgcaccctcgcgacgcacatggcccccgagaggagtactggtatttccagcctcggcggctctcccggccgcagcgccctttgttgagaggtagatttggatgaaacggggacgggttcctgaaatcgggagctgcttgggtcaagtggcttccctcctctcccgaagaaagggctctggaggggctccagcagccagagaacgcccccattttatagggacgggttgcgtggggggcggccatcccgccaaggtgggtgttaggctggagagagccccgacgaaaatgttattaacttaagttggggggacacttgtctgagattggatggctggtaagatggcggttcccagttgtttccaaggtctcctgcatttgtgtttaaaatgctgaagttttcaaggtggtgtgtgttgggagtcttggataagtgctctgaacatcgcttgggaggtgctccctgggaagtgggcatttcaaatttggagctttttgtggagtgaagatggtgactggacgttagctttgctggaggcttgctttctcactacttctttttctcctttttcttttttccccttttggagactgcaacttttctctcgacttctactaaaggatgcactcagcatcatgactcc

SEQ ID NO: 53775 - DNA, 1117 bp, Homo sapiens
gtcgctgctttgggttgacaagctgttgatttagcgttggaaatgggctggtcacatggttctgtacatattgtcactattgtaccgattaaagtactttttcttgcccccagcatagtttgtccaaataaaacactgggctttgccctctcctcttcttgtaaaacagatttcagttttcagcctttccaaaactttgtatcgctcatttaatctacaggagagcgtcacattagagaaggaagttttaaagaggttcggttcaataaacatctctgcaatttgagccctgacggtttcgggctaagtgcacagttggcaattctcaaaaaatcccttcgtgaaatttctgaccgagtgattgcagacaggacagaccgagagagtcgagatctgaaaccagctctgcgcaccaagtcgacgtgaaaagaggcccccggagtgtccgaaatggccgggagtgcggtttgcattttcctttcgcgggcgctgccgcaggctccggggtccccgccgcccaggactgggtccctggtccccgatccccgctccccgctccccagcgctgtggcctcgtggggctgccccgcccccccggcgtcgccgcacccaccccgcccccgcgccggccccgcccccgcggcgcgccgcccctcccccgcccgcccgcccgcccgccgccccgcacgcccgccgaggctcggggctcgggccgggctccgcgcggagttgcagcggtggccggatgccaagtgtaagtgtaagttgctatggaaaccccgaccgaggcgagttccgaatccggagcgagacggagccccgggcgccgccggatccgcccctcgcatcccggcccccgggcgtccgccgcgctcaggccccggcccaggccgactggaggtgctcctcctgcggccccagcacccggctccggaaatgccagggatgcagggagggcagaattgttttccctgcgcgtcgcgtaaaaacgtgccaggttctgcttgctggaaccgtctaaaacaaccggaaccccggattttcacttgcagattcttgaggaagttttataataaattcggagacctggaacaagccctagtggttggtaaatatc

SEQ ID NO: 53776 - DNA, 1525 bp, Homo sapiens
ttagcggagctcactctcggctcagataatctctggggaaaaaacggacagatagagtggttaaacaggaaacactatttttttttttcaaacgtttgagaaaacttgaaaaccatctctcggtacttttgcagtaatttccaggagtcagaacatacagtccattattcttcagagtaaccaacgcacaagacattttggcttgggacttgatatcgcgaaatgacgtcaaaaaattaaaaaaaaaaacgaagctcgcacatgcgcaatgaggtacagctgctttttatttttttgtctgtatcagctattggctcctatccccgcctctgggatccggcctgcgccgcggggtcctagggggccagcagctgtaaagcggtacgggattccgcaccctactccagcaagaaagagcctgaagcccctccccacctttcccggccagggcgctcttctacgtcccgcgcgcggacagccggggcgaagtaggccgaccggcgcggccgcagcgagttttctggcagcgctagcgccgcggggcctgggttcccgggttccggtctccgccggctccgggctcgcccccgcgagttggccgcaccgttcccccgcccgcggggcagccgctcctccgggaggctccggcagggaccttcgccccggcccccgagcggcagtgcggctccagctggaggcctggcccgggaagcaaagtgaaaggacagaggcctccttcctcgccagccgcccgccgcgcctttcccagctcaggccggcggcccgcggcgcggagggagcgaaagagtcggggcctgccccctccaccgcccgcatctcggccgccgcacccgggtccgccccgggaggccccgcgggagggaacccccggcccgctgggcgcttccgcactgacgccttggggccgcgcgcccccgccccttcctcccgctacacccgctgggcccccgcccgcgctcccggcctgctcccagcgccgcctcccccgttagaaacttcgcagacaccgcgaagctgctctttggagttggagaaacttaggaagaatgggaaaagccgaggaagtcggggaggaccacgttcttcccttgccctcggcccgacactcctgtccacattggacgcggcagcctgccagcgcccaggagagccgacccggtggacaccccgcttggggacctgccggcgtccggcttcggctcgaggcgggcggccagccggggcgcaatccccacgggacacgcacctaggggatgcgtgacccggacgcgggcttggtgggctctctagagtcgtttcttatgtggcactttctgtctttgtctgctgtgtcctgcactgattaaagggtggagaagatagtacggaccttctctgacacaagtccaacaacgccaacattttaaaggggtgggaggtattgagcgggagggctgaccggcatctggagcagggcgcttagtgttttccagctcgtgatgcaggctttgggcacagttttgaa

SEQ ID NO: 53777 - DNA, 1469 bp, Homo sapiens
gacgcttccctccagtaaatttactcttttacctatattctttccaactggtttttgttatctgcaaatggaagaaaggcattttggagaaacctgtggatctgagctgggctctggaagaatggtggggtggaggaaggagagccgagtggagaggtcaggggaaggctcttaaggcaatcaatcacctttctgccctgagtcagctatggacaagaggctgccaagcagagagttgactcagcagaggactgcaaggggccaccctgagtgaggctggtttttaaatactcatttcaaaagcaattgaacgctctctttcccctctcctgtgcttaggtatgtcttctacagttcttgttccaatcacttgaagtcctttgtgtctcctgcctctgcttcttccaaggcacctactaatgtccaatgaggccacagggtcttctctttgatcccaggatatttctgtgaattattagcctttttattgaacctaaggaaggaattcaaatggtgatttaattcgtgcctttctcccctcctgccccttcccaagtatcccattgtgggaattttggagacaaaccctgcctctgattcaagccatgtatgtaaatgaatttattggatgccactgagaaggctacattaggaaagggaagagagttgtgaatttaagaaaaactacaacaaatctatgtgggaggagggaaggaaaaaaggaggaatttggaccatttatttgcagcatgtcttactgacagttaaatacagtggtttgttctgttttctgccactcgagggttatttaattaaattcatgacctaggatgctaaccagccccacatctaaaataattgcttctctgttggtgagatgtaaagccgggattgattttcccctggccgatagctctcctttctgactcatgaatgtcatctccactccctgccccatgtaatttgatctctgtatttgatccctatttagtagtacacttgccaaacagatgtctgagtaattaaaatcccacatgggcacactcgtcagtgagttacatctatttaatagtcagcttagaaacttttcaccctttggcttttctcccatcctggtgtcgtatgtcagtagcctttagcaggatttaactattagagttcaaacctgctgtttgttttcctgcattcatagacactctctttttgttttttgactgcattttcttcacaagtccctgatctctttctccttcaactcacctggattttctctatggttttacgccagcattcaaattctcattggatgagtcatcctatatttcattcatgccaacactggcaattaaaaaaaaaaacagaacaatgttgttataaccatggattaagagtgccttttttttttcccctggaggcatagccaaaatatttcagtctgaacaatcctccaattttttttaaaactattt

SEQ ID NO: 53778 - DNA, 1677 bp, Homo sapiens
gtcagaagatcaggatcatcctggctaacgcagtgaaaccccgcctctactaaaaaatacaaaaaattagccgggtgtggtggcgggcgcctatagtcccagctacttgggaggctgaggcaggagaatggcgtgaacctgggaggtggagcttgtagtgagctgagattgcaccactgcactccagcctgggcaacagagcaagattgtctcaaaaaaaaaaaaaaagtatccatatctgttatatctcctttctcctttatattttcttttcttttttttttttttaaatagattcatcagcgatttctccattttcttgatctttttccaaagaattacctttggagttgatcaaaaacattgtttctaatcattaatttctgctccaaagtttccctaatcctccatttcttggagtttaatttttaaaaaaccattaatcagttcacttatttttactctttctagttcaatttttccctgccaaatgatgttactaaactcagtgtggtttcaaatgacttgagtatttctaaaaatctgctctccgaggaggaagatttgctatcactgatgatgtcatttaaaagaatgtgactcagactcttgtggcaaatttctaaagaattctaaaaatgtttgagtaatgggaacacaattgcagcaagcttatgacctactctgaaggagccaatttgtaaaacctgcacgtttgctgaacattatctgcccttatatatttagaaataatcaagtgctaggaattaaagaggagctctcacttttgtttattgggatgccttctgatactgcatgtctatgacccaagatattcttaatatttttctttttgtgaaaatgtatttaaacacatcatgtgtacagcctggcttcatttttgctcccaacagaaattaatctcagatgaaacatttttcaaaaaaagattaaaaactgttcacatgctaggatgaccaagttttccttgcaaaaaccaattcactatgatgatgtggatgaaggcagaatgtgttattaaaaataattaagtgctctgataggccacaattataagcgataaaaatattctctaataaaatgtattgtgccaatagaaaggtagattgcaggtgtgacctttggcaaggtatgtagtagaacttattagagccatgtgtttgtagattatgtaacagtttttaagtggtcaggaaggggaggattttgtggtcagaaaagtggaactgccctatttaacatatgaccctggccattcccatcccaaattactgttgatcaagttacagatagttgggaagcccaggtgaaagggaagcctagaataaggcccgacaaaattgcaataaacagtaggccacaaagccagtggccattatcattaaaaacacttactgaagtatttaatatagaaaataatgtcaagaaaaattgttttgcaaagcactatgaaccagaaatcacttaaaaaggctttaacatatcctcccctgatgtctttaggaaagctagaacatgaccaaaaacataagtagacctccccagactaacagctttatgatcattatttgaaagcattttgttttgcatttgcatgcatctcaggtttaagtttccaaatttttaaagcatttaagtgctaatgctctaggaatt

SEQ ID NO: 53779 - DNA, 2269 bp, Homo sapiens
tagaaactacagtttgatgatttggggcgactgtatacgtcatgttgccgccgctcctattaagatatgaaattgtcccaccactgccccaaagttcccccgctcctgtgcattccattctgtcctgttccactcctttcccaggcaactgctttgcatcgccactgttgcttcttctagaatgtcctataaatggacatcagaccgactatggctttttgggttcttccccccacagcatcgtgtttttcagctccacccacgtggttttgggtattaatcctatggtagaactagctagatgctggagaactcattatgcgccggtaggtaattttaacctgcatcgtctcatctctattctgtcacaatagaggaaactgaggcacgcccggcgtgtgggcgtgtgagggggcaccgggccgacttccgcccgtcagtaggcctggacctgctggcacccgctgtcaagatagggcctggcgtcgcggcgaggcatcagctcgggcagaagcacagcccaggaagtgggcgcgtcgcaagctccacacccaaccaaacccgggcagagggctcggtgggcgcgaggccgagggcccaagaggccggggccgctaccccctcgcccctgggacggcctccgggtctccttgctccagcagacaggcccgcggcggctactccgaggcgcaggggcaaggccgcagcgggcagcggaggccgaaacagagaacacacacaacgcggaccgacagcagtcaccgcaggggtcgccggggcgcggctctataaagcctcggctctataaagccgcgctaagccgcatcgcgctgcacgtttccttccgcgcggggccggcgctacttcccgccttaccaggccgccgtgccgggaggagctgagacgtctgcaaggccgcaacatctcgcagcagcttttcgcctgcttcctccgctcgctctagagggcacagcaaggtgcggggctcaacctgccgcttccccaagacggaggtggccgccacgctcccgcccgctgtaaacgtccgagcgggaagagcggcctctggtttctgtggtatcggcttctggtttctgtggtatccggagacttcgtttcccggcgcgagggaaacaaagatgctggcgtggagcggcctgcccgccgctattgtctggctgcctgacagggagcggccgctttcgctttcttctgccgaatggaacgtggtgactcgggagccgcggagcgcctttcgaggcagctttgtctgcggaaagggagcgctgcggacggcctgtcggaatggtcaccgcccgctttccgcgggaggcgcgccgggcaccgctgggcgatttctccgcctcagcgaaagaaaggagaagccggcatttgtggccgcccagtcttcgttccgatttgagccctggcgtcggcgggaggtgacagtgctgtccgcgcgcaccccctccgtcgccgtcagggtcgtgctccttaggtttcctgcggtttttctgctgctctgagacggtctctgggaccaagttctcacagcatcgtcttctcctctcgcaaataatctttttatgatgtttgttctgctgaatccaccggacgcctcagacacgggccctgacggcatcgccggcctgggggaggcgtggagagaggggaggaaggcgggagggctgtggggctgctagctgatttggggatcccatcatcttcgaatttttatgcagagcccatggaagcgcctggtcagagaagcgggaggaaaccgaacctaagaaaggggcttggagtcagcagtgaagaatctattgtttattttagttttgtttttagattcaggaggtagaagtgcagctttgttgcttccaggtattgcagagtggtgaagtctgggctttcagtgctgcccccacccaaatagtgtcctttggacccattaggtaatttctcatccctcagagtgactactatttaaaaggcagctattgttagagctggcaagctgcaagggcaaaacaaaacaaaacaaaaaacaaaacagggttggggggagcatagaatattttttttttttgacagcagcgtagtaaagtttggatttagagctttttgttactgcccatctcccatactcctgttttatttctctttgtagcatttataacctcctggtatgataacgcattttacacgtttattggcttctctgcccacttgatttttatctccttttggagagcagggaattttttgt

SEQ ID NO: 53780 - DNA, 850 bp, Homo sapiens
tttatgttacgacttgaaactcgtcagtggtgcatgctttcccgtgctttgcatttgtgtacccactcttcagacgtgacattaacatcttattgagcagatccctgtaagaagccactgtgtgatttaaggattatcctcaaaatgaccacccatcttaatcctctcaaagtctattttcaaccgttgcatatattctattaaatcctgagaagtctccttcagtggaaacttttgggaggtttgatccccgagaagtggttctgggaggtagatgccatgttagatgatgtcactcaaccactttctggctgtgtgacaaggtagaatagctagctgtccctgtcagaacctcgacacattgttttgcagtcatctatttactggtttgtttccttagaggctccttaaggccaggagccaatttgccatttgttggtttggctgtttgttctttttctgtatctgagcattgacactggtacacagtaagtactcagtaaatatgcttttccagatacagttctctgagttctttttatttttctttcaaactgaacaaacaatgacgtatctggccatgactaaaatacagaatagatcaaagcagccacttaattcagggaaagttaacatttcttaattgagagaaaaggtatccttttctgattgattttccacaatgtctgcccacactgacattgctcaatgtgcaatttcccaatggctttattttatttttatttttatttttattttttgagaaagagtctcattctgtcacccaggctggtttgcagtgatgtgatctcaggtcactgcaacctccacttcccgggttcaagcaatt

SEQ ID NO: 53781 - DNA, 822 bp, Homo sapiens
ctattttctgcacttttgtcaagaaagagtctaaaaatggtatttttgatactgaaaggtatgtgtgttggtagaactcagaagtaaggtatttgaaattccagttcacctaactgacttctttgctaccattgagaaactgcttattttggcatggctcactttaacctaccaaaaatgaggcaatgtaggagtcttccccatgaggttgttgaagattgttgaagatatgacattgcaatgttaaatgattaggaaatacaaacacatgtctaggcagcattgactgagcattcaaccaatatttatttgataaatatttattcttctgcctaaaaaataatcatgggtgttattccaggttcttggacccttcactttctaaccccagggttaggtgaggtcactcaccctagagttctttttcaactcaaggaaaataaccaggcaactagaacattaagtgtactaagagcaaaagaaaggtctggtactacagaagtcacaatgaaggattctggagtgagcaggaggggaagcgtctctgctgcccactcacagtccctgggtgatatattggtgcccaagagcttgagaacaaaatgctccattcctcctgggatctccacacccctgtggtgctctcctgagcctgacccatgctgggaggctctggctctccatggagactgcacacgagagtgttggtcttacactgtgcacaacctctcacaggcatttgcccccagatcttttttctgcttggttgggggaaggctggatattggccaattgctagtattgctaggtgcaaactttctg

SEQ ID NO: 53782 - DNA, 834 bp, Homo sapiens
tctgcagagcagcagaaaattaactgtgggcagcgacagcttaatgtagcaacagattctacactttgcttttaaacactggattatttgcgcttagagttttccaagcttgtagtcactgggtctggttctttaatgagtgtctttgatatcttttctagttcagtgcagaaacagccagagggtggaagaaacccccagggctaactaaagacagctcagaaatgcttctcagctgtggactctccgaggccggcttccagccagcggtcagcaacctttctgaagtggcggcgggccgagtctttatttgcgctgaattcagctctggccagttttgtgcagatcagagcctctaagtaaggcgggacgattgctgtacgaccctctgtacttgctgggaggggacgagggtatgggagggaactgctcttccccaccccgtcctcctctgtgcgtctagtcctgagctgggattcctgcccgggtcgggggccccagagctgctccaaggccctggccagctgaggccccgtgagtaaatacagcccaacgcagagccaggctagcacaggcagggctgttttctctcttgcatgaggtaatctgctgcggtgggttggattccaagtggcattcatctccgctaatgtgacgtgtaaatgcacaaacacagccacaggcatcagcagagggacgccgttccccccgcagcctggctgtcctgcttcccgttcggataaaatgagcccttcactgtcatacggagtgatgcccgaccccaggtcgactaggcatggctcagctttccacgtaggagacaaactgaagccc

SEQ ID NO: 53783 - DNA, 865 bp, Homo sapiens
aaagcttccctaagtgtacactgtgcctagagataccagctaatgatactccagagctatcaaaatgcgcaagtcatttaaaatctaagcactcaggacctgaagacaaacaactctagttttcttcactatgtttaacattgggcagtactacactacaaattcagtacttcacaaaattttattaatttaatgattaacatgtagaagcttctttctgggttcctctgctaggaaaagactaaaaaccacatattactggagaagcacttgctatttctaccaaggcaaaaatggcttaaagcatgtaaaaaccaatatggcatcaaatttgaatgaattcctttgtcagcaaatactgcgggcagaggcatagaaacaccagtcaatatttgaagactcaaggattagaataaattacacagcctatgaagtttgctttagaattgcatcaaagtaaagatgattctaacatttctctgcttcgggtatttgctaacttatttcctgtattcaaagaactactgtgtatggttgagagggaagaagaatgcaagcactttaaaaaaaagttgtggaatttaggagatgagtcatgcacttttcccttataaaacatgtgttccaaattcatggacctttgcaggggtcagaggtgcttctcagtagtatgttacctagcagggggaaaaaaaaatcagcacactttacgcttcctttcaaagtaaaggtgagactcaacattgagtaagaaattaactgcttttcaagagaaaccaaagctttgaaagagtattatacaaacagatgtttgaaaatatttccactgttttgttatctttttgccaaaaacaatgaaactgtg

SEQ ID NO: 53784 - DNA, 662 bp, Homo sapiens
attacaggtaagtataaagaacagaaacaaccacatatctttttgatgtatttccttctaggcttttgtgttctaagttgtttgcagatggctgaactcatcctgtaaacaattctgcagctcagcgtttctcatttaaaaattcttccaaatattttaatgagtaggtgctcaacaactatttattaaaatgtaaacatgactggatggctagaaaacattccgacatgcatctgtaccacgattcgcttacttactcatttattgactgttgctgaagcataccctggctttttaccaaatctgtgatttgtgcaagagtggagtttccgggttcctgtgtcagccttaagagctgagtgtgttgtgctgggtgtgttgtgtagtgttgcatcgttccactggaggggcacaaagcgctggagtgggcatcaattccaactccaggcattcccccattagcatcttgggggaatcaaaccaagaatccaccaatccttaaggggcaagttcctatcgatctgctctacggagcattaagacctcaatgaccccagaccttgctgccatcctcctctcaactcctatggcacatttaatgaaataatatagaattactcctaagtgtttcatctcatgttattgtttcctcatggatgagt

SEQ ID NO: 53785 - DNA, 3766 bp, Homo sapiens
aacattgtgttcctgcgacagctcagcgagggctggtgatccaaggtgaccctacacatgtattgaggtcttggtgatgttgttcaaagagtgaaggacatgccatcccaaaatatgccggatttttatattgattagtgtgagctgaaaacactgaaaaagttgtagattccaacttgaccccaacaagccaggtgacctgggtcttcctgcatgtagcaagccacaaagattcctttgggaggggcccctcacctattcaggcgagaaaatagcccttatcccagagactagggtttggaagatgcaactaacctgaataaggaaatttctggaagtagcccttatcttctacctgttttatactccccatgtatcctcccagtgactcccctagaaatgtactgccccagattttttcttgtcatttcttctcaaatgtatcgttctcagcataaaagtgtcttgctttggccaattcctttggatttcactcttttaaagattcccaggtgcaagtaacactaagaaaatttgtattcctttctcctattaatctgcctgatgtcaacctgacttctagatccagctgaagagcccactaagagctaaagggaggttggaggggacctctgtctcccctacactgtcagctaggccttctgagccacctggcttctcaagacctggcttctcagccagacacagtggctcatgcctgtaatcccatcaccttgagaggcccaggcaggaggactgtttaagtttcagagtttgagaccagccttggcaacacagtgagaccttgtctcttcaaaaaattttaaaaattagccaggtgtggtggcatgcacctgtggtcccacatactcaagaggctgaggtaggaggatgccttgagcctggggggtagaggctgcattgagccatgatggcgccactgtactctagcctgtgtgacagagcaagaccctatttctaaaaaaaaataaaataaataaaattaaattaaaattaaaaaataaaacgcaggaaaagaggtgaaaactcctaatttcagctaccagcaatattttactgtagcagaaactgactaactttccctgcaagggttagacagtaaataattctaggctctgcgggccacacagtctctgtcacaatgactcacctctgctgtttgagcagctacaaactggcaaacaaatgagtgtggctctgttccaatcaaacttatctacagacactgaaatttgaatttcatagaattttcacattatgaaatacttttttagaaaaccatttttttttttgtacatacgtaaaaactatccttagttcgtggccacacaaaaacaagcagcgggccagatctggcccacaagccatagtctgccaactcctgtgctatagttaattcaagatataaaaatgctcaaagaggagtactctgttgcataccttatccacaaatccacacaccatccctgtgtagagagcacacaacccttagctactgaatttttcactgtcctcaaactgttctacttaagagccaaagttacttttcattaaacttttctcagtatttcaactactgtttctttttaacctagcaactatcaggcctactcatttcctctgccaggaggcaatggtagccctcaaacctcaagtatgcacaccttgcctttattttctagaaaaggccagcaatctaaaaattaggaaaccaccctgttctgatcatgctattcctaatatagtgttttattttactgataaaacaaagcattgctgacttacaaattattggacagtaacagtgtccatgaacctaaaaaaaaagtgccatcaacttgacacttgagagtttagctaacaaagtacacaaagaacaaaccacatggttggtgctccgtggtgggggtggcagaagcaggaacccgctgacaagcacatcacaggccctccaaaacctcagagtatctgttcttccattaaacctgcctcacttgtgaattcctccagactgagccagtctgaacttggctcctagactctctactcagggagggagaactagaacctgaggttagtcaggttcacacaccacattaacccttgctgggaacacttggtaattgcaacaggatctgaagagacacagatggtccagtcatctttacatatgcatcatttgcgtctgaaaatcctggcactacccatgaccttgggaatgaacaatgtgcggtcatctaccatgtcacctgctgtcttctttacaacaagactgatctttcagatccttctttatttttgcgtagctgaggccatttctgaagccaaaaagaaaagaaaaagaaaaacaacaacaacaacaacaacaacaaaaacagctgacacgacagtacagtataaataaaaatgaagaaactttatgttggatcaagctgataaattactgttcaaccagcagcctctctagcaagggcagctatctgagctgaagacacctggactgctctctgactcaactcttatgagttctgctcataccaccgagtcaaggctttaacagtatttgcatttgccgtttttcactgtgatcttaagtcacagtttttcacagtgatcctaagtcttccatgctgtggtacagaccccaagttttcgcaactcagaggtgggccaagtgcaaggggacctgagtcagagccaggtttgatcctgaccgcagagctgacagtgtggacttagccgagtcacttactctgatctgtttgctcatctgtcaaatgtgaataatgacttgtccccagccttctcctcagtgctgggtacaggtcaggtgagatgacaaaggtgaaactgctttgtcaactgtcgaaaacaagttattttcttcttccattaactttccccctcaagcagcaactgctttcttctgttcccttctgcagggtttgataaagaagtctgttgagcacgtgtttatcatggtttttaatcacagcttcatctttccagactgcagcgtccctcctgactgtaatttcttctcatggtttggtacctctttcagtcgcccctcccttagcctttcccagtctctcttgtagctttcctaccaagcagttcacacacacacacacacacacacacacacacacacacacaattcaaagtgtgtcagatcttgaaatattttctttatatctctcctggaatcgcccagcgcttccttgcccggaacgttcctggctacaataagcaccacatcggccaaatacccattagaaactgaatgattcctatctgaaatactcacaagaagcctggagcccattactttgtgtgtagaatgtagtctttttcccccccttaaatgcattacctcacatctgtctgtattacaatttagtatgccaacttccccactcacagtttcaggcctgtggcaaaccatctttcagtttattttccccactggcttgctgttttatgacttaaaaatacttgagagcaaaatgtaaatttaggcaatctcaaagacattactgattgggtcgttttaattaaaaaccagcattagtatctgtggtactaacagttaatactaggtacgctttgtctgaatcccttattttttctttgattgccactgcctctacttcttttgccaaagaaagttgtttaaaaaacttttaagcttatattccttctgccaaaagctaacacacaatgtgttttatcattattcttt

SEQ ID NO: 53786 - DNA, 2993 bp, Homo sapiens
agccctcaaaataaagacagttggataaaaatattagaggtgttttagcaattcttcccacagtagctggcactgtatgtgcccaatatatatctgttgaatgagtaacatgcttacatttatatgaaatggaaacttcactcctctggttgtggatacttagaactgccaacttctcttgagagcaaaagaaaataacaccaaatgtactatttacaagtcatacactatgaaacacttaagtagtttcaaaatatttccaattagcaagaaactctaaaacaaatgtagcaattcataaatataaggtagcaacgtaagtggttacagtaaaacatacacaattacaagattttttaaggcaaactggaattcagacgagttcccagaaagcacactctttttcggcagcatattgttgacactaccttactaaattaaaccccgagacagaaacactctcctgaccaaaacaccagaactccaaaggagataaaagcaccataaatatgagtaagcactacagtattcatcctttttttaaattgtaagtttctattctagtaataagggacccaaaaactactaacataaataataaaagagcttaacaaaattatacataactctacattgtaaacttattacttaggaaaaattgcatttcattttccgtaataaaacttgagagaggagtttttggtgcagtaatgcatgctcttgtaacaacttacattcccaaatagctaaagaagttgccaggaagttaaaatgaacttcagtgagtcagtcattaagctggataaaaataatcatttctcaacttttccaaaaacactcactccatgcaaacacgatcgatcctgatactgttttgcccttccccctgctcagcttggggaagaaaaatacaaaaacgatgcttttaggcattttaaacaacttcactacattgagggtgtgtgtgtgtgtgtgtgtgtgtgtgtctgtgtgtgtgttttccgaaaaaccagcatggttttctgtcatttccattacgctgaaaaggacatacagacatccatcgaaatcaaaagcagggaaagcgaacttacacttttccccagatgctaagtgactgcagtggctaaggtcatggtcaaaattcacagctcgtttaaactttcctggctgagccaacagctccgatcatgtttcctgatcctatcgaagtggattaaaactgcaggagtttctcgctgtcagatcagcaggaggctatttcagaccctcgaaccgcagtccgcatagcccgcagcggcgcatcctccaatccccgactgtgcgtgacgctaacctttccacgcgttctccagcctttcccacaccccccacagcgggtgcggccaactcgggaccccctccgcccgcgcccgccgggacccccgcctgctgtccccgccccggccgcccttccgcagtcggtgacttctgcctgactccccaaagtggggggaggcgacgaagggaggaagactccccgccaagggctctccagcccgcacagcggcagggcgatgcgggagaagcgcagggatgccgcccgacgccagagccatatttacatcggctgctgctttgccaaaaagccgacttgtgcccagtaatattgcctttaaaggaaaaagaaaggacctaagcactaaagctgctgccccaaatctgctcgcgctccggtatcctcgccccagtgccccagtgggaggctcgcacgcgcccagcccgggacaggtacacctgcccgcaagcggaagacgcgggcgccgcgcggcccccacaccgggtagcggtcgcccggacccggcccccagcagctcccgccggggctgacagccgaggcgccgtgccccgcacaaacttcctacctcccaggctgcggggaccgacctgcgggcgggcgggcggaccgggggcggcactggcacccaccgtgagactcacatgcacacgggacccccgacccgcaccgggccatagatctaaaggggacgcaagtggtggtgcctgggcggcccagagggctgggggcacgcgccgcggggctgggggcttcgaggcgggcgagcagccggaggtccagggctgactccggctccccgccccgcagcagctgcagccggaggaggaggggaacgaggaggaagaggaggaggaggaaggggaccgcgcgccgcagctgagcccttaccgagtggtttaccccccacatgaggacgctgagcagcgggtcgctggcccgaaacagcttcactttctgcgctacgaagtgcttcttcttggtcttggtcttgctcgccaggacagaggaccctaggttgccgggggtcgccatggccgcctcctatgtcccctccaccgccgtgctcccgaggccggggacccgccctctctacaccccggcccggggaggcagccgcatccccccggcggcggccccggcgcgccgcgctccgctccgcccgccgccgccggcgcgctcagccccactcggctcgctccgcccgctcggcccggcagactgcgctcggctcgcgccccggcccgtatcctgcgcccgccgcggatccgcgctcagcccgcggctggacccggcgcgcggcgagcggcttccgcgttgggcgccggcgtcatgacgcagggggcgggcgggcaggcgggaggcggctgcggcgccgcgggcggggcactgggtgcggggcgcggggcgcggcagctggaccgttaggctgcgccttcccgccccggctccgctgcagccgggccgccccctgtgcgcgggcgacctccgggcgttcgctccctgcccgcggaggaggccgtgggttgcgagcgggagcctggggaccccggctaggcgtcccctgccgctccccaaggagggagaggacagagtgggcagagtgaggaggttggggagaggagcccccaggcgtcgatcaggcgaaggagggagg

SEQ ID NO: 53787 - DNA, 654 bp, Homo sapiens
aggagacttgcaggtttcaaaggacagaatttctggtgatttaacatgttttgaaagccatctaacacaataccattcacaaatacatcattaaattatttatttatttattttattatttattttttttgagacagggtctcactctgacacccaggctggagtgcagtggcaagaacacagctcactgcagccttgaactcctgacctcaagccatctcctgccttattaaatgattttgccaataacctttcacattagctttgtgctctgtggagggtatgtgtgatgcaagagttctagagtcacagaaatgaccttagctcacgcctgtcatcccagagctttggcaggccaaggcaggaggatcgcttgagcccaggagtttgaggttacagtgagctctgattgtgccactgcactccagcctgggcaacagagtgagaccgtctctaaaaataagaaagaaaaggaaagaagaacaaagtgacctcaaaatgtgtaatccaattctcaaattgtatgcattcgatagacaattgatatctagagaaatgtaataagtaatttcttgggcaataagaaactttgaaggcaaggaccatggtgtacccacttctagggcgtctcagtgaaccctgaatactcccttt

SEQ ID NO: 53788 - DNA, 587 bp, Homo sapiens
tgcccagctgcttaaccatgtttgatgaaccaatgaaggaagagctcttgccagtgctttttcagaagggcagaaggctgtcctcccaccagagctgcggttcttcacaggctcctagaaaaccacacaggcccttcatcccatgggaacctttgtcaaattcctgtgggtctaggttagaggatatttgagaaagacaaagcagtcacttctgcaaaaaattaaccaataccttaactcagagtccagacactttgacccttaccttagagcagtgtgtggctcatctgcagccaataacatggaattagaggtggctgctgtccttcctctctgttggatagtcttattctgagaactgaatcatcagtctcaagacatggagataaaaggaatggttctggcatcagatcgctgaggttgaaagccagctctgtcattcctggaggtgactttgggcaaatcagtttgtcttaataaacctcagtttcttcatctgtgaagtgggtctatactagtctaccacacatgggtgttgtaaggattaaagcatataaaccttgcaaaacatctaacgcaatgcctag

SEQ ID NO: 53789 - DNA, 906 bp, Homo sapiens
agcaaaggaaaggaaaaatttcggcttgctgcttatcagttgctatttctttctggataatctctttcagataaataactgacgtggcagacttcctccttccctgcatggcctcctacccaatttctccccaagatggcatctggtgactaggggtctgtagactaccaggccccacgaagagaccagtgagagagaactgctggcatctggccttccttcaaggaggaaggaaatacgatgttggtatcatagtcccagccatttgcctctgtccataaattctgtgtgctctccggtttctctgttctaaccccaggcttctgtcagtctggtgaccccctctctaggggacacagtaagttctagattccctacaaactctacaaaggatgtgagagccaggagcagtaactgccacaggccactggcccagacacttctccctgccaaagttctacgacagctctctggcatgtggaacttggcatggaatgaaacgcaggcatcacgtggtgtcctgggaggctcagagctgttctgccgcagggagatacagaatgagaaatgattggccaggaattaccaccaggcagctgatgacccctgagtgggctttcgctcaccttccctgaaccccacccctcatacccagctctctctaacccaaagttcaagaggaaatggccacaccctctcctggtatcaaacaggcaggtgcaaacttggagcgctgagaaacaccaattgccctctgcaatttaatgcacatttagcataaagcagtgaagggcttagctttggctcctggggcaggaaacaaaatttatgtagctagatcatttgcctttggtgtatgctttatactattaataaactagaatgggctctgagctctgtgctctc

SEQ ID NO: 53790 - DNA, 1422 bp, Homo sapiens
gagtggagttgggataggtggaggggggcagggcgagggaggagcaggagtgggaggagctgggagatgcagagatgggttggggagggtctcatggaagggaagggagagaggaagggggagaggaagggggaggaaaggcaaggggaaaaggagaggaagagggagggggagagagaggcagagtgggaggaaagaggggcggggacctgggagggcccagggcacatagtgggaggagcaggtgggaaggagggaaggagggaggggcaggggagggagaagagggggagggagacgaggggactggcggtgtgggcggagcgtggggagggaggccgactagcgcaggcggacgggagagaatgggggaggggtgggatgggagcaggggcagagacgggcagagggcagagggcggagcggcgccggagcgggcgtcatggcgcggctcctctggttgctccggggcctgaccctcggaactgcgcctcggcgggcggtgcggggccaagcgggcggcggcgggcccggcaccgggccgggactgggggaggcaggtaggacgcgggtcccgcaggccccgccgccgcctacggctttcggcttcatttcaccggctgcacccgggagcctagggccggtccaggccgggcgctgccctcctactaagccctcctcggcgcgcccctccccccccccagcccgaggatctgggacagtggattgtaaacttggtggcggcagggtggggactgacccctgtgagaatccgaggaaatgaacaaatgatccccctaaatgtgcgcataattttttttttcttggctcggggagtgggggcataagtggggctcgggggcctctgacccctatcggggactccaggcgaaggcccggggcctgggctgtagcagcccggcccgcgcgcccctgcgaaggcccctagtattttgcattgcagccctcttcgtagttccgcgggcttccttccagcatctgagaagcaggcagttcagacttggggttcctgtgagtgtttcctgccctgctgacttcccataaatgtgtctaagagccagggagactgggttgatcatttgttccttctttaaggtgacagccattgttaatgactgagacagagaccagggcgagcctgtgtgtgtgtgtctctctctctctctgtgtgtgtgtgtgtgtgtgtttctgctaaatacttttggatcctctcttggatctgggtacctgcacatttcaccaagcaggaaggagtcacctcgggagacctgtgccagctacccctgtatttcagttctatttcagggtaacttagtgccccaggggattggcttcctgggcggttgccagactgacccactctgaatccaattttatatgtgttcattgaagacattcaga

SEQ ID NO: 53791 - DNA, 868 bp, Homo sapiens
agtccaggcattcaaggctgtagtgtactttgatcatgcgtatgaatagccattgtgctccattctgggcaacacagtgagactcggtctcttaaaaaaattagggcagagggagaaggtggtgtctgaagaacagatagtcactctctaatacgtgtaacaaaatatagaggtgtgggagagggagctgggaacccagaccaactcaagccttaggttcaaagcgaaagaagtacatgttttaaagctcaattcatgagagtcccactgacttttagctcttctctaattcccactttccagtgtcagctactatagtgtactgcctgttgagtcacactaaggacagtgcttccaggagacaatagggtttttttctaagcccattccacttcctgcctgaaaggagacaggaagataaagccagcttcacagactgtaaattccaacctttgtacctgaagttggtcctcttacctatctacaggaataatgcaagatctttgccaaagctaagaggagggtgttttatcatgatgcgtttagtcctttccttgacaaatgtcaatgatagccagagattaggtctcacaaattcccccacgggaccagagtttagatctgggaggaggaacccaggacatacactctttctagcaaagcctgttcttgctctttttagtgcctctggctaaagcattctctttttaaatcatttgaggtggccaagaagagacaggatcctgaacagaagtggcaaaaaaacagacaggaagaggcttgtattagtttgttttcacagtgctataaagaaataccagagactgggtaatttaggaaggaaagaggtttaattggcttacggttc

SEQ ID NO: 53792 - DNA, 737 bp, Homo sapiens
cagttaacaagatggtcaggaacttggaaggaacagattgagagatggatgtcaagaatgtctgggaagagttctgtggatgagcctttgaaaatgggcacagactgtaaaggtgtttgtgcggcatctgaatgcccacccaagggaatcccctacagagaaagtagttaaataattaggcaaaatgacacactctgtggatatcgttcagtttccttttgcagccacccctgcttgcttgatggccctcgaacaaaatggccatggtgtcaggagttcaacaatgtggttttccccttaccaaggctggcctggctaccacaggtgctgagtgtctaactagtcaacagcagagatcaatactgagctcccaacgtggcagcatgaaccacagggaatagccagccacctagcgacaggttgatagcactgaacttcttccatcatcctcaccggaacacacatttattttggatatggatttgcattccctgactatactgcactggccagaaccaccgagcatgaacttacagaacatcttatccatcatcacggtattctcacagcaccacttcccatcaaggaactcatttcacagcaaaagacaggcagcaatggattcatgcccatggaattcagtgatcttatcatataacccatcacccagaagtggctcgcctaataggttaaatagcttactgaagattcatttaaggccaggcacagtggttcac

SEQ ID NO: 53793 - DNA, 2012 bp, Homo sapiens
cccatctctaaaaagataaaagaaaagaggcagtagtgaatgcaagcagggatggtagcccatgaccagcagaggccaaacagactttaaggcagcattccgttctccacacccatgccggaagctttcctgccacgcaagctttccgagcatgctaactcgccccaagcagctcccatcccgcagcatccactgcagccgctgaggagagtggcgcagcgcagaaaccagtgcccagtgcccaggtgggggaagcggtccgtgggagtcacgtgggcgggaggcccagccaggatcccaggactgctcaggcctccgcgcccccggcctcgccccgcccgcgcgcgctcgcgcgccgagggccacgcccgtgacgtcggcggagcgcggtagggggcggggcgcgggccggagtgggcggggcgagcaggcgcgactgaatcgggcgccgcaaagagccgcgcattccagtgagtccacgtgacgcggccgcgaggcctgaggtaaacaaccgcggccccgcctcccgggcctccgcgcgcaccgcgctcctcctcgccggcgggacgcgctccaacggggcgggcggcttcctccgtgagtccccagcggccgccgcgggccgaagcagctgcagcgggcgcggcgccccgggtctgcgggccgagcgcaccggcaggggtcgagctcgcgtcccgtccccgcccccctgcgctgtggcgcagcaggaatttggccgggacccgggcgctattcgcggctgctgactcgcggcggccggctgcctttcgctcatctctattctggggccgttgggtcaccgcgctccgccggccccctcccccgggcccggagggtgtgtcccccgctccggggctcgccgcgcctataaggggccgagcggcgggcagggacatgcagctctacagcagcgtctgcacccactaccccgccggggccccgggtcccacggccgccgcccccgcgccacccgccgccgctacccccttcaaggtctcgctgcagcccccgggagccgccggcgccgcgcccgagcccgagaccggtgagtgccagcccgccgcggccgccgagcaccgggaagccgccgctgtccccgccgccaagatgcccgccttctcctcctgcttcgaggtggtgtccggggccgccgcgcccgcctccgccgccgccggcccgcccggcgcgtcctgcaagccgccgctgccgccgcactacacgtccaccgcacagatcaccgtgcgggccctgggcgccgacaggctcctgctgcacgggcccgatcccgttcccggcgccgcgggctccgccgctgccccgcgcggccgctgcctcctgctcgccccggcgcccgcagccccggtcccgccgcggcggggctcctcggcctggctcctggaggagctgctgcggcccgactgccccgagcccgcgggcttggacgcgacacgggaggggcccgatcggaacttccgactgagcgagcaccgccaggccctggccgccgccaagcaccgaggccccgcggcgaccccggggagccccgatcccggccccggtccgtggggcgaagagcacttggcggagaggggccccaggggctgggagaggggcggcgatcgctgcgacgcgcccggtggggacgcggcgcggaggcccgacccagaggccgaggcaccccccgccgggagcatcgaggccgccccgagtagtgcggcggagccggtgatcgtctccaggtcggatcccagagacgagaagctggccctatacctggccgaggtggagaagcaggacaagtatctgcggcagaggaataagtaccgattccacatcattccagacggcaactgcctctaccgagctgtcagcaagacggtgtatggggaccagagcctgcaccgggagttgagggagcagacggtgcactacatcgccgaccatctcgaccacttcagccccctgattgagggcgacgtgggggagtttat

SEQ ID NO: 53794 - DNA, 1054 bp, Homo sapiens
tagtttatgcctcttttatgtgtttatttatttgggggactggattaagagactggctaatttttgtatttttgagatggggtttagtcatgctgcccaggctgctctcaaactcctggcctcaagtgatccacccacctcggcctcccaaagtgctgggattacaggtatgagccactgtacccagcctctttccctcttttggatggcagtgtttagtataccctttgtagaggggaaaaactttagggcgcctttcttgattcaggagcctcagctgcatctcctttttctcagaaagactccaggcctcaactgttactcatgtggtcattaagatcgtagccttttgtatgcaaagacaaataaaaccctgtagcactgtctagcattaccagctcattcttacctttctggctgaagtttcttcatcacttttggccactgtagacctgttaccttactacattttgttttatagcaggaacgttttccggttttccctgtaaagggttaggtaactccctcattggcagaaggggaagtccatttacttgattctgcaagcttggctatcagataaaagtcttggcttagaaagaaaatgacttaaacagtaatagaactaaacaattacagagtagaatataaatgtttactttataaacatataatatgttcactttaaaatcagtattgtgcttttgactgcattaaactgtaatttcaggaaaacaacttactctttactgaaaatgtttttaccctttcaacaggtacttactgaatgtctactgtttgcacaacagcatgtgatacgcttcagatttcagcatgttaactactgacctatttctctctctcagccaaaggataaacaaactgatgtttgaatcacaaaaatgataatcaatgctgtgtgtgtcttccctgttaaaaatatgttcttaaaacaaaacaagaaagagtgtaaatggtgctggaattttggtaatcttgtcatgagcatactacccattgaaagcaattagccctcttgttcttttttttttat

SEQ ID NO: 53795 - DNA, 1529 bp, Homo sapiens
ttgcccttcctgagtgaggcaatgccttgccctccttcggctcgcacacagtgcgctgcacccactgtcctgcgcccactgtctggcactccctagtgagatgaacctggtacctcagatggaaatgcagaaataacccgtcttttgcgtcactcacgctgggagctgtagactggagctgttcctattcggctgtcttgaaatgtatcccccaattagccctcttcttcttttctaaatggatatgtagcttagtggagtaccaaggacttgcaacttgaatctgattttattttattttttaaacaagtaattatgactcaagagaagaatcaatggatatatctatacttatacatatacaatggatatatctatacttatacaaaatgaactcatgtgtatgtttgttttgctcccttagaaataatatcctgttatttgtaccaatgttccggaaatctgcaagcctggttaactcagtaagagaatgcacatggacgccagttcacatttattgatttggtagagagagaaagcaagaatacagtagtcccagcatatttagtttttgctttctgtggtttcgtttatccttggtcaaccacaatctgaaaatattaaatggaaaactccagaactaaacaattcatcagttttaaatgtcacgctgttctgagtaacatgatgaaatcttgcgtcatcctgctccatcctgctcagggtgtgactcatccctcagtccagcggatccctttggtcacttagctgtctcggttgtcagatcaactgtcctgttgtcgcattgcttgtgtttgtcacccttatttcacttaataatgatcccaaagcacaaatagtgtactggctattgttgctaatcccttactgtgcctagtttataaattgaactttatcatagggatgtgtgtattaagaaaacatagcatatataggattgggttctactaagggtttcgggcatccacaaggagtcttggaacttatcccctgtggataagagggaactactgtgctgtgagtaatgcctgtgtcctgtcacccttctgaaaggtcaccacaaacggggtttgaagcaaagcattgtcttgagaagaaataatcagaattgaccaaataattcacatcatattgttaccggggggtccttgctctcagaactcccaagatggttgtgggccacttccaagatggcagcaagcctcttgttctctaacctggcattcttggcctcatggattccaaggaatagaatcttgggccaggcggtgagtgttatagctctattagaagccatgggtcacggaagagaaccgtagaacccagcaactagtattcagctcgattaggacgaacccaggcacttaactgtgcagcaacaatggcaagcctttatcccattgggcgccccgctggatcagaagcacagcagacaccctgccggatccggagtggtgaaagtcagtgacgggtctgcgacagaggcaaacagcagtagtggacggcga

SEQ ID NO: 53796 - DNA, 2348 bp, Homo sapiens
ctggacctgaaaggctgaacacagcagggccctccttcatgaacattttgcacctaaggaaataataaggttaaaactagattcatctggcctttgcccaggggccaccaggacagaaactgtgtaagattagttcctccttaaagcaagattgccaggtaattctgttgcaaagtcatagagaccttaagttatctgccctgcaaatcccactgcctctattcaggctgccgaggcactgctttaattttttgaaagattcaccgcgtcttcttggatttcaagaaaaatcccgttaagaattgaggggctctcttcttcccctcctgacgtgagtgtaactcacttcctggtatgtctcctttccttttggcctacatcctttgtctgttaggtgcttccacatccttatgtcttaaatggccaaaatacgtcacccccactgccaaaacacacaggtcactcgaggtcacaatctggaacataggctggccattgttcagcacacattcttgatctaaatcaatctcaaaccttgctggaatgccctgtaaactggggcaaagtatggtcaccagactaaccattgtccttttttacccctcctgtgacggggctactacaggttacaaaatcgcgctcttcctcctagctactgtgttactctgagatatctgacatcgcagagctaatgttgcctaaattattttcccatcctcttttttttttttttttcggacatcatgcctcctattttcactctctgggaactctgccagtttttcaaggactgggtaaagaacaaaataaatatttgtaggtggtttaaaaggagaagtatgttggttgtaactctgcctgtccaaagaaatgcattttcactgtctttcagatttttggagtcgttaactgggagagcttcagaagattgactttactagtttacctttcagatttgtgattaagggctgggtgtgtgtgtgtgtgtgtgtgtgtgtgtaagtgtgttgggggagggaggagtctgagaaagtgagcaagtacgtagaaacttttttttaaaaagtccagattaagtgattgaaatcgactgtgtgcaaatgacgctatacctcttcatagatgttaatcgggccctaaaaagttagtgccggaaagtgcttacttacaacactcagcatatactctttctttcaaattgtttgggatttttttttaagggagttcactgaaatttgggaggttcaacaggttgctgttttttaatatgtggatcacccgatttgggaggctcactctgcctctgagattaaagagatgagggcactggctcccagcgaaggctctcggccttaatcatgtgtgaaatgttttccttcctcggctgcagagcctcggtggtttgcagcagtggaaccaggcaggcccagttgtgggtaggagaggccgtcacctgttgaggcctcccccccacacccccgcatcgccctgccctggcagagcccagcccccagtccccggagagcgcgcctgaggacggacggacggacggacggacagacctagggacggagggccaggggcaggggagatccaagaggccccgcgctggaatgcagttttctcgggcgagggagactttgcaccggagtggaaaatagtttggggtggggtttcgcaccgtcccctcctccccagccccgggccccctcccaggcgctttctgggagcttttagaactgcgctctgaagtttccagagagcgaggagcttttgcggcaggcagagacaatggaagaaaatgaaagccagaaatgtgagccgtgccttccttactcagcagacagaagacagatgcagggtaagtaacagacccattcaaagatggagttacagggacgcgtgccccttgccgcttgctgctttttataaactgcagctctgggacccggcaaaggaaaaaaaaaaaaaaggcaatttcttgggatggtacattttccaaactgagtagagcatagagaactgtgatttcttaggcttgactttatctctggcacgattttcttaagcagcaaaagaggtggtggggtgatgtcacatttgtagtgcagtgagccatcagcatgagctgtatctctaagcaatgacaaataaatcactaagcagcttttaatcatttccccccggggctccagccacgggagaaaggagctgtttttgtgaaactgtctctaggaccgcagcttccattcattggttgggggattccatgtggcagatgcatgctggctgcaaagtttgtgcagaattttagagttaaatcacagaaaccaggcatgttttatttt

SEQ ID NO: 53797 - DNA, 1117 bp, Homo sapiens
catgggctgtttcaagagtttccacggaatgaaggtaaacgcttaggatatcgcagcctgagtgagaggcactgcaaagtgtggccgctacttgaagttcttcatggtgagtggagagggaatcctgagcgcatcctggattagaaaaaaaaaagaagaaaggtggcctgaaatatgatctgagtatatctggaaatacgcagacatctagtacttcacttgcagcactctgtgaaccagaaggccaatttctacatgctacaagctgcacttcaagatgcacccaaaatgcatgctcgggaagttgttttttgtttttgttttgttttgtttctgagacagactctccctctgtcgcccagccaggagtacagtggcgtaatcttggctggctgcaacctctgcctcctgggttcaagcagttattttgcctcagcctcccgagtagctgggattataggcatgtgccaccatgcccggctaattttgttgttgttgttgtttgttttgtttgtttttgtttttagtagagacaggatttcaccacattggccagcctggtcttgaactcctgacctcaagtgatctgccagcgtcggcctcccaaagtgctgggattacaggcgtgagccaccgcgcctggctgggaagtcttttttaatggcaataaccaaatgaactctcttgaccttgctgcctctgcaggcactgccccgccccggcccttccactctagaggaaagcacctggcatttagcatctttacacacaggaaacaacagatatgctcagggacttttcctctagcttgtaaccagggatggctgttgggcttggcagccgtcaggctgagagtgactcagcttaaaaggtttcattgttgatatctgccctgagcattcccctttggacttggagttccaggatgtcttgtgtctgtgcttcagcatctgaagccccttgttgcctgttcttaaggtagactgcattatcaacggtgtcttaaattaatagcttctctctactgactattcacttgtcacagctgacatgaaggttctcagtcctgagtgcctattaatgaagctcacagatagagtgcagaaaccctttgcaa

SEQ ID NO: 53798 - DNA, 2189 bp, Homo sapiens
cattcccttcggttgaggtaaagacgggaatcttttttctgagctgcacccagcacgcttcaacatcttcaagcagatggtcagcctaaaagtgtgaggatagctcaggttgccctgagaggatgcttgcaggagatggacagagctaaatgcaggatttcaggagaagtatgcttcaagaaagagagcatggcatctatgaatttggcagaagtggacatatagcttctgccaaatgatgagttgtaacttttaggcaaattgcttggactttctgagcttttatttccttatctgtgaaatggggtcatagtatccatctgacaagagatactgtgctgatgagatgaaatacatacacatggtttctgacatatggcaggcatcctataaatgcatttctctcatcctcatcccttcttcataaaaagggagtttgggaggcagagtcccctggacaacctctgggaatctggagcagccagcactaacttggagcgaggaagcctgtgccaaagcatgcggaatctctagaaaccatgtgggcttttgttcatcatcatgccaataaaacgccatcggatattaagagaattccttctgagtctaagcatttctaaatacctttcctgaattgagaaagcaaactgtgtaaaagccaagcgtgaaaagactattctgtttgcaaaggcatttttcccatcctgcctggcttgtcacgttctgtgactggactcatgcacccagctggcagctgcaccagccagaccctgaggtaactatagtttaggcccattttttttcctgctccagagactacaaattctatttcaagcacacgcatgtacagaatgcagatgtggggatgaaaatcagaccatcttctgggagcgaggctgtgatacttaactgtagggacgccattggtggcctttctgcagtggcctcgcccaggcatggctggggcatggacctcaagagcggttttggccttttgatgtaccatagcaatcacatgggacaatcaccacacatcccacgtggggccaagacattgcgtgatctgtgatcagacaggcttaaaaggtattctccgcattctgaggaatttgtaacagcatggagattctggaaaactagttccctgaaaaagctgagggtcaacacagggatgagtggagaggggacatggagcccttatgcctgacatgaagggactgctctagtcaaggaaacagccacttcagaatgtgtctctactgtggatacaaaccaagggcgaggttactaggctggttacatcatctagcaaaagctcttatagctcagatagacccacaaatgagacattccttttcaatgactaataaatcattcgtttattcattcaacaaatatttattgagaaactactatgtaacaggtagtctcataggtactaaggatacagtagaaaacaacaacaaacttaaaaaaaaaaaatcccttagccccagttacttgagaagattgcttgaagccagtagtttgaggctgcagtgagctatgatcataccactgcactccagcctgggtgacagagcaagaccccatctctttaaagataaaaaaaaaaaaaaaatctctgagctcatgaaacttacatgttagcaagagaaactgatcataagcaatatcactaattaaaatatgaattataacatagagtagaaaatgctaagaaaacagacataaagcaagtataagagtaagaaatagtatggagaatggctactaaaattctagctgaggaggctagggagggcttcactgagaaaccaactttatagagacctgatggtttggataggtatagacctagattgaaaatatttccctccaggttttcaaaggcattgctccattatcttttggtttctgaagttcctgttgagaaagctattgcctttctgatacctgatccttcctatgtgactttttacctgttctgggggcttttaggattttctgttttccccatcttctggaatgtctcagtgacaaacctgtgtgttgagtatttcataaacttttacaatctgcgatctcatgtccttcagtttacaaggaaaaaagaacattcttataatattgttttggaaaactctgttttttctgatctcttttacccaaatctccattactgggga

SEQ ID NO: 53799 - DNA, 742 bp, Homo sapiens
acattgcccaggtgggtctcgaactcctggcctcaagcaatcctcttgccatggcctcccaaagcactgggattacaggcataagccattgcacccagcccttgaatttttgaaaattaggctctttaacacctgcttggacttcaaagaacgaaggtgagtacttacacaataaccaaacagtgcattccttggaaattccaaacctagatctcttgttacatgcttgccaagcttgtcctgaacgttcctaagtgcagcaggaaagaagtggctcagcttgtgctgtgtgtcccctgagtcttgacctgtgactaataactgtttcctttgtgtgcaggggttctctatctccagtatggagatgaaaccaagcagctcaggatgccgaatgaaatcacaagtgcagacacaatccgtgctctcttcgtaagtgcctttccacagcagctcaccatgaaaatgctggaatcgcccagtgtcgccatttacatcaaagatgaaagcagaaatgtctattatgaattaaatgatgtaaggtaagttgtgacatcattttttgcctgccattttgccttagagttttttttgttttttgtttttttgtttttgaggggtttttttttacccactatattgcatttagagtgtttttttgttttttgttttttgttttttgttttttgtttggtccatcatatccctttcatagagtttataccaaattctaatttctttatat

SEQ ID NO: 53800 - DNA, 4413 bp, Homo sapiens
gataagagaaggaattatttgtaccatctgttgcaagtggcataaaaaagatatcattttacaaactgtaactatttttggtacaaaaggaggttgtccttggcctggggaacatgggagtagcccagcagaagattgagtgtcagtgagaaggacatttttcttttatccatcctacagcactgcacaattattgattgtggcttggaagcgaaatgatttatttaacattacttctctattctgctccagattgagatctttaatcactgttggacccaggactggtcagccaggtctggccactggagggctcagtagagttcctctgtcaaaagatttatagaaataacgctcatcttaaatatagccataagctaaccgctgactggaccatctctttcctgggaattaaataattttggcagcagtctgtctgtctgtctgtctcatgtctgggagacattccgtttacaatcaaatgaaacaataggctaactaaaaccttacaaatggcaatcttcccaattttaccaatgcaaacaagatgaatttgaaattttttcaacgtaataatcccttcccttcctaatatcatcttcatatctataggcacagttcagattttctttgagcaaatgtaatttttttaaagccaatgaagaaatgaatatgaaagggaaaataggaatgaatatgtgtcacaatactattggccttgccagagcataaaaattacttcctgttgaggtaatcctgaatatttcctagcacgtccattcttaacactgactcagaaagaatacattgcttccactttgcttttaggcctagtcaatgaaaggaagagggaaaatgaagagtgggacactttatacactgctgggaagaggaacgtagtaatggctgtaatgtcccaaggtagagaaggcagagaaggatctggtgatgtaatcaaaccaaagcgtgggggtgttagtggttgcacacactcatactgaaccaaactttatggtgagttagcctgaaagagcccttctctggagaatgtgccttccactgagataaagccactgggtcctagatggcaccaggatattgtttaggaaattggcttgtctggttcattagcaggtactctggggcctttggagattgaactccacctctcttgggtgagcttggcgcttgctaaagagcatttaactcatcctgattcaccgcaggattgggctggctttcaaactcctgacagtgaattactgctcttgtaatgacgaatccatgcatgcatgctacagacagtgccctggagcattttgaaagtgaaaggaaattgctgtgaacctggcaggaaggaagagaagggagaggtaaactagacttcttctcgcattgaaccgaccgactctcattgtaacagggtcaacagaagccacctctctctagcgtaatggacatggtttcttgtggttttaccctttgttgcttttttttggagccagggtctcactctgtcacccaggctggagcgcaatggtgtgatcttggctcactgtagcctctcaacctctcaggctcaagtgatcctcccacctcagcctcccaagtagctgggaacacaggcatgcaccagcatgcccagctaagtttttactttttgtataggctgggcctccctatgttgcccaagctggtctcaaactcctgggctcaggggatcctcctgcttccacatcccaaagtgctaggattacaggcgtgagccacatagcacctagcccatagcagatatgggataacatgtcgaacatggcatgacttgcttagccaagcagcagagagacagagagttcactgtttgtttcctgggggacagcctggccccagacccttcacatacagtcactgggacaagcaaccctgcccataataagcaggtaaagaagaattataagagccatgtctgttagcacacctcacgccataagacagggtctttggaggatgtgataggggcggcatcgtggcctaatcagacaagggggaccactcctccatcccccttcctggaaagtacgtgcttgactgaagacacaaaacaaaacctgcctaatgtataccagattcatcagaagctgatagtgtgtgcctcccatactctggtgagaaataacaaacccttgctgattagattaaaagtcaagagcttccacattccttctactgttttccgacctcttaggtggcatctgttacaaccacttcatccaaatatttttcctagtgagacatcttaggagggtggcaatgtcacgtgctccatttgcccccttctttaataaccacaaagtgatttgatggcagtaaacagtttttttagaaagcctgcaaaggactggatttgaacttgaaagacgtcatggaattcttttggtcagcaagaacaacctctaaaagccttaaaatgttttaaaaatgcacaggctgcccagagcgtggtagttgggtgtggcgtgaagccagtggggcttccagcccagtgagtggagttccttgtcaccgtattcccacttggatagctttcggttccacccagtccccaagggctcagaaaacatgatggtaatcagagcctgcctgggagcgcaggagatgcttcctttctcccccaccttttgctagcaatgcattaatgccagtcctccgctgagagctgcacaagtcacttcgtgttgtggacacgcaccttcttgtacctgttcccctggaagataccagctgtgctgacagcggttgtagccagaggtctctggggatcgcctaccttctcgtccttcatcttgtttagggtggggcagaagggctctggtttcctttccagaatcccctctgcacagccctggtttgccctctctatctttccttctcgtttcagatgtattttccagggtgattgcagttccttgcccggcgctatgtaggactgattaatggctgctacccaaagttcagcgtggtaaaacagggctggttaattaatagacagcctccttatctccctcatgttttccctctggtgttaaaccaggagaagaggcttacgtttccttcagctgccaattcccagacttcaaaagtctggcagcaaagtgggtattgggtgctggtctaggtttttgcagtagcacctttaagtcaacagaaaactgatctgaaagttggctcctctggattgagtatgttgggttttttgacagtttcatttctcggtggctggttgtttgccctttctaatgatcctgtttgccttcagcgaaatatattttgtaatatttcctttgctgttaacccatttacctaggccgtttaaagttccttcattggtgttttccctgtaagcagttgttgaaggactgagtcacccgtgaggtagcctgtggttggatgtgggctgaggttattcagtgactaatttccaaggggaggagaaattgacttatcacggggaaggttactttttatccatgccagtgtcagcttctctccgaaaactgggtaatacgaaatggtctttattggttgtgaacactcgagctgagaaacattttaggatctttgtgtcttttgtgatgattttgtttctgaagaggaagctgtctaaaatattcaagtgtgcaaccaaggatttagatgaagccagcaaacaaaggaatcatgtaatcaggacctgagcgaatgtgcttactcacggcgttagttacacaggtgatttccttaagaaaaagtaagtggctttaattctttgagggtgaaagagtgtcttaagattccatttcagttttctctgcttacttcattgtgtggtctgattgagtggtatgtttacaaattctagacttggaagggtggggtttgaaatacaacaaactgtacataatattccttttccacaagcaatatatatatatataaatgctccacagacatgattacatgaggcagtttcccaagatgattttaaacaaatattttttatactaggttttttttttctggaaacaattttaatatgttgtttcttatcttacgttcaagaaacttctgaatgagtgatattcgatttgacttatggttcttttgggaaataatatatagctacatgtaagaatttctaactcagacttcagatcttaatttgaaatggccccagatattttctggtgtttcagaagtatggtgtaaacagcattttgatccgtgtgcagtctgtgggcagggacacctgcctgtcagcctgctattatgatgaggctcttgaagaaactaccctctttctaagaactggaagaactcaaataatgaagagacaatagaggtttgggcagtaatggaaagaagaaaagacagtgc

SEQ ID NO: 53801 - DNA, 1197 bp, Homo sapiens
caacagagcaagatcctgtctcaaaaaaaaaaaaaaaaaaagtctgtatatactcatgcagggccaacttgtatcaccagtaaatacttcctctgtctccttgtccatcctcaaagctaaagagaccttggagaatactgggtcctaatagctgactttacagcaggagaaacagcaaggagacttcctaaaggtccaaggatgggagctactctagttaaatgacatttcgctatcctgctgccttaagggtggctccagccattgctcttgacctcacagccacccactgggccactccacctccatctctcacctgacttgctacagtggtctcccaaaaggtctccccactcagtccctgcccaccttccgcctgttctcattggggaggccagagtgaccccgttaaaacgtgagacctttcatgtcgagcctcagctcaggactcgccgtggcccccctcacattttgtctttgcaagcacaagtaactaagacaaaacaaaaaggaaatgcactagagagaccaaatatagcaaatgtttttttcttttccctaagagtcattattttatttcttttgagtccgccctaagatttacagctctaaagcaggcgagagtggggagttcatttccacagtcaccatgaggtccactcaagagaccatctctcctgacaccgtctctcatttgaaggtaaattagctggccgtgttcagctggcccataacatgaagcaactgctattcctacctgtttgtacctgtgcaaaaaatgagatgtcaattccagaacacaaatgttccagattagcctcagggaagagaaagaaaatgcaaaacaggtgatttcataaagcagggtgtaggcttgccctggggagtggcggctctaggcacccagcagagagccaacaggaagtgaagtgcctcaccctagatgtgagtcactaagggaggcagctcagtgccacagagagccctggatccgagaaagcctgcaagctaattgatctgtttccctaagaaaagccctgcctggctaagcctcagtgtcttttgtcctaataaggggatgataatctactcaagagttctgtgcaatttttatttttatttttattatatttatgtgtatatatatgtatatatgtatatgtgtgtgtatatatatatagatatacatatatattg

SEQ ID NO: 53802 - DNA, 956 bp, Homo sapiens
caagtagcccagtgcaactgctctacctatgtattcaagttcagtaagttcatatacgcacgagaatatacaggacatgaaaatctccagcacacagaacactgcatggcacacagtagatgctcaataaatgtttgctaattaaaattagagccctggaaaatgctaatagtaaaaattcccaaaaccagcttggagagttgtttcagggacaaagcaatagtgctacgactaatctgtactatttccctcaaatagtataaggaaaatgctgccactcaacagcagtttaagtacagtaccactaggtgtcggacatgaatcaaaattttctggcattatgaactatccaggcaagaaagactgtggatgggtgttattcattcaacaaatatttaccgagctcttacaaatgtgccaggcattgattatcctacaatgaacaaagaatcctggcatctgccttctaaagtatttaaagttcatgtagcattgtacatttcacatgtaacatttcacacacagtattatcatatctagattcatagccctattatttctgttatgctagaatttaatttctctgcaaactcagaaaaatttgttatggtgctctaaccaactatctttctatctgactttatcacctctcaatcctttaaccaattaaacttgcttgactttatcaagaccttccattccctttagccttctccattcttctaaactatcagtctccctccagaaattactatcatgctcacttcggcaacatatatactaaaattggaacagaagttactttctttcttactaagattacccgtggatcagtatttcaacaaaattgaccagtaccctcaacttcctttccccttaacctttcaaagcattcgatgtgccaatctctaactacggagaattccaaaatacacctgctctgttcttgttcttgg

SEQ ID NO: 53803 - DNA, 2310 bp, Homo sapiens
gaagacagtgtttttatatcctgatttacttttgctttatacatcatagcagttttgaattaaaaagcaaatatatacatacacacttatgaaacaaacctgaccactccatgcacaatacagattgcacaacaaactccaattgtggttgatcatgcagtctaaaatcctgaactgggccatgactgcctatagcacagtctgcatctcttctctgactcagcttctgtcagcagagcagcggggttacgagagctctgcagtgatgtggtccacaaataagatcttcccctccctttcctgtctaagcagcaatagctaactggcagaacgacatcatcttcccaaatgtagttcccaccagtacatttaaattattagatcatgaaggaaagttttcataaaattcttactgagtatttaacattatttaatttgtaaaaggttattgctttttccttcttttctgggcatctttagtcattcaatgaaaacacaacctggggaggtggtatataaatcaatcaactatgctggctccggtccacagcaaacaaattccaacacaaggctgtgccatcatcaatgacgctcacactgacttgatcccaagggtaccaaagggtactccgtcctttcttaacctctcagtagcgccacacagagctaacaactccttcaatggctctcatcctgggtaccacagttccagtctctttgttctcttactacttctttaactattacttctttgcaaaaggcaatgtagcaatgtgagaaaagcctagatcttaataagacagatgtatgaccaaggaggctaaagacttatcctttaagcttcaaatcattcatttgtaagatggagacataccttcacgaggtttaatctgaaataacatctgtaacatgcttaaaacagtgtctaacagatatctaataaatgattaatagtttcaagatgatcacccctttctgtctaaatcagaattctatccttgacctccctctaatttcttacacttccataggtgaagtcacctcaacctgtgattttaactatgaattatttctaaagccctcttcaacaccaccctttctcccaagctccaaatctgcgtgactaaacacttgctaagcacatacacctacatactacatgtccaaaactgaattcatcaccttccctccaaacttgcacgacctcctctattccctaatctgcatagtggctgtacaactcatccccctagtcacccaaacagaaaccagagtcatcttagactcctccttccttacctctcatatctagctaccaaatcatgtcacttctcccaaaacatataatgaactgtcctttttccactccaccggcactgcctaaattcagacccccatcaactttctcctggattatcacagggcatctagttggtctcccaaacatcctgtcacccctctctggaatcttgtctgttcaggactaacaaaagcaccttttaaactaaaagctaatcatatgactactctataaattccttctgttgctcctttctgcctgtatacagcagtgtttcccaagtatgttcctacttgttttataggatgcagaatataaactacagttaagtaaaaaaaagtcttcaatagcaaaataaatttgagagaagctaggttaaacaatgctgctgctggaagcttgccaaaggctaaatataaagatcaaattcaaagtcctcaaaatctgaaaactgaggctactgaaaagcttgtttctaactagttcgccttggtggctggtttgtcggcctctgtccgtcccttaattggtggtgttcctcagattctggactttgaccctcttccctccctcaatgacctcatcaactcccaaaactataattaccatagatgctggcttaattgaactctgcctaactgacttgctagaccaaccaaaattcttgatttcctggctaattcttgaatactggctgatcccatggctcaactctattattattatttgtacaaatttatggggtatcatatgcaattttgttatctgcatagatagtgtagtggtcaagttggcttttcgtatatttatcacccaaataacacacactgtacccattaactaatttatcgtcattcacctgctcccactctgtcacccttctgagtctccattgtctatccttccactctctacacccatgtgtacaaatttttagcacccacttatgagcgagaacatgcaatattcaactttctgtgcttggtttgtttcacttaagataatgtcct

SEQ ID NO: 53804 - DNA, 3287 bp, Homo sapiens
aaaaatccgaatgggtcgtgaaggttcgagtgtcagctcctagagagatcctaggaaaacgagaagttaaaggtcatgaactttctccaggcgcctatcactgtcttgcccacatgtccacaccaagttcgcgtttcctcccgagcaaaacaaacaaaaaaaaattttaacgtaaacaaacaaaaagcctataaattcgagggggtgtttaaaaaagagaaatctcgaaactgcccagcggttgcgtcaaacacacctggctgttatgcagccttcaagaaaaaatgttccccattcaagtgcattttaattcatgtctttcctgggtagagcagagggctgtgcatgttgttttctgcatcacccagacagggacacttcggtgaagttttctcccccacgaggctgaaatgggatcacactttccaagccccctcttcgctcccctccgccccccaaaaacgcaagcacaaagccagcctggctggggccggcgtgggctcggcggcgtctccgggtgactcgggcgccgcccctccgcccctccgccccggccggcgtccccgaggaggcggctgttttccttggcccgcggcggggctgggtggggacggccggggaggcgtgcgcggccgcgggtgggacgccggcgccgctcccgctccagggcatgattctggagctacacccgagcaactctgaagtcgcggcttttcccccaactaccactcgacacggcttcccttcccctgtggccacctagggggaaaaaacgagaaaaagcaaaccaccacccacctccccacgattcccccgccccttcctgaggcgggtcggggacctcgagctcccgaggagagcggccccaatatggactttctcaaaggtgctaggagccccggggcgagacaaaaccgggggccttacccttcccgcccgctcgggcccggcggccgaagcgcggcggcgagctgaagcggagacgctggccgggcgccgggcccggccgggacgcgctaggccgcaggctcggttaatattcatgagcggccccaggcgcccctcctccaaggctggccggccggaccccagcgcccaccgccggcctttgtgcccttccctccgccccgccgcccgcccttgctccgcacacgcgggcgcggcccctccgcccccgccgggcgcccgccgcgggctccctccggccccgagccagcgcccggccgggtggcctgtggcgggaagggagagagcccgcggcaagccgggcactccacggcccgcgagcgcagcgccctctcggctgagacggaaaagaaaccagacacgcaccagaggaagcgggacgagtggatccgcacggggctggccggctccgggacagcgcgccccgcccgcccgcccggcgtgagccggaccccgcagccggacgatcccgcgctgcccgccgccgccgccgccgccgccgccgcgctccgaggccgccgcccccggccggccgctcccaggcaccgccgcgacctgccccggccggccccgggctctcggccgccgcaggagggcgtggggcggggcggcggccgccggactctcccctcgcctcgccgggccgggccggggcccagctccggcgcccgcgaacgccaagtgacagaagcgcctcgctccgtggccgcgcggagctgtttcccgggggcggatttctcgcttcttcctccctggatccacctcctcccactccacctccttcccctcccctccccaggggaggctctggggctgaatattttctgtcttgaataacacgggaccggggaaccgacgctggagaagggggattagccggaggccggagcggggtgctcgcctgccccctccccgtgggtcgcgggacctacaagccctcgccccccagcaccccaaaaccaggcacacaacgctccccgcccctgcagtctcccaagcgctgaacggcagcgtccagggatgggcttgctcccgggaaaggagacctggtggtagacgtctggggtggagagggggacaagcctataacagcgacatctgcagactccagggatcaaaggtcctagattgggggacagggcttggcaaattgtgcccccaccccttttttgcagcgggaaggcaatgaagctgcgacgagacgtgggacttccagataagggagtgtcccctcacgcctcacagcaaaaatctcttcctgtggtgggaagggggaagttagccaagcgttgctcattcagttctttcccttttataaattctgcagagcggctgagcgaatttggcgcggctagcggaactgtggagaggcggctgcgcttctctgtccgccacactccaggtcacagcggctccggagccgcggcacaaccgccaccctccccacccaattcccgggccttgtcacagaccccggcagctcgctccgccccgccgtgcctcacaacatctcccgctgcaaattacccaatcgggagacgcgacgagagaacgcgaaccaatcaggggctggtaaatcaggcttccctccgccctcttccccgcccccgggtgaaggccaccgccccctcggcctctccttcccaccccgccccgctccggggaggtggctccccggctccgagcctcgcggggctggagggggagttgctcgcagtcagaggcagcgtttgtcaccttgtcaccctcatcctcgccccctcccatacacactcccctccccttctcggtgctcctgctggtgctgttgagggtcatttttatcctcactgcggccggggactgccagctattgtgtctgatcagctgccaccgctgtccagagggaaaaaaagaagaacaaaacctagaaactgtggagtcctcttaccttttccttctttctttctacactctcccctgtagacttagaaacatcccttctccttccccgcccgcccaccacctgaggtcctgtttctttatgggggacaggggagcggggacaaaaaacactccctgcagctggagtacctgcgccttagtttttacatcttccttaaagtggaaggtgccaaaccaaatctacaactaaatcctccgcttcaattcgagggaagacgttgacgagatcatttttatatggccatgaaatttgcgtgttcttgacagcctgtcaccaaacaagtcagctaataatcaagaaaagaaaaatagaataaaatacaaggactgtatttcagtcagatggtaatttactaaatagcccagtggctgtagca

SEQ ID NO: 53805 - DNA, 1435 bp, Homo sapiens
tcactctgtcactgccagaagcaacagtacagtattatactctccaatttctctaccagattcaagggttatggcctctttggcagggagagagttactgtcaggaaaatcttactgttggatccaggacaaaccattaaacagttgcataagtctttgtcagcttggagttgttgttctgcaggtgttttgctatgttgacacagctcatgtttgccctgttttacttattgctctttcttttggaggaaatcatagagaaaacaggactcaaaccacaaacggaaacagtttatctgtttagctgttgaactccccgggaaagaagaaagaaatcagttaagagatgcatgagtgaatctttttaaaaatccatcttcaaaacacaccagagagagtaatgaaagtgattgattgattagaggcatttgcaccagagagacacaaatgcctctaattgaggcattaaggttaataattgtgaaagtcccgtcatgctgaaggctctgcagaagggacgcaggtaagtaaaacaagcctctgccctcatggagcttcttgctcaacagagaaaaagagcaggcaagtgactctaacatacagcaaaccgtaaaaatgtggccgtcatcctcgtgacaccccccatttcagcagatcttaataattattcataatcaattatatttacagatcttgtttctaaacacacgtgaaaatcttgtatattttattctaaacatatgtgaaaatcttgttctcaaatacagcatttaatgaggccaatgaacaagctttcagagaataatatattgttgtctaggaagaaaggaaggttttggaaaatacaagtgacctgtccctgtgccttgctgatggccactgaaaaggctgagcatataggaaatagtcttcattctaatgtgaaaggcaaatttgtgtcccgtggaatgagaggtatgcatggtatgagaacaggacccagggtcattgcagggctcacagttgtaaggcatatttcatgagttatattcctccacatggatcattgcttgttagttatcacattcattacttctattagatcagtcctagggtgtttaattattcctgtaattttcatttgttcttccctttcttcatcattctctgtctttggtattgtggaatttcatttcagtctcgaagtccatttgatctcatccaagtgctagttcaggagcatttgtgttctgttttctcagagtctttgtacatagctcagcaattcttatatttcttaaaacttttatctgttggatgaagtaaaggctcagaactatatatgatttttataaacacctacattctaagtctgaatagattatgtgtatttgatattttacagagtaaaaatttgaagattacttttacacaattaaatacttgtttatagctt

SEQ ID NO: 53806 - DNA, 863 bp, Homo sapiens
atgaacagccaactccccaaccacagatggtctaaatgcacggtgactgccacaggtatccacccacaagggccaaagccccttgctgcaattcctgcaccctttatctaaggcgtggttggttgttaggaggtggtggagaacagagtgaaggggtgtgtcctggtgacgatccctgcacagctgcagtggttactggcagtgaaaactgctgcagcaaagggagggaaagaaggaaactgatggctcatagcaatcaatggattactcatcaaagctgcctcattgctggatggaggagggaggtgattatccaggattttttttttttctccttaatcttccaactgctcttttgcaaagcagcaatccacattctagttaggcattaatctctgcctggttagtttggccaactcatagagctgtggacggatgccaatgactcactattacagggccccactttatttttatctgctccagggccacagactgtaaccttcagtacagttgatcatcttgaaaaggtgcatgtcattggaaccttgagcaggaatgaattctaggaaatgtgtagttcaggccttttgcaaaggaaagacccagtcaacttctgtccaagatctggtggtttggtggagtacatcagaaccaagactagaatctcctcctcataaattccattgcagtgcaaactgtcttaggaaaggcgatttttctaggtgctccagagaaagttgacttttatatttttcttcaaacttagagcaaagagaatgacaaattcagagaactgtcttttctcatcacccagtgacaaggtaacaagaaggaaagtaaaatggactctaacaagatta

SEQ ID NO: 53807 - DNA, 1710 bp, Homo sapiens
tcccttttacagacaagccataggtcactcaggagccgccagcgtgtcctagagctcctgcagaggcctccactgccagagagcccccaacctgggtaccaaaggcttcaaatctcaagctctgtccacttgagctactttatttcctagctgccttcaaaacccctcagtgtgctttttaaaaacaaaacttgaagcccgccctggaggagtcaagaggagacccaggaagaaggaggcctccagagcagcacgcgggggtctctggggccctgccgggctcgcagaagcgactccccgtggctcgcggggatggggacggctgggcgccggcgggacgctgcaggagcgagctaccggccggaggacacggggggacgctgggaactcggggtgaagggacgggactcagagtttcgtcagattgggggcggggagaggaggcccgggtccgaggatggaagcgatccccgccgggagggagaacaaagcggtggccctctctctcccccgacgcacggcaagcatttaatctacaagcagggtgccagggagggaggggagcgggccgagccccaaaatagggagtttgcatttaccacgacgcctcgcccgtagtctggcgcctcctcgctgctcccggccatgtttctcccggggaacgcgggaagggaagacggcgcgggaaggagcagggagggcgaaggctgcgtgggggatgggacgtggggatggggacggggacggggacggggacggggacggggacgggtccgccccgccccgggcccgccggcgggaagcagcggcctgacgcggatccatggccccggcgctgcgccccctcccctggctaggccgcgggggcgcggggagcagctgccaagccgctaccgctccccctgagcgcgggccccggacgcgtcccttgcggccgccgctgtcgccgccgccccctgccggatggtcgcgtgcagcccccggccccgccgccaagccccgcggggactctggagcaggaagcccgcggcaggaagagaacgtgtcccccaggcccctgattcccagatccaccgtcccagccctcgggctaacaatctccttgactcctccctgccagatttcatgcacgcgattgtcccaagcagaagcgtgaaagagcctgtgagccagcgtgctcttggaggatgggaagtgtcctggatgtgttttcaaaccttggagccgccacccacctctctccacctccgctcatctccctccacctcccctcacctccctccacctcccctcacctccctccatcttcctccacctttctccaccttcccccacctccctcatcccagggcctggagctggaaagattacacccgattgcttttagggtggcccggatctgcagtgatcagatctgggctttgaggatccagcctttcggcctttcgtcaactgcattcaggggaggagggggagagatttttacacattctctgctttaccagttttgcaagaacatctggtcagattgtaattgttccaggttgcagctttactaaagcaatcgctcttttctgattagaaatccttcttgtatgagtctgttgttcatttcaacccctctcacatgcctatgctccggttctttgtccactcctgtaggttcctgctttttctgggtgtgtcttcattccccaggtccctgacatc

SEQ ID NO: 53808 - DNA, 1519 bp, Homo sapiens
tctgttgcccaggctggagtgcagtggttttatctcggctcactgcaacctccgcatctcagattcaggtgattgtcctgcctcagcctcccaagtagctgggattacaggcgcccaccaccacgcccggctaatttttgtgcttttagtagagatggggtttcaccacattggccaggctggtctcaaactcctgacctcaagtgatctgcctgcctcggcctgccaaagttctgggattacaggcatgagccactgcatccggccttgagttgatttttgtatatggtgagaaagaggggtctagtttcattcttccacatgtggatattcagttttcccatcaccgtgattctctgcattttaaattctgtaatcatcctgtgccactaccatggtgaaaacacaaatatttataattcactgaattctctgccagcctggaggcttttgtcctggaagtatatactaatttttttttgacattttggtaattgacttttgtcaatacaaatctgtaattgaaggaacagttcagtctatccactgaattgttcctagcccgtcactcagtgacactagattggaaatacagaaaggcatttaattctttctgcactagactggaaatacagaaaggcagttaattctttctgagtcttgaaacatgaaagtaaattaaaaaaaaaaacctttcagtctgggaattgtgttgaaatccataaacatctgaaacttagtgactcagattgttagtcacagagtcactggttagaatctggatgaaatccactgtggacaaaggccagtaataatgatgatgatattttgcttttccatagtgccgaacaaaactctttacaaatgttacaagtacaaaagaaagagtagcaagacattttttctgcaagtgctcaggctaagtaagactcttgctaactttgaagtagtttatttttccctctacataaatacaaaagaaatgtagtggcaaataattgcaacaaaacccaacttaagcaaaggcctcattagtattcaattagcatagtaacccgtctttcccggtctcttgtttgaagcagactggatccaatgtgtagtcttggagtaaagaaaataatatctccagagtaggtcttacaaataaagccaaggctacactcaattgtgttttgtattattacactttcgttagtaattcaccttccactgaagaacacacagagggtagatctaagtttgttctcttgcaataatgtcagacctgaggaatatcagcagtaagcgctgggcagtttcagagatatcctcccactatctccccttctgaccggaacaggaattggatagcttcagagcaaaagaataatgtgtccatgtgttcctccagatctctgagtcctggcagtcgacctcaactctcttggccaccataaagcagtcattgaaaggacacagctgcaggaactagggactaagcagtaaataaatccacagggctggaggcagaagttac

SEQ ID NO: 53809 - DNA, 1941 bp, Homo sapiens
aagagccccattttttaaattattgctttactatttttatcttacattaggaagaaaatattagtctgatttgatgcccttaatgtttggaatataaaggacaacaacacacattaacttcaaaatcaatgaatatacttaaaataagctctatagcaaacataactacatcactaaatctcaatatttatagtttatttctaaggaacaaatgtaaatggatcgaattttaaaaatcatttaaacatttttctaagtgtctgtaaaaaggattagaagaagtgtaacatacatgttgaaagattgtccctcaatgcagaagtgggcattgaatttggcacttggtttgaagcagttttctctttccatagccattgtatatgccattcggttactgtggtcagtggttttcttgccttagaactcactttaccttagattctcttctgcgtcttagctcagcaaaatgatcatgatccttctgaacctaaagctcaggccaacattgtcattatctcaatttgtctcttggcttgagaaagaactttcagattctcttcagttcatatcaaacacacaaagcaaacaaccctaaaagtcacacacacaggtgagaacttttcaacacactttaaattaaggcaattcaaagaataggagactagaaaaatctagtttgcatggtaaggccagatgctgaacccagaaataataatttctttctaattccaagattgatgtcactggctttccattctcagatttctcagcatgttcattacaatcagccacagagtacagctgacacctaggtcaccttttccagagaataaagggatgagagatgggtgactcagacttttctgtgggtctgggtattttgccaaagcttaagcgatatagacagaatgccttagcaattgtgaaagtcatacctggactctgtactcattacctttcaccgtgttagtcaagtcatattaccttttgtattctgtttttctgtgtgcagtgttacctgtgacctttctgtattctttttcgacatttattttctaagttttaaaactagtctgtgtttctgagctcttgctttaggcgtagttctcaggttcagaccaattgcctaatcaactgggttgatttttaaaagtagcagactttttaaaatggcaaatatgaagaatggttattgaggttgttattattcaggaacctctttcagttggtttgggaaacctggaacgtacagttctgatgatttttcttattcttagagacattacacatgttctaaaagttttttccaaatctctttccatattttctttttcttcttgcaaaagacaaataaaaagaaaaattttgacattaaaagcaaaccatgaaaaatgatgtaaaacatcaggcaaccaaaaattcccaaaagcccgtttgctttttcctagagaaaaataaaaacggtagaaataatgatctaagaaacattccccatttcacacagcacattctaggaacgtctgaagattaatggagcatgcaggaaaggcttctctatccattgtgaaaagctgtggacagctctgtcatgctgtcattctctaggtttgggagcttagaagattttgccaacagaagtacccaggtttgtaaaacgccatgaattttacctggttttataaagatcagggtttcccaatattagcaatatagacacttggagctccatgattctttgtgtgaaactgtcctgtgtattgtaaactgtttaacaacattcctggcttcttttgctccttagaacccagtagcacccccaattgtaaccatcaacaatgtcttcagaaagtgccaaatgtccatggtggctgggggtagagggtgatagcccaaactcatcccctgctattctttaacatcactgccctagagtaacagcct

SEQ ID NO: 53810 - DNA, 569 bp, Homo sapiens
gctgaatcaccggaggctaatgcatactgttaataaaattgcatatattatactattcactctttgttcttttattaggtgtcacattttgtgtcaagtgctcaatatactttatataatttaatcctcactacaaccctgtgataaatccaatggattgttggaaatcacagttactaagtggcagagttagactttgaaagaatgtctttactggtattgctaaatacctcatgtgatcatctatccttgcttgttttcagaaattgtttctcatggtatgaatggcatataattcacttggagctgaaatgggagttcactcattttataaaaatatgacattgactttaaaagaatttatttactatctcacctaccaatgatagatctttaaaacttaactctgataagggaaaagtaaattgagtaagtctttcatgagcactgattgcttagtcagcaacaccaaaagggcattaggtgcacagtgctttcatggtttggtaaactctggtatttttctgtttccatgatggatactccaaatttcctgttgaaggtagaaa

SEQ ID NO: 53811 - DNA, 1578 bp, Homo sapiens
ccctcttccctctttctgcagcgccttctgctagagaagctcatttggaagccactgtttttacgtgcctttgaaagttaacggggtgaaaatgatgtccccttaaaaactgtgctcttttctatttctgtgtatctggggaaaaaagaaaaatcctagtagagacggcaaagcgcagctggtgcgcaggcgtcacccaataaggtttttgtgagcaggccccaatcgcggtgtgggcggagcgagcggctgagaccacgaggacgcaaggccagcgccgccagggagacgagggaggggaggagcctgaggagatcggagtgctcggataggctacagtgagaaaggagagtcacgtgccctgcgcgaggccgctcggggaagggcgtggagcggaggcacgctggccgccgcaggcacaggcgcagagtccactgcgcgggggcgggaccggggagctagctgcaggtacggtgctccgtctcctgtggaggctttagcggctcgtggacactgctcccccatttcctttcatttcccccgtcttctcagtgagatttccttggtgagttattggaggagaaaggaaggaaaactagaagccagcccgctcccatcgcatgcctttccccgtaccgtcccttcccctttccgctactcgctggtcatctcaactctgcgcgcatttttcctgctgcttctggtcgaggctcctcggaacgccgcgcagccctgcccgccacgtgtgtgagtgcgcgcacggggcccgcggcctcctccgcctgctgcgctcgccctcccgcccctgctcccgggaccgccccttgggcggtcctccgggtcggctctgcgcctgctcttccccgggtcgggactcttcctctaggtcgttctccaggaaccagtggacctgctctttgtaaatgagcagcctaaactaagaggagaagccttttaagtgggcctttacgtttttgtccagtttttggtgtcccttgttggaaaattgtcttctgagaagcggttttattcctttttgttccacctggtcacccgtaaatctatgcacatgggcctgccgtaggaaagtcatttagacgcttttacccgagtgtttaaaagacattttggtaataggatttggggaggaagatggatgcctctgaaccaccggtacagaggccactctgcccgaaggaaataaagcttcccggagaggagagaaaacacacttgagtctgggtttctcactgcctggttggctggcggagtgattaaaacaacacaatggcctggtgaaccttttagttcctgtataaaaaggctttactgaatgtgtaggtccttactttgggctcttactgaatttcactacataagaatacgttaagtttttcttttttttttttttgtatacagttgattttaatttttgtcccagacgcttagggaaaattctccagatttcttcacatcagattgtcttccaaaacattttagatagatggatctgtagatctatatttagatctagatccaaatctatatcactttgcccctttcttttcgcccttgagt

SEQ ID NO: 53812 - DNA, 6047 bp, Homo sapiens
attgtagttttcccctttgtagtctaattttctatctaagagggcacttcattgatgtttgttttgccctaatattctttttctttcttttttttttttttttttgagaaggagtctcgcttagtcatccaggctggagtgcaatggcgcaatctctggtcactgcaacctctgcctcccaggttcaagcgattctcttgcctcagcctccaagtagctgggattacaggtgcccgccaccacacccatctaatttttgcatttttagtagagacagggtttcaccatatcttccatgctagtctccaactcctgacctcaggtgatccacccgcctcagcctcccaaagtgctgggattacaggcgtgagccactgcacccagccttgtcctaattttcttagtatagtattatactatgtatggagatctgtatataacataaaaaaattcatatggtaaagtaacaaacatcaaggcagctttcaacacctccatgagggagcagacccacccatctatttcattcattaccatagctccagcacacagaccagtgcctggtacccccactgggcaccccccaaaaaatgctaacaagcacttgttgcatgaaattacattttagggccaggcatggtggctcacgcctgtaagcctggaactttgggaggccaaggtgagaaaattgcttgaacaacccaggagtttgaaactgcaatgagctatgatagtgccactgcattccagcctgggtgacagtgcaagaccagtctcttaacaaaaaaaaaaagaaggaaagaaattacattttagtggggatggaaggaggctatgccagctggtattgacataaggagaggctaaaaaaccctggatgaattggagttggttcaccattttgcctcgggcagccttgtgtgcgttctgtggggttgggagtgataatgagtgataatccctgttcctaatccctggctgtcccaggtgagtggttgtctaatatatgcaacccttttatctgcctgggcttctctgcttcctgaaggcggggtgcttaggaagcctgtgaagccgacctgtctgtacgtctgtacaaggagaggccaaggtaataggatgctgtggagtctaattcaatgtgataacaagaagaaaacccgagggtgactcagactctaaaaatgtgttgtgcaagcagaccgggcgccaggctcctgggtaatttggctgggctggaacaggctccggaggaggaatgctggtctccattctcataacacacactccaacagggagccaaagaataccatgaccagaaattggtccacactgctctaatttctcaaatagatccgcagcagaaaacacagttctcatcctcaacaggtaaagtctattgaagaaaaataatacttgaaagtcccttagttacaaataaactgaagaagtacattatcctctccccacatactctccacataagcataaatacaccgaaaatacgatgccgttttccaagagggaacttttccagtttctgtcatcttcaattataaagtttgaatggggcttgaacctaaattgaatgctagagacttcactctgttggcagggtagaccccacccaagcagtgctagggaaagatgatgtaaaacccacgtgtttttgtttttttagagacagggtcttactctgttgcccaggcttgactgcagtggcacaatcatagctcactgcagcctcaaactcctaggctcaagtgatcctcctgcctcagcctcctgagtagctaggactacaggtgtgtgccactatgttcagctaatttaaaaagtttttttttttttagagacaagatctcaccatgtttcccaggctggtcttgaacttctgatcttaagtgatcctcccacctcagcctcccaaagtgttgggactacaggcaagagccactgggcctggcccttatgtttctttagatgagacaaggatatctctaaggccccctattaggctggctgcccagatgcaaaacctgtgaacacaagaatgtcagtattacctggggagccacctccagtcacccgctctgtcttcatgctccgtggtgaacaatctccataagaagttcataggtgttggacacgtgtggccaggccctgggctttgaaatcgaccctggtttgcagctatatggttgatgctgccagacacatccagatatggaaaatcaactttatcccaggctttcttgtgccgctcctccagccgcctgctctgttgggtgcagctccttctgttccattttgcttcatgggctctggaaggaggagtaacagtgcacagatggcaaggtggaacctcccaacacaaactgaatctcttcctccttctgctcctcattgcctgagcctactgttctcccccgccaccaccatttctattttcaggaaaaaaaggaaaaaactttggtgatctacaagctttgggtgacttttcctttgagcaggataaccagagcagctaggtgattttccaaatgctggctatggctaaacccagtctcaaacaaaatcggaaaatcaacatgtttctcttcagattttccaacaacccctttcttcatctctctccaacctacaagctgcccttctccacctgacatcccagtagtgggtgacttccagcagctggaggcacttcccaccttccccagacctaggcctgcacattcttctctcccttcatctctgtctcttcagtctgagaagttagtctgaggcgtgactgctgcatcatcaatgactgcgttagaaaccccagcgattcactgctatgttctttatatgtaggatagttactggcacatggaaggcacccaatatgtatttgctgagtcagactgcaaaagtgtgcaactggctgagactcttgggggtatttgcacagagaaataacgtaacgataacgactactagctaactgccatttactagtcactttacacagtctaaaagcaggatctcgacatttctaacagcttgatgacctcatatttaatgtggttttgtacagaaatttccctggaaccccacacatgacattgtttggagcgactccttccttgcttacctataagcctaatcctgcgtattgagtcattctcttcttgagcaagtaggacttgttgctctcttgtcacttttccaccagtgttcctctcttaagggagagaaaaagttaaacatgcctgcttttcagtgtctatagacgattgtggaatgtttgaggaaaaccttggactttttcacagccactccctgtctgggcagcctcgggtcagcctcctcctgcagtttttctttctgtttttcccctctgtgtgtccctcctaagaatgtggtcctatttcctggagcaggagcctgtctgcaggcatggctgggaaggaagccctggccatgagctgggctgatggcacctctggagctggctttccggcagctggtgacacagcgggtctggcctcattcattactaattgttgacgctgtgttcggaggaacgtgttagtaacagcacgtaccttgatcagccacactcaggcctgggtggaggagataggtggtgactcacacagtggtggaagagggcctggtcacctgggctgcccgaaaatgacaggaaaggcagggccaggaaaggaaatccccctgcacatcacctccctccccttcccactgcatgctccacccctgcaccacaggcacttgcttctcactcctctgtgtttttttgtggtttttttttttgttttttttttttttcagatggagtcttgctctgttgcccaggctggagtgcagtggcgcaatcttggctcactgcaacctccgcctcccgggttcaagctattctcctggctcagcctcccaaggagctgggactacagatgtgcgccaccacacctggctattttttttgtattttagtagagatgggtttcaccacgttggccagaatggtctcgatctcctgaccttgtgatcttcctgcctcagcctcccaaagtgctgggattacaggcatgagccactgtgtctggtcttttttttttttaagagtctcactctgctgcccaggctggagtgtagtggcatcatcatagctcactgcagtctcaaactcctggactcaagaaatcctcttgcctcagcctcctgaatagctggaactacaggtgtgttcaccatgcctgactaagtacttaaaaaattttttgtagagatgcggtctcactatgttgcctaggctggtctcaaactcctgacttcaagccatcctcccatctcagcctcccacagcaatgggatcacaggtgtgagccagcatgcctggctcctgtgtttttacttgtcattccctgtgcttataatgctcctccctcaaatctgtattggtttagtcttccttgtgcatcaaagccccattcaaatattttctcccctttgagactttctcctgttcccccttgcaattgagaagccctttgtgcaaaaccacactctgtagacaattactaaattgagtcatagttgctctgatgtgtcccagttgccagcagatttggactacttgaggaccggggctctcccgtgtccatctttgttcccactttacctaaccaggagctgccaataacagacactcactaaatgttcatgggcagattgtggaatgaggcaggcacactctgcaagggacaagtgacaccggctcaataggtcggacgtgcgcagatggtttgagagcaaagtctgtaactctggagtgttttccatcttcaagccccctcaaaatctatttgctcttcccagaaagattcttgccatatatttggtggttggagtggtcttgtcaccggccttcaagaacactgattattgtttgaagggtacaccgccattgaaagagtagctgatttcctcagccaccgtgcgtgtgtcaataagattttataaagtacctgtctcagtgctcagctttataagaaatgaagtggaggattcaaaaggggtagaagacatagactccactcctgtagaccacaaagcctcgtccaaaagagaacatggctgaaatgagaacatgtgaatcaccaatggtagacctgtggtggcaaggggagaatcactcaatgttttcaaataaagaaattcctgcttgtcatttccctggctctttctatatgaacttgttcatgttcgaaacagcttgactgaaaatcagtacttgcagttaagaacactttatttttaagtttttttgaactttattttttatttttgtagagataaggggtctccctgtgttgctaggctggtctcgaactcctgggctcaagagatcctcccagcacagcctcccaaagtgctgggatgacaggtatgagccactgcacccatcattgctcttaattcagattgaggtgttgattcacggggcaagatggaatggcatgaaggaaactcagtgggaaggatgaaacagaggcagagaatggttaagagattcttgttgtagttcagccaggaggctacagggactagactaggctacagggactagactaggctgtcatagggagagaaatagaaggagtggcccagataactggttgcaacctctcctaactcccaaagaaggagggaagggtaaaattttgccaggataaagagaggatgaccaaagaaacagagctccaaagaagggacttttttttttttaaaaaatcactgaaggctaccattatatttgatttatttttattttattttactttttgagacagtgtctcactctgtcacccaggctggtgtgcagtggtgcaatcatggctcactgcaacctctgcctcccgagttcaagcaattctcatgactcagcctcccaagtagctgggattactggcagctgtcaccacacctggctaatttttgtatttttagtagagatggggttttaccatttggccttgaactcc

SEQ ID NO: 53813 - DNA, 3484 bp, Homo sapiens
aaaaaattaagtacttacagtacttaattcaaagtacttaattaagtacttaattttaaaaaacccaacatttaaaggcttggaattcaaataattccaagttatggaaggtgtaatattctaaacagtggcttcaaagaggctgttttggctaatctaattgagacatagtaaatggcttaacacaggttgagaatcccttatttgaaatgctgaagtgtttcagattttggatttttttaaattttggaatagggtgggacccaaatctaaacacaacatttatttatgttttatattcaccttatatcataacctggaggtagttttatacaatattttaaacaatttgtgcatgaaacaaagtactgactgagttttgactagaattcatcacatgatgtcaggtgcataattttccacttgtagagtcacattggtgctcaaaaagtttcaaattttagagcagttcagattttggactttcagattagggatgttcaacatgtcccttctatttgggctgctgcttcttgtcatacatttacaaaaacattgtgctatctcctcggagaatctgtcatacagacagttcccacttggtgcactatgattgtgatagctccagttctccagggtttccaggcatatgaaggacagtgtctctttccctctcataatgtctaaaatgtgtcctttttttcttccccaaggggaagcatcttctcatggttttctgtttgccttggctcccacgctggttgctaaatcaggctccaaataagactgtggtaattgcactgaggaactgtgactatgccgttctgtgttgccctgaagcaataacaacaattccttgagctaaataaatatatatactttttccaaaaggaccaattttagcaatttggaagataagtttctcaaacaaacaaacaaacaaacaaacaaaaaaaccacacacaaaaacccactattggctgttaagggaaagtatctgtttggggaaaccaccaaaaggactaggaatttcatttccaccagttaatcatttacaatttttaagtctaggcaggcaaacaaggtccatgacaaaaagataagaaagttggagagcatcataggaacatttacaagttcaaagtctagcgattagtctacgtggctgatgtggtcaatttcatggtttccatttccccccacggtgcacagtgtgggttgtgtcttcagggcaatgtgaggatgacagcgggaatggtttcaggatttctccacggcactaagctcttactcagctgtgggccctcctgacatttacttaagacagagcactctgtcttcacctctacaactttccctatgtccaagtggttttatgcccatttgttgtaatcttgatttacttaatttctttacacacatctgcctattgatgaatcccatctcccttccccaaatttttataacctttcctttctgattcaacttattccagatcctggtaacctgcagtttttccctttctgtacagcctatctctaggtgagttccagaatgactgttaacaatgcagttggtataatcctgtagctcactagcaaaatttatagagaaccaaaaaaagtctgttgccattttttcaggagtattggtatataaatccaaaattacttctttccagttataaattttaaaaacatttattttaatagtgtttttaaatacaaaaacattggaggcatgatgtaaattcatctgtaatcctacctttcagagatatttgtcttagacttttggtacctttgctttaaaaaaattacaataattgagatcattttgtacatcagttctttaatatgctatttttcacttgacactaatttataattatttcccaagtcactgaagttattattgaagcatgattttaaaggattcatcatattgtattatgtggcttcatcataatttactctaccattcctttgatatagacctttccaattttgctattgtaaataatactataacaaatactttcccccatatgtctggggcattttattttattttattgagatagagttttgctctgttgcccaggctggagtacagtggtgtgatcttagctcactacaacctctacgtcccaggctcatgcagtcctcccacctcagcctcctgagtagctgtgactacaagcacatgccaacacacccagctaatttttgtattttttctacagatagggttttttcatgttgctcaggcttgtcttgagctcctgggctcaagtgatccacccacctcgggctcacaaattgctggaactacaggtgtaagccaccatgctggacctctagggcattttatcataataggggattcttgaagaccacaagaaatgtctctttgtggctaggtacagtggcttgagcctatagtcccagctacttgggaatgagattaggcctcaaggattgtgtgagtccaggagctcaagtccagagtccagtctgggcaacatagtgagatccttttcttcttaaagaaaaagagaaaaaagaagggtctctttgacactgaactgcaggaattggctacaggcagcagttatacttttgaagagataaggggctcttgctttgcttgcttgttgaaatgttagctatttttgaggatgtttgaagccagagatatcaagcaactgctgttgacacctgcttaggttatcacttaggtaagtcagatgaaagttgaccaattttcaactagtaaaccgagtttgcaggcttcctagtttctatcttccatgcattattccagaatgagagtaaggctggcccttctgtgagtgttgatgtagtgttccctattgtctaatacactgtatctcccctcagtgatgatctgtcaaaggaagaaacacatccatgaataaagtgctctccaaagtgagatgtgtcccaggtagaagtgacacccttatcccctccttgctcccgtcattgtatttcagatggctgcattcgtttgaagttcttccctgtagagttccgtggaaggaccctgactccctctagtggacagcgccactaggcaaacaataattccgcccggcaaagtccagaagccaggagtaagtgtccttaaatgccctcttgaaataatggaagctgtgtttctgaaggagactcttcccagtccacagaagtttttgtctttagcgggccatctgtgtcgactgctgccacaagacatcaggggattttttttttccttcagggcagcaattaattcaataatctacagagttgtgtttctttttcactagcgttggagacttgttatgtccagatttactttatgccacaggcaagaggcattactaatgtgaacagaacccaaaagaaacaagctatgaatctgagaatgctcatataaaggactggaaaaaagtcataaaatcattcttttgctttaa

SEQ ID NO: 53814 - DNA, 1203 bp, Homo sapiens
cttattagttctgctgttgagaccttctgatgcatttttcagttcagccaatgtatttcccagttctaaaatttgtttaattttttaaaaaattatttcaatctgcttgttaaatttctctgatacatttctgaattgcttttatatgttattttggagtttgcagtttcctcaaaactgctagtttggattcttcatctgagaacttacatatcactatttcattagggtcagtactggaatcttgctctgtccgtttaaggaggtcatggttccctatttgctgttgtttattataaacatacaactatgtcttcgcattgaaggattcgttattttttccagtctttgctgtctgtgttactttgctcttactagcatatgtgtgtttagaggttacccgtgaaatttgcctgttaattcccttagcactagatcactacctcctttttggcactagatggtgccctaagaccaggtttgccgcagcttttgcagcctttcaaagcactgccgatcttggaaagaaggtgtcccagaggggattccctggctgggtgggaaagctggctaggggtttgtgccctcaaggatccaggcagtgcacctcctacagcatggtgctgccaaactgcctctctgatttggcatctctttgcccgggatggagagcagctcccaagttgtatgcactggggctgcttgccccacctcttctgtctagctcccagatgccctcagggtccttctggctgcagacactcatgatgcttcccatgggctgagacaggaacagctttcctgcataggaattcaagatattggggaagatggctgtccaccttgacctccctttttccggtgctgaaagcgtgagtgctgggtgacatttccaggaagtgcctcgcagtttgaaggaaggctattatggatagagaaatcaatttatcgtatgttctgcttgcagtttttcacgtctttgtgtctccagggattgtcacagcctcggttttgagttcttggatattggtggtgatgatctttacactggctagttctgtttcattttctgtatgggagagtgaagtcagattacttcttctctgccattttggtgacatcaccttaacccttatactttttcacatcagtgtggaaagcttaaattcttccattttttgtcctatatattttcaaaataga

SEQ ID NO: 53815 - DNA, 1154 bp, Homo sapiens
gatttaaaatgaaaacaatgtgttctggacaggaatactgataataaacagcttaattgtttgtttgtttgttttgagacctggcctccctctgtcacccaggctggagtatggtgccacaattatagctcactgtaacctcaaactcctgggttcaagcaattcttgcacctcagcttccagagtagctgagactacagtcatgcaccaccacacctggttaattattttattttatattgtagagatggggttctcgctatgttgcccaggctggtctagaactcctggcctccatcaatcctccaacctctgcctcctgaagccctggcattataggcatgagccctgacagcttgctagtattttaagtacaattggtaaaacttataaacaaaaaaaaataaaaatatttaaatgatcaaggacaatttataaaagaagtgaaatgcagaaatgcaaagttaccatgaagaaatttaattgatacttcattagtaatgtgcttacccattgatgtgccaaaaatcagaaaaccattttttttcagataagaatagtgtggatgaccttccaagagaacatctcacagtgccctctggaatcaatgagtcacagcatgagtaggcaggggtgatgttcaaacacatcagcaatggctcaataatcaaccaactagaaggacatgtgccagacctggttctggaggttcctcattggctgggcaggacccatttattcactgacaaggaagaagccctgggttgggcaaggaagtgccaaaatgccagcaggagtcacttggaagctctgtgtaacagctcttaatgaatcagtacagaattagtttgatatttcaacacctagaggatccctagaagatgtttgggtttgctaaacattaactctgtgagaagaaacactcataatcaaacccaatattattaaagtgaggactaagcaacattgtttctcactcacaatgctagctcaccttctatgtgtgactgggagtagctgtggctagcaaccatttggctcttaaatctgtctatatctgtgtattcgtatgtatctcatatatatgtgcatatatgtgtagatacttttaggcagaaatcaacatgcataacagaaactcgttctcctcctct

SEQ ID NO: 53816 - DNA, 4361 bp, Homo sapiens
tgccagatttcaggagtaccaaactgctgcacaattgaaaatccatgtatgtcttttgactcccccaaaacttaaccacgaatagcctactgttgaccagaagccttactgataatattaaacagtcaattaacacatattatgttatatgtatttagataaatactgtatttttacaataaagaaagctagagaaaagaaactgttattaagaaaatcatgaggagaaaatatattttctatttatttatcgtttatttaccctaattaatacagcaaccccatccccatgcccatcactctctatccctcaccttttaacttccttcaaaactagttacattccttgacatgttaaatattaatttgtttattgtctgctttctaccaactagaatgcaccatgcatgagagcagaaattgtttcctctaactattttcattgttcttagaagtgttggtgcttacgaatagtttctcattaaataaatgacagaactatttgaaattgcctaattaacacatgcacctaatttctgtctttatgtcttcaccaccttccctgacatataagcctttgaagacacagctgtagaggagaaggggagggttattcaaccgcatttacaaatcataactgattttaacttctgtattttcagacctccccagcgactttctctcaggaaactccactcccaactgacaggtgctatttccagccagtcctatgctgttgcaaatagtgagtccatgaatgccctctgccgtgtgcattacttattttcatcagcagatcttcgtaacacactcctggaagtgggatgacggggtcaaaaggcgaatccatacataagttaaatagatattgctcaattctcttccacggggttcagaccattttggatttctacgagcaatgaagacagtgctattcctctacaccctggccggccaactgagcgtggttaaacgtggggagggaggagggtgaggttaccaacctgatggttgagaaagggcctccgcccagcgcgcccttcctccacccccacccgagagacagctgaactccggccgggacgcgcgtgttgccagtccagccctgcaccgcgtcccctgagggcgggctgcaggcggccgggaagccttgcacaaccggcccaaaagaggaagcccagaaagtgctgaagtaaacactttgggagaccgttgcaacataaagcggcctctcagtctttggtggaaccatcactaggccccaatcccttagtccctcttgcgtcgaggctgcaaaatggttccattcgccaggagacgctcctgagagaagggcgcgcgcggcacaggtagggggaggcgcaacgtttcccagaattaaaataaaataaaataaaataaaataaaaatcccttcaaggtggttgtgtagtaggggtgggatgggggagagaaaatcaggcgcagactcgatgagttggagaaagcagcccctaactcggagtcctttacgcatatgtttgtctgtcccactgtctctaaccaggggccttccttgcacctcggagcaaagcagctcggatagcgccacacgtctgcgcgctgcgtgggaagggcagggctgacagcacttcctccccggggcagcgacctggagcccgggtgcggcagtctgcaccgcgcgtcgctttcccggccggagtctcgccgccttcccgcgccccgcagcgccccgcagagcagtcgaggtaagtggcgctcccagtcccgggagccctgggagcgccagcacgggcccctcggggctgtcaggaacccgtttgtcaagcccgtcgggtccgacgccgggggcagctccaggatctggcctcgtgaacgcgtgcccccaggcgtggccctcgagcgcagcgggtccccagggtcccctccgctgatctccactctggacccggctcgcgagggtgggggtgtgagggtttggggttcgggtttgctttttcccgagctattgcaacagatttgacagatttcctgcccaggaaattgctgcaaggtcaaacggggaactgctatgaacccttgcacgtccagcaggtcagcaggtcagcaggtcagcaggtccgggagccccagtctcccggaacctggagggattcttgaggggccaagattagatgtggattaaatgccagccgtgtgagaatttgagtgtggctcgcagtctgatgcatcttagagtgtttccttcctctaaaacttttggacaactctttcctctttttaaaaataactttttcccccgaatattctcattttcattttaaaataccataaagatagatttggacaccaggcacaagtttcataatttggcttgaaatgaatatccagagggccttttacagaatggaggaaactaactagggtgtcctaatgtctccaagaacctctgcgcaggtgttccaccaaagacctagcccggtgtacctcttactttcctgctaaggtatttcttagttcatacccctgtggaacgtgaaatgtgtttcctagacactcagggcatagcggttcaaaagaacttttaatgtgatccttgacgagacggagtactagaggaaagtaacaaaagaaaagggcccgtgagtttattatgcccccagatgtttttttctggtggcataacgtggtttaaacaaaggtgccggtactagctactattcattttaaaatctgggtctccagagagaaatttcagaaaggaaaactttgtcctttttcataaacctagagcagcgattttccctctggcctcactggaataatgggtggcacatgggccaggacgatgatgctggctggcgaaattagcaaggatctgctgagaaatactttataaagtcttctagtggtatttcctgtctgctcaacgtgtgttgtgaaaggtctaagaaatttaacttcatccttaaactattaataatgtgtgtccttaaactattaatccttaaactattaataattactaatatttgggttttttctcagcacttgggagacctgggttctggctcttatatctcccccatctagataaggatgatattgattaacttgcataacttctccctggacttcagataacgtcagtaaagtgagatgattgggctacattatgtctgttcttaaaatagcaattgaggagttgctataattctttgaattggtcccaactggaatactggcaacattatatcaacattagaattgctgatcacaaattttttaaaaatggagaaaataatcataaccataacagattacattctgaaatatcaatatctttgaggtcttttgtttctgagaagttcctgtaaaagcgcagtcaatatctggcctatatgtaaaaaggcaaatttccatcttatttgaaaactgagataagaaacagcccaaacttgaacaggtcaatattatattttgaaatctttaaattgctatttctcaagaaatataactttgtaatatgaattactttatggcattactttaaatcttaaacacaatactaggttttatagtatttattacattttttgtatttttatatcctaagaatgttcaccagttatccactattgatttgccttttttcactcatcaatcaaagttttaaatagttccatattattattagaatgagctacttataaagttcattgccataaatgtctgtttgatatgtcactttgaattttctttaagccatcttacttccaaagagcattattattttcattttcttctaattctcttcaattttattttaattatttttatgcctaaaacattttagtgagtccacaaatcttataataaattgtctgcgttccatagcctattggaccacaatctttacaattttataggaccccatgagtttatattatggagactacggtgatcttaggaatgcttgcctcaaaacagaacaatttttattaacacaacaggtatcttctcagtatgaaaatgaatgtgtgtgttttatgtcactgctgtcatctaagaggcaagtcacttaaagcttaagcatttattataaattcatgtacataataaatgccagattttaaagtgtaagatttctacactggttgcatggggattttaaaatacatattacacttttaattatcgtgagaaacatgacttttagagaaaactgctagatatctggaacagtaatcattagatttctcttgaaaagagagaactagccgcatgaaggaatgccattacacctatacccagttaaagagactagattgtacctgcagcttggaagggcagaccctgagg

SEQ ID NO: 53817 - DNA, 2565 bp, Homo sapiens
accgtgcccagccttctaatgcatttttaactttgagaatagaagtatgagggatgctgttttttcctcatgcttgacatgaagcaaaagcaagttttgccttcactaatgtatttagttctcataatccctttacatacttacttgcctttgcctttaaattaaaaaaaaaaagttgttacctacctgtagagcagtggttctcaaactttaatatgcaatagaatcatatggaaagcttgctaaacacagattatcgggccccaccccaagagttctgattccataattgtgttcaagaccagcctgggcaacatagtgagactttgtctttacaaaagatttttaaaattatcccaacatgatggtgcacacctatagtcccagttactatagaggtggctgaggtgagtggatcacttaagcccaggagctcaagactgctgtgagctacgatcatgccactgcactccagcctggacaacacagcaagactctgtctctagcaataatacttttgaggtggggccaagaatttttatttcagtaagaagtgtctgggtgatgctggtctgaagactcacactttgagaaccactgtttctgagaaaatgtagaaccaaacccaaagcttagctttgatctcaccaaattactcaactatgcaaacctgcaagagcttttaagtgtctcgtaatcgcttatgagatttatgtactaactataagaagaacagcaacaatgatagaaactacaaccgctatcaccacttactgagtgtttaacacacatcagacatttggcaagcactttgcacccattattttatggaatccttacaaagcccactgaaatattccaattttacagatgaagaaactaaggccgtattatggctaagtttcccaacatccacagtaaatgaaaagctggacccatgtctttcagaatccaaaatccttgctcatgctcttaatagctaacttctccccatcctctcaggtggccaagagcaactcctcatcccaagagaaataatagtctctcttctttggctccttattattttatttattccttttataaaattattgttacatagtatagtgctaagttatttttatgtctgtcaccctcttcagactttaaactttattgattcatttaacaaatattcaaggtatgaattctagcaatgacctaacagagagtttgcattccataaatgcttcttgagctaatgagtgaatgaaatcagaagggaaaaatcagggcagaaaaccttgacccgtcactgtgtagatgaatgagtttctgtgaaaatgaacaagtgattgttatgtgtatatgttcgtgggttccctgtttctctaggtcacaccagactaagttacaattgggaaacattattattaggttggtgcaaaagtaattgcggttttcacaattaagagtaatggccaaaaccacaattagttttgcaccaacctaatataacagtaactaagtaatagccactggtccagccatccttggtggagtctctgcaagcccagctcatcggctctttctggcttgttcctgctcctgttcacagagtcctggatgtgtctcacaggaaccctccgatgtcactgccctgtgcaaaggatttcatcattcctgttgcaccttctgtggctcccagtggcaggacagtcgtgtccccacaggcttatgcactgctcctggggttacctggatttgacccctcctgaggtggcggtgtctgccttcctctgatctctgtgcaactgctgcgggctgagatgttactctaggcacttctaacataaaccacaagacagagacctgtgcttttgacttccgttagggtctcaaaagatagtccttttcttcttcttttttttttttcactttaacactttttaaatttttaactttttgactcttgaaataagacttagctgaaaaacacatacattgtatagctgtacaaaaatatttttatatccttattctatttatctatttatataagtgttttctttccttcttttcttttctttttttttttttttttttgagacagagtcttgctctgttgctcaggctggagtgcagtggagcgatctcagctcactgcaacctctgcctcccagctcaagccattctcccaacctcaacctcctgaatagttgagatgacaggcgtgcaccaccacactcggctatttttagtagagactgggtttcaccatgctggccaggctggtctcaaactcccaacctcatgtgatccatctgcctggcctcccaaagtgctgggattacaggcgtgaaccaccgcacctggccaatataagcattttctattttttaattctttttttaacttcttatttttatttttcaacttttattttagattcattggatacgtgtacaagtttgtcactgggtatattgtgtgatgccaaggtttgtggtacagatgatcccatcacccgggtactgagcatagtcctgaacattaaacccaacagtcaggttttcaaacttgcct

SEQ ID NO: 53818 - DNA, 1544 bp, Homo sapiens
gtgaaaaaaaaaaaaaaaaattagctggtcatggtggccggtgcctgtaatcccagctacttgggaggctgaggcaggagaaactcttgaactgggaggtggaggttgcagtgagccgagatcacaccattgcactccagcctgggcaacaagagcaaaactccatctgataaaaaaaaaaaaaaaaaaaaaaaagcagtcaatactaggatacaaacatttttctttaactgtctttaacatagaaagatgtacagtatgcagataaattcattgaagagaagaaatacagctgaggaaaacccacacagaaaaatcttccagaaatttgtttaagcctccaatcatgtctgggatcaataaatatttgatgactgacttactttgtgtaaactcgatcgatttacttatctctggatgcctcagttttctcatctaagatgaatataaaagtgttttcatttcacctagggtgtgaggatggatttaatcagtcaatgcacgtaacgcaccaggacaatccctggcatggaatgagaacacctaatagttattcgctgttatttttattattatcaggcaggtagagagcaaggggagatttctctctctctcaaccccagccatgcacagaagcaattgagtgaggagttttcttcttggtagacagacaggtagcaacttctctggttaatactgaaggctaattctaaccttcctgaacttcattgactgtgtctcattttaataattgcaaagtcatttttatacctcctctgttgtttcatttttttatcattatttattttgagtcagggtcttgctcttttgctcaggctggagtgcaatagtgcaatcatgagtcacttcagccttgaactcctgggctcaaagaatcttcctgcctcggcctcctgaatagcagggactacaggcgcatgccaatatgactggctaatttttttattttttgtagagacagggtcttgctcacaaatattctgttttgtcttttcttttcattctcagtgctctgaaattttcattctgttattggtattagtatcttagtccaagtaaagactaagcataactaaaagtacagctgaaacggtgaaatttgcaaccattcaaattagcttagacaacccgtgagtttgtaatatcttaatacggtgctataagaaatataagaaagcagggttttgacagataagctccttataaaaatgtaaataatatgagtttcttcattgtattgacacttgctgccaccgaaaacatcaactctgtaaacccaaaacttgataatcacaagaagagaaaaatcttaacaagttttttatttcatgcagaagttgttaggaccacttgtttgttttgttttgttttgttttgttttgagatggagtcttgctctgtcgcccaggctggagtgcagcacgacctcagctcactgcaagctccgcctcccgggttcaagcgattcttgtgcctcagactcccaagtagctgggattataggtgcgcaccaccacgcccag

SEQ ID NO: 53819 - DNA, 4998 bp, Homo sapiens
aagtgctggtattacaggtgtgagccactgcaccaggccttttttgaacttacatgaaaaatagtgtatccttttatttgttttctgttttattaaaaaattcctatataaacaattgtattattacatatttcacttaatatataaaatagtacacttttatgactaaatcttttagttttaagtgcatcaaataatcccttaatttaataccattctgctcaaaattcagtttctagcatgaaattgtaacacattattgttataacaaaggggtacacatgaaattagttatatgatgtgaattaagaaataattaagatagaaaacataaagtgtttttatttactaaatgatgattaacctattacttgaaatgttaactgactttagattgaattagaaaagaagaaaagtcattgatactgtcactcaagttgcctcaagttgcatggtagttatcagaatttttctcaaggcaactaaaatttttggtttgaaaactgattcaggcctaaatagatgtgagccccagtgaaagttttgtttaccaacaaaacacatctgtgtgagtatcagtatttactcacctggaaatagcattggaaaaataaacagtgttatagtgaatgaggttccacaaacctgtacctatagcagcagcttagaaacagactgtttaacggctctgatagttctcggaaccatgttatttggcagtctctaaggactgcctggccctggaatgtgacatttctgagtgtgtcacaccaggagccatgtagaacatgtagccagtcaagtgagagagaactttctatgaggcttgagatctggactctagcccagttcttctcattagtctgggaagctacttaatctctctgggtttccaacgacgcatttctgaacacaaacatcaacaagatctgattcttacttaataacaactcccagttttctaagagattctataacgataacaaaaagagtgtgattcagtgtggcaaatgctgattgcaaattcatgctaagtatttttggctattttgtttagatgtcacaacaagcctaagaattaggcattattgttttccttattttatagacaaggaaactgaagtccaaggagattaaataccatgtcaagttggttgttaaggccaggatttactgacatgtttaccaagtgcagtagatagcaaatctctgctgggaatgaagataccattaaagtgttagcatgacagctggattttgaatgatcagtaggattttatgaaggagatatgcacagaggaggatattatttaaagggaatagcatatacaaagacaaaaagagttctaaaaagcctgttcagaaaacatcaagggtcctgaggccaggcctggtggctcaagcctgtaatcccagcattttgggaggtggaggtgcgaggatcacttgagcccaggagtttgagacctgcctgggcaacatagcaagaccctgtctctgctaaaaataaaataaaataatgtaaaaaaatataaataaattaaaaaataaaaggccccgaatgggacaaattaggaaggactttgaaagacacgctgagtgcctgaacgctctccacttcatcataagcagccagggaagatttttaaacaggagagtgacacattcacatttgtatttgcaatttgcagcaacggtggtggtgaatattgatggggagtctggaaggctggaggctgggtgagctggtgaggtgtcaactgtggcttgatagagagaatgaaggcaaggagaagccttctacaggaaaagccaacagattcctcgaccgactagatggaaaaatgggaggagtaagggactatgccaagggttctaagtcagactgatatgtgactaatggccttttaccaagttaaggcgcatgggaagagaatgcatgaaggggagtagtgagtcggagctacttagagggaaatgcctgggggatgttgagctggctgtgtttaggcaagctactctgaccgatgcaataaaggccgccctcatccaggtccaaaattccagattccatggctggaattgctgatcttcacggcatcccaaactgcatgcaaactgagttaaatgtgtgagattaactctgccgtcgatataaacatatgtcctgtaaaccatatgcatcacagtacttaggataaatgtttaaaagacatagttttgaaatgtatccaggtggaaaagagaaacgatttaaggattgaaaaactgaagcctagaaatattaagcattagggaaaatttccttgtcgttcaaggaatctaagggaaagttttagcctggacaagcggcttcaaccacctcacccctcatctatccaataataacaataataatcacaaaatctagctgattttgtagtatttccatttctttttcatcaacaacttgtggttcttcccaagacataaaatgaactcagaagtgacatactcacaaaaagattctaactccacccagtcacgatgtgagcatggcttgtttgcaatgcattgcttcactgtgataactccaccccagctctttctggctgctaacccaaataagacttttagctgtcagggctgggtgtttttttttttttcctctctctctctctctctcttttaatctttattttgacctttggaaaataccacacgtacatataggcacagccctattttcttacgcttgtgtgtgtgtacactgtatacatgtgtataactcttgtctgtccatttcaataataaggttttcttgcagggaggtcaattatgtaatatgactgaatttacagattaataatttttgttaacaaactgccctgaagtcaaatgtctttttatcttcaccgtgggtgcaactgtgatccattcacaagcaagtttacttatgactgtacgtttcagcacaattttgatgttggctccacttaataactcagtaacagactctgggggaaaggaatgaaagggcaggggaaagggcagggggaaagattttcaccagatgaatgcagggagaggtcacgagaacgcgctgttgttttgagttatttccatcttaggtggatgattcactgtggcacgtcattaacctgttatatagcagtggtgtgcacagcctgagaaacgaaggcctttgggttcagtgggtttttctgactcatcgatgtcacatttccagactttattttagtgcttttccaaatttaagggttcaggagaatgaatcaatggcaagattcttgttactcaaattatatttgattcctataagcttattgtaatgctagttggcagttttgaggtcagcaaacaaatctatatttattcttataaaatggattactctcataaaaaaatctgaaatgtgttaacaccaataattactcttaataataattcatctgaaggattcctttattttctcacactattgtactcagatagaaagcaattcacatgagcagttctggaattttattgttttttccattaatttccccttattaaaataataacttaaaaacccatgacaagatttttaataccatattagttgttttgggagacaatttgtgaaaccatggagataatatctacttaaatactttctgccattttgtaggaattttttttttttttgagagagtctcgctgtgtcacccaggctggactttggtggcaccatcatagttcactgcagcctcgacctcctgggctcaagccatcatcccgtctcagcctcccaagtatgtgggactacatgcacgtgcccccacacctggctaattttttaattttttgtacagaagtttctctatgttgcccaggctggtttcaaactcctggcctcaagcaatcctctcccctcggcctcccaaagtgctgggataacaggcgtgagtcaccatgcccagccttgtaggaaatttaaagaaaggaggatatgattcagatactttgtaagcaactgtgtggggataaaaccccatggaaatgactcctcatgctgacttccctcatgaaccaggggcagggcccacctgcagccatcttcctctcttctaggtgccataaacacttttttaatcccaacaatacacacaaaataggacaaggatcttccatcatccgtcactgatgctgtgtttgattcctctctgactttccctgcacacatagacctagaccttcggtgtttttctcacctgttgcttctatacctgggtgctcacctgcctgctttgtgtggtctgacccttagcattcactgagtggcttccttggattcaaacacacacctccttgtcccatgtgtatgtacacctgattctttgggatgcgtctgccactaagaaatgtgctagttcaatggaatctagacctctcttaactaaagaccccttcttgtaccctctcaatgcctcctggccaacacagttttacaacttcccatgctcctgcaagacacctcctacactggacgccagatagggcagtagagaaaattaatacatcacatagcaattcaagcatctgtcctccaaaataaaacatgcaaaacttaaaccttgaaatgatggtggaatatgctcagtgacctctagctcagggtagtttttgtgtttctcaagagggagtgactagaaggacggcaaaagaaaagtcactgcagggagcagaacattcagatggaaaatgttctcagtcctgtttggcgagggtgataaggttatgtaggagaagaaaataatttttttcttcttaaaatagggagaaggggaaatatacgatggaaaaattaagcaagaagatttcattatgtcagatttcctaaatgataaacgcaagataattgttgaagataatttgggaagattaagtgctagctttgcagggtggatatttggaggatatgcactgattcacgcaaaatgattttacagcctc

SEQ ID NO: 53820 - DNA, 1386 bp, Homo sapiens
ctgagagacggaggctgcagtgagctgagattgcaccactcactccagcctgggggacagagcaagactccatctaaaaaaagaaaaaaaaagaaagaaaagaaaagaaagagagaaatgccgttagaaatggtctgcagcaaattcctcatgttacagatgaaacaattgattacctttgccaaactacataatgctagttaagtggccaaaggactagtaatgtctcctaacttcccaacttagccttgccaaaaatgtcaggaaacagagcagccagttgcaactcacagtgcgtcccaccctattttgtcgcaaacttttcctcttcttgggcaattgcttcatttggtttaggcaaagaaaggttaaaatgtaaaaaaagttttctttctatctcttttcacttggcagggctgccatttaagttctaagggtttgtccaccagtacttctaaataaatgtactaaaaactattatttcagaaatatcttttgaaagcagggaattattgggtaaatatgcttaatcactcctcacatcatttttgtgtaaggtttttttttttttttttttggagacggagtctcactctgtcacccaggctggagtgcagtggcgcaatctcggctcactgcaaccttcacctcctgggttcaagcgattttcctgcctcagcctcccgagtagctgggactacaggcacgtgccaccacacccaggtaatttttgtatttttagtagagatggggtttcaccatattgttcaagctggtctcaaactcctgacctcaggtgatctgcctgtctcggcttcccctagtgctgggattacaggcgtgatccagcctgtttctttggtgccaagaagactagtttagcctggaaaaattcaactgtggctctgaggcatttcccaacgtttggcacaatcttggatcaagcagattggatagaagccaggcatgaaatttcaggctaacataagccttcctctcaatatagtcctctcccaacttagctgcccatggatggggctcttgggggaaagagagggatgcaaagagtatcctaggatcaggcttttatgagactgctaatatctcagtttcttcctttttcagatgggtgagtcaagtgaagacatagaccaaatgttcagcactttgctgggagagatggatcttctgactcaggtaaacttccctttttaactggcaaattggaaaacaaaaatagagttgcagaatttcattgtaatatgacaagggagctgtcttttttaaaaccctgatatcgggggaaccagcccccgatatttcaatgtaggttcttttctattttccctaagtgacggcgggtctgagaaataaagggaagagtac

SEQ ID NO: 53821 - DNA, 610 bp, Homo sapiens
atctcaaattcctagcctcaagtgatctgcctgtcttggcctctcaaagtgctgggattacaggtgtgagccacggggccctgcctctcttactcctcttaatgtacctaggaattagcatatttcttggcacccagagatatttattgaacaaacaggaccttggttctttcactacctttggccttggataaattgctcaccctctctcaccctgttttctcatttcgtaagctcagagggtctataagtgccctttaagcagtgacagtccacaatcgccctgacctctgtgtgctgttctcatgtcccaagagagcttctctctctttatgatcgggaacaatcaaatcaattgcgaaagagcctggccagtgacactgcaccagcattttcctgaaacctctttgcaaatgattattcagcaaaaggctcggttaggcaataagctccttggcaaagtctcaagacacggtggagaacaagcccagtgacttgctctataatgtctgcaaggctgaacgatttctgcatcaccaagggagccagaaaggagctttttcccattaggtagctcatcttagaaccataaaatctgaggattgctaga

SEQ ID NO: 53822 - DNA, 1220 bp, Homo sapiens
ccagaaaattgtaatttattttgttttcaaacattgcttctccttttttgcttcttctgaaactctaatgaaatgtgttaaatcgtctaacactagcttctttatctctaaattgtgtgtattttctatttctttatctattctggatatattcatcagatcttaattcccattcaccaattctttcttcagcataatctaatctatgttaaagtcatccatttttggtttttgttttttgaaatagactttattttttagaccagtattagattcacagcaaagctgagcaaaatgtacagggagttctcatttgccacttgcctcatacgtgcacagtctcctccactaccacaattctacaaaaatagcactgtaacaattgatgaacctacactgacacatcattagcatccaaagtccatagtttacttagggtttactcttgaggttgcacaatctgtgggttttcagaaatgtacaatgacatgtatccaccattatagaatcatgtagactagtttcactgtcctaaaaatcctgtgttctgtctgttaatctctccctcccctttaaaccctggcaaccactgatctttttcattgtctccataattataccttttgcaaaatatcatatagttggaatcatacagtatgtagtatcttttttggtgaggtgtcattcagaccttttgtcactttgttaactggactgttcattttcttactgttgagttttaatggtttgtgtattttggataacagtattttatcagatatgtcttttgcaaatgtttttccccatctgtggcttgtctgttcattctcttgattttgcacttcacaaggatttttaatttgaatgaagtctagcttatcaattatttatttcatggatgatgtcattggtggtgttgtatctaaaaagtcactgccatacccaaggtcatctagattttcttctatattatctactagaagttttatagtttacttagttctctgatccattttaagttaaattttttgaatgatgcaagatctgtgtctaggttctttgtttttgtttttccatatggatatccacttgtgccagcactatctgttgaaacgactatcttttcattattacctatgcccttttgttaaatgtttgtataagcccattttggggctttctgttctgttccactgatttatttgtctattctttgccaa

SEQ ID NO: 53823 - DNA, 928 bp, Homo sapiens
cctcccaagtagctgggactacaggcgtgtgccatgacctcagctaattttttaatttttttgcaaacagggccttgctatgtcacctggctagactcatcctggcatcaaggaatgttcccacctccgtcccccaaagtactggtattatagctgtgagttgtgacattatacctagctaaaaacattgcttttgaacttgcatggttaaatgtttccacattttctgttaaaatatatttacggttgttcaactttcaactatgcaacttactagctgtgcaaatttgtttgagttacttaatctcattgagactgacctttcatttctataaaatgagataacctttgcccggttgttttaagaaggaatggtaatgtgtgcaaagtgccttgtactatgtccaacataacccaggtgcctaaaagacggtcgttagtattacaatactggattgccaacaatcatttgctaacttagacatcactccattctcagcatagatattatttccaccagaaagtcttctttgactctttgggactaggaggatggtgctgtgtggtggtttatactgagagtgccaacttgattggattggaggatgcaaagtattgctcctgggtgtgtctttgagagtgttgccaaaggaaattaacatttgagtcagtgaactgggaaatcaccctcagtctaggttggcacaatctaatcagctgccagtcagaataacagcaggcagaagaatgtggagagactagactggcttaggctcccagcctatgtctttctcctgtgctgggtgcttcctgccctcgaatatcagactccaagttcttcagctttgagacttggactggcttccttgctcctcagctagcagatggcctattgtgagaccttgtgattgtgtaaggagtaccttaa

SEQ ID NO: 53824 - DNA, 1342 bp, Homo sapiens
cctcactagagtgaattttttgaggactaaactgcatttctgtatctctaatgcttaccctctatctcactgactctgtgtgtttgagtgcatgcgccgaatgcttaactatatcacttaatttctgttaggtacacgctgtctctcagcaccagaacagcacccgtagatctggccttagagctaaggaaagaaggcctttccaatcgataaggggtactaatcctgtacagactctgatatctcccgggctgggtacacgcaggttcacacccaggtgtgagcaagattgccaaactatacctataaggtgttcggaggagagagtccaaaagtcgagagaccaggctaagttagttaatttcacaatagccctgatcgtggtgggacttgttcccaggaagatgggatgggctgaaacttccttcaagaacaggttgtgaaaggcagccgaccacggcgtagcaggtcactgccaagggaagcagaagcggaaaccctcgcctctggcttaggctgcggagcgggaacccgattctctgagtcatgtttctacctaaacacgcaaaacaagagttagtggctgcaagggtggcgcgcggtgctatttcttgctaataaatggtccccactgggacatttttgctgtgactgcaggcttggccagtctccctgcacggattctgggaaggggggcggataggaggctagcccctgggaaggtcactctcggggtccccgggcctggcctccgcgcgcccctgccccgccgcctcccgggagccgccgcagtccccactggctgcggacgggcaggcgcctgaggtctccgcgctggcagcctggccgcacgcggggaggagcgaaccgccgccccaggcgtggccaaagcgtcgcttctgtctcctcagacgatttctcttcaaataaggaggaaattatttcagaagacaacgaaaaaacacattcaaaaatcatattgaatcagtgtttgaaaagaagacagcaaatactcagtttgactaaacaatgtataaaataccaccttgtttagttattttaggcaataccaaacctttttttttaaccaattaaaaaaatcttggcccagtgtggtggctctcgcctgtaatcccagcactatggcaggccaaggtggctggatctcttgagcccagcagtttgagaccagcctgggtaatgtgacaacaccctgtttctacaaaaaacaattcaaaaataagccagttgtggtggcatgcacctgtagtcccagcgactcaggaggctgaagtgggaggatcccttgagcctaggaggcggaggttgcagtgagtcgctg

SEQ ID NO: 53825 - DNA, 2070 bp, Homo sapiens
tcatagatgtctttatatagtctatgatgtcttcattccataaaaaatccacacgattaaatatgaaattaatgtacccagctatgaggctaccgcattctttaacccaagaacaagaaaatacatgaatcagagaactgcaattacctacttgctggtctatttcctcattagagtgaattttttgaggactaaattgcatttctctatctctaatgcttaccccctatctcactggctctgtgtgtttgagtgcatgcgctgaatgtttatatcacttaatttctgttcggaacacgctgtctcttagcaccagtagatctggccttagagctaaggaaagaaggcctttctaacccataaggggtactaatcctgtacagactccaatatctcccgggctgggtacacgcaggttcacacccaggtgtgagcaagattgccaaactatacctataaggcgtttggaggggagagtccaaaagtcacgagacccggctaatttagctactatttcacaacaaccctgatcgtggtcggacttgtttctaggaagatgcgatgggctggaacttccttcaagaacagattgcaaaaggcagccgaccagggcgtgtcaggtcactgccaagggaagcagcagcggaaaccgtcgcctccggcttaggctgcggagcgggaaccccattctctgagttatgtttctgcctaaacacgcagaacaaaagagttcgtggctgcaagggtggcgcgcggtagtatttcttgctaataaaaggtccccacagggacatttttgctatgactgcaggcgtggccagtctccctgcacagcttccgggaagaggtggggataggaggctcgccccggggaaggttacgctcggggtccccagaccaggtctccgcacgcccctgccccgtcgcctcccgggagcggctgcagtccccgttggctgcagacgggcagacacccgaagtgtccgcgccggcagccggaccgcaagcgaggaagagcgaaccgcgctcccgggcctggccgaagcgcttcctgtgccaggtttccggctccgggtcccgggaggaggatcgcgggccagaggcggagccgccgccctgccgcgactttcagactccgaccatggcctcgcgctggtggcggtggcggcgcggctgctcctggaagccggcggcgcggagccccgggcccggctcccccggccgtgcgggaccgttggggccgagcgccgctgccgaagtccgcgcgcaggtgaggttgggaggcgcgcgcccggcggggctcagaggtcacggctccaatgacagcagtgggcggaatgaatgggagcggggagcacgtgcgtcgcgacgcgggggcgcgcggggtagctccggggtagctccggggtgggactccggagctgaggggtgctcgcggtgggacggagccgcgcgttggactgaagtaggggcgccctacacggggttgcagaaagcggtgtcctggggaccccgggagcgttttggggggtggagaaagcggtgggatccgtgtcctgggggaagcgcaggagcgatcagattgaccgctgctatatggacaaggttaagcctggagagcgactgcagctatttactttggagttagaggaagacagatcttgcctgaaattttagagccaaagtgctcagagctctctccgagaaacggaggatcgaatcggcctcggaatagtccgaaaaggtcttgtggagaatgcagggctggtgctagggtggaccggaccttagttgtccagcagtggcctcgggaggagagcacacctggatggggctggaatgacactggaaggagaaaggcccgaggccgtcaggaggagagaaaccctggagtcatctaaagtcagaatctcagcgatagcccattctttcagggtctcctctgctgcctttgggttccgatctcctttttctccctttctggtcagtttagcccctgtaaatggacactgtgagcccttctgcgctttgtaatgattctcagtgtgccatggggtaggcccatgctat

SEQ ID NO: 53826 - DNA, 688 bp, Homo sapiens
accactgtaccccagcctgggcaacagagtgagaccctatttctaaaaagagataataatagcaaacacacattgagttctaaccaggtgccaggcagtatactgagggcttaaatgcagcatcatgtctgtttctcacagcaaccctacaaggtaagtgcttgtgatttctacattgtacagatgagcaagagagattcagtaacatgccgaggtcttgtagagggcacaaatgcagccccacagtctcacagcagagcccgcagcactgcaccacactgacgcctgagcaaagttcactccctgactggagagccacagaggcacgaccgaaggtcaggggacagggtttcctagcatccgcgagccttacagaaaggcaactgtgcagtgctccagctggctttctcatggagagtcaacagagacatttcccctccagtagaacacagaccgtctctcccctcccccttgttggttttacccaggctttgttttctgaaaatgtggctgggcctgcttaacatgcttagcagggcactgggaaatgcacttcagtggccggtgccagctagctttttggagttttaaaaagactttcagaagtcttatttctcccccattgaaaggagggaaaagggtttttatacagttacttcttttgagagaaatgtggaaacagtgggac

SEQ ID NO: 53827 - DNA, 2391 bp, Homo sapiens
ttcaaattcttgcactcaagcaatcctctgacctcagcctcctgagcagctgggataacaggtgtatcccaccatgccaggctaattttttaaatataatatttagtagagacgaggtctcacgatgttgcccaggctggtctcgaactcctgggctcaagcaataacgatcttgcacagaatacagggttttggtagcaccaaaattactgcaggtttattggactgatcagcacacagctatagcaccactcaaaactgaaagcaaatgtctcttgttcactggtgcaaagctactctctcccagcctccctcatccctcaacctcagctgctttatgaagaaagatgattaggagtggggccaagttctccaagttcccaaaggagactaaagaccacacacacctgggtaggctacataactttggggagagcacagactcaacattttatggctctgttggatacaggagcccaaggcaccttcatacccatcctgtggaagaataagttaccagcttccaactgctgaggtctgggtagggttcaaagtagggaagggaagctactgtgaccttttgggtggggctctttggaccattcaatgtactactgtttgtagcttccacttctgagtgtatagtggtattgatattttacaggcctgaactgtgagggctcataagctccagggagattatgctcactgcgaatagcccatgtagaaaggcattagtaggtttggggccccacaatccttatgacctgtttgagtacaagtctgtgcacagatgactttcctgactagaccctctggcaagaggaacaacctcttcaggtgactcttgggtttggattcaatgcctccctgacgtagctactaggtatgcctcttttgaaaagattcccatttgggaatgagtcaactcaaatgcaatgactaataaggtgggaaaggcccaacaagcctctgtcatcacatggaactggtaatattcaagaatgcagccagtctggcccctagggcatctcagctttacatgaaaaagcagcagcttctccctttgagaaagtctgatcttacattctgccacctaaaccaaatctgctagctcagtgaggcccttgattcacagaggttccctaaatgcctgggcctgtttcactgatgattcaactaagctgagacgctgtggtgcctagtgggctgtaaactccagtgcccatgatacagaactgaaaatgggtgtggttgctttgttccacgggcaaaactcaaggacattctcacagatctggccaatattccccttgaaaaccttgttatatttttactgactatcaggctattaccaactgcctaggtatttagtcagccacttggaaaactacagaatgacatatttaagactgtccaaaaaccatggagatcaattgtagttgctgatcaaaccatctgggtcactaatatagatgtttacagtaagggtccattgtctgatgagaccaattataatcaagccactgatcaagctgcacggttaagactgctaccactgctgctggatccatcatcataccagacacagcaacatatctatcatcatagagtggatacaaagtaaaagactctatgttcctgatgcagaggctgccacctcatcctagacttatgagtcctggaaaaggactcatttgtctcatggtgagaggaaccacatcacatgctactggcagattggttgcatcagacaaccttcttcaggctatcagtggggtctcactgctgatgacacttttccagggtctggtactgctattccagttcaatcagctgactccagccacagtaccgtggtccttgacactaatctgtgtcctatttttactttccacatcatttgcaatctgacaataggtacaccttttatcacaaaagtcactcaacaatgagctgttagtcaaggtaggtgacagtctaccatccacagcatcttatatcgcttagtactgcaacagccttatcaaaaatcagctcaaaaaacctcaacaacaacaaaaaaaaaaacccgactcaaaaatgggcaaaagacttgactagacatttctccaaagaagacaggcaaatagaggccaggcacagtggctcacgcctgtaatcccaacactttgggaggccgaggcgggcagatcacaaggtcaggagatggagaccatcctggccaacatggtgaaaccccatctctaccaaaaatacaaacattagctgggcatggtggtgtgtgcctgtagtcccagctactcgggaggctgaggcaggagaaacgcttgaaccagggagtcagaggctgcagtgagctgagattatgccactgcactccagcctggc

SEQ ID NO: 53828 - DNA, 2748 bp, Homo sapiens
cttctacagagaacacataacttttctggaaagcgagaaattaaacttactgtgctctccttttggctttcaaaaatctttaaaactttcagcaaattaaggttctcctcaatttcaaggcttttcatgttaagttgaataaaagttgcctatttttaatatcgataaactacgagatcacttttatatttgcaaaccatatccacatccctactagatttttaaaagtttttcgaagggctaaatataaagtttgcacaaagtgatacagtagatgtggcaggcattcaacaagttcacttatcaggagaattcctaaagtgaaagcttgaaaaaaaaattgtgaagataaattccgagtagtgctactgaagatacaatgttactaacatgaaaactgagaaatattcaaaacattctgaaaacagcatctccctctaaaaataaagaggggaagcatttgccaacacagaaacatcggttcttaaaaattataatcacatgggagacatttctataaacaatttagttctgaattgcaataaccctaacctttcaaagcacgttttggccttgccttaccaaaagcaagagcattcctggtgcctttatatttatacaaaggactgtgctactttgtttctagcgcaaactgttggtttacacagttaaagatcttcaaaacaaactaccacacacaattcacttccaatcatccaaagagaaacgaacaaacaagcatctgtcacaaagtcccaagagttttctaatttacaataacagatatttttacgttgtagttcagaggctacctctgttcgtttctgtatttggattcacatactatacatttacttagcttgttaagagagaaacctcagaaaataagcaaccggcgatgacaccagtctattttaagttacttatgaagcctacagctcaagaacttttgggagaagggagggtaagccgtttttccaaggagttaagaacaattcgtgtttgataattaatgatagcagccctaacaacctcttagaatacattatggtggggcggaagtgaaaacgatgagagggggaaaaaaataaaaaaaacccgacttgaaaatggacaagcagacagatttacaaaccttcaattaaaggaattttaagatgaacttctctcaaacgccctccctcactccccacacccgcttcctcctctcctccgggaggtcggtgtaatgtgactcatgacaaattttttttaaataaataaataaataaaagacacaccctctgggggctgaaactgacataatcgcccccaccccaccctccgccgacacacaacacacaccccgctggtcctctcccttctgcggcttcagcctcgtccctgccctctcctctcccctctcccgtcctggacctcctctcccggcgcagagaggcggcgcggcggcagctcgggggtattccgggactccagccctgcggactggaggctacctggggggcgcgcgaccccggtggccgggccctgggggaagcggacgcgaggggggcgccgggctgcggcagcggcgggctcccggctccctcgcccattttctctctccccttctatcggtttccaccaccacagccacttcctgtatcgcagcccgactccctcagcccggccactcgctctgtccccggttggggctggggttggggctgcggtaggggctcgggttggtggcagccgctgaggtcagggcagttccccaccccgcccagtgggctggtcactccggcgggtcctcgacccggccagcgcccgccggccgccagagcgcctcacctgtatgtagttgttttcacagtagtctgccacccgagtcaggttctggtaactctcgatcagcgccctcttgccagacgggatctcctcctctagtaacatctgcagctctgccattttccacccctctgcatcgcttcctctcgcgttaaagagacagaggcagcaaggtccgccgaggctccgagcacctcacagcccggatacaaaccgcctacccgccctcccgcctggtattgtgggacggcacctcctccccttcctcctcactctctccagcccccctccacccccttcgtgcagccgcctgaacctcgttctctcgcgagcgtttatttctcccacccccacggaccgcgggattttttttttctttcgcactgtcttctgggaattgtagtctctcctaggctaggcggcccgtccaaagcgcatgcgcccagacacctccgaaaaccaacgcggcagagcgcagaaagcggagaccgagggtggagggagggggcggtgttggggggaagtccggagtttcctcacagctccggaaggtggcgccacagggtgatactgggggaatgaaatcggttccccaagtttcatgtgaaacttggcagaacttggttaattaggaaatgtcagtgaatcaaggacacccattcagagaaggattaaaaaggggacagagtacggaaaactagatttttacttcctctgccttcttagaaataaagcgagtcaggctttactttctgaagttccgcccccatcaattcatttaaaatttagcaaacatttcttgattgccagctgtttaccaagcagcgtactagacactgggggtacaagttgagtacgaatactccgtacccttaaagactcaattataaaataaacatacatagcttgtagtgcttt

SEQ ID NO: 53829 - DNA, 1531 bp, Homo sapiens
gcctgacgaataacagattttatagaaataatttttaacccagaagttgctatattatggaaactgcttatctcattatgcacctttccataagtgtatgacattgtatcttaaatgtgtacattaaaaataaaacgctgtacgtgcttttgttcgttaattcactttaaaattgtcacttaagtgctctctaagggatttcggggggatcggaaaccagctagagttctgtttttgtttttctgctcagaaaggcggcctgggcgctggagccctgcaaggtgtcaccgtcccaggggctacggagcccgcgggaggctgatccaggccctgggtggctcccacaaaaggggcccctcttcctgcccgcctactccagtggcactcagtccgggcttgcgacgcctattacctgttcatcttgtctctatcgttcaagccattcttcctgagcaaaaggatctgctgcactttcgccacattacccgcgctggcagctttgtggatcttgccgagatctcggtctcggacgtggtagccgggctgcgagtaggcgccctcccccggctcgcccccgcctcccgcgctgctcctctgccgccgcgcgaaggagcccaagggcgactcgcccttcttactaaaaatcttcttcatggcccaggcgaccgggcttcagagacacctcatgtctctctcggctcttaacggcctccggagcccaacataacaagtcagccccggctggccgcagcctcccaaaggaaactccgcggtttccaatctctccctccgggttaccaagcaagcgatcccgctagacacaagtgcgcatgcgcacctcagatggcaaggtccacgcgcgtgcgcacgaaggcccagtggtcaagtgtgctccatgcgcatgtgcaaggcccagacctcgcaaatctcggcgactgggacgagccctgcgttcctgtcaaacaaatgtcggtgggagtctggctgagtgttcaggacgtttgcgaaaagaagcctcgcgcctgtggggaagcagcctttacgcatgactgggactggagtagcgtggagttttaagatgctgaaagcctcttctccgagaaaactcccctaagaaactctctgaatctccctatctctcagtttattccccttccatgtccctttgggtgccatctggtctccatgagaacttaacagatgcaacaacagagggcacaggatttcggagatcgtggcatatgtgtcaagtgcagagggcacaggatttcggagatcgtggcaatatgtgtcaagtgcaaacttacgaggagaaaccaatgcacattctccagaagaaatgagaacgcatttctgcatgcctccttcccccacccctctgcctttggcccagccttatgttttattttttgcttttgattttccaaggttacatctctttcttcttttttttttttttttccccaacagagtctcgctttgtcgcccagactgtagtgcagtggtgcaatcacggctcactgcagtctcc

SEQ ID NO: 53830 - DNA, 2639 bp, Homo sapiens
aatcatatgcttaaatcaagaacctaagagtgtcgattttcttaaaaattatgttttaaaaaaactcaatgttttaaaaactatttctttgcaaaactgtaggaactctcaaaaaatctattaaaatgttaccatcaaaaaaagagactggaatgaagcaagaataaaacattgtcacaagtgattgcccaagagcgtaatgaaaacccttgaaatcatttttctcttcactaccttttgttttacaaaacgatgaggatgaggctgaatcaaaattttaactgcaaacagtttacgactcggaaatacacattttagttacttctggtcaaaatgagaaaaaaacttgcatggctggccatccgaaatattataccatgtttgggttaaatttaaattccatttaaaaggaaataaagagcaggggataggggctgtgaacactaaagccactggaaagtcggaaaaaagggaacattacctgctccctttaatgtatggtacagacattttcccaccccagaacgccggacactgaacaatgccggacggattctctagcagaaattccacgcaatcagttcgataagccagggtctctctctatcactgagctcacatcccgcctctgccctcaacagcttcatcgtcagcactgaagtctccggcccactctcagcgtcgtcccctgatccactcctcaatcctgggattcgcattgagtacatcacttcatttctagagtcccttctgagaaatcgcttccacgagcgcaatttgcaaacagccacgggcagggcgggaggaaaaaaaatgggctgaatgcctggcttacctggggttgcaccgtgctcgacaaggaaaacatctccggcgggccctcagcgacctcacccgcctgccgaaactgtgcccctctgtccacggcccggcggggaggcgctgagcccttcttttttcctttttctccgacccgttgcccctcactcctcccagaaacggaaaatggcctccccttcctacagctactgcaacgacagacaatccgccccggaaggcgaggcgctaactcaacagtacttccggggcaagtgagcgcccacaaggccaagtgcctgcgcgttctttcccgcggaagtagttgacatttacaaggagcagcgcccccaaaggtctttagctgttttttaaggggagaacagcctttaccctctttggactttttcttcgttttttttttttttggagacggagtttcgttctttcgcccaggctggcgtacagtggcgcgatctcggctcactgcaacctctgctccccgggttcaagcgattctcctgcctcagcctcccgagtagctgggattacaggtgcccgccaccacgcccggctgatttcctcttaagactttctacagcttccttatgaaatcttctgactgggccttgagcaataaggtcttttgctacaatttagtgctcttttcctcacactaaatcgaaaactctccctgttggtcctgatctgtttcagtcaggcaaattacatcctgggaaaacgtcagatgacaggggaggccactcgcttcctgctcatccagtttcgacactttctgtgctttcattagcttccagacctcagccctggccctcgctttactgtacagtcagaactggtttctacgcctcgcgagggtgggaggtcgtgtatgggaggaggaccgcttcccaccagcctcgttgggaagccaggagaaatctcttcaaatcctgcgattcagagtcaagtcccagtcgtcctttttctggtcggcccagaactgtttgtgcctcctccctcatgaggaatgatgtcagtggggccgcggtcgccgcccacgaagagtgtaaggctgcgaagtcggggctttcccgacgccccctccgtccgcgtctgcgtaggggaggtgacgagggcggggcgcggcggcggggtgacgtcacggccgcgcgcggcgtgggcggagcctcactttgaacccagttggcgggagtggctgctcgcggaggggcagtgtctgcggggccgctgtatgctgtccagcgatggatcccaccgcgggaagcaagaaggagcctggaggaggcgcggcgactgaggagggcgtgaataggatcgcagtgccaaaaccgccctccattgaggaattcagcatagtgaagcccattagccggggcgccttcgggaaagtgtatctggggcagaaaggcggcaaattgtatgcagtaaaggtaggaagtcaacgagtagcaaggaaggggttaggcccttcggccctccttcctgccccaccggcttgggcaggccccggggttgctggagcgaggagtctgggtggcctggcttgctgaagcctccagagccctgcgagctgacttctttttggggcgacatcagcggtcgggtcgggtgtctcgcctctgttccgcccttccctccatatctcagatgcccagtgagaacagcaaagtttgactctcttctccctgcccagcgttagcaaatgaggaaactgaggccaaaggcaaagggacttgaccgaggtgattacatcggtcttagtacaacaggcacttaaagccaaagccgtgattcgtagt

SEQ ID NO: 53831 - DNA, 4114 bp, Homo sapiens
gcagtggcacgatatcgggtcactgcaacctctgcctcccgggttcaagcaatttccctgtctcagcctcccgagtagctgggactacaggcgcacgccacgaagcctggctaattttcgtattttttagtagagacggggtttcaccatattggtcaggctggtcttgaactcctgacctcaggtgatccatccacctcggcctcccaaagtgttgggattacaggcttgagccaccgcgcccggcccggatttattttttaacacacccaaatccgcagtcattaagtgacaagacttttgttttcaacaatatgaagtacttaaaatctggatattagatttttctccggtttggaagatcaaaaggtaattaattcatattcaatagctccccttccactacatggctcctacacagaaaaaaaggctaaataaacaacactagaaccagaaagtgaaagggggctttggggctctctgcaggaggcgtctacagccggggcccagcgcacgtaccattcttcggcaaactctggatcaccttcacggccgcctcaaacctagtctcgtgcacggatctcgtgtccgccatctccagctgccagtgttggccccggtcccaaggtctgtcggcgggaatcaggcagcagcagcaccagctttcccaagagcctgcatgaaactggaacatggagcgcagccgcggatcaacatgccccaaaaggaggaggcccgggagcgaagcgggtcagttcccctttgccctgccctatccaggccacacagatcgaagcggcccggctccttcctcctcccccggggcgtgactaaggtcacgaatccggcccgcgacgacagcaaaacaactcaccgagaggaagagcatgtctagcagaagacagagggggtccgggcatcggtggccgcggagccgctctcccaccctggggaccctggcggagcagccacaccccccattccgccggagtccgtctgtcagtccgtgccctccccacagccccgccccagagtcaccggaggacccactggcgccgccgccgccgcagcagcagtgcagcaaaccccacccacccgacccgccgccgcggcaaggacgcgcgcggtccgtctgtccccagaggagggtccgggaagcggggaaagggggccacagtcccggcttggtgcggggagcacactgtgcgcgcttttgttcagaagggggaaaccgaggccggaccgatgtgtccgctctggcagccgggtggacgaagtgcgcgctggggatgcgcggttgggttctgcacctgggcccaaagctgcacgcgacggcaccgctgggcaacaaaaatgactctgcggtccccagcgcctgcactctcctaagttaaggtttgaggaagttaaatggggcctaagcaaagggctttaagtcgggacaggttctgtgagaaactccagttctgccatttaaattatgtgacctagggcaagtcacttagcctttccagtggcaatcgtgacacccactctaaagggtagatggagaaaagcattggggaccttggatggaggtgctcagcagtccctggcccgcaggtcttcgacagttttcgctgccctgagccaagaacgtccgaggagcagccgaaggagagaggaggtcgccggctcctaaactgggctgggacggagggcaacttcccctacactaccctttccacccagccccagggagccaggcacctccagcgggatttaataggagactgggcatggggacggccgggcacagtggctcacgcctgtaatctcgatactttgagaggtcgagtggggaggattgcttgaggccaggagttcaagacgagcctggcaacatggcgataccctggctctatttaagaaaccaataattaaaaaaaaaaataaaaataggatactgggcgtagagggcggggccaatgaggagtctttacgggtcgtcaaccctagaaagggggtgccctgggccttcaacttactagcgcaaccccctgcgtccttaggcatttgggaagtgccccaggccgaacgttggtggtgggactgactaggttgtggggggtggagtcctgtagcccggaaatcccaaagtctcccggatggaagagtcgtttttgtcagttagggggatgggttaggagggttactaggaaaaatctaggcgcagatcgtaagttactcttccctctgagccgcggcgccggcatttaccttggtattgccggacaaggcctgtccggtaatgtccccgacgcccgcccctcgccctgccccgcgggcttatgggaaatgtagtccgccgttccgccgcgcttccggacacgtcccagcggcgtccggcgttcctgctagctcttccggttaggcgtctctgtcccgcggacgccgcagccgtgcggcggaatccctccttcctagccggttgcatttcgtgcctctttgaaatgccacattcgcttccagcttaagtgtcttgagattgtcgcggtgtctgcagctgcggcttctccagcgccctccggaggctttgcttcgggtttgtctaatacaacacagggggaaatcatttgatcgtggacgtttcacgtttctttgtcttcaaaaatgaagaggacattttgtaaaattatcacacaaagatgagaaatagattagagaaccaactttgggttgtaaatactaaagaattccaaatggtaatgtatgaatggctaaaaagcagtgacacttatctaacgcgttattactttattccataaaaggaacaaacctaaattgaaggaatattcatttcccccttattggatttaatagaacccttttcatttttaatgggaaataatcaatgtgacctatagatgtttcaattttttttttaaataaataaacctctttagggtgatttctggtgggattgaggaaaatgaacgggtttagggttatcttggcccaaagtctatcttggatttgccgctagttcactgtgtgactgcgtcaggaaacaagctctgaaaaatttcgttttctccaataaagtatgtgaaattacctagcatgtagtagccttcaagatttttgtatttcctcttttttgatacttagctgagcaataaatattggacagcagcaccagggaagaatctgaatcaggcagggaggatgagcactgcccaggaggaaaaagcgaaaaggaaagtgtgctgagcaggtgccttggcgggggagagaggaaaaggaaatgacttcacacacacacacacacacacgcgcacacacacacagagagaatgaagtttctttctgtctcttaagtgatgtgtgagtggatggacagattgccctcagctttaagggcagttcaggatgatctgtcttaagatcgatgctctgtggaatgagaaaaatgcgctctgcagggcatgcccactgcatgtgctgggaggctctcctacatccaatgggcagatgcgcagtctccacggaggcctcaggcctcggtgtgagccagggctgcttcaaacatgtcggctatctaaagtaagtcccagcaggggtcatttatttaaggaccgtggtgctttccatggctgatttgctggtaaatgacaggtgtgagtgtagtgaacatgtcttgcctccacctacttcacccaccatcctgtgcatcatggaaacctgtctcgatgatcagcagccatgtgtggtggggtggaaaggacagtctccagagacagaatcctgggaccatccctgactttgcaacttactagctttcttgccacactatttagttttttcaagctgtaatttccttaaaatggggaatatgatcaatctctatcccacagaaaatttggagcacatgagttcattcaagtaaagtataccattagcaggccataacacaggcacgaagaaggaaatacaataatttgtgcgtgtgtgtggtgggttaagtgtcacatcttcataaaattcaaccctacccccatttcagtcacttgtcagagaggaaagccaagaagccaattccaagagtttagtgtgacatcagtgtctaggtcat

SEQ ID NO: 53832 - DNA, 967 bp, Homo sapiens
gagtcctcctcgtcgtcttccagctcctccgggtaagggtaatcgaagtcatcgtcgtcctcctccatctcatcctcctagttgtcctcagactcctgggtctcctcagcgtcgccgtactcctcctcctcgctcttgaggtcatcgtataccactttgttaacggccgagggcctcggtggtgcacgccaggtggctgccccagccccgccgcccccgccgccgccgccaggggcgctggtgtgtgtggtgtggtgtgcgtgtgtgggggcggaaggcagcggcagcttccgccaactactgctgcccaccctggccgagctcagccgcgtcttgggcgccacctcatcctggcggcggcccacctgccccggctgctactgcgttgccgctagctgagcccccgatgggttcggacgtgtgcggcggcggcggctgagaccgggggagaagggaaagcggacgaggagcggcgggcgcagtggaggcagtggggagcgccggggcctgacgaggaggcccgaggggccgggcgcctgggcggtagagacccggcctgccgaagcgggtggagggagaaggctcaatccgaatcgctggggccccactctggatcaccttcagccgccatcttgtttcttcccgttcaatatactaatgattcttaaatccatgtagatttcaagaaaaaaaaatcaatatatatatagtcttaattccagccgcgcatggtggctcacgcctgtaatcccagtactttgggaggccgaggcgggtggatcacgaggtcaagagatcaagaccatccttgccaacatggtgaaaccccgtctctattaaaaatacaaaaattagtcgggtatggtggtgggcgcctgcagtcccagctactcgggaggctgaggcagaaggatcacttgaacccgggaggcggaggttgcagttgagccactgtactccagcctgg

SEQ ID NO: 53833 - DNA, 603 bp, Homo sapiens
ctgcatgcagtgtttatgcactatgttccctcctgagaaggacattttgaaacaattaccccttgatctttatacttttgtcacgtttactatgcaacttttccttgggctaatttctcaatccattctttttgtgtctgccattattgatatcttcgatgttggaagggtagagagaggtattactgttgtatttgaaggaaactgtgcttgcctggctctgatgaaaaccaagattgccttgaagaaggcaaagggtacagctgagattttggtcataatggaaagtaccagatgctttaacatccaggtcttgactgtgcccttgactgtgtccccaaaccaaagaaagttcagtaacccgtagccactcagtgtttgctacgacaacaagtaatgtcaacaagagatattctcaattgcccaaagaatttattatcaaaacagtccccgtgacctcattcattgccctttggaccaagcacactcttctggcttctctgctgttagtacactattatacatttattgaaagtggggaagctactttccttccagacaggactcaggtctgggcatccatgtgtaaggccaagattatcc

SEQ ID NO: 53834 - DNA, 1233 bp, Homo sapiens
tcagcctcctgagtagctaggactactggtgcatgtcaccacacttggcttagttttgaattttgttttgtagaaacagggttttgccacattacccaggctggtctcaaactcctgggctcaagagatccagccaccttggcctcccaaagtgctgggattacaggcgagagccaccatactgggccaagattttttttaattggttaaaacaaaggtttggtattgcctaaaataactaaacaaggtggtattttatacacagtttagtcaaactgagtattttctgtcttcctttcaaacactgattcaatgtgatttttgagtgtgtttttctcattatttgtcttgcgaaagaatttcctccttatttgaagaaaagatatagtttgaggagacagtagtggcgcttcggccgcgcccagggccgcggttcgctcttccccgcgtgcgaccaggctgccagcactggggacctctggcgcccgcccgtccgcagccagcggggacagcggccgctctggggaggcggcggggcaggggcgaggggaggcccagcccggggtccgccgagcgtgaccttccccggggcgaacctcctatccccaccccttcccggaatccgtgcaggggcactggccacgcctgcaatcatagcaaaaatgtcccagtggggaccattcagtagcaagaaatagcacggcgcgccacccttacagtcactaactcttttgttctccgtgtttaggtagaaacatgactcagagaatcgggttcccgctctgcagcctaagccagaggcgatggtttccgcttctgcttctcttggcagtgacctgccttgacttggtctgctgccttttgcaatctgctcttgaaggaagggccagcctctcgcatcttcctaggaacaagtccgaccacgatcagggctattgtgaaattagctaaattagtccgttctctcgacttttggactctctcctctgaatgccttataggtatagtttggcaatctcgctcacacctgggtgtgaacctgcgtgtacccagcccgggagatatcggggtctgtacaggattggtaccccttatgggttagagagaccttctttccttagctccaaggccagatctacgggtgctgttccggtgctgagagacagcgtgtttctaacagaaaataagtgatataattaaggactcagcgcatgcactcaaacacacagagcc

SEQ ID NO: 53835 - DNA, 697 bp, Homo sapiens
agcacatgctgtgcacatgcatggacactaacacgtgtgtacttgcacacacttgcctgtttagtgatgaggactttacattagcttgctgactttcatgctaattgtttgtacatttctccatgatagttaccacctcctaacatactacctatttacttatgtatcttgtgtgctttcttccttaggcactagaatgtaatttcctttgtggggatgaggtgggggaagacttctgtttatttgttcattgctttgtaatcagtgcctggaagagtatcggtcacaatgtaaacacttgagaaatatttgtaaaaggcatgaatgaatcatacacttttaacactaggtgtctaacagtaggcatttagcactgggaaggaagtccaccactactgtgattaaaaagaaggaagtgttaccaaccactcagcttctgacctcccttttctaatgtaggggattctttaaattcattgtttctggcaggacagagatagctaacaagaaatgttagccattcccggttggtgacttcatctgccagtccctgccctgcctcttgacctgaagaaagtctaggcagaaggatggcatctcagggcatcatccatgcaaagtgagggtgatgagacctgcagtagcttccagtctatgacaagggttcaggccagatcccctttgagaacattctgaa

SEQ ID NO: 53836 - DNA, 1761 bp, Homo sapiens
gttaacaacatgtcttcacaaattaactcacttaaccttcataacaataagaagcagatgttctaagaagtgttactgtgtctctcagagatggagaaaggctaagaaagctgggtagtatgacaaggcagttataaggtagagctggacctaaatttaagataatctgcttcaagcacagtgcttttcccaccgcagtgcagctgttatgagcagctgccgaaataaaacagcttgatattctcctgactgagtcctcccactgactcaaaaggagggttaggttgaggctggggcggagctagacctcaagaagaagccaacaaagtcacacacagcgctccccacctgcgcttgcgcaggggaggaacacgcagtccggaaaaacgccggggattctgggtcgcgcagccgtggagctacctcaaggcggaactggggagtccagggcttcggcagcctgaacacccggtgtgaaaggaaggtggcagacgtggagcggcgcgcatgcgcagcagctcactctgctgaagggctgagaggcgcacccgggcggccagctgggctcggagcggaacggggtcaggatggacgaggacgtgctaaccaccctgaagatcctcatcatcggcgagagtggggtgggcaagtccaggtgaggcggaggtgcgggtcgtgacgagggtggctgggctctttctgccccggtggctgctgtctcctgggccgcgacgggaactgtaaactgcagcggcgggctcgggccggctccgctcgcgccctcctcggcctctgggccgcgctctcccgcgacgtttgctttcctctccccacccgcgcctgcctggttcccggcctttgccaggcccaagttctctgggtcgctctccctcctgtagcgccgagaaaacaccattccgagggccgccgctcggccggcaggtttgctgcgcggagctcagggcgtggcgggctggtttgggcccgaatccggccgggggcgccttgcctcgaacctctcggggttcaggctgcctgccaccccgagacccgggagacatagctttcccacttgagggtttctgtggggccttctctaaatacataatgtcctcgggaagtttcgtgacgccttaggtcccattcctggcctgtttgggcgcagcttaatgtcgattcttttacttttttattagtcggctgtgaaagaactggatcttgtgactgctggaaaatttcgctttagtgtaaggtccgagtgcttcagccgtgggccacctttgaaaataaaatgtaattgttatttctcattttgccacatcctgtggagacagaagattagtgttgtgctttcattttttactttttccttggggaaaataatattgacagtggagttgagtataaggtaagacatggatctaggtggatgttgctagagggctgtgatttcatccaggtcttggaagagagttctccagctgatgtcattcttgccatctgattatgagtaggttatgttcaaggccgtcctgatccttaaaccacatttgcactccaggggctgtaatcagtttcatattttagctataccttctgatacacgtatctttcaaataattttttgtatttcataaattgaaatagccttaattctacaaactagaatgaaagctctcctcaaataacttgtaaaagtcacttcataaagtcttactttttaaaagcttcttcagaatttgaaagcttatgtaatatatt

SEQ ID NO: 53837 - DNA, 2347 bp, Homo sapiens
ccctggtgagcgacgcgtttgcccgcccggacgctccacgccccggccaagcccgggccccgcatccaaactgcgcattcctgccttgcgcccctgctttgcgcgcgcccagagtgtttgggagaggcaggaagtgggagccacacagtttctggatggggagatcatttcgataggtttatcttgaatagggggataccttgaacccaataccccaaggttagaggtttagaagacgaaggtcaagtgatttgaagaatactgctattccagtcgcgtatctgggcagcggggctaactgctacccttccctcacccgctggcgccgcaccctcgagtggccctggcctggcaggcctggcagggtatgcggctggctctcgaaacttccctcggggatctcttgtctgctcccagaggctttccgtcgcttgtggtcaggggaaaggtcgccgactggacatagggaataaagcaaaggagcattgccgccccggctctctttaagctatttcctttgatcttttaggaaaagggggaaactttctaaaggagttggtggtttgtggaggaaagctgcagaacccaaaaacaccgtcgggccgtttcccgactaagggagggttaaaagtacggcaagctctgtcccatcatgtaaggtaaaaagacctcaggaaaagcacattcaaagggggaggaggcagaggcagccaggagcctggagcgtggcctggggcgctgcgctccctcacgggtccgggaggtgtcgcgcgcggccgccagcgagcccagccgctccccgaggcttgcgcgcctgcgccggagcctcctgggtttctgcctctttaaacactttgaaatgcaattccacccgaaacgactggtagtaacattttgacgaaaccgaatctctgttttactaagcagcgacgccgcagaacaagcagctgatgcaatcgttcaggtggaggcggctaggacggccgcccctccccggcggggcgcccggggagccgccggatcgggccaggcagagcctgccctccactcaccggcagtctgagcagctggcccacccgcaagctaccgccccccccagcatacccctcaccccgctaaactcaaacccggccccgcaggcccggggcctccccctccgggttcgccgcgggcccagccgagccgcgctcacgcccgggactccctggcgggaggcgaccttcccgactccttgggccaggcgagccgcggggctctggcgaggggctcgagtgaccgaagagaagtccgcggagcctgagcctggactccccgactgctcggcttcgcctgtttctctgcaccgagctcagtcctttttcctcgccctcagccgcgcaccggcacccacagtccggagaggggcaaataacccccaactccgaggtccaggcagcggagggccgaggggcagctcctggcgcccttagtctccaccaagctctttggagctgccccgacgaattgatccctcatgttttaagataggagccccttaacatgagaatgcgcgagccctggaggggcagacctgcactcccagggaactccgggccctttcccgtccacccgcccgcgttgccacgggaccccgtcacagctcaccacccccacccctccgggccgcaggcgggcagggcccccaggggagtgcgcatacccggtcctccggtgtctcaggccgaggttgtccttgaggggcgggccgtcgggaatgcccacctcggggcgggcgtgaggactgtccaggacaccgctgtagggccggccaccccgctcccgctccgaggcgcctccgtcctcaaacagcaccgcaccgctgagcttgttgaagacgatggtgttcatggtgtcggttggtagggacgcgcggcgcggccgcagagcctcggggctgggccgccgggagctccgcagcggggctcggcttctaggagaggaaggtgcatctcgttacttactggctgagagtgctcagacccctgcaggttcagggccttgaacttggccgggtcgccgggctgcggagccgaggggaggagcggcgccgccgcaactggcagggaccctgcggctctccccagttggctacacgcccccgcccctgcaggttccccggacaggtacctgccctcttccttgcctgggcgatcgatccccccaatcccttcactccccagaactacaaccgggaatcattcacccgcagaggcaaaggaaacgaattcccaaacgagcctctgggtttcagtttgaatctgggagaggcatactccggactgcggagcgcgaccggcgtgaggccgcg

SEQ ID NO: 53838 - DNA, 1166 bp, Homo sapiens
aaaagaatgcatacacttaagttgtcaaaacatagtccttacatagcttattaaataaccaaatgggaaaaataaccagaacaaaaaccttcagcatttttttcaaaataatgtctttaataaggggattacatttattttcatagaacagttttgtttgtaaatcaatctgttcaacacttaaaagaaatttctcgataaaaatagtggaaagaaaaaaggatattagaaacaacaaattttgtccttaacatatctaaatatcctgtaaatttaacaataacctgacaattatcaatgttatatacatatcaaatgagttatgcagaatcatttatttttattctgtctatattatctgatgaaaggtattttagaaagtaatcctaaacagttcctaaattactaagaggatagcaatttaaaagttaaatatgacttcagagactcgctttcagaagggtggaaaaaatactggcaatattacagaggcaaatctaactatgagtcaaggtacaaagcatttcactacaatgacctcagagcaaataggagtgatcagaacagttctcccctcatccatccaagctacagaatagtggccaaagaaaacacttccaggaaggtgtataccactgtatttttatttttcaaatacctatggatccttaaactatgttggcttggtttgaccagtattagcaaatatcacaagcaaatcattattattattcaggctcgtgctttgaatcacccaagttgtgactttatttaagcacatgtcttagtaactctgacctgtcatgcgcatctaaagcaaacggttagaaaacaagaaataaacgatatgatgtggcttaggcaaacagctaggcatgatggacatcagatgggtcactttgaaatctcaggtactccattataaagtgggttgttaaacatagagtctatttttttataggaccaatgggatagattaaatactacaccctcgattaaagacttagcgccatggaaatcaaatgataaaagccataccacaaaaaccaacaaaaaattaaaacaccaatgccaatccacaaaaaaatctgtaatttatatcacatatagtacatatttcacattttaataaaatttcatgaatatgctgtataaatttgcaaaag

SEQ ID NO: 53839 - DNA, 2019 bp, Homo sapiens
caagaaatacctaacccaaacttcctggctttgaagaaggaagagctgtattttaggtgacatttaataaaataactatatttggaaatcaaagacagtagtagtagtagtcactttcttaaagagtgagtcatggatttattattaacaacctcaaccacccctttcctcaaaagattcatgttaatattccaaatatgaatctcatatttgtttgttcctgagaactgatgatcccaaagttattgctagggtaataggaccctttgttctgccatgagcacctgctttaatagtcaaaaataaacatcagggtttggtttctctgcattcttattaacaaacttacatgatttcctgttggaaactttcaggggctgaaccaatatttctggtcgtctcaaagccaatctcctgggagaaagaaggtcaacatacctatcaattttcagcacaggtccgaggtgaatacaatatcaaaatatttagtcttaagaaaaaacttaaaggttagagaaaaaaatgaatgtaatgcaatagattcaaattaagaaacaaatcgcccactttcaaatttttgtaaattatcttccctccctccaaaaccactggtcttttttttttccacctttcatatcaacatggtttcaagatattaatgtgctattttccatttgcttcataacaaaaatctaatatgacccagtactgtcatattatttttggtcattcatcatacttagttagacaaaacagaaatccaaacccacaggataaaaaattctaaggcaaggttttatagcatattttatcacatcaatgccagaatgatattttgcagagaacaaaaggtcagctggagaaaagccattattatgtaccagcagctcacctttcctggaaatgctttgaggggatcaagcctgccctggggttggcatcagcttcgtgtttcgcttgccaccaagttgcatcatcttggctcataatctgaagaatatctccctttttgaaagaaagcccagcttccttacatggaattgccttatcctcattaggattatagtcaaagagggctttgataaacatctggaagaaaagtttcattaaagatgaataaagataaaaaataaatgtgaaatggcctatattctcctaactccgactccaaacatagtaattttaaaactggaatattgaaagaaatgtgttgtgacaaagtggatatgtgttggatggaaaaacatgacttccctcccacgcacgaagaaatgtttttaagcaataattaccttgccttcttttgatggtgtctcctctttgctgccgggtataatcttaaatgtaattgctccctgagactgagcctggtaacagataaaacaaggagttataagaaaaccagacccaaggaagaataaggtaaaataggtagaaagtgaaatgcatctgaaaatttacaagcttggggcttctactcttagatagactaaacggaggaaactatttttgtagaaattcctgtaatgtgagaaagaaagctctgaagtttgtagaataagttaaaaaacattaactcctaaatccacttttacttcctgtgtacttttaagctgtcaagtaaatacattcccatccaagtttcttcgaaatagaaacacacaaaatatgcacaacaccttaaataaacacagtattcaatgactagaacagataatgtataaaggtctgggtgcagtggctcgtgtctgtaattccagtgttttgggaggcaaggtggcaggatcacccaagcccaggagttcaagaccagcaatatagcaaaacccctgtctctacaaaaaaaattttaaaaattagccaagcgtggtgatgaagctaaggcctcttgagcccaggagttcaaggctgcggtgagctgtgatcgcaccactgcactccagcctaggtgacagagcaagaagcttttttttttttttttaaagaataatgtacaaggttcatacagttacatttaag

SEQ ID NO: 53840 - DNA, 1465 bp, Homo sapiens
aggaatagctttatacaactttagcattccacaaattgttccaaaaggtaagtttaattataaaaattctcaaaatgtcacactacatccaaaaacacaaattaataagtgtctattaggtgtcgagtaatgtgccctgtcagcatcgagggtacagaaaggacagacacaccttcagtccatatcttcttaaagtttatagtatactttgtggaggcgttgacattaaacaactaattacattgttttaacttgctttttagccaattttctcaaaaaagaaaacaaacatgttctgtgagcaaaagaaaatgaaaattaatgaaaaccagaagagggaaagtaaagaaaatttttctctctgccacctttacttcctttttatttttaacctcagaattctatgctgtgggaaaagtctattttccttacagttttctattttaatagctgccggttagtcttggttgccaatatgggagggaggccataccatggggtcaacagcatttcaaatgagcccagagattttaaaaagtgaaaatatgctaaactcactggaaagagaaactataatttcgctgagtcttctctacacatttactgaacctctttcacgggtatgttgataaaagtttatgcttgcaaccaaactttttaagtgtaccgtatttgaaacttggcaggcagttctagtatattgcagaatcctcagataaacaaatcaagggtaacaaaagcacaccctctgtgtaaatgtggattatggtatcaaacgcctgcacttctctagttttgttcattctttgtatagtctttctacacagcagactttctgtagttttgttatgtctttactttttgctcgtgccatgttccaaagagaagaggggaggatggatgggctcttggtttcatgcagttattcaaaagccgagcttctttccatctaagcagctccactatcccccaggtcctcatagtctttccctggatacactgaataatgttgccaaagcagcagtcatcactatcccagcagcacaagagcctgtgctaacgtctttgcaaatctcacaaactgccaggtctaggatgatgcaatgtactttcattggcctacggagaaggacgatgtcatgaactttggcaacacattttcatgaagttgcaagataccaaatctaattgtcctattaatttcaagaggatattttactaaaatgccaggtaggacctcaacatactacagatttttaaaattcagcacaaacaaatacattgttaagtaaaatacgtgatttagaaataggtactgttggaatggtacgaaaaaatcttaaaaacagtcagacactattcaatcctctcccactgctgatttatgtaggaaggttaaacagctccacgtggcacacgccgaagtcttatttcattctagacacttggtctaccctaaacatac

SEQ ID NO: 53841 - DNA, 443 bp, Homo sapiens
cttttaaataaaaataattccaaattaaatgctaaaacttattaagtatgtccaagcattaaggaggcagatgacaaaatgtaagtttatcctgctggatgcattaaggggaaaagaaagctttcacaataggcaataaagacaggcaacaacagaccccatgtattgggtagagtgaactgagagatgagaacttaaaaatgtgatcacacctgccgcaccctcccccaattgacctttggccaggcacagtgactcacacccagtaaacccaacacccaacactgggaggctgaggcaggaggattgcttaaatccaggagtatgggaccagcctgagcaacatagcaagaccccgtttctaaaaaaaaaaaggaggattgcctgagcccaggatttgaggctgcagtgagtcaaggtggtgccactgcactccaggctgg

SEQ ID NO: 53842 - DNA, 1253 bp, Homo sapiens
ggctgggtctacctgtcacttaagaaaaagcccccaaatagattcacgctaaatgctgcttttaattttttaaatagcaaataagtaaataaataatgctatcgtgtagattacacggccaaacgcctgttctcagaaaacatgtaattaacacgacccaagtgaagacgcctttctggcttagggaaagaaaaaaaagaagccagccagcttatcgctccctttcagtcggttcttttccccggggagccggactctgactcaactccgcagtttttcctccacctgtcggttctccccgctctgggtctgccccgccgccgcccccgcccggagtcccgcgcgtcaacaggggtctccaggggtcctcagggtcccgcccgaggcggccccgcccctgccccggccccgcccccacctcctcacaaggtgcccgccgcgggctcccaggctgaggcgcctagaggccggcaggaggctccggaggaccgcggcaccgctcggcccggtcgccggcgcagggagcagcttcgggggccgaccccaccgcccgagcctagccctgggctccgacaggcgctccccagaggcgccccattacctgctctgggctgccgcggtccgcgggcaggaggcgcactcgctctggcccctgcagccccgggcccggaggcaaggaggcagcgaccgccaccgccgcagaggacaatcgggagccagcgggctcggcaccgccgcggcgggcgcagaacgcacgagcccagtgggagcccggcccccgcctccagcccggctagtaaccaacacggcccccaccctcggaggggcgggaccgcggttggaggggcggggcggggctgcaccgcccgcgggtaagaggggcctgctgataggctgcgaaggcgataggcgtctcagacttgaagacgcctctccagcagaactccctcattggtcggcaagagaaaacaaagctgggctctgattggtgacagctctgtagctcctcctcatacccgcagtccccgcaagttccacccctgcccgcccggttcgctcgcccttggttcccactcccaggtggctgcagactggagtgtgtttcatggacgagcaacctccctgaggagaaccccggatacgcaggttcattcgccagatgcgagttttcttaagccgctgcgattctctgatttcagtatgaacttggtgaataacgtaatctttaacttcctttggattcagacaagtct

SEQ ID NO: 53843 - DNA, 548 bp, Homo sapiens
aatagccaggttaatagaagaaaacagcaaacaaatgtatgtaatgtgcattagcacaggggagtcacagaaggatgattacccagtaacccaatgaggctcagttgcttttatatccttctttgtggaggaatgggagaaaagggaaatatggctatttttagacgtagtgaatgatttataggggagatgaatgagccccatgctcagacaatggtaagtaaatgattctctttggaaattgaatgggatcagagaacagatgatagtttgggacaaagttcatctgggctccaggtgtggtgtttcactttcagtctcctctgtgatacaagctttaatcttctcaggttaatgaaatttcagggaggatattgaaggcaattgtgttcctttttggcgggtccagtttctacctagattagggaacttcagagaacattctcttcttgtgcatttgggagagacagaaggtgaagagacaggagttggaggtggggagaaggtcagagtgaacttgaggctgcttctttatttcagtatgtcaa

SEQ ID NO: 53844 - DNA, 3214 bp, Homo sapiens
cagcagtacataaaatcaaatttgtagcaatttcacttaacacacctgagaactttcacatgaattttctttcaccaatggacttcagcgaggaagaaacagaggagggaaaagtgagagataaagagagggtgggcagggcaccgctgggtatggaaaacgttagaaagggatggaaaacgttagaaaggggtgaaaagccgagcgcagtggctcacgcctgtaatcccagcactttgggaggccgaggcgggaggatcgcttcaggccaggggttcgagaccagcctgggtaacacagcgagaccctatctccggaaaaactttttttaaaaaattagccgggtgtggtggtgcatgcccgtggtgccagctacttagagggctgaggtgggatgacccgtaagccccggaggtcgaggctgcagtgagccgtgatcgcgtcactgcactcagactggacgacagcgcgagacctgtctcaaaaaaaaataacaaggggtagggtggggcagtgagatggttcagcgttgttcccaaggaactcatctccctaaatttccagtctcaagcgccgctttcattccctgccccgagcggcgctccccgctccgtgcacgcatctccgctgagggccgccctgacgcacggccttctgccttgaacacagaacccctcagcccttcctattagccgtttctggccgggactgcacgcgctccttcctgcctcggggcgcagggtgagacttacgtctaaagggcgcccggcgagctcgcagcagcccctgccccgcggagggccggtggcgcgcggcgtccggtgaggggcagcggcccgggctcggttccggcttccagcagcggcccgaaggcgccggagcacgctccccgctccccagaacgcagcttccgcggctgcagcccaggcagctcttcgggaagcgtccgcccgtggtctcgccagggggtttccgacctccccgcccgacagcgcaggggcgggggccgcggccggagagctcgcccgagagcaccccctcccgctgcgcctctgggcgcacgcgcagccgctgcagcctcccttatttagtccgcgatggcttccctcgcgccccaccgtcctcttccggaaggcggctccctccctgcgcagcccggagcccctgagatcagcctcgagcaggcgcccgagcgagactatccctaaacgggaacggcggtggccgactcgcgagtgaggaaaagaaggaaagggcagactggtcgcgaagagaagatccaggcctcagaggaggagaaaggccggagccagccgaggtttgccgagggcggtgttccggacccgcgcggtgcggggaggaaggccgagggtgggagaggaggggcccggcggaaactgccgaggtttcccgaaggcggcagcgtccgagttgcccggatgtagttggtggagcggcagcggcggcaccagcggcggcggcggcggcgggaggaggaggaggagaagaaggaccaggcggcggcagcagcggcggcggcggggggaggaggggaggaggcggcggagcaggaggaggagaaggcggaggaggcagtcgctctccgcggggctgagccggacgcgtcgtcttgcccccctccccccggttcgcggtgccgccgtgtagttggcgccgctgccccggctgagagtgagcgtggtgtcgacggagggagatggcccgggagcgccggcgccagtaactgggagctgatgagagtcgccgagggcgcgccgggcccaggtgccggggctgcccgccgcccgccgccgccgccgcctgcgcgcccgcccgcctttcgcggccgctctcccccctccccgacacacactcacaggccgggcattgatggtaatgtatgcgaggaaacagcagagactcagtgatgggtaaattgtcttttcgtttcgggccgggcggcggcggggggcggcggcgggggggctgttcctccttatctggagctggccgggccgccatttttgttgttaaccctgatccggatcgggttggggaggaggagcggccgcgcgggcgggcgggcgggaacgcagtgtggcggggagcgggggcccggcttcgcggcatttcgccctctccggcccttccggaggctccgggtttgtgccgtgtgcgtgcggggctcggcgctggggcgctcggtaggtctcccgcggggaggggcggcgggggccccgttttcttcctccccggccccccacccgcgccgtgtcttatgtcgctgccttctcttcctgtttttcagctgtcacgaccggaggggggactcgcagccttaccaggtaccagccgaggccggggtggagggattggaaggggccggagggggaagggagggactgctactcgagcgcaggcctcagaagtcgatacaggcccttcggtgcaacacatctgaaactagcaccgcggatccccttaaaattccaggtttggttcctttagcgctctccagcaaggtttagtgacttattttgacaggtgactggagggagttcgctgatttaggaaaaaagaatcatttgcagccagaaagacctgactcgattatttgattatttgcgagtgaaggaatcgatgggatgagatgataggtgacttacgaggcttatttatttatttattgtgttgggggaactgaaaagttaatgtaaaggtattaaaattaagtgaagaacttgggtaaatagctaaatgacttacaactttcaagtcggttataaagtactaccctttccccttttaatatttttggtatacttaattgccttacaagtaaaagatatgtgtgcttttgtttctgtaagaattgaggtctttgggtacttggataatcattctgatgtaggtggttctaggtaggtgggttcctttttgttactgcagtcattgtgtgtgaagttctaaggattatgatgaaagtggccccaattttcaggagggaaacctcataatgattgttaaccatcagatgactgcagaaaacactttctacatcttaaaggactagagagcaggtttctaacctgatggttgtgttatacagctgaatttgaaaacactgtcttctgatatgtaaaacattggatatgtcaaaaattaaactttactgaatctgtcctccaaagcatagctgattacacattgcaac

SEQ ID NO: 53845 - DNA, 616 bp, Homo sapiens
aacagttcctcagtgaacttctataatctagttcggctagagctgtggctgggcaaggaggttggtggggaatgcaaagattgggactgaagggagagtgaagagatatgtctagagatgttgtcatacatatggtttgttggggcttcccctccagtaatcattgagattctgtttttatctttagtacagtactttatagtaagtaacatttccatctgtttctttttgtgtataaaattggtttaggcagtgtggcaatatgtactttcccttgaataaacaaccatttcatagttcaacagcaccaaaagtgtccaatattgggttatcaatggctctatccaaaaatgcacctctggttgtctcagcataaaagcaggatgactaagcacccaaaacagatggagttttagaataaatactgctttgtgagcacatgtctcagctgagacacatgagcagtattgaaattgccttatctgtaagggagaatttacttaaagttttccttgaggtaactctgctgtaatacgctaccttttttctctctttaataccacatatttttgggaaaagtactattccaatttattttattttgtacagataatag

SEQ ID NO: 53846 - DNA, 1119 bp, Homo sapiens
aatgtttgacttaatagaaaaagacacttagaatttcataatttcgtatctgcttctgcattcaatctgttatgatacatccagtgttttgttgagcctctgggtaaacttcactgtatgcttgtggtaaaatgaggaagaaaaaaataatcatgttagtattattatgaaaatagttctggtcttgtgaaaggctgttggggttccccaaggtttcctggataacacttggagagctgctttagagcatatattggcaaccatcccaggccaaatctagaaaactttaaatgtttgcaggcctttcgtttaagtcctcaatattagttactctttttgtaaagttaagaaatttgacacctgctattgcacatcggcattgtaaaaattatcccataatttgaagggtttctttttccttaactccttgaggatggcagtggggtggagaaaataaagttattggtatgtgattgtatgctctaccctggaattctgttaagtgtaaggtatcagcttggactaatctagaatttgataggcaaaatcaatgtagtgtggtagaccggtgctcgggtttgtgaactttctgtcctggaggttgtgccagaatgttaatcacttaaatagaatgtttagttcagctgacttttttttttccttaaagcacaacttctgtgaaagaaacagtatgtttatatattcaaatgcaaactccttatttcctccaggataagttggcaaaccatcacttggaagagcactggcctagaccatactgacctctggtgtcctctgtccactagtctcaaatctcattctacctcttcagttcagtaattccacataaccacttggcaagcaaaccaagccttccagataacatccgtagaagggatcagttgcataataatttatgtatagggaggagtaggtggtagggaagaacttcctgaatttggccctttgtgattgggttcctaaagcttgattgtaggcttctggaagctagtgggattgaaaattaactctccactgctttttgaggtgtgagggcgcagggctgctttgccaccctcattattttgggatgtaaacctgagcatataaatacatggc

SEQ ID NO: 53847 - DNA, 471 bp, Homo sapiens
tacatatgtatgtatttgaaaaatgggattctgtgttgctgttttttacctgttcttttattcagcaatgtgtcaggaatatgtttttatgtctgtttataattctgcagttgttatattgattgcgtaggtataccttcattgacaaataatcccctatcaatgaatacttgggaggttttcagccttttcctactgtaaacaagattatgatttcatatctgcccacttctctgattactgccttcagttaaattcctagataggcaaatgatgagtcattgtgtctgtgcttgtgttgaaatgtagtcatgtatcacactttttttttagtttaggtgatgtttgaggaagaaccttagctgtgttgttgcttttttaaaaaattggtcaacttagtaataaagtgaataagccattcaagtatttaacttagtctatccaaaacatattggcagagtgttaccttgt

SEQ ID NO: 53848 - DNA, 551 bp, Homo sapiens
gtgggggcagagggaggtcccacacacttttaaatgaccagatctcgtgtgaactcagagcgagagctcacttatcgccaagggcatagcccgagccattcatgaggaatccacccccatgatccaaacacctccccaggccccacctccaaagttgggaattacatttcaacatgagatttgggccagggcaaatatcaaaactgtgtcagactgtttcacgcgctacatttctcttatctttcagctttccattccaggtcagtttgtttatttagccagggctaccatgcatgactcagataggagcagctacccagcaagctggtggtgcccagtcaatggtaacgagcctcggaaatgcccaaccaccttgtaatggcaattacaaacatgcttcttgggctgaaaaggcagattaaaaggttcaatcatttatcaaatacctaccatatattaggtggttgtatataataatctctataaccaaacaaagccacaaccctgtggggttgtcattcacctgcccaagcagtcattgggtggttggg

SEQ ID NO: 53849 - DNA, 2983 bp, Homo sapiens
tcaggttttggagggagaggataaaagaacattccctcagataatgagttttaaccttaattccttccaaagcggagggggaaacaaaactacagcaagaccaccttgagtaccttgggaagggcagccccgcgatccctaataaatgaattagcatctcaaggaggagatcactgcggggctgatattgatcagggtcagccggcgtgtttgccagccattgtttggggggtggttaattgagtgtcagtctcggccagtgtcgtctcgttggcgccgggtgcttttggatttgctaattttcgttaagtgtctctagcccgctactcgtcccgcgtacccgggagaacctagcggctcctaacggatcaacagtcagtctgtctgggctttattgatcccatggcgggcagctcgaggcggacacgctgagggggtggggggcgaaggctgaatgcagaccccagcgctgggccgcctcccccgggctcccacccgaaccctcctccgccacctgcacaggccggggcattgtcactcgcccctgggggttccagaaaacgcagtgcggccggggaggacgaccacacggaccccctgcgtgtttcggggggcacccaaaagaagccccgcgctggggaacgctgaccacccgaggctgagccgtcagggtctcggaggcgggttcccgagccggtcccggggctgggctcccccggcgcctcgcgaaggtcactgacgcgcaggcctccgcaagggggagcgcgggagacggcagcgcaccagccgggcgccccagccgggcgccccagacgccggcgccgctcggagccgccgggcaggtcccccagcgctcgcgtctgggcccgccccccgctgcggggcggattgacaggagcccggcggccaatcggacgccgtggggcggggcgaggcggggcggtgcaggccggctcccggcgcggggcgctatttacggcgcggagccggagagacctgggctggcgcgggcgggagctgcggcggatacccttgcgtgctgtggagaccctactctcttcgctgagaacggccgctagcggggactgaaggccgggagcccactcccgacccggggctagcgtgcgtccctagagtcgagcggggcaagggagccagtggccgccgacgggggaccgggaaacttttctgggctcctgggcgcgccctgtagccgcgctccatgctccggcagcggcccgaaacccagccccgccgctgacggcgcccgccgctccgggcagggcccatgccctgcgcgctccgggggtcgtaggctgccgccgagccggggctccggaagccggcgggggcgccgcggccgtgcggggcgtcaatggatcgccactccagctacatcttcatctggctgcagctggagctctgcgccatggccgtgctgctcaccaaaggtgggtgccgggggcgcacggggcccggggtcccgtcctcgccgcggggctttggagccggctgcagaggctttgttagcggcaggcgaggctccctcctgcgccggagccgcaggtcgcgacaagttgctgtgttcttagaagtcgcggcggtggcctggcgcgtggatgcggactccgatctaagggcaggcgctgatcagagggtcctcctggctctgcctgcggggagcggcgcgtttgcagcccagcggggagcggggccggagtctcggcctcgacgccgccgcttccgcaccctgggggctcgggcggccgggaggaatcgcagatcctggcctgtagctgccgcgtgccctcagcgtgtctgtgtgagtgcctcagggtgtatttctgtgagtgtgtctctgagtctcagtatccctaaatgcatttttgtgtctctgagtgtcgttgtgtttctgaaagtgtgtctgaacctctgtatcactcagcgtatctctgtgtctctttgaatgtatctctgaatgcatttctgtgtctctttctgagtctttgtgtctctgaatgtgtgagtctctgtatctctgatcttgagtgtgtctttctgaatgcatttctgtgtctgtctctaagtgtctttgtatctctgaatgtgcatctgagtctctgtgtgagtgtgtctctgcgtacatctctctgtgtgcgagcgagtgtgtgggtctccctgagagtttaggtgtccgaggtgtgcagaagtgtgtgttgtgttgcttttcagcagccgggaggagtaggctctgtcagcgtctcactgccactcacctcatattttacaaacaggaccaaaaaaaaaaaaaaggcagcgggtcagtttcttctttcctctgcaggctttcaccttttagaaagaaataacccgaactgtctccgaatttcaaggttctcctcacctccctgctgtgaaatctacctactgttctgtgaacagataatttttttaagtaggaagcagtttagtctttgcagccccctacttctctttaattgctatgtagcaggcatgaggttaaagcataagctagcccagcgaggatgatgtgctacagtatttatttattttggaaggaagggtgtaattaaccctaaataacagcccttgtggcttgcagaggggagcctcctggccctatcaaaggcgggcagaacagggagggactgaggctgacatgaagtcacagataccgaaactatgtgcctgataatgatataattaggggatcagagatttctgacggctgcggacttcaaaagctttaaaagaagccagcagtctctcctgtagccatcttgactaaagcagacatttttgtttaatcactacatacagtaacgagaaggggacagaaacagaagggcattgttccacagtttcaaaataccagtcccctttctggccttttgcatgccacaggaagaaactttatgaacgacagaaatatagttttaatacagtggtacaaaagtccatt

SEQ ID NO: 53850 - DNA, 683 bp, Homo sapiens
gtgttacatatttttcactttcttaaacagagcatgctggacagattttaaactttgcttgatgattcatgtcatgtttaagagcatcaattattatgtaatgccatattatagggagtttaagtatcttgcccaaggctagacagctgttaaatggggaaactgttcaaatgcaggcagtctggctacagagcccatgttcttagcaactatgctatcatgcctcaccaagtgctcaaaagaattagagatcgctgtgggctggagatgagtcgtcccaatagtattggttgctctggcaaagagcagggaggcagaatctgaagccatccagcaaacttagcaggggtggagatcagggtccactttgctgacatttcagaatagagaaatgccatgtcatagcaaaagtccaggaagaaccagatcagagatagaggggtgaaacaaaaagtggatattggccaagtgtgactcatgcctctaatcccagtgctttgggaggctgaactgggaggattgcttgaagccaggagttcgagaccagcctgggcaacatgatgagaccctgtctctataaacaatttttacaaagaaaatattagccaggcatgctggcatgcacctgttgtcccaactactcaggatcctgaggcaggaggatcgcttgagcccaggagttt

SEQ ID NO: 53851 - DNA, 836 bp, Homo sapiens
tgacagtgccagctgtataccatgttcaacaacatcttgctgttgaagggaggtggagtaatggtgtgatgggaggcaacctaactaggtacagttaatgaatggaagtcctggcggcagaatgagcaccttacacgtagagtgacagcaacagggaagcttgggtctgggggaggggatatagctggtgaagggcagggaaggagggagaagatggacagccttgaatgtaaccccaaggggactttccaataaacgttaataaagtagaaatggaaagggaacagctgaggagttggaatgatggcagaagaagttgtagtttgttgttcaggcagatgatgtgatggaattggagtttgagaaggcttagtagagtttatatttctatcatataaaatgttcaaaggttgggaaatcaatgatttactcatcatcacactgggactgctgatagactagtatcttagcctgggttctctggaaagctgatacagccacatagttaaagcttgaggtcatacttcacatgctttattttagcatatgacctaggagcaggagtgaaggatgggagtgaagcaaggaaggaaagagagtcgattacagagctgtttcgttgagctggtcacagctcctgtgtccaatctcgtggggctgcctgagatgtcttgaagtcataagcccagagaaagaacagaggggatgcctttatccactggatccatttttccaatgatcaaaggtttgtcctatagagtattaatgattaaaatattaaaaccctatggagattattagaaagatgataatttagtagttatcatcatctggga

SEQ ID NO: 53852 - DNA, 584 bp, Homo sapiens
ttttatattggtactgcaagctgttcctaaccttaattgtagtagaaaatgaaactatcgccatggagtggtgtgtttaaaacccaccaagaggtttcagcaggagagcggaaccgaaaaaggagggaatcattaaccacagaagtgactgaagtggtttaataattatgttatttcaagaggaaaaaggatgtgcctaaagtagaaggggaagggaaggattgataaatagaacttatttctatcctaggtagtcagctggtagagctactagtgggaatggcctattaactaattgatctgctagactcaatagagaactccagctggagatcaaagaaaattctctgctacaaaggcaaacagcaaccttggaccagatgtttttcttccagctctgtcatgcttgataactgtagggcatggctgaatctggccataggcctcatccatccaaccgttgagatgaaaagcaagggctatgtgtgtacacgcgtgtgcacctatatatataaacacatgcacacatgtacacacacatgcttgaaaaagagagacaagcagcttcaaagtcaaaaggattt

SEQ ID NO: 53853 - DNA, 1441 bp, Homo sapiens
acagagtgcgactccgtatcaaaaaaaaaaaaaaaaaaaaaaaaaaaaaaaggtagatgagtgaggaatcactggctagttagttatattgggaaagacctaggggtcctgattttaaaaagggctaaaatgttgcagttgttttttcaaaaatctacatttgcagggtctgatgtggtgactcatgcgtataatctgaacactttgtggggctgacgtgggcggatggcttgagtccagtgggcggatggcttgagtccaggagatgaagtttgcagtgagctgtgatggtgtcactgcactccagcctgggtgacagagtgagaccttgtctcaaaataaaaataaataaataaataaataaataaataaaaccctacatttgcactttagcatttccctaggaaacaaaagtaataattagatagaaaaaaagtctgccatgtaaaaattctgtaaaatttgtaaaaaaaaaaatggggctgggtgccatggattatagctgtaatcccagcacttttggaggctgagatcggaggatcagttgaagccaggagttcaagacctgcctgagcaatatagtgtgaccttcatcactacaataaaaagaaaaaaaaaaaaaaatcagtcaggcatggtgggatatgtctgtagtcccagctactcaggaggttgagttgagaggatcacttgcccccaagagttagagactgcagtgagctatgattcagccactgcactccagcctaggggacagagtgagaccctgtctctggaaaaaaaaaaaaaaaaaggcagaggggagaggggaattttgtaccttagaaatgaataatctttggaactctggctatatctatcactgccaaggtaaacagggataaggccaggatgtgactttgatgcctggtgttcttattaaccaaaatggagtaagaatgaaagtacttttgcagcaaatgttcaggggatttgagcacccatttaaggctgtaaccaagccagaatttcctttttgaggctgggcagaatctggtccaaaaaccatgaacaacaggaatgtttctggtaatttttctcaaatccaccagagggttcccactgaattttctgacaaacttagcctatacactgcatctacaagacaagggagcatttatgtaaagtgtttccccccgaccttagttactttgacaattccaaccctcactttctcctctgctcagattgacatctgagaagcaagaccacaaccgcataccattttatagatcagcctgattaaaaccagttctccctataggtcacatcatgtacaagacacacggtttttgtcaagagaccagctaccagcagagaaggttttgatgctattgctagtaagaaattagtaactagatccctggtctcctttacgccaactttataattatactgtttg

SEQ ID NO: 53854 - DNA, 1343 bp, Homo sapiens
ggtctgtgatagatggttatttttttggcaggcttgagataagcctgggtcaaggaaacagcttgtgttcgtctctttaagcctcactcatccttgccatatcatttcatgatttcctttcctgttatcttcaaacattccctcaaagcagaaattgacaagagcgaggaggttgggaaagggctggcaaagcagttgtttttcttcgtgttctaaaatggatgttttcctttcccccacaacccccactcccaccccacttgcaacctttcttttttattacccacccctgggtctctaaagatgatggaaaaaaataactcctttccctctttaaagaagggtccctaagaggtttctaatcagctcactgtcagcctgtttcctctgatcagcttaaataggtctacttgaagttcacaactgccaaaaccgcgtgttcagactgaaaggctgggagcatttcagacgcatttatgaacttccaccaagatgatccggcaggctgaaatcgcagggagagcgtctgttcaacaaaccctttcttcttgattgaattagtgttacccactaacaggatgaggaattcccactccacaagctgactttttttcctctttccacctcccgcctccctccattaaaatgtaaacttgattcctgtgtcctttgccggagcctggcttccctgtaagcccatcataaacatcttggtagaaatgcaacttttaacctctccttgatggttttccgtctaactttatacatggggaaaaaatggtgaaagacgttatctctggcgggtgcaggcgtgtaggggcaggaagtttctgcactgtggctgctctggtcctttcgtaactgaggttttcctgccctgtcctttagcaaagaatggctttgttaaccattagccactgacaagagtgtgtccatttcagcaaaattaataagagatagcatttttcttccttctaaatggcccatgtcagtaattaacatcgcctttcattactcaacttgaaagcgccttctcggcctccctctgaccttgccctggctttgttaaactgtggcctccagcctgtgagagacctaaatgcagaaaaagttttgtgaccgagatgccttgaaagaatcattcgacaaatatttattgagtgcctactgtgtggggctaccaagttgaatcagacataaactctaatggaggaaaaaagaaaaaaactgggagaaaagataaaaggggtttgtttaaaatagccctaagataacagataatgatggttaccccaggacaggagcagatccggtgttgtgggggcctgggctaatcgagatgg

SEQ ID NO: 53855 - DNA, 1402 bp, Homo sapiens
ttggataaaacaaaaacaaaaaagaagaaggatacagaggttgctttttgaattagaatgtctgaaacaagatctgggtggtaggaagaaaccaaaagttgtttgggtctccctctgttgcaaggttggagtacagtggtgcagttgtagcttactgcagcctcacactcctgggctcaagtgatcctcccatcttagcctcctgagtagctggaactacagataggtgccaccatgcctggctaattttaaaaaattgtttgtagagagggatcttgctttgttgcccaggctggtctcaaactcctgacctcaagtgaccctcctgccttagcctcccaaagcactgggattataggcatgagtcactgtgtctggcctgaaccaacatttgtattgtgtggacgtgtgcacgtgcatacacacacacacacacaccctgcagagatatcagcctatgagtaaatagtggcccatgatattgcatatgttctttgacctatcattcaacaagaaggtttatgaatttagaactggtagtcaactgtggacttgttgattgcctttgttttcacagctatcctatgcactcacttgagagcattttctgtgatgaattcaagcactagcccattagtgagcatttaccttaatgttctagagtcctcgttagtagaatacagagttaagggctatttcagatttcagtaaagatccggacagtgtcccttattctttgtggggataattaagaagctgttgctagtgtctgatgagaagtgaagttgctgtttctggcagaggggcaatgaggatcaaaacacatatttggaattttatgttgttcctgagctcccctgctgggccaggatgtgggttaaatttgctctcctgtattaataaaaaaaaaaaaaaaaaaaaaaaaaaaaaaagacacaagggaggccaggtagtggagagcagagaaaataaaaggcagggagatgaagtcaaatttcctctgatctctcttggagctgctgtcgactcatcagcctcagttaattatagaggcagaaactgagccactgccaaaataaacggtgctgggcacatacgtagcctcttgataagggctgcatttatctgtgagaagagcgtctcagataaatgtggaatgacttactgccggaacttgggacctttgtaaccacgtctactaaatctagagcttgtttatcagccagtctgcagctccttgtccctgcaaacatttttattggtacacattctgtttctcttcctgaaggaatgggaaagctggcctcctgcgccctagaatgaaagtatcttaaatattaatatctgggtttagatggagtggtactgcctttaaagttcgtggaaagctttggaaccatga

SEQ ID NO: 53856 - DNA, 758 bp, Homo sapiens
tgtacgattggaactcaatgacggtaagtacttattacacaccacagtgtatttgcatgatatatgatatatttttattaactgaaaaagttttctagtatatatatatatatatacacacacacatacacacacacgtgtacttaacacttacttattctaacgaaactttatgttccttattatatactataccttatgtgctcaaagtgcctttttgcacccttggatctgtttgaaatcaagatttctggcttgtagatgtatttttaactgggaacagatgagcccctggccacccgggtgaattatttgggactgtggtgtgtgccactctggcactttgcaccctatgtgtttcttctgcttccctagggaggtgattggtgagtcttagggaggggccaggacaaaggtcctgtggcctggggaggacaggttatagtttaagctaacaccctgtacatgctaggaagtcaccaaggaaggaggtggccttgtcccccgggggagtttacacttgtgtgcctgtggcttgtgacgtacccagggtaactgcagagactggctaggtcctggagcagtctcaccttttaaattttaagttaattattacttcttgaaaggaagtttccctgtgttgtgcaggctggcctcgacctcctgggctcaaatgatcccctagtctcaagtgatcctcaggctgagatgacagtagctgggacgacaggcatgggccactgtactaatcctttttc

SEQ ID NO: 53857 - DNA, 1888 bp, Homo sapiens
tgagtacacagcccataatactgctttagttaagcagagctgaataaagtaccactaaagatacatttatattgaacagggttcttcctgttagtatctttcattatgagattaatgacttgctgctatctctggaaagatatatttggcaaactaaatcctaaaggaatcaagtattaagtgattatggaaatctaagcctcttggttaggcatttcatacatgactctttgttgctatcaacctggattcacacgttaatgacagtagaattcacaagtgtcccagaacattacaacacactcgatcgatattaatcgaaaaggagaagcagaaataatttaagtaagattgcaattgccacggagctctgacctttcagaaacactcgtacacgaaagtgccaggaccctcatgttgcacggttccagggggcgctgtttgcagagtgtagactgaagactgcctcctaggaagggcgacttgctggcctgcaggacggggcacaggcgcagggtccctgcccagcacaaccacgccttatcccagctggagtctgaaggccccgcaggggaactcccctctcttactcacctccatccccttcacctccgctcctgcagcctccatgcacttcagtgggaaacggatctgcactacaaactgccccccttgcagagttccaagctcatctaattacatagtgtttagaacagtgcaataaatcaaaagatacttccttagccctggaggtgaatagaatagtttcatgtcattaaaccccacaaccaagggaccctttatgacacggacttcttttgggaggtgatgcctctgtccgtgtgagagtcctggctcctggtaggtttcttccggtgcctcccaggcagttggaggacgccgctctcattaggtcatgtttactgaaggtgcttgttttctgtctctccattcattcggttacaggacacccgacgggacaaagcgtgttgtaaccgaccaccaatggagccggctctgttcacggattatggttgtcttggcaaccagctttgctgaactcaccacagcaaacatggaatgaatgactgggtcaacacccgagataaaaagagggttatgcaactgtttgctgaacccttggcgggattttttttttttctggacatttcccagaatgtccccatattcaaaaattccaaatgaagaattcctatttaaacccataacaagtattgccattgttcatagaaaagagctgttgcttttggaaatataatttaaggtctgcagacgatttgaactgggtgttgcttcagtttcagtaaccgtgcaaaagcgtatttaacgataagttttccctagacaggaaacgagagaggccactcatgtatttctaatgatctacataaataatttcatctacttagattcaaaactttagtcattaaatggttttactctcagctaaatagattcttgaaaatgaattttaaaacgcagaaataagcttttgaaaaaaaattcagagacaggatggagcctctctttgtggaaaagcaaattggcaaacaggacaatttatttaagacagtgagtacaaagggagcaaggttctgggctctcctgtttcccaagccatttaattctatgcaaacaattacatggtaatataatccaggtttctagaatagtttatgtttatttctgtctcggactggaagaaaaatattgcaccgggtaagatagtaacagttgttatgacttgtacctgggtgcttgacacagctttcctcataattattctttgtgttttcctgatttgtagatttctcctgttttctgagctctgactcctggagatgttctcagcttcttcctcctccca

SEQ ID NO: 53858 - DNA, 525 bp, Homo sapiens
gggcaacttaacaagaccccatttcacaaagaagaagaagaaggaggaggaggaggaaagaaaagagtgacccacaacccaaagccttgccatttcccataaaaaaagccacaatctgtcccttggagcacatgaagggcaaatctccagtctaagaagaggctcccttcttccccgagtgcaggaggggaagccacctgggatcttccagcatgagctcatgtacctgctgctgtctttcacgacacttgaaagcaattgcattgttttctacgaccgctgtaacacaccaccacacacctggtggcttagaacaacccaagtttattctcttgtagcttaggaggtcagaagtccaaaatctgtccttgttggccaaaatcaaagttggcaaggctgctggaattccttggcatgtgaacgcattactccaatctctgtctccatggtcgcacctccttgtcctcttctgtcggaaatctccctctgcctccttcttagaacactttttttttgggggggggg

SEQ ID NO: 53859 - DNA, 645 bp, Homo sapiens
tgggctcagaaggatgggtgtcttttaggaaaccatccatgcccatctctcccatattatttagtatctacctttgcttatgtcgtcataaggcttctctcgttgtttctagtagtctgtttacctggctagggtgaggacaatggcttatcatgttttagtccgagattcccagcatgtagcatggcgcctggcatgcagtagaagctcaataaatatgggctgagttgaatgaattagtggagaggagagagaaggaaattttgggcagagagctagctcaagaaaatgcttggaggcagggcaatttttctcatgtcagtatagtatgagtcaccatgaggaaagtggggcagtgaaccggactgggctcgggggatgggtgagcagagaggaagtgaggaaatggctgctctgttctcaccactgctggccatgttcccgtggctgttcttggcaggtgtgaggaggtggcgggccgtgcctggcagaacacacccattgatgcaggaggtggtacagaagaggggataagagcaagagccttgcagcttgagtcctagcgctgccacctgtgtgagcttgggcagactgctcacaccctctaagtcatggttttcttttcttttcttttttttcttttct

SEQ ID NO: 53860 - DNA, 905 bp, Homo sapiens
ggcctcagggctgctgtgaagctgcaattcctttcatggagctcatgtgtgtgacagggtgtgcccagctcttaaagtgctttgaagaaaatgcctttgtgctaaaagctctataaatataaggcgcagacctgggcgtggtgtttccagaatactcccaatttgatgttagctgtcatcaaaggctcaggtcatagaaaagttggaaatgggggtggtttgccaattcagtgattccccaaagcagagatgattgttttttctttttttttccaacttccattgcttgatggtacaaggcccatgttgcctttcttgtgtccagaactacacaaacctgatttcaagtatccttttgaagaattaccaattgcatactctctctctacccctttcttccccaccccacccaccaaccatccagagccatccaacagctcctcctggtggccattgcggagagagattctctgatcacacacctttaccttcagtatgaatgtgcttcattcatttattcaaccactttttattggttaactactatgcacaaggcatcttgctagatgctggagataccaatagaacaaatagggttcctgccttcatggggtcacaattctgtgaggaaacagacaaacaagtgattataattacacaatgactgtgtcataacaaaagtatgtacaagagcatgggggaggagcaggaaaggaacctaaggcatgttgatattgaagctaagaaggccacaacttcagggccttctcatttgcatggtccccttctgaggccatatcacatgtgcatataacacacacacacacacacacacacacacacacacacacacacacatatttttttcagacagggtcttggtctgtcacccaggctggagtgcg

SEQ ID NO: 53861 - DNA, 1651 bp, Homo sapiens
agggacaagtggaatgagcgaagactttgaagacagtcttgtctgccaggcactcagatcatcaggaagcagaaaaggagatgcaagatcaggttgagaggtattttgtgcaggaatacacattcagtgttataatgtaattgaaaaagagtctatttcagaggcatcagcttcacagccaccatggtttaacctcacctgtggtgtgagatggacagtgggtatgggtggcccctcctatgggtgggaagcacagtgatgtgttgggcacctgagcagggctgccaagattttctaaagcattctgtggaccattctgtgagcccctacaaggggttctgagctccttgccctgggatttgatccaatggacctatctaactggtatctccaatgtcagaggtgagtgagagcttctgtttgtttgaactctgcctgacctcagtctcagtgcttattttgaaccaggaactaaatgtagaggaaaagtatggaggacaaagtgcacaattattttctcttggacagatcttcgacgtcctgcttttccctggggagcactttccctggatgcaggtagacacaacttctttctcctaatatgcccaccctgcattctcccttcgccctggtcttttctcatgattttgggaaagttccagacagtctctctgactggcagcaggaaaaacacagtgcaatataatatattgtgtatatttagcatgacgtgtaaatattttatagaagctaaagtaaataatatatatatttgtaatgtcagtgtaaatatttgataggctgcagtaggaatccagtatgtttggagctgggcacagcaccagtgggaggaagggacaaggtcaaatcagagggcaacctgttcatgacgtatctgaaaacatctctttttctccttctgcctggctgctgctttgaacgcttgactctcaacattcaaatattctcacgtgaattatccacagcaattcaagaccaagccctatagctttagaggctgctggaaagagagcagcatgtaagatcctaaataactggctgaattatatttattcatttgttgacttgtttactgtctatctcatccatacaatagaaattcctggaaggcccatcttgcctattatcatatctccagtgcataaaacagttcctgacacatagtagacactctgtaaataattctggactgaataaatggtgagatttgatgccaaactgaggagaaaaaaactgcaaccccagccctccctgaaagggccaacattttaaatccattagtcatgcaaaccttgagggtgagtttatttaaattagtgataagaactagctgaagttagctatgtgacaggctgatgttgtttcactggaaggggaagaaggtatttggggccctagggctccacggtgaggtccacgccagaagagttgtctaggaggccatggaggtagtgaggggcacaaggcagatggggataaagaagcagaaaatctacagcagaagatgagagggaagtggaagacactagaatatctttaccacctcccaaattttccaggacaacctctttacatgcatgactatgagtaagtgtttcaacattaaatgcaacctactgttagctttccc

SEQ ID NO: 53862 - DNA, 1134 bp, Homo sapiens
cctttatatattcttttgtaatttacatattcctgtacgatcctaaaatctttctgaaacaagcaagaatataaatttattattttgataagtgttagaaattaatttttacatttttttttaagagacggagtctcactctgttgcccaggctggagtgcagtggcatgatctcagctcactgcaacctctgcctcctgggttatagcaattctcctgtctcagcctcccgagtagggcgaggctaattttttgtattttttttttttttttttttttttagtttcatcgtgttgcccaggctggtctcgaactcctgagctcaggcgatccacctgcctcggcctcccagagtgctacgatttcaggcgtgagccaccgcatcaggccaatttttacctaattttttaaaacacaaagttattcttgtaaccattggcattataactgttagcaaaaagcaagggctcctcctagtgatactgcaagtcagtgcagcgtactaattccaggtgtatttgttttctttgttgtgtaacaagttcattatctttagtaaacacacactggaaatctgttgaattcagggatcaataatgaagatgtgtattttagggaaactgcagtaattccttcaggccactaggggccatttgactaaattctcttcccagttcaaaggaaaggtccccagtgcacccccagggagcaaaaataaggacctcctcccatcctaaggtgggatattctaagggtagaatcaggtgcatcatactcagcaaatcagtatttctctaattttattactttttgaaacctctttaaaaggaaaaaatacatgtgaattccccagtattgacatgggaatggattactgtacaatagtgatgcatgtataaaatgattgctctgaccataattgtcaacaaaagtcggtagaatgaaaataagaaagctgatgtccctttcactactacctgctgtggtcaaatattgcttgcctactctttatcctaaaaaaagaaatggggctaacatcctacctcccacttccaccaaaccctccatccaacagcaatttgtcctcttatgcaaggtgagaagaattgccccagttgttctggaaaaagtgtt

SEQ ID NO: 53863 - DNA, 1803 bp, Homo sapiens
cccacagaacaatcatccgttaggttacttgggagaattgcctctacgtatccactctgtccttgtgcataaacactccaaattgagaaaagtagaaaggccattttgaatttgacttaaaaaaaaaaaatccaaaaaacagagtctcgttctgtcacacaagctggagtgcggtggcacgatctcggctcactgcaacctccgcctcccaggttcaagcgagtctcatgcctcagcctcccaagtagctaggattacaggcatgaaccaccacgccctgttcatttttgtatattttagtagagacgaggttttgctatgtttgccaggctggtctcgaactcctgatgttaagtgatctgcctgactcagcctcccaaagtgttgggattacagtcatgagccacgaatttgatttcttgatgaaaatctactttctgatatgattctccaatgaacttttcccttgggcttggagagcaaaaaacttctactttgttctcaattttttttttttctaagagattcccaaatgatgagttaagtccaggagaattttttgcctctgactagcacccagtatgggtccccgccttgccatatgtggttctgggtatgaataactgggcaaaaaacttatttaagtcctccttaccaagggatgtttgttctatctggcttctagtgaggtagaaaatgtcatcaagttggacttttcagttctggtattagtactgttatatctgatattgcaaattccaaagggctaaaaaaatacagtcaaagaaagccaaccaaattgctttaaagctttaaaaacaaacatttgcatttcaatcatgggtaaaggcctgggaaagagggaagaatctgtgcaagtatttaaattaaatcagtttgcccacctcctaacacattcttagaccggtggtatatattggcgggattcttaaactttttgtaattgtgtgataaataatagcatgttcaaatatctcatgaattatgattagaatccaatgctgaagcttaacatcccttttgagaaaaatatagtcagtgaatcattctttataacaaagagcttgggaaaaaaattaagaacagtcacaagagaatttgggatattggtaaccaatcagaaggtttcaggaaaaaaacagtttgcatttggtataacttaagagactattttggaaatttaataaacctagaacaaagttatttgaaactccagtaatgaatacaatggttaaattccactcattcctgcatcatggcagaaatacccttatctctgaacacaaaccaaaatacacaaagtcctgatgcctatctgccagccctggagggcagcctggcagtgtgagaaggaagaaatctcttaagagccttctcttttaccatatgtgctttctactaactctgtcatcttttacttcatccaaactggaaatgaatgagcaggccttctcagatggcagaggctactgatgttggcagtaaatatataaatgaaataaaaacagaaataaccaaaaaaccccaacaaattaaaacaagctcctgaaaggcacagctcccttctaccctctctaaattaataacagacttattagttcaaaggtaacttgcgagaggttagagtttcttttaaaaaacctaaatatagattaatatattcccccacccctatattaatactttttacaaataaacacatttggtttagcataaggaatatttaaatataaacagtagttttcttacacaaatgtatgtttttacaatactaaatcaacc

SEQ ID NO: 53864 - DNA, 490 bp, Homo sapiens
gctgagtaggggagggtgtggtccctggctagggctccacccccacgggcccaggtgaggacaggcactcctgctttcgccggctgttgcattttccaagaccactgtggcccaccatgcccccgtcctgggcctataaaaaccggagtccctagcacaacagagacacaagccgctggacgtagagaggagcacattggcggaagaaggcgcaagcggctgattgtggagagggcctccagaggagagcgcgggcagaagagcaggacaggcacccgctggccgggaggtcattgactggcagaacgacgcggaatttggctggagcagtcggaggagagcccaggacgcccagcagcccgactccagaacaaaaccatctcccttctggctcccccatctgcatccttgctgagccttacttctactcaacaaagccttacacattctcgcagcccacgtgtgatccgattcttctggtacaccaagg

SEQ ID NO: 53865 - DNA, 687 bp, Homo sapiens
tcaggttaatgtgtcttggctcatgatggtacccaaagcagcagggtccaatgagcaagaagcagaaaataccaaagacatccccatctgtataggcttggaaaatgtcactgcatgtacctgaccttccactattaaggtagctgatttatcccttagctaaagttgctctctcttcctaaaagatcttgcttgttttaactttgtggcattcatgttgctgttccagtccaatcccaggataaacttctgaggttgcaatgccagtttggagagcaggacagcagcaaattccaagggaagccctggggttatcgcaagctccagccgcctgagttaggtcacgttgccaacttcaacagagcttgacctcaagctgaactccgcattgccaggctgcagagagctaagccaagcagctataacaagtacaggccttcccagccaagcaggagcccacctaaaataaacctgtaacctttccccagaaaatgttgtgtttgtttataaatagcctaactgcgtagcccctagagttcactcatgggagcaggaagagtcaacttgtgttaaaccctcagagcttctcaggtaccccccaaactccaggcctgtactcaccaaaaatggatcattctcttcttggacttcctagaatcccaagacccagggcagaaaggagaatag

SEQ ID NO: 53866 - DNA, 796 bp, Homo sapiens
caagtgaaaaacaaaagaaaaccaaaataaatggacatagttcaaatcacagcaacaacaacaaaaaacaataaataaaactccaaacccaagttaagcacttagtcacttcatcatcaaataagaccagggatactgaattcagatgaatagaaccgctttggataaaaagatggcactgaccaagtcccagcccaaagtgtgggccaaaccagacacagctgcttgggcacatagaaagttttctagatgttgttttgattttatgttcaaaattcagagggagaaaaaaaagttgagcccactgtagggtgggaatcaccaggttacctgcagccagacacggtgaagatgatacatggacactaaaacacacagacagaagagtagctgggtgtgagaaagcccaaggaagaagttcccaagtaagaaacatcctggacaggatgacctcagagtttccttccaaatctggaaatccccagttctctgtccagccctcccagccctcaggggagccaggcaaacacagtgagagatggaatgtcatctatgacaggaacatctgtaagaaagaggcacttttcattttcgatgaggcagagggttacaaggaagggttaggggaccttagtttctggttatgatgtagaaagtcaaaagaagctgtctgccactcttgccctaaaaaccaaatcaagaagaatcagtgggacaggagaaatctactttagatggtagggagaaacccttcaaacttgtaagaaagttttaatggctatgtgtgagataatgt

SEQ ID NO: 53867 - DNA, 669 bp, Homo sapiens
gtcggaattaaaaaccaagtgtgtgcaaactcaaagcccaggctctgaaccactaagccatgaaggtcccttgtgctgtgtttccacacttcctgtgaaactgtcaagctcttaagaatttttctgaccttcctgacaaaggaagttttccaacctgcccctgttacttttagagttcctgttgccatcgcacatctctaccagtgtgagtttatttggaggtggttgtccagacattccagggcggccgttacagttgtttccatgcaactctaggaggagcctctaggaggagccatccgccatgatgttgtgcagtgcacaacatgcccagtggtaccctggacccgcaggaaagaaggtcagatgatccctaattgtcaccagctcttatactcccatctcattcctgatgaatatagaacaaagtactatgtgtcaaaagtgttccatggcattgatttaaatattatcctgggtttcttctcaacttacttaagcgaatttacttaaccattcttctaagtgatctcctctgtgtttgcttctctaacattttttttaggtaaagtagtcagaaccagaaatatcacatatgggtagcttctggcactggctgcaagggagtctgtgaagtttatgaagttcatctacaaggccatgggactt

SEQ ID NO: 53868 - DNA, 618 bp, Homo sapiens
gagagcacaagtagtctcattagaagagactccttactttgctttgcctctaaggcaatctggagtcttcgccactgggtttgccaagtgaaatgtttttttctgctctactattgacccagcaagttgcatggtgccgttttattgaaaaaacatgtgcaaagtgtctcctaagcagcaatgaggatgaggctgcttgctgcgctctcttgaaagcagccaccagcagggagcccgctctggttaactgatgaaatggcaggccgcccaggctcccgaatcatcgatttccacagccgcaaacaattgatgcaatcagccaagctcagaattagcctgacttatcctcatttgtgtgtgtgtttatgtgtgtgtgtgtgtttgtcttgtattggttccctagtcccaggacccatcttcatttttgtacttgttttgtttatatttccaaaatgcaaattttgactttctgcctgggaacactacaaagtccttcctcacaaacattgaggaaacaggaaactcacagatttctcacaaaaggggctttcaattcctattagataaaatgatattcataacaggttcccagaaaacaaaatactcttatttatttat

SEQ ID NO: 53869 - DNA, 3321 bp, Homo sapiens
atttttaaattaatacgacacaagattttccccacattaatattttctaacacatgacacataggaacagcataacagttacttacgctgacctgtgattcacttcctctctcccctatggttggatattgaggttgtccagtaccattttcaggcctggagctctaggccaagttttgcaaagagcccttcctcttctcactgtttattctcctctgaacctcaccagaagtcctcagcacatgttcttcatggaggtcatctttccctggactgcttggctactttagaagtcaaatcaagactagaagtatgaaagccaatcacaatttcccaacaattaggatccatcattcaccatttggttggtacgtagagaaaacattttaagtcagtactgtgctgaaaaatcctaaacatgccattaccttagctccaggtcttctgtccctggtgatggagcaaagccaatagctgtgcaaacagagtggggagtagacagggcgcccttgagagactgccagagctaagcccaactcctctgtgactggtggtgtgagcacagacaagacactgaacctctctgtttcacttcctgtaaaatgggaataacagtatttgccatgcacagccatggtaaggactagcaaccgtattagaagcatgttaatcacctggcacaaaccaggcttgtaataaacattagtgattaatttacctggggatggtggcacacacctgtagtcccagctacttgggagtctgaggtgggaggagcgattgagcctggaagttcaaggttacagtgagctataatgacagcaccgcactccagactgggaaacagagtgagaccctgtctctttaaaaaaaaaaaaaaagtgattactatcctatttctgcatttttctttgtctataattttgtaataggtgatttctaacaggacctgcagacactttgaaaggataaactacattttaatgtgaaataaaggcatgttcaaaaagcaaaggtgcagatagtggctgaaagaaaccacctgaaactgaggctgtttattttcacaggtccctgctgctaagaattccaaactacaagggaaaaagttaaactcagctagatttccctgcctgctcaagaccacaaccccagtggcaacataattcttggtgaggatgaaaaaacgaaatctatacttgccttgagaaagcattcatgcaaaataaagcccagattcataagtaatctgacttcagcatcacttttcaaaacagtatcctgttaccagctaaagcaaacagagtggttccaaccccaggaactgacaggcagtgcaaaagggcagattggaagagattaaatatttgtgcaaaagcccgtaccccccttcacaaagggctgcctctgtctggcataaaagggaagggatgcgggaactgagaagagggccttatctttccagaggaaggactgtttggggacggaggaggtggagaaggggagagaaaatagcggagaaggggagggataatagcagaggaggggagacatcagatgggtgtgtgtccccgggtcgctgtcgagccgggccaggctgctgtcatcggctgaggctgcacttctgacccctgcggtgaagccaagccacgcgggctcaggggcagacggaaacaggatgactcgagctttgaagctgccagcctgtgatggcagagaggccagaaagaagcccgctccagaacccactctctcagcagcagcaccacattaatttgcaggggggtgggaaggacagaggaggggaggggcggagaggggagggcaggagaggtcgggctgggaccgaggccagggaagcgggtcatgtgcacaaggcagcccaaaggccttccagggggtgcccaagaaggactttagagaagggagattttgaaaaattattttttaaaaaaattgtagttttcgactctgctgacagtcgatcaaagctagtttctgcttctgagacattttagtggctgccaggaacttagaatttagaagagaaaaaagaagaggaaaggaaaaaatctacaatggagcagtctgcgcgggcggtggggagattgctggtaagatgagagtctttgaggaattgggatttttctgtggactttggagctcctcggggcccaccatgaagaccaacatggggccggcagcgcagggaaaaacacccttgggaggccctttgaacacagctcacgtaaccacatttgaggagagacaacgggagggacggtcccttgtgccagtcgagggacagggctggaactgtggttccaaaccctggctgcacaatgcgatcatcaggacacttcaaaaaatgcagatgccaggcctggctcaattcagttaaatcaggctccctgaaggcagggtcctgatgcagatatttttttaactcccccgttaattctaatgctcaaccaaggttatgaaccctgagtaagagacttaacgggaccctgctgagcacaggcttcccctgggctacagtgccccctctccgtcacctcactgggagaagaacatcaaggtcacccaccttctggctacagtgaagactcaggaagtcgttcctctccgatagctgagagtcaatacagggacctcaagagtggagcctcatcatcagagtaacctggggacaacagaggccagaacacacacaacactcagcaagtattcaaaggccaggcacggaggctcatgcttgtaatcctaacactttgggaagccgaggtgggaggatttcttgaggacaggagtttgagaccagcctgggcaacatgacgagacccccctctctacaaaaagaattaaaagaattagccaggtatggtgactcacacctgtagtcccagctattgaggaggctcagacaagaggatcttctgagcccagagttcaaggctgcagtgagccatgatagagcaagaacctgtctcaaaaaaaaaaaaaaaaaaagcccactaaaaccaattttaaaaacccccaaatatgtgagtaactgtgccaggcactatgctatgcaaatggtgagcatagccaattggttgattctgcagctctgggttttctctgtaggcaggggcaggagaaccagctataccctgaggtctacaagtccagagagggcaaaagcacaatttccaaaaagctaaatccaagactctttatgcaaatataaaatgaacacatgtcaaacactttatcacactcactaattaatgaggaatcagtaagatcttaataccagttcagagagatctgagg

SEQ ID NO: 53870 - DNA, 1309 bp, Homo sapiens
ttccaaagtgctgggattacaggcatgagctgccgtgcctggcctattttgaaattttgatattttcttcatcatggggtttttgcattaattttgatttttaaaaaataatgccttcaaatgttatttatcttgactcctgagtttttggacacccccttaaactgtgtgctaaggcttcaccctcatcccagccctggaagtattctaatcagggtggaaaataatgctacttgtcctttctgagcaataagtaagggagggaaggaaaggaaggaaggaagggagggagggagggaggggaagagaaagaaagagagggagggagggaggggaagagaaagaaggaaagagagggagggagggagggagggaaagaaagagagagagagaaaaaggagggagggaaaaggaaaaaaggaaggaaggagagaaagaaaaagagaaaagaaagatctttctgagagataaaaggtagagaagtggagtggggcttgtcacactgacttagccagaaacagcagacagtaagcagtattcctagcagagcaagctggcaggagaatctgttaggccccagtctcatctaaaaatagtgagttgtgatggttctcacccctggcggcacaggagaatcgtccagggaagtttttaaaaatactaatgccccggccctccccacagactaaaaagtcaaaacctctgagcatgtggccatcaggccactgtcatttgccaccaaggtcatgaaccccaggctccttccagttccaatattctggactgtctctgttttctctgcggctgctcttggagggatcagtaaggtcgcttttgtaaactccttaaagaaacctttgagaacctgaaaacaacaataacgatacactcccctctttggcaaaatgctcatttggcacacacacaattcagtttcaggaatcccacagccccctcctcactctcaggaagccaccaattggttctaaattaaaaattcctcatctattttaaatagcatccaaaaaatcttgattcttcatgtgtgaccccatgctaagtgctgcatgaaggagtttatctggacccgtttctctctctggaagctaagacacagctggcggggtggactgcggttcctgctgccacctcttgaacttccttccacagttttcagagcacacgcctcagtctaaggttcctgctccagactgcggtcagactcacctgagagctttaaaaaaatattcctgcctgggacccaccttcagagacccttatttacttaatctgcaatggaaatgggcat

SEQ ID NO: 53871 - DNA, 1199 bp, Homo sapiens
actccaggactcaagccatcctcccgcgtagacaggactacaggcatgccactgcatctggctaatttttttacattttttaaaggtatggggtctcatgttgttgcccaggctggtcttgaactcctaggctcaagcgatcctcccacctcagcctcccaaagtgctgggattacagatatgaaccactgcacgtggctgacattagcataatttaaagccacactgtgcctctcatgggcaggcagggtgagagcccctgtcagtcatgcggtgggagacacagagggctgctccgggacaaggacctgctgcacaggtaagctggcttgagggggcttgctgatctaatcactcccagctgtaggcccagctaaatgggtggttttagaagctacttaaagtttaataatccaaaatatagagtgcttttacaacagtgtaacaagaagggaactggccagggaatgagaaaccgagggttcaggtcctggccatgctaacgattttgtgaccttggccgagactcccacaccccggagcctgcctcctgcaccggcagttaagtgcacagcctactgcacttggcagacatcaggtcaaatcccatctctgcagcacagcgactaacttaccctgactttgcccttgtttgatcgtcaaatagtattacctcatggggttgtcatgaatatctaagtgcccagcataaaatggatagcaagtgctcaataagtttttgttattattatgattcagctcagcaaacctcaaggagccgttgttaggataaacggagtaatatatatgcagcccctagttaactgtgaagtactgtacggtggtgtcactgtcgttgaccttgtggctttcactagactgaagccaggacaagagtttgtggattccagacttcctggaacagaactcatagtatcttactacccccacctcaatgctttcagaaagcttgtttgagatcagaatttgaagctgggcacagtggctcatgcctgtaaccccagcactttgggaggctgaagcgggcagattgcttgagcccaggagttggagatcagcctgagcaacatacggtccctatctctacaaaaagatagggtctacaggtagacctaaaaaaatccaaaaaaaattagctaggcatggtatcgtgtgcctgcagtcccagctactaggga

SEQ ID NO: 53872 - DNA, 1905 bp, Homo sapiens
aggggtatttttctttctctctgggacccttccctccttgtaccagagagtaagtaacaaataaccaaagggcgagcaacagaaagaagggaccaaggaagaaatctgaattgatcaagagacaattgtgcaaagtatcctgaaccaaattcggagatgttccagaaagtttacacacttagagtctctacccagttacaaaacatttgttagcaaatgttcatgctgaatgaaggacacacatttctcaactgtattcctgactttcctacctgctgacttggtaatttcaaaagacctagtatagctatgggatatatttctcatgaccaagtaggttccataattttatcttaatacatcaaccatgtaatattttaaactactagaaaagcctaaaatgggaatgcgaaatggcaaaagagagtggaggagagaagagacagcagttctaactcagccttccaaaaagactttcaaaaaagaaatattctagatgaggccaggagaagccatctagagtggcactgaagctccaaagagttccacaaagagtgaatcaattgcatttatgtgctttggaaaaaacaaaaagcccaaacttgggatttcctgttagcccagagcagcgtggctctatccctaggactcagtggctcccagtgcaaaagccggttccctatgtgagttatgtcctgcgtttgaccatctgatccgcattttcccgtggattaataatttgaccactctggaagtcttgctgtgtgtactgaaaccgtctgttaactctcctgtggactgctgggtttggtatttaatcttcaacaggaatttcagaaggtcaaagtccccatctgagaggagtgccatgcaagtaatgaaaccaggcagacaagttcaccctcaaggagatggaagtctttgagtgtggttgacaaaagacctttagaccatgggcatttggggcctggggtagagcgaacggagaagaaaattagcttagggagagattcttaaatcagtgggaaaaaagcaaaacatgtgacatgtggagttgcaagcttctgggaaatttggtttctattaactgcacaagcaatagttttggtcattgttgttgatgttgtgtgtgtatgcattacgtttaatgggcacccagtgcaatggcagtaataaaaatggaacagaacaagtatgtgaaggaattaaagctagaacttaccagtgtaagtttatttctagttgatttttgaaaaaaataaagccaaatatttgcaggtcccaggcgctctgaagtctgtagtttcccacccttacagacagcaccccatggtgtgtcaactttctcatttcaaagtccaaagcatcctaaagcaaacatgaacctcacagtgaaatggcctcactctgatttacacatcattatttctccaactgttgatttagtccagtcttccctgatggcatcttctaaaggaaagcttcttcatattcttccccaggagacagtcaaggctgtccacggacaagcgggttgagacagcatattccgtgctgaatctgagggcataagaaatttgcttgtgctttctcctatttcagttctgtaacctccattccaatgcagtcatgtgaatcgtttgcttctttgggttagtaatagatgttgccgtttattggccacgtatatactcagccctccccttatggagaggcaactggagaaactgaggtctttatccaatgacctgctccatgccagcatttctgtaattgggggttgggacatctgagctacaggaacttctgagagtcctaaggcggtgagatattgctatagtgaccaccaacatcaatgtttgaaacatttataaaataataatagtagctacatataactaagaa

SEQ ID NO: 53873 - DNA, 1075 bp, Homo sapiens
acttactcaggagcctgaggcaggagaatcacttaaacctaggaggcagaggttgcagtgagccaagatcgcgccattgtcctccagcctgggtgacagagtgagacttcttttcaaaaaaaaaaaaaaaaaagagggaaccatccctgaaagtcttcaaacagttggttagcagctgtgaaacttatgtgactccaccttaaaatgaggtggtttgtttgatgtctaccattcgtactgaaggataatttggaatatggataatcataatatttcttatggaagcagtcatgacctaaaactctggcaactgccattgccctggcgtgctttccaaatgagaacagagaagatgcctgggatgacttcccacattcctgagtgagctgcatgctcgtggtctactgcttaccccaggtcatctctgcagcagctcagcagcaccttccatctactgccccaaacatcacccacattttggtctcccccacctcctcccatttttgcaaagccaattggctctcattattctgaaccaatcttgcctagctgtgtaaccaccacttgagagaaagttaattttatactcagtgcatttacttctatttgaaatagatattaagggcgctctgctttctaaattctccccaagtgaaacagagctctctatgaggcccctgagaacaacagagcattaacacaattcctgccctgaagacgttgtgtctcctcttaggtcaagagccaataagcacataattggcccttaattgtatgaactgtattcccggtgcttttcacagcacatggcattgcgtaagggtcaacatggcttgctgatttatgtgttgatctctctctctctctgtgtgtgtgtgtgtgtgcgtgtgtgtgtgtgtgtgtgtgtgtgaagagagagaaggggatttggcagtgatgggaggccacagcaaggggggcaccaagaattagataactcctataatcagtgttgtttactattcattagcaagagaaaatacaattgcaagaaaatccatttatgattatagaggagaatggaactatgcattcc

SEQ ID NO: 53874 - DNA, 740 bp, Homo sapiens
cccttcatataagttatttcacaattgaccctgtcataaaggaaaactttcaccaaaaatacccttttttttctttttgaggttttccctttatatggagttgtggaaaagtagagtttctgacggaaactgtcttgctttatagctaaatataagagcaaatccaagtacagcagaaaacaattatccagaagtggccagggaagcattcctggcttgtagtcatgtggtctcaggaggcgggcaagccctttgcacaaaacccaaaccttacagtatgaatggcaggggtgtcaaatcagggttaataattcaacacaagaaccaagcccaaaggccacccaaaactaagttcagtggctgaaacagaagcccaataggggtgtggcactgtgcccatattcaacataaaaataaataaatgggccactgtgggcagatgtgaggacatcccaagttgtcccctggggacagacctccccacccccaggtccatccaaggtacagaagagtgcttttctctaacacatcaccacctttaaatgaagaaattttgtttccagaaacttcttttcttttctttttctttttctttgtgtgtgtgtgtgtgtgtgtgtgtgtgtgtgtgtgtgtgacaaagtctcactttagcccaggctaaagtgcagtggtgtgatcacagttcactgcagcctcagcctccatgggctcaggtgatcctcccacctcagccctcctag

SEQ ID NO: 53875 - DNA, 1775 bp, Homo sapiens
gtaccttcactaatatttacaacttaatgcaagaggcaaggtgtagacatacacctcctgcagttggagtgcagcagttcttacgaggaggaagagttggtctgaggttgcaccacaagaagtttatatgcacctgacctacctgaagtctacacctccctttcaagatgaattaacatgtaaagggtgctccccactctaacagaggggaagccagcaagttaatacctgatcacaccttttatagagcactgtggttaacaatctgccttcccaaagtaactcatttaaccttcataacaataagaagcagttgttctaagaagccttcgtgtctctgtctgagatggagaaaggctcagaaggctgagcagtgtgacaaggtagagttcgacctaaatttaaggtaacaggattaaagcacagcgcttttcgcacagcaatacagctgttatgagcatttgctgaaataaaacagcttgatattctcctgactcagtcctctcccactgacaagacagaaagagagctgggttgaggtcggggcggattcagagcccaccgtgtcagcaaagacacataaggaactcgccctccggaaagacgcgggggaattctgggagtgcgcggccttggagcgcgcacatgcgcggcagctcccgctgctgaatagctgagaggcgcacccgggcggccagctgggctcggagtgcagcggggttaggatggacgaggacgtgttgcaccctgaagagcctcatcatcggtgagagtggggtgggcaagtccaggtgaggcgggcgtgcgggctgtgatgagggtggctgggctctttctgcctccgtagccgctgtctcttgggccgcggtgggaactgtcaaccgctgcaagtgtccacgatggcggccgggctcgggccggctccgcccgcgccctcctcggcctctgggccgcgctctcccgcgacgtttgctttcctctccccacccgcgcctgcctgttcccggcctctgccacgcccaagttctctgggtcgctctccctcctgtggcgccgagaaaacaccattccgagggccgccgctcggccggccggtttgctgcgcggagctcagggcgtggcgggctggtttgggcccgaatccggccgggggcgcctcgcctcgagcccctcggggttcaggctgcctgccaccccgagacccagaagacgtaactttcccgcttgagggtttctgtggggccttctctaaatacataatgtcctcgggaagtttcgtgatgccttaggacccattcctggcctgtttgggcgcagcttaatgtcgcttcttttacttttttattagtcgtctgtgaaagaacagctggatcttgtgaagtgctggaaattttctctttagtgtaagtggtccacggctgaagcagtcggaccacctttgaaaataacgtgtaattgttatttctcattttgccacatcctgtggagacaaaagattagtgttgtgtcttttcattttttatttttcttcttggggaaaataatattgacaatggagttgagtataaggtaagacatggatctaggtggatgttgctagagggttgtgatttcatcgaggtcttggaacagagttcaggtgaagtcattcttgccatctgattatgagtaggttatgttcaaggccgtcctaatccttaaaccacatttacactccaggggctgtaatcagtttcatattttagctataccttctgatacacatattttttttt

SEQ ID NO: 53876 - DNA, 1431 bp, Homo sapiens
atgccttcttttcactcatgtgtgacgactatctagttacaaggatacaagcagtccccagagaatttactgggtcttttcagaggcaataggctctgccccaaaccctggactactcctttccttccaggttacaaataagctcttgcagcagatttttttttttttttgagacaaggtgtcgctttgtcatccaggctggagtgcggtggcgcaatcagagctcactgtagcctcaaactcctggactcagggaattcccgccccctcagcctcctgagtagctgggactacgggcataggccaccgtagacagctaattttcagcaaacaccttaacacagagagccagtgtggccaccaagtgctccactgccccttaaacaggtaggaaggggattttgggctaaaagtggcaactcaagatccaggtagctttgtctaaagtagcccagtaacaatcgaacccctgaacggaaagataatcaaacacagaacaaaccatggccatggccagaggcgctagaatttaaactggaagccgtgaaaattctttgaatttcttagaggactgacagaagtcattatgcgcaaaaaaaattgtattcccccagtcatccacgtttacattttatgagatactttgtttgctgaagaatacacgttttaggagattttcagtcccagagaagaaatattttcaaatggattgtgactccctgcggatgcgtatgtgaggaaaaccagggatgtgaaggtcaggattttgtgcaaactttaatgactcttctgccaaaatgattttgttcagttaaaactaaaactaaccagacgtatgacacatatttacagtcagggtcaagagtgtttactcttcagcagttagctttgaaaacaaaagagctttgaccacagatggactgaagggaaccaaagctggaatggagagctccctggaagtgtaagagccaaactcacagccctgctttccaaagcccaccacttccaggagtcggccatgaattcagatgatgagcttcgtggcaatatctatttttaaaggccagcacacacatacaatatgatatggtttccctgagaaagccacaactgccaaataattaccacatttctaattttaaatttgagttaacaaacaccaaagcataagctgagggttgattttaatttttgctctactaaaatcaaactcgattgtcatgtactcattttctcctcattacaaactacattttaaaaaatattatgacaaactacatttttaaaaagattattgcaaactacattttttttaaatgtggatttttttggatgttacgcatacataggtacacatacatgtataatacatacatacacaaagataacagagaagaaaaaatgaccaatcctaagaagaaataacagctt

SEQ ID NO: 53877 - DNA, 356 bp, Homo sapiens
atctcaaaaacaacaacaacaaaagaaacacagtcatttgccatggtggtcccttaagattacaatggctacaccatcaaccgtagtatgtagtgggctgtaccatctaggtttgtggaaatgcactccatgatggttgcagaatgacgaaatcacccaaggacatatttctcagcaggtactcctgttgttaagcaacatatgactaatcagaatgtgacttttcctcacatgcatttgttcttcactttttgggagtcacagcccctttaagaagagtaatgaaaacaatggatgctctcctttattaaatgagctttcaaaaaaaaaaaaaaaacccctagcattttccatat

SEQ ID NO: 53878 - DNA, 1152 bp, Homo sapiens
tctgttcttctcccttcatgtcacctggatccccacatctcacaggcatctacccaaagcctttgtctgcacaggttcacaaacgttacttgtacgtttgcccctgaattctcccgaagggtggcttcctgctcatgcacactcatcagatctgacaaagccaagctcaggcttttggggccgaggtttgtgacacagcacacaccaccacattagaggcctggctgcatcccaagacaaaccagaaatttttgagaaacaaaagttatttgcacagatccactctgagcagaaaagacggaatcagtactcttccataaaatgatgggaaatgttgtcagtggcacctgctttgtaccgtccaattctctgaaaacaattagaagacagtggaaactgaccttgcccgaccctcatcatgatgagcagccaatgcaggcttctctggagaggcagttagttctaagaaaagccaaccaaacctctcctcttggcaatcactttctcttgctcttttaaaatcaagaaatcaaagtgccctttagcacggccctgtggccaagaaagccctgcagccaagataacaggttgaagttcaaacaattcatcccagataaccactctaattctcccatgattggaagttgctagaagttagtcaaagttataaacctaggacacaggacagctgggaaaaaaaaaaaaagattctaaaagcagggtttgtttcttgggctgggcatagaggctcatgcctatattccaagcactttaggaggccaagtggggaggattgcttcagcccaggagtttgagaccagcctggacaacacactaaggcacccgtctacacacaaaaaaaacaaaaaacaaaaaacacattaaaaattagccaggcattgtgactcacacccatggtcccagctacttgggtggctgaggtaggaggatcctttaagcccaagaggtcaaggctgcagtgagctgtgattacaccactgcactccaggctgggtgacagagcgaggccctgtctaaataaataaataaaagcagggtttcttttaagccagaaattttttcatgggtgatattctaccttctaatcacataggacacactactaatatcatcttctcagaataataaatt

SEQ ID NO: 53879 - DNA, 1738 bp, Homo sapiens
ctgagcgtggaggtgtgctcctgtgctcccagctacatgggaggccaaggcaggaggatcacttgagtccaggaggttaaggctgcagtgagccatgtttggatcactgtacttcagcctgggcaacaaggaagaccctgtctttaaaaaaattaaaaacaaaagaacaaatatggaggcttgggaacagcagccttgccacaaagggacaactgagaaaataagaaatgggttgaaattcatcacgaagttggatggaactaacaaagacccaattccacagaaaaagacatgctgggtggagagttaggagactggaataactcaccgaaggcatcagggtgagtgatttggctatgacttggtctatgtcaagcattccaggcagagacaatctctgcatttattttcctcaaagagtgaggggaaaccccacctatgctagaatgtaccagagtagaattaaggcaaacatgcatttccccttgtggtttgcctgacgaggtgcaatttgtatgaaagatgactcacaaggttacagagtcattctttagactcgagggttgacactctgtgtggttcttaatgactcagcctgggagaggtccccaacacagaaggctccagccctgcaatcccagactacagaggaaagcccctcgtttatcagctggttagtggttaacaagcgtggctttgggaagtcttttgtcttaggctattgagttccatcttctcatctcctctctgttgtctactcagcacttccttgtattcttaccgccggaaaaagtcagaaaagaattcactcaagcacagagggctctgaactgggcaacagctggcaccacaccaggcattgcaagaaaccacagctgaattccttggcgctcatttttataaatattccacaggaaggatgtcagaagcctggtttatccagcatagagagaatggggttcatctccagaagcccagccccagaggcaacttctaggaaaaaatcatcttgtgatgggtgcggggtcaaaggggagtcagcccatgtgaagttcccacaaggttaaaaaataaattattgtcaccactgcctggtggaattcagacagtcatgaactcattcttgtaagccacagagatggttgcggtaaacacagacaaattattgggtttaagcagaccgttttttgttccaacaataaaaaaaatcattttccctttcctccacaaatctctttattactaaaaagctttgatgccttgagaactgggctagatcaatgtaagcctctctttttcccctgggactcctccttagggctccaaactggtttaaaaaatcctttgcctgcttaggaaaaggagaccctcttattgaaccagccacaaaagaaagaaaaagaaaactactcaaaaagaaaacaggggctgggcacagtggctcatgtctgtaatcccagcactttgggaggctgaggcaggaggatggcttgaggccaggagttcaagactaagctgggcaatacagtgagaccttgtctctacaaaaaaattaaaaattagctgggcctgcctatggtcccagctacccaacaggctgaggaagaaagattgtttgggcccaggagttgcaggttacagtgagctacgattgtaccactgcgctccagctcgggcaacaaagcaacaccttgcttgactcaaaaaaaaaattaaaaaggcagggtggggtggctca

SEQ ID NO: 53880 - DNA, 1205 bp, Homo sapiens
tctgcaacttggctattctggggcaaatagacaattcataaatgaatgagtgtagctgtgttccaataaaactttatttacacaacaggtggcaagagggatttggcctgcaggctgctatttgccgaccactgatctattccagcatttcccaaactatgtactacaggatactccaatatacttgaagcttttcctccaaaagagggagagtttccagttcaaagagtttagaaaatgctaggtttaaaaatgttaagcagatttctttacttcaaggcttcttgcagtctctaatgtgcttatgagcttttggaagccaaatatggaatagaattcagcacacagcatttctccaatttccatggatatactggagaagcacccaatcaatgatatctcaagggccactagtgttgggtgggaaggcttgggaagcaatgtcatcatctaattcctaccttgtatagacagaaaaatgaggtttagagagtgggaagttacttggctgaggctactcacctagacggtgtcagaactgggactggaacccaggcagcttagggttgttgctgccatttcagagggccattccttcatttagatggccccataacaaaccagtgcaaagctatcctgagtcatctccatcccgagggattttccggaaggcactttgaaattacataacgacatagatgaaccaatacttaaacctcaaaaaaggcgaagactatgggttcagattttattattttatttagaaacaacatgaggtgaggtgaactgattggacacattcaccacgagtctttcctaatttctaatacaaggtggagcaatagaaaaaaatagaaaataaggagaacaaagtctttttctcaacttttttaggattctagactatactattcagtgttactaaagcacactttgtattttatgaatcatcagtgatgagtaagtacagattaagctctatctgaacatgcagcagtgtacaaagcacagagcaagagttttggagataaaagaaagtttaggaggatcagagacaaaagaaaaaggcttggccgggcgtggtgactcatgcctgtaatcccagctctttgggatgctgaggtgggaggatcgcttgagctcaggagttcaagaccagccttgggaacatggtgagagcccatctctacaaaataattaaaaat

SEQ ID NO: 53881 - DNA, 2944 bp, Homo sapiens
tcaaaaataaaaaaataacctggaagaataaacagtcctctttggaacagggcagactcttggatctgttaacctctttaagcctcagtttcctcatctgtgaaacagaaataacctcctgggaagaggttgtaaggtttaaagagaaaatgaagagccttccacattgtgtaggggagagtccctggtccattagcccttcataaaaaccagtgcctgccctttccttccaacagaagaagggggtggaggcagataagacaagacacgaaaacgtgaattccatcgattgactgcgaggggctagggttcacagcaagcagaacgtcctgggtttctcttcaataccacctcctcctctcctgttcagatgctgagaaacatctggcgcagtagagatgctgcctctgacatttctatgacaaaacgcgtgcctgtgctagggtttgcacaggcacaagttatcacaacctcgggatggggctggggatggcggacaggagctcctttaatttccccagctggcctctccccttgtgaggaacttctcattgcaataaactgtcagacttcacaagatctctcatgccaacgcctgaagctcttaatcccgcacctgacccagattgcggcctggactggagcctccccgccgctcactcactgtaatgcaattaccgccttctggagctccactcggggtgccagggactgctggctgtcacccggggactaaaccactcccttcggggagcccgcacgcgcgcagaaacgtgggcagctggggtggcctggcgcaccacgcatcgggttcaaacccgcgcgggccctgcggaggcgccggtctgggaccccgggctggggcgcgggagccaccgcagctccggccacttgcggctggtgtcgggaaaggaaccgggcgatgtcgtagttctgatcactggcgcgccactccccgggccacccgcctccccgccatgctctcagcgtaacgggcagccgcgctaacttcccgaaactccgcggagagaaaccctgccccggcccgctcctccccgaggcgcgctccggggacggaagtgggtgggagccgcggccgcgccgcgcctttgttacggctcggggaccccgcgggccgagcgcagcgccccgtcgcagcggcccgggcacccgccggcctccacccccgggaggcgcccccgttcccgcttcggtccccggcagggcctcccgcagccagagcgagactgacccgcgcctcccgccccggagcagagcgcagcggcgcgtcctggcgtctgccggccccggctccgcgcgcccctcggccaccgcgcggagggactttgctcacctacccggctcttccacacctcccggtggcaggatcgccgcttcccgccgacagcggctcggcggccccgacttctcagcagcgccgcggccacgccccgcctcgttcccaccgcgcggggagcgggtccccgctcgggatgattcacttcgctccttacctggaggctcgcgcgtccccaccccttgcgacccgcgcggcggccgggagctggcgccctctgctgggccaccaggcgggagcaccctcggactgggcaaggatcgggcggagagggtggggacacagaggggggccaagcacaagcacccctgcctctctcaacgcgggcaccccttcccaaaacaggggccagtgcgcggggaccacgctgggacgactctcgggggaagcaccagagctgtccccacgccccaggacacgaactcgcgcccggagccgaccccctccacggccagcgggtccagccgcgtcctcggaggtggcccaaggaaaccgcgatgaatcggcataagcacgtcctatcttaaaacaccggaaaggcagattttactttgtttggaaactaagtttgtgtcctgtgtctcagtagctctcagggtggtggcagtcacgcccccccggtcccagggctgggaagatgcttgggctagcccccgctgcagccccggagatgcggggctttaggatcccaggggctggaggccagggccgccctatcgctctcccggccgggggtgtggctgtccaactcgctctgtcgcccgagtgaactcttccagcaggttggcctctcaggctgtcccctgaggacctgagcgaaactctggaggggaccaggaagaagggagagaggacatctccgagaccttcccgggggtgcgcccacactcacgcgcccacactcgcgtccccaccttcccccccgtctcacctccgcgcgctcctgcagagcccgactgcgcccgccctcctcgcccacctgccgggcccgggccgggggtgcacactagcgcggggccttggtggtgcggcaccgtcccctgcccaagctggctctcgaggaggtgtgggccccgggaaagtcggccagggccactgtcgccgtcgccgccggagcagagccagtggcgagctcgtcagggcggaccgggcgcctccgtccccgagagccggcgcgcgagtcccggccagcgggcaggcgcccggtattaattgtagggcccccgggtgtcggccgccaggcgctctgagtggctcggaccgcgcgccaggccggcggggccggcgccacccaccccctcggcgcgcgcccggcccagggacgcgcccacgcgcacgcgcccagcggctcagggctccctggctctcaccggctctgctgcccggaggcagccgcttaccctggagccctgagaggcccctttgagtctccagaccttccagggataaataaaatctggcgacctgtgccaacgctgtgggccagttgcaaaggagaccgtccttgctggccacgcgcacctgtgaaaaagtcgcgggaccccccaatcccctccacctggaccgaaccctgcctcggtggttctc

SEQ ID NO: 53882 - DNA, 573 bp, Homo sapiens
aatacatatatatatacatacatacataaatgctattattgctgggcaatcaataggttctctgcccaatgtgcatagagaccaataccagggcactggcttttgagaaaagaaagttgactggcaaggagacaggaggaaactcccaaatctgtctctccagctggtggctgggtcaggttttataaacatagggtggggaggtgcaatctgattggatcttgcaatgtgttgatgccaggaggcacaatctgactggatctggcaggcggtgacactagagctctatctgattggactgtggatcctgccatgtggtgtgcgcttcttaattcagtctccgctcctctgagcacttaggttcctcctgtggttgcacagtcggttcatctgggcatgctcaggttatgtgaccttcgacctgggggccatgacaactgaaaaacaactttgttacataaaaattgaaccagattggtctgatgtgattacactgtctagtacttataactattatgttaaatcctatgaaaaggcaaacattaaaccctctcttagaaatgtaatagtttc

SEQ ID NO: 53883 - DNA, 4741 bp, Homo sapiens
gctaattcttgtattttttgtagagatgaggttttgctatgttgcccaggctggtctcgaactcctgagctcaagagatttgcctgccttggcctctcaaagtgcagggcttacaggtgtgagtgaggagccttctttacatgctgtctgacatgtcattgttcagaacttaattacacggttgcaagggaatgtggtaagtgtagccttttcatagggtgccttgcagcccttaataacatctgtcattagatttctaaataatgggtacagtcttggctataagagtcatcagtgcaaacagtgtttacagccatggcattggacgatgacgtgatcggcagaggaagggaaaccaatcacagaggtgctcatccacagctgtaacgtgcctctggctcacagaaacatggagcaccagagcttggcttggcttgtattggtcattctttgtcttattcctgggccatgcatttttatagcacgtgtttgtccttttccttttgacctactttacccttatacaacctagttgagttttatgcactctttcaagaagcccttctagaacacgactgtgtataaataaataacaaacaaagctttgatcagtcttcctctgtcagaatggggaaagaaggcgaaagaagtagaaaaagaggaagtagaggaagggaaaggggcaggaaatgagtggaaagcaaactgagtgattgaggagatttttgttgggggtcggggagatgcctcagagcttgtgtatttacatgagtcatctggacacgctgaaacccagtttcaacttgaagggttcctctccaaccaactgcttcctggggtctgtctggagagttaccagaaggtaatcttcaactagaagtgattattaggtgggcataggcagctgttgttggcaaaggaaatgcatttctttttgcttacctgtgaccagtggtttgagtctcatggaagaagctctcaatgatagaaactgaagtcagtgccacatatgtaattatataaagaactttgtgattgcagctcaggaaatggtctgggtttcagacgtcctctgtcctcactgatgatggctgaaactgagggtttcaaagtctctggttggtgccagagggtacagttgggtacagaaaagtgaggaaatactctggagtcaaataaaaatgcaagaagcagagagcttttgaggatatacaatgtgacgcttaatgtttgtcttccttaaatgtcctcagtgccaccatgactaagttctggaaacagagaatcctgttttgattctgtgactcagagggcataatatgttggctctttgccctggggcccagggtatccagtgaagcaaaaacaactaggctacagctgcacttccctgtgctgcatgctgcaggggctggaaccagaaaggccacagggaatctgagaaaattcacttctcttaagcttctcactatttctccaaagcaaagacaggagggctgctgccaggactgtgagagtttgtacagtattgtggtgcaattgcaaaaggcgtgctttctcctggcaggtgcagcccccacacagggctcagcatgtggttagtggagaacaggctggatttaggtccccatcctccctctcagcagagcatccctgcagagagaaaaacccacacacccacccacctgtggtagcgctggctgctacctacttcacacatcctgcctgataaggtttggctgcgtcctcacccaaatctcaccttgaattgtaacttccataattcccaagtgttgtgggagggacccagtgggagataattgaatatgggggcagtttcccccatactgttcttgtggtagtgagtaagtctcttgagatctgatttttataagaggtttccccttttgcttgggtctcattttctcccttgtctgccaccatgtaagatgtgcctttcaccttctgccatgattgtgaggcctccccagccatgtgggactgtgagtcaattaaacctctttttctttataaattacccactctcagatatgtctttatcaacagcgtgaaaacggactaatacactgcctgtcaccactggggctgtcccaatgcttcatgcccttggagtggtggcctctgaagcagagtttagtgtgtagcatgtgtctgaggcgtgtgcttgatatcaactcccgtggcagggagacagaaggcaggagagtgcgagggagaagtcaaactgtgatgaaatctgatgatggccttgggcagccctgtggggagccctggagctagaatgttctccagtgttggaccaagctggtcaggcctgtatccctctgtggtttagggtaaagccgctcttcagctaagatgagtcctgagttggggcagctgacagctgacacccagccaccagcatgcccagtggtgggggcaacaagtctgtccatgaagggagatatagaaggcatgtcacagtgtctgccacaccaccccaaggctgccctttaataacctagttttctgcttcaaggcttcccttgatattaaatttcatcagagttctacagcatgccaagatttgaggggcaggataaaaaaatcaccctactgtcaatgccataggcattgcctaaccatgataatcagagaaagccgcttttaccctagtgtctctcaattttgaccccaaattaagcataatgccaaaagaaacattttgggactctctgaaaggtctaggaagggaagaagcttgctgggtgcattctgcagggacatcagtttactgtccacactttttgtggtccatatcttctccgaggccctcatgctgagaaaatctcacaggaatcccatattcagcctcaggggaggaaggtccgtgcgaaacacaagaaggaagatgattgggggccgtggaagagagaggcaatgtcaccttatcccaggagacctccagcaggtccctggaaacaggggcaggggacaggggtgaggcagggtggggagccctagatcccaggccagaccactcggtcaacccctggccttgctgcccatgaggtctgcagctgtgggaaagttccttaattgttccatgcctcagtttccccatctgagaaattaggattgatagtaccaacctcagagggctcctgccaggatgaactcacacgaatcccttgaagagggcctgacccgcactgcactcaggagctgtggctacaagaatgggagcaagaaggaaggatcccctgagtctgggggttgagacaaggccagttccttccccacggagccaacttcattggaagagagctgctcatgggttcagcctcaaacagaaacattctgggaagctctcagatggttctatgtaattgtttagccaattagaagtgattcagaaggcaaattttgctctaataaacagagcaatttgtgaagggtttttggttctggagaaaaaactctaaaacatcaatattgttactaatgctacagagaaacaatgacccatactctgaatcaacacactaatttgtaaacctcacagactcagccttgaaattcctgttttattgaattgccctctgaaacaaaggttatttttaagcaacgtttagtaaaccaatttaagtgggaatagaactcctgaaatgtcagaggtgggtcactcctgcagtacaaagatagcctagcttaatagttaacgctgttcaccagaatccaactacctgggttctggtcctagctctgcctcacaccagctgtgtgatcttgggcaagttacttaacctctccgagcctctgtttgtctcaaatatgaaatggagatgataatactagaactttacacatgacttatggtgagactggaagcagacaatgtaggtaaagtcacagcaaaccctcattaattagtactatatagtgatacacagaatgcagagtaaaatataaggtatgataaagaaagcatgtgcacacacacacacacacagtgttcactgcatttgcaccctatagtagaaactattaggtaggctatgcttcacttacaaaaccctccaaatctcagtggcttatgtgagacagagacagagagagagagagagagagagagagaaaggagaagagttatagagagagagaaagagaaagaaagagagagagaggaagaaagagagaggaggagagagaaaagagaagaggtagaagggaggagagataaagagataaagatagagagaagagagagagagaaaggagaagagagaaaagagatggagagagagaaaggagaagagatagagacagatagagaatgagagagagagggagagagagatttctccttcataaaccatgttgagcacacattgctgggtggacaccggttaccttctccagccacagttgcagagaggaaaaaggaggtggaaaaacacatggcttctgttcatagtgcaccagccagaacaagtcatatggtcatgtcaaacttcagggaagtggggatatgaaattcaccctctgcctagaagtatgggaatcagacattggacagtaacaatgagaagcacacacccagaaacacagatcaacctctctggaatttcctcaggcaatttttgcgtctcagcacataagtgagaagtgagtctccctctcagacaaaggacacaccctctactaatgacctcttagggccatccctattttctgt

SEQ ID NO: 53884 - DNA, 2361 bp, Homo sapiens
tttatgtcctcagtgtgtttcagtcaactgcattcacaatccttttcatgtttacagtgtttcttctttgacccatgggggtcctttcatgttggtgtctgtgtcggtttcacacgacccgtcagtctccagtggcttccttgcttcacggcccaacaagatgtctcagctcctcttgtattttttttcctagacttgaaagcagtcattccttccaagagccctgattgcttctactaggcctgttgattatattttaaaatatgaagtacgtgtctctttatgtgcatcagcattgacctgaaaggtgacacctatgtctacaactccactccaaagcctcctacatggtggctgtctccacttcatcccaaagatctggaatgaatgaggttctgtggtccccttataaagcctcttgcattccaaatgtgtaaatgattttattcttagtatttccctaacacagctgtgagtctgagaactgacagatgcagtgagatgtaaaccaaggcacgagctagtcaaagagagatgtgggagtgcaagctcacagggcacagaggccaaggagcagtgagactcatgggcaaggatcaaaatgtggatgtcagccctgaaagactgtccccttttctctgggaatgtcaccctcttagaggagaacacagcttctagaaggattctcagcagagagagaggaggggatcccctggctaagatcagctgagaacacccacaccatcaatgtggggacagacaccacagacaggtcccctgatgtctgtgacttcaatctcctgccctttggaaagacagatgaactggttcaatgaatgaaccaggaaatgttcacgccaagttcccctgaatgtgagcaagaagaaatccgtacaaactataaatgtcaataaaccaattgccaatggagtttttgaatcaatgaatactaggaatccagggaagcagagctcttctgagatgcgacatggactttctagatgggtaagggaagatgaaggtttgatttcaccgttcagaccctcactcagcacagcagattacctttcacgcaactttcatctctttttctcctcatcttcccattgggatggaaagaatcctccactatgcagctgggtactagtgtagactgaggattgagcatctagctaaatttaagctctgggctgtcgtccatgtgctgagcaatgctgttcaattagcagatctttcctttgtaaaccatgtggttgactgcacagtttgtttgagtctctgccaacaaaataatttttatacgggctgtcactgctcagtgttctgcaagtcattcctcttgcttaagaccatacaaggttagagttttgtctacttcttttcaaggttcagctaacttactgctgcaggatttcacagacaattcaaaggaacccagagttctgatgttcccaggagaagaaacgtggggaaataaaacccctggttgacgtgcagaagagacaaacagtgagaatctctgtgagtttactcaggtgggctttacaacatactttgctccaaaatcctgtgttcaggccaagccctgatattttaaacagacagaaagttggctgggagcctccctgaatgactgtgctgctgatgtcattttacacctgccacaaccatctatcttctgagggtgcaaaaacaagtctgagatggctttgaagataagcacattcagggcgtgctgacttgcaagcagtgtgtgtgtgtgtgatcatgatgccacagaggtggggagggatgtgtggaaacctagggagaaaacagcacctagaaaagttccctgggtgggggtaggatgaatttcgagcatcactcgagcagttttgtttctgcgacctgtatctgtctcttttctccttcccttctgggtcccccttcatcaaaataaatgcccaaatgtgagcactggcagggtggaataggttataactggtcaaatgtcagagctgaagtcactgcagagatagcaatgatagccagggtggcacagaccttacctcgggggtatctttttttgttttgtttgttttttgagacggaatttttttctctcgttgcccaggctggagtgcaatggtgcgatctcagctcactgcaacctctgcctcctgggttcaagcggttctcctgtctcagcctcctgagtagctggaattataggcacatgacaccacgcccagctaatttttttatttttatattttttaattttttttagtagagacggagtttcatcatattggtcaggctggtctcaaactcttgacctcaggtgatccacccaccttggcttcccaaagcgctggg

SEQ ID NO: 53885 - DNA, 1031 bp, Homo sapiens
taccacatgtttagatacttaaaggctgtaaatcaagctaacaacctattaaacaaaatatgctgtagcttgctgctttgaaaaaaatactgtcatgatgaccttgaagtccaagttcaaatttagaattctcaactgtctggaattccgcagtggaatatggtggtgtggggagagctaaccctggctccaggcctttgttccatagctcaccctctcttctctcattccttctgtgctgtgggaggactcattctcatccacgtggacaccccagcacaaacaaccaaactccagtcaccagcacactcaggggtatgatccagaaagaggaaagctatgtccctctagctctggggatgccttgtcctggagggaggcacaaaactggataagagtcagcatttatttccctagagttaggggttgtagtacagtttagcaaactgcaaagtctgatggaatagtcccttacttcagacaatagttgcaagtttaggggtccccaggaccaccctcaagttcaataattctctagaatggttcagagaacccaagaaagcattatacatagcatgagaatgtgtgtgtgtgtttgttttaacagttgaaagttacacaagaaaatcaatcaagggaagagacacacaggacaaagtccagttgggatccaaaggaagaagatcctttggttctcttcccatgcatttatgatcagtgtattggtccattctcacattgctataaagaaatacctgagactgggtaatttataagggcaagaggtttaattagctcacagttctgcaggctgtacaggaagcatgatgctggcttctgcttagcttctgagaaggcctcaggaaacttacagtcatggcggaaggcaaagaaggagccagcacttcacatggccagagcaggaggaagagagagaggggaggtgcaacacacttttaaacaaccagatctcacaggaactcactcattattgccacaataacaccaaggagcatggcgttaaactatga

SEQ ID NO: 53886 - DNA, 1326 bp, Homo sapiens
aatctccagatgccacctggcttcatccacagaactgccagctctataagatgatgtaatacatatgatgtgatactataatacaatgatggacttcagggtaagggaaagaagggttccactgcctgcaaagtttggaagcccctgcatcaggtcccatccatgatcctattattcattaaatggtcccgagcagtgccagaggagactggcagtgttcactttgcttatttagaagcctgaacaaatgccaagaattcacggtcagaaaaacaccctttggctccacatttatctagagagcaaaacagacgcacttgacagatcctgcaggtctaataaaacgccagtgtggcagaaaccctctctgctgcttcatagtatttattatttccagcagattctacacttgctgtcaccaggacatacctgagcaggggaggtcagggctgacccctggggctgtgggcagaaaccatggaaagcctctgagggccactggctttgtcatgagtagatgcaatatgtgggtgattgtttacatggaaacgaaacatctgcgacacatggcgacatggaaaatcccaccatcatacagtaaatgagaacccaaaattccatgtcattaaagcaggggttgcattattgaatattaaatgagatgacccagggtgagcctgtgtggctggctgaggaaggtgctggggtcaaagtccttctcgggccagcggctttctaggacaataaatgtgtcactttcctcccctaaccttctcccgtgtggaataagaacagagctaaagatgtggttccttgaccaattatactatatttaaaatgacatttttaagggactttactattaggccttagtaaggaaaaatctgaatttcaaactgcgaggctaatgtgtgagatcaagtcacttgaccaattgagcgtttacatctcagggtggctttctggatcttgattttccttagcaaatacaattttgttttaagacagggtctttgtcacctaggctggagtgcagtgacgtgatcatggcccaccacatccatgacctcccgggctcaggagatctcccacctcagactcccaagcagctgggactacaggcaaccgccaccatgcttggttaatttttttgtgtgtattttttgtagagacagggtttcaccatgctgcccaggctggtctcaatcccctgggctcaagcaacccacctgcctcagcctcccaaagtgcaaggatttcaagtgtgagccaccgcccctggccaacaaatacttattcaaagtcatccacctgcctggcactatt

SEQ ID NO: 53887 - DNA, 555 bp, Homo sapiens
gggcccagctctcccgaggggctgtgttacttcggtgtctgtcaggggaaatggtagcatggagattgtggctgggttgtggcatcagacacccgggctcagacagagcctttggttctctccttacacagcttccatcaactctgctcatgtctgtttcgttgttgttaaagcgggcagcaatggcacattcctcatcaggctgcatcgatgattaaataaggtatttaatccttgatgtggcgcctggcacttagtaagtgcccataaagtgggtggctcgtggctgtcactcctgggccttgttctcacagcggcattcctgctcctgtgtttgccctctgtttggttgccatgggtgctgtgtttgtgtagagcttcagcaggacgtggtgctgcgaacattcatcttgcctctgcctggtgatctggtgagcaggtgctgctgtttgtgggaggaaggggccagctgcccatgggatagcagcaactgtgtggcctccccaggctggtggccagggggctgccttccccatcaggggtgggacccactca

SEQ ID NO: 53888 - DNA, 572 bp, Homo sapiens
gggtttggtagcttatattgatgtggttcactcaaaggactctagaaaattaagagtgtaggattttcccattcctgccaaaactctgggtggggagttattgagtcaaaacaattgcgagaatttgggaagtgggaaagaagaggaaaatgaaaaagcttgcatggtcctcaaatggaagggtttacctttgcataatcggggctgttttaacaaccagcagtgctctggaatcaggcatgttgagaccaagagctttggaatcaagttcaaatttcagttgtgcaatgtatcaactgtgtacctttggataaattattttcctttgaatctgttccctcacgcattactgaggataggaatatcgactaccctgtactacccatagttgttgggaactttaaatgctatcacatgcatatgcacataataggcactataaattacagctcttaaaaatcatgatatgagatgttctcgtgatgtatttaatttgaatatcaaaaattccaagcaaggaaaaagatctcctttagagatttttgaagttaggagaggcttccaagtgttta

SEQ ID NO: 53889 - DNA, 991 bp, Homo sapiens
ctcctgtgaactcacggagagagaactcactcattaccatggagatggcggagagagaatgcactcattaccatggagatggcgtctagccatttatgagggacccactcccatgaccctaacacctcctacgaggccccatttccaacaacggggatcacgtttcaacatgagatttggaggggaaagatacccaaaccatgtcaagttctgtttctctggagaacactgactgatacacccgtctacctcccaccctgctgtgagtgaggtaccccacgaggctgcaattggatctaaggaaaatgcctggcctgccgcactgctgaaagccagcagggggctgttttggtttgtgcaagcactgacatgcagtgattgttctggtcaccgcatgatctcctgaaaggaaaaatgctgaaataccacaaaactgtcttatgaacaaagtcccaaatgctcccttaactgtcctagaaccttaggctgccactgatgcttacgtttttgaatccttttttctcccagtttctacgtctttaattcccaaagatcaaattctaatggagttccccatatcacttaggttaagtgccaaagtcctcacaatggcctgcaaaatcttgcgcccctcgtgtctctgaccacaacatcatcagttatcccattgtccactctgccctagaccctctatctccttactgttcccaaatgtgaggcaagcacccatctcagggcctttgcttttgctgtcccctctttctggaaaactcttccctcagatctctgtcaggtgccttgtcacatttcctcaggccatatcgaaatgcccccttctcagcaaggcctccccagccacctgtctcaaaccgcaagtccatttctctaccctcgtctccctccactgcattactgccctctttagcacttcacatgagctaacttccatgccataacttccttcccttcttcccccgtcttccccatctga

SEQ ID NO: 53890 - DNA, 4881 bp, Homo sapiens
cacctcctgggttcaagtgattctcctgtctcagcctcccgagtaactgggactacgagtcctggtgcccgccaccatgcccggctaattttgcatttttaatggagatggggtttcaccatgttggccaggctggtctcaaacccctgacctcagttgatccgcctcagcctcccaaagtgttaggattacaggtgcgagccactgtgcctggcctatttttttctcttaataaattgtgagtttctcaagggtggagactgttcctctatcttccatatccagggcacattgtaaaaaatattcagattaggccacttatttagaaattcatggaaatgttgattgggacacaatcaaccctttgaagatatcttccaaaggaaatctttgttgaatttggcaagtggtttaattcaagaaagatatgttgaaattttagtttttaaaaagcttacatataaaaaacaagttttaaaaaacacaagatatataagaaacaaaatttaaaaacaagtttgccccaattgatcttggtctcagatacccagaaacaatgtagtcctgtaaggtcttccacatgctctaaagatgtccagaaaattctgtcagtgggatctttgcaagaaaaggtatacgagtcaaggtggagcccgatccttctgcctcatcgtcactgtaatgagagggagagcagtggaacccattcagggtctaccaggaggcagcactctcttccctggaagcctctgagactgtcaaccttccaagaaggtgactctggagggacagggtaggattatgtcatattcctggaatagtgtagcaaaagtccccctgtttatgcactctgctgagattcaggtctgtgctggcacaggacagaatgttccagcacaggataactatgttacagtgccagttatgaaagcaggggagtgtcttgtgttgggggcagagcagtctttgactgccacgctaggtaaaaggccaccacgaaagccttcttatttagtctgagctttcacaattccaggctcttgccagtctcaggatttttctcgtgaatgaaccaggaaggtccaaggtagggtgagcaaggcaagctagccagggataggagcagggctagtttgtagtgcaggctgccctgctgaggggagcagcctcatatgagtccaggaggcagtcagcatgattcaccgagcctgttggaggctagtgacttgagctggtgtttcataaggctctgcatgggcagttttccctcccggattcctctccatgcagctgcagactgaggaaaatcaaagccacagcttctgctgggatttgcatgggaaagtttcccccttccctgggaatgtcctttcagttctctacaccccgtggcttcgactatgttccacaaacactgagccaacagcttgccagaaccccagggtcagcgcctgtggaacctgtcacccacctgcagctgcaagtcttgggatatgcgtgagacctcagacagcagtctgcctgctgggtggaggtggggggtccaggccaggatgggctgactggcaaacattcccaggtagggtgaccaactcatcctggttgtcccaagactttactgcctttagcactaaaagaatcatatcaaaggaaattcctcagtcctagacagaagaggacaccctgtcccctgactctctaatccccggcagtggtgtgcctgctgacctgcccaaatagttgtacttatcctgagctgctgattcaccttgtggacagggtggctcaatgcaactgatggcactttcctctttggctggctcctagaaaattcattttaaaatttattttattttatttttgagactggggccttgccaggctggagtgtagtggtgcgatcatagctcactgcagcctcaaactcctgggttcaagccatcttcctatcttagcctatggcatagctgagactacagatgtgtgccaccacgcctggctaattaaaaaaaaaattattttggtagagatgggccttgctatgttgcccatcaggttttgaactcctgagctcaagtgatcctcctgcctcagcctccatagtcgctgggactacaggtatgcaccaccacatctggctaatttttaaaaaaatttttgtagagacagagtctctctatgtcgcccaggctgatcttgaactcctggcctcaggcattcctccttggccttccaaagtgctgggattatacacatgagccggctgctggaaatttcagagcctaatttgtacctctccctaacgaattatataggaatgagtaggtgcaatttgtgtgttaatctttctcttagccaatccatctctccttagcatctatttgtcttcttttaatacttactataaaacacaccttctcttacatcattggccgtagctttgtaaccatttcaaattatatttcaaagacctacaaattgttaggcccctctcaaacctcctgcagggaaatctttcctatctgcccaagacccttctttgagtgtgtctggccttggccaggaggcaccattgtaacaaaatagacctgatcatgcacttggggaaaaatcactaatccttagtgtctgctgttatgaacagaggtatttttaaaaacgttagaaacatgtataggcctttgctgaaattacgatcaaattctgtacctgcttaacaatttgttccatcacagtgtaatggcgagcgtgcgcctggctgctcccccaaatgatcgcggttgggttttctgtacagttttctctccagtcgaaagataattgctttccacacataggaaaatctaagcatagaaccaggtgttcaggtagcttgggctgagccaaatgaaaccagccacaggcaggctctgtgaaaacaagatttagcttgcatgacagctactgtttcactggctttgatgaggtgtgagcgatgtgtatttcacaggccacaatacggcttcgagagggagcctgaacttcagtgtctacttccagttctttgcccttggctgttttgattttcagtctgagaggtactcctgggctaattcacttttttctctggcactcgtagaaagaatccaggcactattcggcacagtaatttgaacatttttcatttaggaggatctggccatgggaccaaatcctgggaccagtgagtcttggaaaaatcacttagaaaatgtatccaaggcctgtttgctaaaatcattccctcttttcatttatctttgcagacatttcgcttcctgtctcataacaaattcaaataacaaattcaactttaggtctgaaaaaatgtgagctgtgaccacaatatattgttatctgaattgtccagatggtccaggaaaaaaaaaattgaagcttatttgattgatttctctaacttcccagacagattatgattcattgggaaaatgttccctgtggttttctagagtattttcaagcaatagccgtgccgaaggagcttcagggtatgaagactagtttctaaatgatacataataaaccctgttgcttggcaaagttttcattttgaaatctgaaacctttaccatctccaagtttcaggatagcaaaagaatctcaactgatttcaccaaaatcaattcctgacctttgacctttattacaaactgtagcatgaagtctttgccccactcaaaagtatacaattttttttcatgaatcattgtggttcgttcagaaaaacttggccaaggcatgaggtttatgtccagtttagaacacttgtgccagatatgatacattcaacatgatgtgtggtttcctctttttttttgagacggagtcttgctctgtcacccaggctgcagtgcagtggggcactctcggctcactgcaacctccacctcccaggttcaagtgattctcctgcctgagcctcccaagtagttaggactacaggcacccgccatcacaccgggctaatttttgtatttttaatagagatggggtttcaccatgttggccaggctggtcttgaactcctgacctcaagcaatctgcctgcctcggcctccccaaagtgctgggattacatgcatgagccaccatgcccggctggttttgatttcttgagaaatccctgtaacggcaccttgaaaccccaccaagccattgtgaggagcatttaagccaaaccaagatccctgtttagggtttgatgttggattctcctggcaatgtgggtcttgtctacaatacagttggtgcacactcccataacccacagcagcacccggctggatgaaaaatgactctatccaaatgatgggatgtgttctttcccaacagaggcccacacggctctgcgagccttcttcagggaagctctgtagtgcctgagctgtcatcctagccccatgagagaaaggacagggaagggggttccacagcctatgcagaacttcaggggaggggtggtggccaggaatgttcacctcttcccacaggcctttatagatgtcaggacatgtctggacagaatcaataattagatttatctgggtaggaggcggtacttttgcacgcatacacacacacacacttttttgggaggctgagtaggggagagaggaatgaaacacagtattattcttgcagatacagagctataatgatggcgttggaatagctggcagtgggagaataatctgtgaaactgaaaggagctgttcctcactttttgtttccccctttttttcttttattgatatgtaatatttgacatgtttctggggtacatgtgtgttacctacttctaaggttagacagagtcttgatagctcaggatttttttaaagc

SEQ ID NO: 53891 - DNA, 3581 bp, Homo sapiens
agggtgggtacaaaaatacagttagatagaagaaataagagctggtgtttgatagatcagtagagtgaccatagttaataataatctattatatatttcacaatagctaaaaaagaataattcaaatgttcctagcacaaagaaaggataaatgtttaagatgatggataccccaattacttggatttgaccattacacattataggaatgtatcaaaatatcacacttaccccaaaatatgtgcatctattacgtatcaataaaaataaataaatacatacatacataaataaaggggggaatcagaatacatcaagggtgtgtgatgaatgttatgtctgtgattatgcaacaggagatgggactttccatctttctagcaggctttctcgactctctcccttattgactttgttgatgtaagcctccatgtggtaaagcccttgtggcgggaactcagggcagcctccggcaacagccagcagggagctgggactcaacaacctgccaggaagtgaatcctgcccaaaccacatgagcttggaagtagattgttccccagtggagcctcagatgagaccccagcctggcagacacattgaatgcagcctcttatgaggtcctgaagcagaggactcagctaagttaggcctggacctctgaccaacagaaaccatgagagagtaaatatgggttgtgttaagccactaaatcacccacttaacacactggggtcaatgcactagaggttagcactatagcagtagttgggatgggggaagggtctgaccttcccctataaagtgggagaagactgtgaaggggaggtattttcataatgtttccatcacgaatgttttgttccaaatatctcagaaagcagtacattccaagattaagaatctggaaattgccaggtgcggtagctcacgcctgtaatcctagaactttgggaggccgaggcgggtggatcacgaggtcaggagttcaagaacagcctggccaacatagtgaaaccctgtctctactaaaaatataaaaaattagcctggcgtggtggtgggagcctgtagtcccagctactcaggaggctgaggcaggagaatgtcttgaatctgggaggcagaggttgcagcgtgccgagatcgcaccactgcacaccagccagggcaatagtgcgagactccgtctaaaaaaaaaaagaatctggaaattgatgctcttaaatctgtagtgcccaagtgccccttgggaagtttcttaaaccccagaggttggtgtggcccagtttgaagacggttgtaaagcttgagccattatgattcctcctcccatactgggggaggagtggccgtactcaatgaccaaaggggtgtgcacaatgtgcccctgaccctgtgctccagtcctgcctctgcttgcaggggttcagccctcttccacgtcatctggtcaaattccattccaacgggacagggccttatcaaacatctactgtggtttatacactaacccaggcattggaaaaaaggacaatggtgattgtgaaagggagtggcccataggagacattttgttctgggaagtcttctcagataaccacactacgaccatcctttgccccgtcttctctaaactcctgaaatgcaggctgtgtgccacacaccttggaacatggccacgcatggactcacatggcttactctagttgtctaaatggcagtgctgtcttcctcaacagtttccaactatgctcctctgggcagggattttttttttcaagagacaggatctggctctgttgtcctggctggggtgcagtggcatgatcatagctcactgcagcctagacctcctaggcttaagcaatcctctcgcctcaacttcccaagtagctgggactacaggtgtgtgccaccatgcccagctaagttttaaaaaattttgtagagaatcgggtcttactatgtacccaggctggtctcaaactcttggcctcaactgatcctcccccttcggcctcccaaagcactggaattacaggcatcatatcttaaacaagcaaacaaaagattttcaatttgaaaacagttacaaaataatagtttaagtaacttttagtaatatagtcgtttatatttattatagaacattattaaaatgaggataaaccaaaaatagagacaaagaaagaagaaaagaaatcatctagaattcttctatccaaatacaatcattgctagcattttggtgtccctctttagaggctgaaatagtcccatcttacgcttttggtctccctcacagcatctcacacaggcctgaggcttggaagacactcagtggctgactgctttaatgaaggctctgctgccagcctgctcaccacggttcctgtttttcaccctatgcagaaagtgcagtatattgtagcagcgaaacctcttttctccagtctgcctttattagggctccattcactcctcctcttgggcttcctgccttccctgtctcacagcttcggggaaagggcccactgaaaactccccctagcacagaacagggcaaggcctgccatcccttccagcagatattaagactggaaatgcgcaggcgcttaggtttgatctacacgcgaatacctgggcttgttgaataataggaaaatattttgttcaaattggaaacttctcttttgaatgcctgggaacctctgggatgacactgcaggagttgtatcctagggaccgattgctcttcatctttgccacacctgggcccctttgttcccacctctgatgctaagacctgccctctcttgttgccttatttgcctggcccttttagtctcatcactctcagggaaggctggtattgttgcttggtgtcctgccagggtcacagtcccctagggaggccagggtcaggcagggttcagccactctgaaagccgcagggcaatggcccatggcagcctggcaggggcccaagacctggtctcaggggaatgtctcctgccttcagcctttcaaaaaggaaaattctctctcactttgtgaaaaacagttgtcaaaaccagttggtggtatttgccaactaattcctcgggctcagtaatccatcttgcaggaggtgaacacagcccaaggtatttgcaaggggaaaagatcagcgaaagaacgagcactctttgattgtgcaacccacacagtttggatggcttttgagtcctttctggaagcaccctagagacaattcttagaagcagcacactcaaataagggatttagacttttgccagtgacatcgtctgcctaggtgcttttagtataaaatgagctgtgcatttggacacaactttttctcagtaaacacatggaaatgaagaaggcgaaatagtattgagagcaaaggaaaaggtgatggttattctagactcaataaagacatgcacaaatgtttactgagcagctactatgtgctaagccttgcttagattacaccttgggaggaaaaaggagacagataagaccatctctggctatcataatattcatgttgtcatatcagaaagaatgca

SEQ ID NO: 53892 - DNA, 3553 bp, Homo sapiens
gattgagctaatttacattcactttctgtacgaagtctgggtgtattctacgttcacagcatgtctcaattcggaccgcctgcactccctgcgctcaattgccacctgtggccggggcttgcagtattgaacagccatccaactagagttttcaggccttgcagggtgttagaatcacctgggtggcgggggagtggctatgaaaaaatttcttgtgcccaaaacaacaaacaaatgcagtgctcgggccctactatattaattctagtctgtctgagagcctgaggctgtcacccaaataccaaatgtcagcctagcccatttgctttcccttttccagtgtgcacctccttccttcacatcacatcacacacacacacacacacacacacacacacacacacacagtttggagtctgaaattaggaggatcacttgagcccacgagacagaggttgcagtgtgccaagatcacaccactgcactccagcctgggcaacagagtgagactctgtctcaacaacaacaacaaaaaatccaaaccacaacataaaacagagggataaacagaagagacagtcgtgctgttctgcatctcttggttgctggaccctgtaggtcccacaacctttgctgacatccctcagagaagctccatcactttgtcctcctgcccccagcagatgccaagccccagaagggcccctcctcttgtcactgtccctccaggtctggcagagccagttcctttgtcggtgaggaagctgtgatcttgggagcagtggccctttcctctctgggtggaacacggagctcagcctctgccctccctctctctgctcctctttgtcaccttccactcacaggcctgggaaaaggaccctcagggctccttgcctgcagtccttttggttggcaggagctgctgattggcatgggctgacagctttcccgagggggatgtctggaggccaccagctgcctccacacacaggtgcccaggtgtgtggctgcttcagctccagcagccaccgcctttctggggaaaatctatgcaggactaagggctgagggaaagccctatgtactttgggaccccaggacaagaggataattgtgcaaaatcccattgacatcactttctctctgtagggagctgcagattaatggtaaaaaaaaaaaaacaaaaaaaaaacactaatgagcaaagtaactcctagttaccccatccaggttggggaagagaagtttggagacactagtgtctctagttatgtagcatttattttctagatctaagcgtctactgttccatggtattagctgtccttggaagcatccctaaccttcccaaccctctgttacttcatctgcaaaataggaatacctgatgtgcctggctctcagagttgttgtaaaaacggaaagaaaacagcagctgaaaattgtcaaggactgtgacagggctgaggtttttaccccatttgtcaggttacaagtgggcctgccagtttcatgaatggggatagaagacacaagactcctgggtcagagccaagggaatttattactcactgcaacagcagtagccagagtctcggcattttcttgtgtgggatccgtagactccaatacccagagcgcgatgtgaagaggccgggtgagacggtcacaccaggcaggaacctgagtttaggaaagtcacttatttttagtatgagtaggaagcctgcctgacctttgtccctgagagagacattatctttattctactgggcagtaaacaaacctgccctttcctctggagacagagacactgactgtatcttcccaggctgctctctgcacaaacacccttggaaagctagtccggaacaaaagcggtccgtgtctctcttggcaaaacaggcttctgcctttccaggcaaaagacccgtggagaattttctccccaccaagcactattgagaaagtgcaagtgctatgcatgtgtaaagtactttaacctcatttaccctaacaattgccctgtgaggtgggaaggggtaaaaataaccctatcatgatgcttatgtggaaagagagtcaggcatgagaggttcagcacgtgtccaaagccacccagctatttggtgaatcaccatgtctagcactgagaaatctaggctctaggccctctgctatttctactacaccactggcaagatcatctttaatgcccctcaagcctcactcattcccactagaatctacaaattgtgacaggccatcaacagtgagaagtcagcaccattagaaacttctgcagtttccaaggctgagctcatttgaaagcaggcgatgcgtgtgttaaataaccaggctttgttttgggttatcaaaattctcccacggtctgctccagcatgccaacatgggtgttggggggttacaagggagtttgcgggcactcggaagcaatcgagaccccgtgacctgcagagtggtgagcaggactcaggcgtatgggagtgggaagtcactgaccctcacacctgcatggatgttgctgctcttctgctttgcagaagagggttcatacccgttctttttgtgccaggaagaaggacaggctcaaaggttctgtggcctgtggcttgaggtctccctgttgttcaacaagtgtcagcaagggtctctggccctggaggggctctcactgagctcccgtgggagtgggacatgtaggagccccagttcctacactgtctcctaaggggctccagcttggcttggacctctttcctggtgcacagtatgactgctgatcgacactcactgaacacttagcaagttccaggcactgtgctatgccaagcccttcccacacatcatcttatttaatcctcacaacaaccctttctatgggtgacatgcctgcatcgcatggtaagtgacaaagctccaactcattgcagatcttatctggctctgaggcccagatatgcttccaacaaaggacttgtgagttatcttcacatttttagaaataaagttggggtccagagagcagagcccctgaaagcctctcttttctgccagcctgtcgcagcaaagtacttccaactagatctttaggtagacaggtctgcaggttctgcttgtaggaaaaacagcaagcaattagcacaacccgcctggatgtggggctcagtgaacctgtcctccgttggcatgcacgtacgctgccctctagcgttgaaatgccagcaggcggctacctctgctcagcttgcacaagaggtcagcccctcgccttcccatggggagcagaacagagtccggcatttcccactctggagaatgggccacttcccactgagtggcctctcctacacaaagggcaagggaccccacatgaaaatgtcccgagaagttttgtgctgcctgggtcagccggccactttcagcaggcttcactctacaaggagctttttcctctgaaagtgacttctgtacaccaattattatgatctgtcacctctgaagccatttatttcaatggctagtgata

SEQ ID NO: 53893 - DNA, 559 bp, Homo sapiens
caactggactagaagcaggttctgaaaagctctattattatggatatggactagactatgggaataactaaaatgcactgtctctaggttttttacattcatatttatacaaaagaagaatctgagctctagaagactgggctgatgagatgaattgtctcccgtgagaaaaatttccctagacatgtttgaacatacagttctgtgtttcactctgagttttgtctgttcctgaggtttttaaatcgaccaaagagaggacttaggactctttgtgactctgccaataaaacaccgcggggctccaccttcctccagccaagtgctgggccacatttgcacttcagtctccctgtgactgctttgaaagggcctgcttttcctctcagaggcttttgggatctgggcagacacacaccctgaagttatctcctcttaagcatataaaccagggattatcttatctcggtaagcacagtgatcttagaaggacagccactcacctcccagaagagttggaaagtctccagggagcaagggaagccattctaggctggag

SEQ ID NO: 53894 - DNA, 879 bp, Homo sapiens
gagggtcaggcccaggtctctggagctgaggctttagtaccaatttcctctggaggggcggctgcctgatgcacactactttcccaagaatttgacactgtaagactcaggacacgggaatgagaggcttggagagtcccgatgtcatctcttccattggcttttttcttcccttcccttttgatcttcccgtcccaggcccgccgtttgttttccattatccagcttcctgctctcatgtccagagtcccagggctccagtgtcctggcccccatcggtgccagggctgcccagaaggcagacaaatcagaggcgtcgtagcctggcgtctcctcgcatgtcgagggccgctttcaccatctgctttcaatgaagtgtgggtttcggtacatattatggaaacagaaatggaaaaaccatcggggtccctcctgcaaaaacaatcattatccactgaaatgagctcttaggaacttccgggtggagagcacatcactattaatgaagaagaattcagacaggaattctggccgggctggacagacaggagagggaagaagaaatggaatgttctgactcacccggcagttaagaggagagtcccttaatagagcaaacagaacagtcctacagccgcggctgtggaatctgctgccagcctggtttctctctgactcagaatgtggctttcagggctatggtgctggggaggtgggctccatcacccgaggaacacctagcccgcgacagaggagatacgagcacaaaggctgggaatgccatctgcactagcaggacctggccagcccgggtccgccggtgccagggagggctaggcctcagagccagactcacaccagccttcctggaggaatttg

SEQ ID NO: 53895 - DNA, 1535 bp, Homo sapiens
acatctttgctaaaagtttcttttcaccttttggggttcacttaactagttcagacactgtttggcaattctggttcaacaggacttgagagtgctctgggactaattgagccaagtaccatactatgaatctggttggtgactaatgtacttggaactaataggaaagagttagtttattttggctcagtgatctggccagccattgcttagtgaccacaaattatgacccacagaagaagtgaagtaatttatgtataatcatagaacagctaacacctagacagaggttcttctgagccaggcatcatgctaagaactttgcatatattaactcatttaatcctaaaaacaaccggctgaggtgagttttatcgttatccccgttgtgcagataaggaaacttaggcagagagaggtaagcaatttctccaaggtcacacagggttagctggaccttatatagacccaagactcactccctgtcttgccttgcacattggcaaaggctaaccacgatttttaatgaactctgggcaattaatggagttgattagccgtggccgaatttgtgctgccaccatgaggaggaagaatcatagtccacccagactgatgagaactcaggaaccaggaaaggcaaggtgaatgtgaagctgaggtctgtgtctccactcaaggaccaaacaggaaattcagggtgggaggggggctctgtccagtctcccagcagtgaccagggacaatgagctgggcttgggcaccgcagggcttaattgtggactgtaccatgttaaccgagctcagagtccaaaggctaaagtgaaacagaaagccaggccgactgtctggctgggtcatctgcccaagaggattagaggaggcagagcaacgcaggtgtgagttagcagggtggaaaaacgaacccagcgtgcaggcgcagctaggaagaggtggggacagatgccctccgagcgtgccgcactacttctcacgggaaaccttcaggcctggggagtctctggggcgtggtgagggaggtgctgttcctcctctcatattcctggcttggcagagcctggtcctgaagttgggatatggtctagttactaatatattctgttaggacatgaccaggacacaggaatcccagctcaccgcatccccacctgggttcagagaagcagattggatagtgggtagacggatggcctttcgaagcagataaacctgggctcagactttggcctccgttaactcttagctatgtgaccttgggcaaatctataacctccctctaagcctcagtcttgccagttataaaatgggaatattaataaaacatgtaactaaccaagttaatgtagtagttaaatgccataagaggtgcaggatagtttgcagaagggttgacttgcactaaatgatacctctatttgctgttgttatcagtgtcaggaataacaaacgttattggctggaaggtggcaaggagagggcaggactgagctaaatcatccttctaattgtttgcg

SEQ ID NO: 53896 - DNA, 2162 bp, Homo sapiens
aagctacccttggactaccctgttccctcatctataaaatggagtaacagttatttccttccacacctacgctacagggttgtttcatatatcaaagagcatatgaacatactctcaaatttaaacacccatacaaatgttaaattacaatagcttttttggcagaatccttactcaaattttcagcgttacttagaaatgttcaacagaagtagcttccactaaatacaatccaatcaatatttgaatgaaatacataaagatttctcactgcctgccaatgtaagtcttttatacagtctgataaagacaccagcttattttagggaaaaaatagctccaaggaatcgtagaagtcaatacattttgtttaataatttgactagaagtctaaattaactgagctagtgaccttgcctaagttatttacctctttgaaccattttctacatctgtaaaatggacacagtgatacatttcttgcaagatcgttttaagaactgtaaatagaatacacaagctcttgagtcacaagagaggttcaataacactggcttctcaatacacaaagaagcatataaatgtagaacgaacgcgggacaacagcctgttgcagtgaatccaaatctgttaccagactgatttggttcaaaatggccaaaaagaataaagtaaacggcagtacatttcatagacagaaccctatgtctaggaaccaagaatcctcttgattcatcaggctacaatataactcggcctccagcaacaacttaatgtatcaaaatcagaaatatacgtacacgatgcagcgactggctcaggtgtgtagcattactatcattgggaacactatttcgtcaaactgtaaagtgcaagcaaactgggttcctgacctgaatttcatggaagtctaaacaactccattactgtacacaggagtcgccccaaacaaacatcacacatctcacttctgcctcagcaacggcggcgaccctgggttcccctacagagatcagaggagaggagaggacaggacacagccccaccctcttgccaaagggtccacagccgtttccacaggccacgtgtttccccgtgatcccagactcctcgcccgctgtgggacggaactacagggcaaaccggcgccatcacctgtctccacgctccctgaaggctgctcgtctctcctaaggtctttggccacagttcctgggcaactcaaaagcctgacgataggccgctggactcgagttcttctccgggcacacaggttcaaacgggtcaagagccccacgccgggaaccgccattgctaaaaaaaaaaaaaaaaaaaaaacagcactagcgcgaagctgaaaggtcagcgcgttttcgcgcatgcgtcgggggggagggggggggcaaaagaaatgggaagcctcgagggtcaaactaggcgaaagaagttcgcttttagaggaagagaggaaattgaggccggaaagaagatacctaagctttcagacatggtttacttccacagtcacacaatttaccaaatgaaaagttccatagaaggagcgctccacctactcttgtaaatagcatcatgaaaatagaaccagagcccgggcgcggtggctcatgcctgtaatcccagcactttgagaggctgagggaggtgaatctcctgacgttacgggttcgagaccagcctggctaacatggcgaaaccttgtctctactaaaaaatacaaaaaaattagctgggcgtgattacatgcctgtaatcccagctacttgggaggctgaggcacgagaatcacttgaacccaggaggcgaaggttgcagtgagccgagatcgcgccactgcacttaagcctgtgcaacagagcgtgaccctgtctcaaaaaaaaaaaaaaaaaaaaagttaaaataatggaaaggcttttaacctctctgaaaggggcaccaggagcaggcagggcatcatcatcttccttgaaccatgtgaggacattttacaacctctgccaatatgcctcaattcaaattaaaattcaagtggttttgccagcccctcctccaagtgagaggtacatacctcatcttaaagccatacgaaaggcattggagaggactggttcagtcttctcattttggacatgagaaagtggggc

SEQ ID NO: 53897 - DNA, 2396 bp, Homo sapiens
accgcgcggaggcaatctagaaactgcagagggagcacggacctgggcactgggaagaatagggcgtggacttggagtgtgaccgcgtttgaatctgggttgtgcctgggacaccccacctcctgggccgtaggtggggggggagagagagagagagagagagagagagagaggatgtcgaccttacatggctcctagctctccgcgctctagccgaatgcctggttcctagtgggtgcttgatacgtgggaaatgtagggggagggggtggcggggcattgggaatgtcccgcagagtggatttcgggagagtggcgcttttctctagaactctcttccggttacacctggagtaaaagcttgacactctagaaggaaaaccccagatgagcagctaggactgagggttagcggtaggcgggagcggggagatagtacaagtacgcttcctaatgaggcggtgccgcaaaataaccaattttaataaagactgcagagaagaaaaccaggttctgctggcggagtgcacaggctcccagccgagcgcccaacaaccaggttccgggcccaccctgccgcagcctcttggaaatctctaagttggaatgtgtgcgtgcgcaccacgggtcactgccctctttgtgtgtgaatttgaagcgaaatctgggcgaggcggggccgtgctactagcaatcggacccacagtcgcggttccaagaagccccgaagcttccccggcttcccgcagcactgctgggagggcacacggcgcctctgtccccaccccagagcgtggggcgcgcggaaaaaggtctggtgactgccctccccgccgccccccgggagcgtgccctcccgccggaccctgggactccagagaagcgccgagggcgcgagtacactaagatatacgaccttccctggggaccgggaagggcacaaccacctcttgcaactccgccactaagacgccttgggtcaccaggcccgggggaaaactcgtccccgtcccaggctctcgattcgggccgcagctcacgtcccgcgctcctccctgcgcgccgctctgctcctccctagtcccgcctccagctccgcccgggcgcccagagggcaaatgaggggcggcggggtggcgggtgggggggagacgcggaatttcccagcgcgggggctctggcttaccctgcaaccgggcagtctctttctgtttacggagagaaaggggaaatggaaaagtcggggaggcggtggctggcgtccgctgcgccgcccctgggcaggctcagacgccgtgagtcaggggcagagcagggcggtctgagcgtgcgggcgacgcgggtctcactcgtccgctccgctctggactgcgcgccacgctctggggtccggcgccctggttcctgcttctgccgctgccgccgccggatcccagtggcccggcgtgctcggctcccacaggcctgcagccagcatcgcaccgaaccttcggggggccgcggctggagcgctcggccggcgtgggagcgccaaggccgcaggtaatccagggttgggggtctccggcgtgtctttcgggtcgcgtcccgcctgggtgccccggggattcccatgcagaaatggagggtgcccccagcagaggggaaaactctggcgtgggaagaggtgggggcgtgcccacagctgcgctcgcgggtcgccggctgcaccaggcacagctggaaagcaccttgcgcaagggtctcacggggtgcagactcgcgactcctcccccttcctcctccttcccgtatccgcagcgccagggcagtgctggtctgggcagtgcgcggggaagcggggacccgctgtcactgcgcctcccgctgccgacgccgcctggacggccgcactctccctgcccgagacccggtgagtgcagctcggaggctggaggacccgatcctcccaaatgctgggtgctttgataatttataagccttttaggctcccttgacttagagaaccaggaggaaaggagtgggagtgtgggttggcggagcccagagacttgtgaatggctggaactaaattcaagtttgtaacccggactctatcccatgactaaagaggtcatagcagaacacgaaggctgggcttttggtctaagaaagaatactaggagaaaaaaaaagttattttcacggaagttgttttcgagcgatagtgcatgatcaggactctgaaatttttctagctctgggcggagaaggacgcctagggattgtctccatagttaacaggggaaggccaccggctgcctgtaagagagaaacgttgcgatgcttgtctatttcacttttgggaagacaagattaaaggctgctcttgataaaaaacagggacagaaaggctc

SEQ ID NO: 53898 - DNA, 2943 bp, Homo sapiens
aggtggaggttgcagtgagccaagatcatgccactgcactccagcctgggcgacagagctagactctgtctcaaaaaaacccccaaaaaacaataaaacccaaaacaattttcttggacccgtgagtcaatgaattccccttctgggctaatttcacttgtgctggggctctgtctcttatcatcaaatcaatatacccaggctggtgaaatcacagtgtgagcttttgccaaaaataatctagctggcagaggaagagaggcatgctccctatagcagaagggggctagtgaggatctgggtatttgtggcccatgagtgcttgctcttggctttggaagtatcctggtgagtattgccataggtcacagcaggagccctaaaaggaagacactcgattaagctggaaatttggggctttgatcggggctttgatcagttcctttgatcagttcctttgatctttggtaaacactaccatgaacgctgggcacagtagtgatgctgccatttccttgaccacagcagaggtttatatttgggtaagggaggcattggagacagctgggcagggggctggggggaaaggtagctgctgtctaaactgcaacttcagtaactatgaccatgaatatgattgcaggtttgactgctcatttagagggcttgtcattcggaggagggctttagctgatctaggggacagtcagagacatgcaatacatatgactcaagaggccgtctggtgtgacacgcaatcaggaatagctctgcaattctgctggattaggtcataaaagcatctcccaaaagaaaagtgtatgagatgtcagtggtctagtaggtcatacgtctgcaaacagtgggatggccatcagatcccatttgggacagtcgtggtttacacctactatgttggtgtaattattaatagcaccccctttcacgctcagaagtatctggtttgaatggtaaattctgtggtcccctagtggacagaaaacttgatgtgtcacatagaagggagaattgggtcttgaggttcctatgcggaagaggaatggtgacttctgctccgatgagtgcaggaagccccagggagcagggagcggaggggaggagggaagggacacctctaggaagaaagagaacaaaatgaaactactgtccagtgttgatgggaaaaaagaggaagttatcagggacagacaaagggtgtggaaaaaaatgagaagccacaagaaaactgctgaggacagaatgggtggactcactggtgagctcagaaccacaaggacatgtgttccccagcacagcaaggatgaccttggaggaggctagtgtcacagagggcgacacagagtgggtcatggagacagaaccagactgggcagaatccagggcttgagtcactcgctgcagacagtcatgtcagggtgtgtcactgccagggaccagagctctgcagggatgatgacaaatggatttgggccagcaaggtctgggtcaagggagcaagatagtttcttcttctgtcacccataatgatgagtcccttaaggaaaggctgtgccatccatttctggctcccctgcacttattactgtgccaagcacatgatatatagtcaacgaattgatatatcaatgaatatctgagaaaataaagggaggaaagcaagagtaaaacatggaaatacaggaagtggcaccgaagcagaaacatgtagaaaggacagaaaaagtgaagccaagaattgaaaaaacagagaccccaggaagtggtgagagaaaggaactgaaaatgggactgtgtatgtaccatgaaggctaaaggcccaggctgcagggctggaaaactcaagacacaacatgggaaaagaatgaaaattatagtttcttgtgtcatgggaatttgaacgaaatcagttggtgagaacttctttgtttgatgggattagtgaagacagcacgttcactcaacatgtgtcaaagtaatttaaagccaaaaagtaggccgagtatggtggctcacatctgtagtcttagctacttgggaagctgaggtgggaggattgcttgaacccaagaggttgaggctgcagtgagctatggttgtaccactgcactccagcctgggtgacagagtgagcccatctcaaatagataaacaaataaacacataaataaataggcccggcgccgtggctcgtgcctgtaatcccagcactttgggaggccgaggccatcggatcatgaggtcaggagttagagaccagtctgaccaatatggtgaaatcctgtctctactaaaaatacaaaaattagcctggcatgatggcgtgcacctgtaggcccagctacttggcaggctgaggcaggagaattgctgctggtctccaactcctgacctcaagaaatctgcctgccttggcctcccaaagtgctgggatcacaggtgtgagccactgtgcccagccaatgtgagtgtttttttgacctcactgttttgctgactatcttgatctcccgcctgccataaaactctatgctggaaccagccaaggctatgttgaacaggtataggaacctgctaatattcatgacaaaagtcccttcttgaagatggatttctaatgaatgtctgggaatttctgatcatttcaggcatgaaatctacacttttagagaatggaattaagtgaggagaaattaatacagtagagacatcgaagcactagaaaggaagtaagggaatgtttatttatcaaatacctgtgaagtgacaggcaaagtactatacactgtttttctcgtttgctctctttcctttgacatagtttttttcacccccaaatccaggccctcttcggaagatacttcaatgactcaagaaaacaaacctatgatctcagattttcccttttggagggagtaaagtgtg

SEQ ID NO: 53899 - DNA, 904 bp, Homo sapiens
caggtaagttttcaaccctcaaccccctcctacccactcttattttggagtcccagtgtctactacttttatctttatgtttgtgtgtccataagctgcccacctgacatcacctaaatgactttcagacaactcaaactccttgccgcaaaactgaacagcttcatgtcttttgttctcagggatctgtgctcctcactgtatgtttcataagccttgtcagtaactcataaccatcccccagggctgtaaggaagacaagcgaccaccatcccagacagctgctttttcttcatcctgtcctctagtctcgctcaacacatgttctcagcatcctagacagtgctcttcttaaacattaatctgagacaccctcccgcaaaaaaggttttggaggcttcccagggttccaaagataaggtcccaggatgatgtaactgacgaggccctccatgtacccgcctgtctgtccaggctcacgctttggactttccctcattgctcaccccgctccagccacagtgaccttgcatcagttgctcacgtattccatagtttaagaattaaattgtctagccctactggaagcaagaaaaaaaaaattaaatcgttctttatgggttctaacaaaaaataacagttccctaaaccaccccctttttcattttctgcacaccaggggaaactactttcaacaattttaactgattctttgggtaacctttgccttatcactaaataacatagttatattgccacctctttatttttctgtttgaggctttatctatgaatttctgtatatgaaagatgaaagtttagttatcttttacaatatcagctcccaccacatgtgtagacacttctcatctccttccaacataaattacgtagacacttctca

SEQ ID NO: 53900 - DNA, 910 bp, Homo sapiens
atgtaacaatctgaaaattagcttccgaaatcccacttggtgtattggtggattcttttattttgttttttattttttgtttgtttgtttttttaaaaaaacaaaggaaaaagcccctgggttacttgagacagtgggggaaatatcagctcaaagattctcaagtgtagccgttatctgattcacccctactccctcagcaaagttggccgcctctagtggacagggtattccccggtcccatcctgggctccagtgactcatacactaaatcagagtttcacatctaactattatgggcattggttactaaggctggaagccaaaagcctgcttgaaatgaagattcctttctaaaggtcaaaactttcctccagaaaatgttcctctccatcaggaggccttggcatgatgtcaccttagatatgaacttacgaggggacgtttcctaaaagtacacttatctcttttgtgatattcatgttagggatgaaatcagcctatgtcatacactgacttgttcacttaaagaaaatgccagataagcagggaattcatcacagtcttgatcatttagactgtctggatggtcgaccgctgtttcactttacctctgcttcataggaatttggaataggactaaggctgcagcccttgctctcaacacactgaccagatgctaactggtcaggaccttttctcccacagacactaaaagaagattcagaaatcttccatgctcagggtgccaggcaaccattgcccatcaatagaagttggcaagtgaaatgaaacctaatcacctgcccctgaagcagtcttgctttcaaagttaagaaaactgaggcttagagaggttaagaggttaaacaacttttctctaaagtcatacctgtcatggctgggttga

SEQ ID NO: 53901 - DNA, 1075 bp, Homo sapiens
aaaagcacatgaaaaaatttgattgataagtacctactgtataaatatgagtctcatggactgagatattgaaagtttgctgtaatgaccatcagtttatttctccacaaaataagaacacaggaaacttcagagtttagcccttccgttctggcagctgccacttatcagaaagttcctctaaatatttgtattgctgggaatcctctgtttctaaaaatggcatctgtatttcctgactagttttatatttcaggttttgtgggtggggggcgattctgcttgacccccagacttgcccttctaataatacaaattagtaatgttatttgtattatgatttagtgttttctaattggaagataatctaacatcgtactgaacaaggcaggttatccactcaattttacagacaaggaaaacacatcagagaggttttgaaattgcctggcatcatcaactagaaaacggtcagcctgggattcaaacacagggagtgtgactccagaatccacactcccaacagcaagctctgtagcccattctaagtaggcattgagttccgatttggggcacaggttaccatcagtaaacatgaacttatttgtggagaacaaataagtcatgatagatccctgcctgttaacatggtgacaccttaatgaacacccactacgtgccagactctttacaacaatcacacagagataggtattctcatcctcatttttttaagatgagtcattgagactcaaagagttcaagcaattttcctaaggccacacagctgggtaacggtaactttggtttgcaaacccagctgttactgactcccagctctatctgctgtgaacgcaattgatttataggagacaaaaaatgtggatgagtctagactttcctctccaacctccaaggaccatcagcataccagtttcttccctccaagaggtactttgaaattcacagaatttctgtctcaaatacatattttggtctagtatttacaccttccatgccctgatattggtagggttctcttctttttcaagactgttaaagcagagtatccagg

SEQ ID NO: 53902 - DNA, 2133 bp, Homo sapiens
tttagcatgatggagggtatacgatacaggcaaaaaaccattggctttgaagccaaatccaccagggtttgaatactcgttaggcaactttaggtggattatttagcctctgtgagcctcagtttcttcatctgcaacatgggagtgatgatgaatcccaggcttgttgggaggattctactcctacatccaaaggctggcatcacccagtgcccaatacacgggaaggcacaggctgaattcccatttgtgtctccggtgggattgaatggagcctcagcagtccccaagatgtgcatcagcctctgagaaaactcccagcaacagaaatgctctgcttccccaggcagccccttccacttcaggaaaggtctaattgctagaaaacgtggagagctaaaatgtcactttgtcatttcacactggcccctgctcccccctcggagtgcgctctaattcctgttcacatgatagctcttccgtcatttgagcagctcttcaatcccatcgaactggaaaaaaggagcttttttccagactaaacattgtcacagccttcaaccatcacatgcatgacattttgagccctgttttccttcagacacaaagaggatcgatcaggttttggacatcagagaaccaggtcaggctcaaatcacaaaacatatgtacttttcctttccactgccccttttggtgtgtttgtgggaatttgtttactatgcctaactggacaggtcatccttgtatggtaccagggtcatttgaatgctcttgtttgcttgttgcttaatctactcatgatatcaatcattgcgtagatcaattgccagctaggcaaacagctacacggctctgtcaattcttggcaggtctacatttcaccatttcttcaacatcacgtggggtaccatgacattgacttccaggtctagcttgacgagtgaaatagaacgttgttggcttaagaagagccggagctcatctgaaaacctgatgagtcactgtcccctctctggcaacctaacacgaatgttcacttagtgcagattttggggagccttggcctttgccctagattgcagtaaaaatgctaacattttcccaattgctatctttacataactgtcagagtttttactgtctcagaggtcaaagcacggagagttattagtcagccctagtaaatttccatttctgacccaaaaagctacaggaacttcccctttgaaagttctccccttccatattttgaaatcacaaaatagagaaaacacatagtttcaggtgtaacatcttttttctccaactcccagaaaaaatcccaggagttttactagtgattctgctgcctgttcactctttcaactggaagtcagaatgaaactctctgtagcccctgctggagattgcatttcctgtctacctatgtgagtccttcatggtgggcttgggaaagtacattccataactgaggtcctgtttgggggttttgaagaaggccaattggcttcttacaaagctccacaagcctgcgctcttttctgagttcatagcctactctgcatgggcaagaagcaggatgcgatgtctcctagaacgagctgcagaattgaatgacctcagcagaacaagcccactgtggccagcctgggtgtttggaaattcatggctctcttttctattccttctgtgtgaaggaatcctaactgcctctttttttttttttttgagacagagtctcactctgtcacccaggatggagtgcagtggtcctatcttggctcacagcaacctccgcctcccgggttcaagtgattcttgtgcctcagcctccccagcagctgggattacaggcgcatgccaccacgcccagctaatttttgtatttttagtagagacagggtttctccacatgggccaggctgttctggaactcctgacctcaggtgacctgctcacctcggcctcccaaagtgctgggattacaggcatgagccaccgcacctgcccctaactgcctctttctgattgtggcagtgaggccactttcctggagttttcttgcactatccagagctgtcctgggagaagcactaagccttggggtcaccagacttctgggacaggcag

SEQ ID NO: 53903 - DNA, 1515 bp, Homo sapiens
gaaaatctcaagaccccaaactcacaatgccaaagggaaaagttaagcttgggaactgagacaagagaaaaacaaagcaaaactgtgttcctttcgttcccaagggatagctgtaatttcatgtgctgactttatcttacgtaaaatgtagatttactcagcaagataattatatgactttcccctccctcctatcttttcacatgtaaagtgtggattcagtgagtgctattcaaggcctcatgagaatgtgaccacctggctcattgcctatcctacccccttctttttcttctctccttctcctcctgcccactcttccccctttacatattgaagtcctcaaaactctccttggaaaaaagcagagaacacaaatcctattgtaactcgtgtttcttttttcctgagtgtttcctcaacctcagcaaaataaacctctaagttgactgagatctgtctcagacactttttggtttacagaagtaaggaagaaggaattgcatgacttccaggatccagcttggtgagggcgtggacggcagagccctgagatgggatcacgtgaagacgagcagggaacgtcaacaagggaggagaccttggcaatgcctgcacagcccgctcagccgcgtagcagagccctcacagtcgctggcttcatgcggtgtagagaaagctggttaaattcatctaactgcaatttgccttccatgtctagtctccttttggccatgaggaagataatccagccggctaggtatagctgaaatgtgacataatcaattacaaatttgttgatttagagcaagtgatagatacacagcccagagtaaatttcccagaggctcttaccactgtggggaggacaaagtctcacttcctgatcagcagtggccaagggaggcttttctctgcatttgtgaggctgtgatatctttcatgcactcctttgaaagtgctcaccagcacgatggaacacattagcttaaatatttctcttcacaggttgctgtgtcttttaacgtaggcaactcttcatgtaaatgctagttagaaaagaggttttgttttgtttttcaagaaaagttgctttaattaaataaaggacaggaagttccttcctgaatggttacaaccccgtggattatacaagcaatgtgctgattacaaaccgcccctttgccagttccgctacagttaccagaatccttgttaaataacattctcccaaaaaagatgtgaggaaattaaacaatgaagctataagaattgaacagacagagagaaacaaaatgaatatgaaactttttatgcttcttcacttttagataacatgtgtacacctttctccataaaatatatatttttattttttcagttttatttattattgttattattattattatttttgtagagacgggagggggttctcactttgttgcctaggctggtcttgaactcttgagctcaagtgatcctcctgcctctgcctcctgaagtgctgggatt

SEQ ID NO: 53904 - DNA, 955 bp, Homo sapiens
aaagaagcagaactggtccccacccactgttttgtgggtctccattttcctgttgcttgatgctgcaaaattccacaagcagggcccaaacaaaatgaacattactacaaagataatttctttctttttttcttttctttgagacagagtctcgctcagccgcccaggctgaagtgcagtggcatgatctcagctcactgcaaccactgtctccccagttcaagcgattctcctgtctcagcctcccgagtagctgggattacaggcacctgccatcatgcctggctaatttttgtattttcgtagagacagggtttcaccatgttggccagactggtcttgaactcctgacctcaggtgatctgcccgcctcggcctcccaaagtgctaggattaaagacgtgagccaccgcacccggcctacaaagagaatttcaaatcttgcaaaagaagtgagatttcacgaaagtgttgaaattgatgtttggagaatggctcaaagaatctgcaatgtcattgacaaatgaggatctggcagagttagaccaagtcagcaatagaaggagagaaaattccacaaggatgatgtcataggttgtttcgaagcatgtgattttaccataggtatcaaagaattacagaaggcccacagagaaaaggatgaaactctctgagcaaaacatgacccactttatggattcattgtgaaaattcagcaaacaatcaaagtgcagcaaatgatgctatagatctattcaggattcatttcattcattctaagaattagtgcatggatatgattttaacttacattgtgttaaataaaattatttttgcacttgttcttagccaaatggccgagaagcgatacattatttttgtccttgttagtttgattttttaagatcaaatttgtgccaaatcttatttacatactacttaatattgttagagt

SEQ ID NO: 53905 - DNA, 646 bp, Homo sapiens
ctaatttttgtattattagtagagatggggttttaccatgttgaccacgctggtctcatggtctccacccgcctcagcctcccaaagtgctgggattacaggcatgagccaccacatccagccactatttattttttgtccttctaatccttggaacctgtgaattgtttttccttatttatttaattacgtatttattgttatgctgctaatctcaaaggacgctttcttctagaaagcagaaacaattgattctgcaaatgtgtggtttcccattgacatctaaggaaaaatgaaacagggcctgggagacagtttacaccgtattcatccaggacattctcactgatggactttccacgaaagctctgcaagttttcctttcagtttcactgtccgttggccggtactggttgcttgactaagccctgttggcgtgggttactgctcaccctgacaggtctttgtgaaacatgaaacaatacaaacattcttctcatttcccctccgttcttcctcttggagctgttcccagtcccggtggcccttctgaagccgagtgggaagctcagaaggaacctctggatttgtttaccggtgtcaggaatggaaactgctggggcacctgtgtactcttgctggtttc

SEQ ID NO: 53906 - DNA, 986 bp, Homo sapiens
tcagtataaaagtcatactggtgttttcctaccctaaatataatgctccttactcaggagaaggggggactggggataacttgaggacagcatttggttctgggaatgaagagagcaacaggccccccagggcagctcttgcctcttcagccgaagtttgaggcaggtgactgccagacctctttccctgctggcctcttacctctcaactccagagaggcatggggagtaggagtgccagagaaaatacaggatgctggttaaatttgagtttcagattgacaacaattttttttttgtattagatatcttaaacatcgcatggcttagtagaagcatatctcaaatactgcagatgtatttgctaagcctgacaaccttagctggcaggggaacggaagagagcaaatgaggaagtgggatcccagctgggactgccccagagcactgggctttggccttggatcccctggcgatcttcccctctcagcgacaggcagcgaggaggaagatcattggcttctcttagggcctgtggctggagggaaagtcaagttcaggtgagtggggaatgctaggggatttccctggggatcagcagggaaggcagccacatccacactcactcagagccggctgcttctaagcatcaaggcctgatgccgatggtgcatgagaggggcccctaggggcagcccctgggatccccccaatgaagggctgctcctgcaaatgaatgaatggagtgggaggccacggagaaccttccagggctggttggctgggaagtccaagcttttgcaactgcaagggccctcagccctgtcacacccagtgaccccatttgcttatcaatacaatattttttaaaaagtctttttactattttgaaattgcaacccaaaatttatttttaaatctatgcagtgcaacaactgtgacataaggaatcagtagagtccatttctctctgtgaggaatcttca

SEQ ID NO: 53907 - DNA, 1863 bp, Homo sapiens
aaatcccaattcctcaaagactctcatctttctccccaccgcccgcgcagactgctccattgtcgattttttcctttcctcttcttttttctcttctaaattctgagttcctggcagacactaaaatgtctcagaagcagaaaccagctttgatcaactgtcagcagagtcgaaaactacaattttatctcctttctctaaggtccttcttgggcaccccgtggcaggcctttgggctgccttgtgcacatgacccgcttccctggcctccgtcccagcccgacctctcctgccctccactctctgcccctcccctcctctgtccttcccacccccctgcaaattaatgtgttgctgctgctgagagagtgggttctggagcgggcttctttctggcctctctgccatcacaggctggcagcttcaaagctcgagtcatcctgtttccgtctgcccctgagcccgcgtggcttggcttcactgcaggggtcagaagtgcagcctcagccgatgacagcagcctggcctggcccgacagtgaccaggggactcacacccatctgatgtctcccctcctctgctattatccctccccttctccgctattttctctccccttctccacctcctccggccccaaacagtccttcctctggaaagataaggccctcttctcagttcccgcatcccttcccttttatgccagacagaggcagccctttgtgaaggggggtacgggcttttgcacaaatatttaatctcttccaatctgcccttttgcactgcctgtcagttcctggggttgaaaccactctgtttgctttagctggcaacaggatactgttttgaaaacctatatttgcttttcaaggcaagtatatatttagttttttcatcctcaccaagaattatgctgccagttggggtgtggtcttgagcaggcagggaaatctagcgatgagtttaccttttccctgtagcttagaaatcttagtagcagggacttgtgaaaattaacttagcctcagtttcaggttgtctcattcagccacgatctgccctcttgctttttgaacatgcctttatttcacataaaatgtagtttatcttgtcgaagtgtctgcaggtcctgttagaaatcacctggtacaaaatcatagagaaggaaaaataccgaaatagaataataattactttttttttttttttttttagagatagggtctttctctggtgcccaggctgagtgcagtggtgccatcatagctcactgtagccttgaacttccaggatcaatcgatccttccacctcagcctgccaagcagctgggactagcaggcatgcacctccatccccagctgaattagtcaccaacgctttttaaaagcctggtttgtgccatgtgcttctaacacagttgctagtccttcccatggccgtgcatggcaaatattgttattcctattttacaggaggtgaaacacagaacttcagtgtcttgtctgtactcacggagctagtctcagaggaggtgggcttaacttaactctggcagcttctcaagggcgccctgtctactccccactctgcacagctatcaactttgctctatcaccagggacagaggacctggagctacagtaagggcatgttttgggtttttcagtacagtaccaacttgaaatgttttctgttagtaccaaccaaatggtagatgatggatcaaactgtgatcagctttcatacttttggtcttttttttttttttttaagagatggagtttcgcttctgttgcccaggctggaatgcagtggtgcgatcttggcttgctgcctccacctcctggattcaagcaattctc

SEQ ID NO: 53908 - DNA, 804 bp, Homo sapiens
aggaaagaaagaaagaaaggaaagaaagagaaaagggaaccgagtcagggtgaagacatttaaatggaaatatttattttcttaaaagtatagcttaattttccctctccaagtttgagaaggaatattgggaggaaacgggacaagatgacacaggcatttggacattcactgcaaaccctagggcgttgctgcaaagcatcctgggtccagttccagtttaggaaacctcacagtcttttttccagtcggacaggtctctcccctcacagtgtttcttccagccttgcctgaggacgagagggaagcaagagcagcagaaagaagcgtgacaatccaaaccgtctcagtttcaaagtctacagaaattaaccaaaatcgccagcggaaccctgggttgggtttcatttgcttctgagatcaaaggacgctgtcattttgcctagttcagactttgatctcctggttttctcctagccactgttagcctcagcaacaagcaatcaacttttgtaaggatgggtcattccatgtcacacccacatctgtgaaaattcgggttccctgagtggggccggctggcaatgttcaccagaacacagcagcggggaatgcaaggccccaggctcaatgctggggacgctttctgctgagtcgccatgacacagacctgctcactttcctcttgctgctgctcattctctttccctgcaaaatgttgccgtaaccttcaaaatcttatccaaatctagagcaaactcaagcttttttttccctctggtgaattgactcaattgacccttt

SEQ ID NO: 53909 - DNA, 479 bp, Homo sapiens
gttcaaattacttagagaccctttatttcgggtgcataagtgcttaataaatgctgagacactcgtttgtgtttggaagtggtctagcgtatttcctgggagacatgggtttggggctgtctctaggggttggagagacacagtgaggaggaagcagatcacattctattattctgggattggaggtcatcccaggcatgtacagaaagtgcacatttgtactgggggcagggcagtttgcttggctggcaatgttctgtaaggattcctgaaagggtcaggccatgcaggaccaggaagcagacaccgcgtaaagttgtttgtcccctcctatgttgttagagcattttgttgcacaattgggatgttttgaaagtactcattggacacaactgaatttccttaggaaagtatgtcgaccgggcgcggcggctcacacctgtaatcccagcacttcaggaggctgaggcaggcagatc

SEQ ID NO: 53910 - DNA, 437 bp, Homo sapiens
tggagaagccgtcacatgttgctgtcagtaacatgcctacagcaggcagctccagggacagacaacaggtgagagcaaacaccatattcagaccattgacttttctccatcctgttgatattccttcaccatcagtagtgaagagaagagaaatgctgcttgcagaactcacattctctgaataggtgactcacgagcacaatgactcacagcttatgtagggttgcttgggtccaagtgtaacaggcatctgtggctgcagttcaggagctagtagagacagaagtcatacagcattgtcacctccgccctcagctccattgcccctggctgagctgaggttccaaaacaacccccaccctctccaggtactgcttctccttgcctccatcgatatgcacaggagctttcgtacgcagtcaagggagaatttattt

SEQ ID NO: 53911 - DNA, 1676 bp, Homo sapiens
cacggcggtctagttggcctccgaactgggggtggagggtgggaagtggttagaaccatccccagcaaagagagaagagagtgctgacttcaactcagtggcaaccagggggcatagatgaaaaaaacaaattgcaaattcttccacctcggcctcaatctctgtgataaaaccctgcggttctctgatgatttctggggtgatggggtggggctgggttaagaagagacttatactgtgattcctgggttgggggacggcgctacgactctaaggttttaagcagtgatcccagcaggttaactggggcagtaagtgctgtctttctcggggagggagggagttcagctccaaaggcggcctggttcgcaggctcctttccctaagatcctttagaaatcgttcccatcccagaaaggaagctggggcgcagctgtgagcgcccccctctccccccgcctgcccccaccccctctgagctccccgctttgctctgaaaaaaaccaaaagcatctctcgatgctggggtttcttcacataaagtgattaccacgtgtcagaaataaactgcagtcccctttggagaacagtgaggttggatcaaaaaggagaactatttcaaaacatgctgccagctcgtcttttcaaaaatttttcttttttttttttttttttggatgtggggaggaggatttcaaaaacaaaaaaaagtaagtcagtatcttctcacaactgcagctgatttcctgtgtaaacgaaaaccatgtgatattccataaatgcttccagctctaaattacaggaaatgaaaaccatcatggaaaaggaaagctttcagaataaatccccacttcggatcccgccgcggcgaagctgcgctgggccgcccgcacacacctgcgggtccccgagctcgcccgggcgcccccgccaccgtccccagagcgcgcagggagcggggcgcgcgatcacaccctccgcgctgcgcccgaccactcgggctttcaattaggagccaagctgagaaaagtaggcttttctttatgcacgcctcgccgaggtcaggttacgacctctcaaccgtcttcaatcggcggtggcatccatattcatgaaggctaattaactctgaaaggctcggcggggctggccctccccgggccgcccagcgccgccccccgcggtgcaggggtgggtgagtgggggccccgagcccagtaccctctcctccctcccccgacaacccgccaggcatcttcccagggccgcccggcctccgcagctgctcctgggccggactcccgagcacgcacttgtgcgcggggacacggggtcccagggcgcggggaccagtcaggcgaggagaattagctgcgtcatttgtcgccatcctagcaactcgagcttacttctcccgatagctccctcctggccgctgctcccaggggccgaatgtgggaaagggatgctaattccaagtgagagttcatgcttggggtttcaggcagccttgcagatgggcggccctgggacctaggttatagccccaagccaatggactgtgggggcgcgcggggaagtcactccacctctctgggctctttgcgtttgctctgagatgacaagaggctgttaggctggagaaactcctttccacttagtgaaacgtcccaaga

SEQ ID NO: 53912 - DNA, 1026 bp, Homo sapiens
ttgtacttttatgactcttcctcaaaaagaagttagaattattttatgtctacaaactatgaagtccatagccaaccatcataatcctcttcaaaaaccactttttagagtcacatgcctactctatttctgactcctgaccaactaacaatctgaatagctacatttcacctgtcagctgttcaactaccccatccctggtctctggcatgtgttgcagtttctggatcaaagttttcacaacagctaggaacttctagttgtccaacagttaccaggaggcacgtggagagcatgttccccagagctgccaaaagttcttggcatatgatcaacgaagcacacaatgaatgagtgttcagcaattaatcaggtgacagagaacaactgacatgttaggggactgcagaatgagccagagtaaagctagacaagaaacacaagtccttactccaggctgctcaccccaggagaatccactctaggtcacccagtgtgatcagatattcttacctagaaaagctgaaataatccgaagtttactacgtgtttatggaaacatgacagcatttcctgggagctgcttatatcatgaacaaacagtaggtactgtacataataggcacttgttctgtccgcctccccatctcagaattagactggagacagctcttctctctcagcctcatctgtaaagggaattccagcctatctcataggtaattatgaagattatatgagataatgtaagtaaagtgcctggtacatagaaaatgttcaggccgggcgtgatggctcacacctgtaatcccagcactttgggaggccgaggcagggggatcatgagatcaggagttcgagaccagcctgaccaacatggtgaaaccatgtctctactaaaaatacaaaaaaaattagctgggctggtggcgtgcacctgtaatcccagctgctcaggaggctgaggaaggagaattacttgaacccgggaggtggaggttgcagcaagccgagattgtgccattg

SEQ ID NO: 53913 - DNA, 3014 bp, Homo sapiens
ggtccagaaaatctacttctaaactatacattttgaatcaataaactgacttttgtgcttcaagtaaacttattttgaaataattttagatttacaagatagatacaaaaatagtatagacttcctatacacccttcatccagttgtccataaagttaaacatcttacataaccacaggacatttgtcaaaactaagaaattaacattgattaatttctaattgattactattaactatagacttcatttatatttcacctgtttttctactgtctttctttagttcctaggtataacccagggtaccatattgcatttaattattttttctaatgctctaaattttgctacatgccatacttctatgtcttataaacaatatcttcattgtaattattatacaaataagcctaaaattccctgggaaatatgatttgttagctattagggaaatgttacatgaagattcatgtaaatgtgatatttctacaaatgttatactgaagagaaaagagttaattgctgaagtaagatatgccccactgtctactttgccaggaacctatgagatcaaattacttaatgtttcagaaatctctcttcaaaaaatgcttgtcacttacctatatcccaaggctcctgtagagtcataagatataccgtaaatccttttaattaattctgtaacaatacaaagtattattataatcatattcagataatccattttcatcaaatatatgtaaaaggtgccttcttttcaagtttcatttttaattactgtatatttttattaagataataaaagaactaatgtagaagaaaataattccatagttgattacatgtctttagtttaaaaatgaaagcatgcaaaatttaataaaagttttaagataaatagaaaatgttccagaaaaaaagaaatgccacaatgaataaaactggctaagaagaatgcttcacattcttttccatgtgcataatactgtggaaattagtaaacagtcacaaacaagtgattcatattcagggcgcagcctttttgacaggaaaacagtaatcaagagtttgggatttgaagatttttaaaaggacacatgtctagtaaagtgtgtcagtttgcctgagacagtcccaatttacggccattgtcccagtgtcccacaaatttaccatttgtcctggatttttcattttctaatgattttttttaatgatagcattaaaatatgctaagacttacttgtacttttaggctctgccataatctcattgagccatgtgtgagatgcatgtgcaatgaagccagttgtcaatttcgcaacttgcttaaatctttaagacacctagcagtaacccatttctaaatgtactaaatgtactgtaactgatacttcattcttaaagacagcacccaggcaccatgcagaaaaagtatacctaggcaggagcaggtagggacagctaactcctccagtcttgaatgaaggtagaagaaatactgaatactgctccctgctcatggctagcttaaagacacggatttaatgaaagcagacaggacagagaaagtgttttacgtattattctctaaagcatgacttttcatctagatccaatgactttttaaaaaaatgcacttagttctgattctaaagcgtctcttttacatcatcaaagtaaagtgaaaactggttggctccattaacagaaaaactcacagttaaatgttgccagctttctgtcagcatcaggagatgtaccaaccagaaaaatcagttaattccaataatggtttgatgatttcatctaattcatgaaaccaaagtaaagcttttggaagttcattctgtagaatatgaaacacttgacattgctttaattgctacttaaaaatcagtttagaagttcaacaacaaagacaaaattaccgttggttctccttattcacagtagttaagttctatgaagtcaccatgaacactgaattagggaataccaaactgtttactcataagggaaattcagggttgggttcctgagagctcctgagagcctctgattacattttaattagctgatcaaacataacctcattttatgtatatttctgtttcaagataccttattaatatatagtcatccactgcatgatgtgtcagtcaacaacagactgcatatatgatggaggtggtcccataagattatcaagctatattttcactgtacattttctatgtttagataaataaatatttactattgtgttacaattgcctacgaattcagtatagtaacacactgtacaggtttgtagcccaggaacaagaggctataccaaatagcctacgtgtatagtaagctatagattcatatcagtacactctatgatactttcacaatgacaaaatcacctaatgatacatttctcagaatttaaccctgttgttaagcaatgtatggctgttcactgttgagtcactaacactgaactcatagccaacagcactataagtttatctatcacatgcattttctccttaaggcacatcacagccttcttgcacttaggcgcaatatacagcacttcagttccacactgggtagtcattttaaacacagaaatcataagcctaaaaaagcaaaaatcatggcactatataaaccacaaaaaggagacttgtttaccgtatgagagctgaaggaaatcagcttgtcaactaggaatgtgttgagcaatccaaatttttcaccattctgtaccatttgcagtcatgcactcagttgaatgcctagtgtcatgagtattgattttgcagttacaaataaattttataggttcagtatcccttaccctgaaatgtttggggtcggaagtgttttgaattcagagtttttaaaaattttgaaacatttgcattatatacttattgagtatccctaatccaaaaatctgaaatccaaaatgctcccatgagtatttcatttgcgcatgacccttgaggattgt

SEQ ID NO: 53914 - DNA, 1589 bp, Homo sapiens
ctataaagtaacctgtatagattaagagagattgaagatatatctttttttttttaatgagcaaaaccaagagacaacttccagaatggaggaatgaagagtgccatagaatttctccccaacaaaaacaatttaactggaaaaaaaattgtttaaaacaaccacttaaactggaaattgtttgaagagtatataataaatggagaaacatgcattcaagaaaatattctaaatcttggtaagagcctgtcagtggcatttgagccatgacctgctcccaccttacctcccctgcacctccaagctctgacttatgtcttagtctgttttacttactcgagagctctagtccagaaggtccggtcaagaatatgggggctccttttcccctcagctcccaagctggggctgcattttcaccctggtagaacaagccactggcactgttcattttccctagccctctatggtagagtttctattctgtagaggcacagctgagagggccagggcttccttactctagccagccctcatttgtggggcaaaagttctactctaggtgcagcaggctgaaaacactgggcttctatcactcctggatcaacttgctggtggggcaaaggttccatatccataggggcaagccaagaagacaagtggctaatgcccatgctcccaacacccttttatagcaggggtgtcactctggaagaagtgagtcactattcctgcccccagtttctgtgcagtggtgcaaggttctacctgtggggagatgcagactggagacagcagcccttaaggacaaaaagttcctctgctctgtctgagggaattgacatagttaagaaggtgctcatggccccaggatacaagcagcaaccaacaaattaggactatcagaagtttaacagaactagaaaaagagacagccagctcacagtaaacacagaggtcaggaaggctgtgcccaagtgggaggctgcatccacttgagcaatcagagcttgatatgggcacaagccacacagatcaattaaaaaaggaagcttcactgtcactcgggggctgaagtataacctctgatcaaacagtggctgaacaataagctcttctgccccaagatcaactcctaggaagccaggctttaatatgaaagtatccctggcagtttactagactgtgggcatgctcaaggcttgcttcgctcaggagtgactgggaatgaataatccaagctactaatctatggctgaacatggggcaaaacaaacttcttgccatctgcaagacccttgccagatgttagtaccttactcttggacttcccagcctatacactgtaagaaataaatttattttttggtattctgttatagcaacagaaacagactgagacataaaattggtaccaagacgtaggatttttgctataatatctgaaaatgaagaagtggctttggaactgggtaacgggtagaagctggaagactgtggaggagctggatagaaaaaaacctgcattgccataaatggagcattaagggtgattctggtgaaggttctgaagatgactagagaaactc

SEQ ID NO: 53915 - DNA, 2787 bp, Homo sapiens
taagctcatggttattaaagtatttttaaagctaggtattttatcctttattgtttaccttctgcattctatttgacttcaatagtgaaaacacaccgatctcttttactttctgtttataacaattttcatggcagtttcatttttcatactttcatggtatataacacagtataccatgatatagtttacagagggaatccttaactttgaagaacaaacactttgaaaactaaacaatttataaaaagatttctctatttccatacactttctgaatctggtcaagaaaataaaacaacatttcaactgcatctgtgcaatgatagctttgattcatatcagaagacggaaaatcaacactgtagccacatagatacataccagagaaagcacacttttaacagaaataacaaaaaacactagaattgtgctcttatccaagcggttcccaaatggaaaaaaaaaaatctgaaagttaaattgtaagacagcttttgaagcccaaaacatttttcctatagaaacaacattactatgagtcatgtcattactaggccagtccataaaagccttgtaaaaccatatgcataagactgttgtttgaactataccaaagtagaataacagtttttccttgggaaaatacatcattttctccctcttctctctactaagtcccagaggagtgggcctcaccaggggctctgttcacctctcggagctcagcagtcatctccctcactctgacactccatggtgagccacactgaacttctccaacctgcagggcctctccactccaagtcattactgttatgaccttcccttcttcttcttgtaggtcaccaccactcagccttctggtctcagcttaatgctacttcctcaggaaggccatcccttgtctccacactgagtcatgtgttcctgatgtgtgtgctctcacatgacactatactttcctaacacagcatttgtcaatctcccccataagctccactgtttcagggattcatttcatttgctattaatgttaaggtcagaagactgcctggcattttgacgattctttacacatatttatttatatgaatgatttctcataagatactttaatcgtttttaacttgatctatggtcattaccaaggaaaagggggggtttccaaagaagacttctcctcccctcaatttacacctagagattgttcatagggaggaagctacctatccaatttctttcccattgctggtttatagtcacttaaatggacattaaaattttagcaaataggtatattttctttatttgtctttttagaagatgaggcctttgaatgatgaaggaataggtatattttctaatattaactttatctcttttttgtaggtaatgtcactcattctcatgacttttatgtcggcaacgaaatgcttattcccaaatttgtgtctctatgcttgatttttctctcaagcttagaatccaaactttcagctgtctacaatttttatacctgaatgtcccacaaaaacttcaccccatccccctgcccaagctttcttttctctggtattccccatttcaggtatttcagataatgacatcaccatctagccagcggagtctcacacccacgttatctcgtccttgttaattattcactggaccatggcctaacagtgttggcatcacttgggagcagaatctgaggccccactgccagacctattgaatcaaaatctaccttttaacaaaatccctagacaattcacatgcacattaaaatctgagaaacactgatgtataattcctttttctctctacccccacaaaactctgataccaagtctacataggcaaatatattccctcccatccatttctgttatcatggccctgattaagccatcacttcctgtggtgatgtggaacactgcaatggcttcttagctgacctcattcctgtagcccactgttcacccagacttttagaagggacactctgatgtacagctatgagagggcatatggttggctggccagaactgtgcataatgtaaagcctgtcctatctatgttacaatttaaaatctggggatgctcacaaaattgtcacatagaaaagcatgcaaaaaaaaaaaaaacttttcttgtgtttccttgttataatcactgatctcaattttctttccaaatacaaacctaatcatgtcatatccctctccaaaatcttttagtggcttctgaagacatcatgtatttctacacttctacctttctgttcatgcttttccccttttctcctatccatcttgcaaaaatcttgcccatcttctaaagtcctgttcgagagttatcttaccagagaacagtcatctcatctcaccagccctcttaagaaataactgcttctccattcactctacaacccattgcactcattacaacacgattacaacactcatcttgctgtatgaaaggcccatggatgtctgtctttcctgtcagacaaggacttccttaaaggaattctgtatttcagtcattggcagatggtagatactcaaaaaatgttttaaaaaaacaactaccatttatatttgacattattaaaagctgtagaactcatcgctgataatgtgaatgtatttacaaactataaaatactaagtaccatatctttcaagttatatgcacccaggcacagtaaaagctcaaaaaatgcttggggacctaattcagtcacataaatgcagctatccttaaaagcccacattctgg

SEQ ID NO: 53916 - DNA, 1971 bp, Homo sapiens
agatacgatgattggatattccaaatcgatacagcaatccttaaaactcagtgagtctgtgttgtctataatgtgctagttccagcacactgaaagcttcctctgcaaaacccagacaacgggggcattgtaattgccaagagtaccgtgctaacgatacctgttatttcttgggatccccattctatcaagtttagtgacaacagttcgatcacccaacaggctccagtgtggtatagaatcagatggagggaaggttgtcggggggaggcaaaacagtgaaaaagttccccttctacaagattcctggtcaaatagccagtggctaccacattcctcagaataaccaagtgtctgtgtataagctttctcctagcaaatttacacacttgtgttatctcacgtgttcctagtgctgtgggaacaaccattagggaggccagaggctgctgtacctcccttttacacaaaaaagaaaactgaggcagcaactggttatcttataaatgtgtccacgatgacttggtcacttgtgggatcccaacggccaggacataggattcctattctctgagaggaagcttccatcccctacttaacatgtcaaactccaaggctgagagggggaagaaaaggaatctaagtccctttatcacggaagaaaaaaagggactctccatttggactttccgccccttctaaggcctcgctcccaggctcggagacgcgccccgccccaggggaaaaggtgctggcccggccccacggggcgcggcctcgcctcccgcaccccaggtccctaccgcccagcagggcgcgctgccactctgagcagacacctgtcccttcgccacaatcggcgactccccaaggaactgacgcccccagagccaccaccaccgccgggactgccagctgccagcgggccccgcaagccctaggagctgcaggaatcctcgtaaacttacagttttcctacagcgtgcgcgtcacagcggggtgacgtcacgggcccagcagtcggggaggtcaagccacggggcgcgggccgctgggcccccaggctccgccctcgccccgccccggcgccgcggcgggagacacgcccccgagctccacgccctcgagctccacgcacctccccgtagcagacaccccgcgcaggcgcagacggcctctgcgcccgcatgcctgtgggcttcgccgaccggggcgcctgcggcggcgactgctctaccaaagcctcactcaaagcctgaagtcggggttagaggaggaggaggggccgacaaaaggggacggagaccttcagaaatactgtaaacaagctgtcgccctgggggctggagtaagacgcctgggttgtgaggtagtttttccacagacattgcccgccttcctcacgtgttcgttaaaagttctccacgtgtggaaacagccatttgctctccatcaggtgctggcgggtcctcagccctgaaaagacagctctcccagggtccctcgctcctccccggctcgacgcggctcccgctagactccgcccagaccccgagcagtccccgcccatctcttgactatgcccctcccacgcccacttaggccttgcccctgggtcccgcccttccggctcccgcccctggctcccggctcccgcgggcccccacctgcccttcttgccctggcgccgcctccagcccagcccgtttcttgcagattttagcttctcccttgcctgccgcctttcccgtttcggctcggtgaagctacctatgggttgctgttcatttaacaaacggtgatccggataaacatgttcacttcttcgcctgggcaaactttccagcccccgacccactcatgtcacgataccttcccgtgtccaagtccggctctctgctccccacttttttttttttttttttttgagacagagtgtttctctgtctcccaggctggagtgcagtggcg

SEQ ID NO: 53917 - DNA, 1888 bp, Homo sapiens
aaacatttgtggaagttgctagagacacagatgcaacgtgttttcagggagcttatgatctagcagtggaagcgcaacagaagtgcaattctttcatccttttgcccacataaagcaggcaaggcacgacgaattttgatgtcaactgcccaggcaggactttgtcccagcccagcgaccctcacgaggccaagggcagagatgatagttgtaatatactcttctgtccatttccttgatattctcctcaaggggtggggggcgcctgaaatccatctgccccggggagaagggcctcgtgggccagcgcagcttgctcctctgcagacccagaagcatttgtgcgtcccgggcgtggcaggcccggcgcccactccgccctcccgcccctcccccgcgccacgtcacccgggtcacgtgagtgaccaggctcctcaccccaacccccctccctactcccgccagactcagctgctctccccgggagctggggagccgggggcgggcagccgcgtctgtcctgcccctcctcgccccctcccccgcagcctgaggagggcgttaagcaaggggcttcggagaaattagaaccagcgttctaaattaaggggagcagatgtccttgttttgctcgcgaggcctgggtggcctgctgttcagacagaaatcgttgaggcgctgaccttccgggactgctgtcaatctccgcgtgcagatggccagcccggagcctcgccgctcccctgcattggaaatgcggcagccgggggtgccggcagcttgagagaaaagtctgcgtggagggggggtgggggggatgaggggaggcccggggagacagagggcaggagaaaaaggccggccccgctcacaatggagcccctgtggcggcccctccgagacaatgcggtcccccgggacccgcggtgggttgcgccaggccagtccgcgctccagctgcctcttcagaacaaggcagtgcaaatgtgcccacttgattctaaatcctcttaggcgctgtccatgtgaacaaggaaaggggtggccctacgatcctttacaatcggaggcctggggaggcctgggagccctggagctccggaaaatgtctgcaccacgcatgcaaatgggtcatttcgcttggagagaggcatctggcgacatcggcagaaaggctctctgcccggtagacggtgaacaaaacccacaaaaccagccagccaacagcgtgcactaaacacccctctctggcccttcaatgccacccggagtcctgaaacattttcaggttgtttcccctggagagacgtcccatgaaatgttcagaaaagccagctgagctgtgcaaagtcattagtcacccaggtatttacactgtttttcctatttcctttctcttttggcctctgtggtcagtggtataaaattcctaggaactcccacctaaacaccagcttcctgtttattcttgcagtggctttaatgtttcgctgttaaaagcggttgaccaagacactgaaacaatcagtagaggttcgcaggtgaatggaaaaaaaaatttaattaaaaaatatatctactgctcaggtcaaaggtccaggttcatttttactgcttatgtcagaatcgcaaaggggaaaaggtaaaattaaaatgtaacttaatgcctaagatcttggttcagtttcatttggcccctgtgtctacatgaacctataaaatacgatacactaaagtatgaatgttttcatttctagcagtggaaggccttttttttttcaatgtggcatgacgttcttttgttagagaaggttaaagttcaaaagttcatatattagcacaatctgtgtgctcctgcgtgtgccttacacctcgctatgcctgttcc

SEQ ID NO: 53918 - DNA, 510 bp, Homo sapiens
gatgacaagagcactgctgcatttcagcagggcctgtagcatcagccccctgcatggagaaagtcattgtcagaagtcattgctcccccattcccatctctaggagttatgactctcagttcttccttccatgactcagcaactactcagttctttccacctgtctcagacttgcttctcagatcccaagggctgaccctctgtgtccctgatgctgtcttctcccagctgatgtcagcttggttcatagtaagctcactgggtgctgagtcatccaatgtcaagggccctttgatctgcccaccagacctggggaaggctgagtcaccagacctggggaaggctgagtctgccagtggactaagtggtcccagatggggaaggaaatgactgcagacacagagcaccaggcacttccttcggggacctccacccttcacagaacatggtcaatccttgttgctgtcctctctctctctctctctctctctcacacacacacacacacac

SEQ ID NO: 53919 - DNA, 4251 bp, Homo sapiens
aaaatgtgggagagaaaatgttcatttatattcaagattaaactttctaactttaaatcatcagacttcagctgtaaatttatttcagttgaaaggtttgaagacattattaatgaatattctaaaattccggaaggtgtttaaaagataattttaacctaataaaaaaatcctgccatagaagtgacaaaaattataagcataaatttattgagcacctactatgtgtcattgtgctaggtgatgtactacgttatttccaatactccggtcacgtttcagttttctcaatttctctatcaataactgctacattgttaatttataactatattacttgaaatacagctcagcttatttattccataaagttggtcccaaagacgtttccttattcgaaggaggtgggaagcaggaaggaaacctaaatctaaattctacttaatactgaagacgactttcttgatatttgtggttatctgtatggtcttttcagaaatcccaaaacttgtaccaagtcaaggataaaataagataaaatcagcaatctatcaggttcagagatcacatctgtcagccgatgcttcttgccttaaggtcctgcacggcgatgaccgctcatttaggaaggaattcatggcctgtggataccttagctctgagtcctgccacctaggatcccacggttctacgcgaggaagagggcggggagcgcggaccgggtgtgggaggccgaggtgacagcaggtgagggccgggtgcggatggggaagtgagacaagcaccgtgtgggtattactcattccgctctactaaggaggctgctggcaagcggaacttctagcctctctttcaatccagctgaagttcaatctcattgaagtcacttcccatcccggttcgcttggggggaaaccaggcgtccctggaagggaagggaagggagtccgggctgcgcgggtcaggtagcctctctccggtcgccgcgtgtcctcgccgtccccaaacctgcccttcccctcatcaagggaactccccggggagtccagaccgcgatccctttccttggccccggggtgcggggggcggacacgcgaggcgtgggactgatggtagccctgcctccaggaagcaggcaggcggggacctctgggcgctcggaggggcagctccgagggcacagggtacagggagaatcagccagatccctccctgccccgggcagccgcggcgggtgtggccagcgcggaggcaggacgccgccgagcctccaactttacctttccaactccgacagcccgtcgcctttctgaccgcgtccctacggtttcccggcatccgcctccctctccccaccacacctgaggaaaacttttccctcgcccctcaattcaaattcagcagtgcccacggttgccgcaaaccgcccggtccctagcaacaaggttccggccgtagagcgagagcctctaggtgtaaggaaggtgatgtcgtaaagccgggagtgtcgtaaaccaggtgcggtggggaggggggaggggtggaggcggaggggtgggggggaagggggagggagggggaggaggtgactcgagcatttagacacaagcgagaggatcatggcggatggccccaggtgtaagcgcagaaagcaggcgaacccgcggcgcaataacggtgagtggcggaggggaccggggagcggcggagtcagggggagctgggcagccggggcgcccccgggggtgaggggggcgagccgggctgggggcagccggggcagggacggcaaagtggagtgggaaagtagaaagtagtgctctctgcccccctccgctgccgccgctgccggagccgcgccgcggccgctcgctctccctgaaccgttatgtctcttacctggtctctctccgcctagcggctcccgccgcccctgccgcctccctggaccgttagccggcgccgacgccgccgcatccccggcgcagggcgggcggccgggacgcactggccacttttctggtcccgggtggagcggctgttgcttctttccgcacttttccccactcttgtgcccttcggcgcctccctctccccctcctcctggccccctcagcgcgattctccctcagcgcccaggcccccgggagccgcggaacaaacttgtgcccggcgctgaccgtgcaaagtggcttccgcgcgccgcggccccggccggcgccgtcgctgtcgctcgggccccgcgactcgggccgggctgtgggcgcgcggcaggcgggctgcggcggcggcgggacggggcggccgcgggttgcgtggggtttgtgcgcgcgtgtgcgcgggcgccggctgtgcgcgccgcgggcggacagggttcggccggcggcggtaaagttgggacccgcgggccgggcgcgctcgcgtaacggggattagaggcgcgggggcgcgggtccctaagcgcccctcctccctggcgcctcccgctgcccggcccagagccccggcctggggactccgcggcgagccccgcgagtggggtccacgtttggcggggcgcggcggggcggcgcggggaacaaggcaggaaaggtacccacttaacgccgccgggagccgcgcggatgggggcgagctgggcggcgggtgtgtttgcggagttgttacctgggcttagagaccgggaagcaccacagacagatccccctcccggggcagacgaggtctctgcgccgggatgggccggtgtgcgtgcgcctcgcgcttttctctttcggtttttggggaagttgttacctgggccggacgcacggagcgctgaagccggataatggggcttggatggcgctctgggtctcgggtggaaggagggtgggggagggggcggacggaccgacggacgcgcggggctgctacttgcaccgcagctgcagtgtttattgatttgtgctgctgtgccaagggaaacacacacccctctgcctggcgtgagagttaaaaaaaaagagagacagcccgagggatcgagacctgaacatgtggtggtggttgcacagtcgccttttccagtttggagagacgttgtaagttgattgtatttctggttatctcggggcgatgctatgctttctctccctctcgtgcagcagcgaaatgtctgctgattgttattgtctggacagttcctgtggcgagaggggcgagacttgtccgcccgggggcggcgggagcgcagggagagcagcccccgcctgcgccgccccggtacctgtttgtataataatgggcggcaacggccctgccgccggccgcagcccaggctatataaggaattacacgtacatttcggaccgaggggctcgctttggttcctgcgttatttttaaaacgacttttaagagaggggcaataaatgcgtctataatgggaccgctgcagcgtcgagaaaacgaggaaatacgtgtttaggagaaaactctctcgtgctcccccagccccaccccccgcgcctgggctccctttctccctcccctctgggatgcgaaacgcgaggttttgtaacctttcctggcaattttagattttgtgtgggatttcctgtctagaagcagatacgaagatttttaagctgtttcaagatgtttccttccaatccataattatatttttaatatattcgagccatcattaaaatcactgctttcgtgattttaattattcaaataaacacttgcattttaaagacgtctgttgattataaacgaaaggtattttggtattctcattgtggagagatgacttgttatagcaaggagtggagcataggctattgcaattttaatttcctgttttagcgtcaaatagtgtgtgttccatattgagctgttgccgctgttgctgatgtggctttatgaaaggtaagttggttcggaaagagctgttcgctttttaccttatttaaaatgttgatcgccagagaaaggggcttttcttgttgctgacgacatgtgtgtgacatgtgagtctgaaccacccagcgtctgtgcagctgctgtaaacatgtttacctgaacaggaaagaatggatttttctccttgagatcctgtgatatgaatattacactcgtaaggcatatcaacagatgacttaaggggggaaaagcgatcctgaaagatacttgaaatcaacaggaaagagaggttcttgatcgctgcagcaaatggcaacttgtgcaggtagaaaaaaagatg

SEQ ID NO: 53920 - DNA, 607 bp, Homo sapiens
tttgtttttgtgtgtgtatgtctttcacagaaattagtatcattctgtcatagctcttaggaaattcagagttaatcaaatatgttataaaatgtgtttgtataatgaaaaggttggaggagatgattctgaaggtgccatttagagcaggtgtgctatggtttggtggctctctattctctgcccgctttaaatcttagtaggcagcagatgaaatactactaagtgacctttgacacagaacccatgaatgctccaagtatgatttcattttaccgtgttctttgtaaactcaaatgcctgtcaaatcagatgtgtgtttcgatgtttttactgaatgcgccttgaggaggagactaaagcttggggtcaatttggcataatccccacgtttttctttttctattatagaggtttcttggggaaggggtgacatttctttctgaggaaaaggtgcaggctaagtgtaggtggactttctgtcttctccatactttttctgacagcctcactggatcctggtgatatcatacataaatgcagagcagactagatgggttgctggttggtatttttggttaccatttgatctggtgtctttggttat

SEQ ID NO: 53921 - DNA, 1452 bp, Homo sapiens
ctggtatagtcaagcacacatggatttgaccactggatttacactagggtcacttaagagctatcagccactgtcttctcatctgtatgacagtagtagtatcaacctcacaggattgacagttaagtgagataatttggaagtacacagcgtagtgctggaaattccattactcccatcctgtttcttttcccatgtccctcatgtttaatttttatatttgtgattataatacttaaaggtatgttttaaagataaatcataattcatctaaagtctttgtcttaccaagatagttcaatagttccaatctgaataaagtttataacattaacataatttatagatcttctaatacaagcatctgtctaatgctagaattctttataaaccactgtatataggctactcacaatgtaatgagctactaattggtagaaacaagtggctatttgccatagttctacattctgttctaccttctattttgcagaaaaatcttacagctttcctaagccatctttttaggtcaattccagaatttgtttatgatcaaattgacaagtacctagccaaagagattaagatactgaatcagagaaagaagtctaaagagataattttccaatgatcatttctaaagaaggaatagagataaaatattttaaaacaggtactgaatagtcacagtcaaaggtttgattatgagtcagctttgttggttttagtctcattagtcaccagcaccaccaacctgtcatattggcaatacatagttttggtcaccaggagaaggagtcacagaaaaccagtactactacttacagaagattaactgaaagcacatgtcctgatttgttcttgaagataagactgaggtgaatattgcttaaaacagtatcagcaaaatacaaaatcaagtgaaatattacattgaatataataattgaaagaatgaggatagacacaaagaacttttggatgctagtgattagatattagaattagtttctcagaatattttaaagaatttaacaaatgacagtgttatgaattatgtgggcagtgcttaaagtgggaacagagcaaaagaagtggatttagttttgtcaagtctgtctgttcagcgttagggggaacattttatttcttctgaaacaatgatattggaatcccatttcatcttttcattttcaaacactgactttataagtgactttgggagaagcttttaagttttatataaagcactttttttgtacttagcacaaagtgggcacctttaaaattacctgtttgtatagcagttaatttaaagaatatgttcatgcatattactatattttctcgattctaaaagctcatcaattgtaaggcacattctttgatttcataacaactttttaatgtctctttttggaaaaataaaacacttttcttgggggaggagga

SEQ ID NO: 53922 - DNA, 1798 bp, Homo sapiens
aaatagctgggattacagacatccgccaccacgcccagctaatttttgtatttttagtagagacggggtttcgccatgttggccaggctggtctgggattacaggcttgagccagccctggttcctccatttaatggagtccagtaaaaaaatgatgtttgctcagagtcacgaatcacagaatattggagccagaaggcactttaggggtcatggaattcaagcccctctgtttacctgtatggagaccacaggggtgagacatgggataaccttgcccagacccttaatcagccagcgctggagcctgggcccaggtttccagatttcctgtttcattcttgctttctcaagagccctattaaaccccattcctgttcccgaatatgaccctgacagcaaagaaaataagagtgtgtcagggctgactgtgcatctgcatgccaagcctcactgtgcattatctcactgaatcctcacagtcacccggtcacatttgactgcatgtttcacattttataggagagagacctgctcgaaatcacacagacagtaaaggcagagtctggactccccccaggtctgtctctctcaaggtcccagcagcccctaatctggaaatgagaagcctgggcttttcaaactgctgtggagagctggaagagcaccagggactctcctgctgggctggcatcccgggaatttgtgccgtttgctttgtggcctggtcaggtgtccttcctgccccaccccatgggcttctggcctcgctgtctctctgagccgggccagcaggagagggtctggctctgccaatggccccttgggtctctcctggcagctctcagatgacactcctgctgggtgccagggactggggcagacctagcagaggagtggacagctcctgccctggttctgtgactttctctctgcctcttgttacttaagactgggccatttcatcccagctgtccgttttaaacactgccatctctggcatctcgttgtgttcctggacctacatgaaggcatcctgtgagcgtccccagtgcgtgatggaggggtggagatgagagatgctgggggcggtctcccatacccacagcttccaggacgtctactattagctcctggatcgctgccctcatcaccagcgcagcctccttaatctcaccttccacaaccctcctgctccccgcctcctgtcctatcagaagattctagctctttcccatgacatgaactaaattgtggggcttcctgcattcattcatttgttcaacaaatatttattaagttcatgatgtgtcccaggcactgttctaggtaccgggatggaagaaaccaaccaaaccacacagacaaaaacccctgctctcatggggctcgcattctagcgggggaaatagaaggtgaatgagataagtaattaagtgtaagttaggggtcacaccagggggaaaaagaaaacagaagggagataggaggtgtcaggggtggttgaaatttccaataaagaggccagggaatgccttactgaagttattttttgtttttaaattttaaagccagtctaattagcagcgggggagtgtataccaactttagtgacagtaatgttaataagttctgataacacactgccatgggcccagcctgtgcctgagtgaagacaagaagcattgagggcagaaagatcaccaagtgcaagggccctggggcaagagcagaatgaagcagagccaaggagtgaggtcaggcaggtgtgggagggagcaggaggcagttcatgcag

SEQ ID NO: 53923 - DNA, 3160 bp, Homo sapiens
atttttcatcggactctccaggctgccccacaaacgaacacctacatgaaggccagagccaggctgggtttgtcaggcagtcaggccctgtgggaactggaggcctctcctccaggactggactcaccctcccatctgaaaggccctttattctaggacttaatgaggcaaaagcagttaagtgcatggctatggaacccaccagatgtgaatggagaatggggaatttgcagggtggagaagagttcaagggatgaaaagaaggaattctggacagactaagcatggatgtgggaataacacgccacgtcacgtctattgacagacgggtttccctcaagctgcactccatgcttctcatggcagaggcagggagtttgtgtttttaggactttagcgtgaaactgagaatcatcttgtgtttcgagcatagagataacgatgaaagaacacaaagaaatgataaatgcttgaggtgatggataccctgtttaccctaatgtgattattacacattgtgtgcctgtatcaaaatatctcatgtaccccataaatagatacacctactacggaccataaaaattaatttttaaaaagaaatactgatgaaagcacagatttttttaaggatgggaatgggagaagtttcagtgtatgtcaaggctcacaaaccttatctgaaagagaccgccgaggcatgtgtgttcctgtccttccctaccccttcctatccctgagccacacctctggccttccatgaaattcaagattgcaaaatcattgaattccaaacgggtccattttctgctgggtgcgattggtagttggtctgtatgatgacagctaaaggaaaaaatgcaattattcaaaattatgaggaaatccaggcactgtggctcatgcccgtaatcccagctactctggtggctgaggcaggagaattgcttgaggccagaagttcaagactagcctggccaacataggagaccctgtctctaaataaaaataaatttaaaaataaaaaataaaataatgaaggaaaaaatggttggaaaacaaaggatgcagaccaactcacttcatgccatgttccttcttaaggtgagagacaggtcctagatgagaagaattttattcacataagactgaccactacactataataaaagagttaatttttatgttcagttttttattctctcagttgccagagatggggggaaatcacattaagtgctggcagccaggttttgtcatgagaacaaggcatcgaagggcgaagtccgtgaatgatcttgggaaatgtgtgtcaccctgacctttagagacgactgcatcctgattggctgcctatgccgccctctccccgggagtcgggagggttgtaaatacagaagaaatggaaaggcaggtaatcaaacaaggccgccgcagtacgcggcgctgggaaggggaaggggggcgcttcgggcttgaatagggtcctccgggtgggctggaccgtaatccccagtggagtgcgcaggcttgcggaagcacgggagggagtgcggagagcacaggagggcccacgtgtgccccgtgggcgtcgtccgagtccccccgccccccccgccccacacaccgcaggacaggtaggggcgggggtgggtgtgctgggaggtgtggtgggcgtgctgggggatgggtgtgttgggggaaaggggtgtgcttggggggtgggcatgctgggggtgagtgtgctgcggggttgagtgtgctgggtgggggtaggtgtgccggaggggtgggcgtgctggggggctgggcatgctagggggaaaggggtctgggcatcccaggggcgggggctctaggcgaggcccccaaggaaggaagcccctcccccgcacccctgctgagtgcgcgtccaggtggatttggggagcaggtggcgcggatgtctccgccgccgtccaggtgggcgactaagagtcctcacccaggaaacggcgtttctgctccacgggagaccatcccgagcgccgcctcgggtccggacaggccccgcaggtctcgtccccctaggcctctgtagtgtgaccaggagaacggattctcctcgggcgatctccatccaggtcctggggccggcagccgcggcaggggaacctcctgcgctcgggaggaagcacagattccagaggagcagtaaaatggcaaatcatgccaagcttcggggtggagctgagggggccctgactccgcctcgcagcccgggcttcggggtggggcgcctaattagtgtttgcgcattggcggccggccggctcggtaaccacggcgaccgcgcggccccgcccagccccggcccagtatccccgccccccgcattccccattggccgctggcgcttcccagcctaccaatcaccgaccgcatctccttacaaagggtagaaagacaccgcctggcagaagccacgcctcgcaccaggaagcccggctgacggcttaattgagattaacataaactccaatcagagaggaaaacgcggacaggattacctaatcgtatatgcttaagggagtaccacgagagcgcgagcagcctcggcagggcagaacaggccctcggcaggttcttcatcctgggtatctatctagactctagttcaggctccatcattacataattctatgccacttcccttctaggggtatctgttttctcaatttaaagagagggctcgtctgtcaggaccctaccaactccagatttccatgagccacagggtctgagcgacgcctgcaagccaacactgttcattcaggcctgaacggctaagcactgaatgggaggttgatttgactttgcttttttctttgcttctgtctacagagggagaaatagctgcctcattccctcttgctggagaaaaaaaaaaaaagcaataggtgtttaatctgcaagggagatgaatttcctatctaacccaaggagatgtgggacagctccggggtaaagattgatagaactgtctgatgtcagagcagccacaggccataaataatccagtccaaccccctggctttacagatgaatcaggcccagagacgccaggcgacttgagcaaggccactcagctgtcaagagcccgggtagaaatcagtgccctttc

SEQ ID NO: 53924 - DNA, 672 bp, Homo sapiens
ccctttttaagatagaaactattgacaaatgaattgagcatcatgtactcaagctaggtgattaggctacaaattatgaatttaaaatctccttgccttccagaacctcgtaacatggtaaaggaaagtgaaacatgataataatagacacaatgctagagctacacatgggacactgtgggagcaaaaaggaagagacccggaaacaagtgactaagccttagaaataaataaacaggagttagcccggtaaaagttggggaaacagcagggaggaagaacaaaagctaggaaaaacagcatggtactttcagggaatgatgctgacatactgagtatgtaaaaggagcagcaagtgaaaggcctaaggaaaagcaagtaacagcacagagagtttgaaggtcatgttgcaaagcaaacatccagaagcatttaggaaactactgaagattaagccaggaagtgcattctgatttaaatttttaaaatattacagattttagagagacgcaactaggaggttggtacagtagtacagacagaagatgaagagagctgcaataggacaagacagtaggaatgcagaagcagggacagattcaagaaacaatcagaaggttaaattaacatacaggttgtatgtttgcttatgtgaagtacagtttgttttac

SEQ ID NO: 53925 - DNA, 1069 bp, Homo sapiens
tcaggtgattctcctacctcagcctcctgagtgtctgagactacaacaaggatatgcccatgctgtatgagttccttaaaaaaaaaagaaaaaaagaaaaaaaacttaccacatcagttttccatcagaatattaaaagtgacaaaggactaaccatcaaatataatatacatgtaatgggcagtatcatgttaaaaaaaaacaaaaacttgcctaaagcagtaacattatactcacaggctgaaaaacaggaataaatgtcctgggcccacagacacataagaggccaacacggaacacacacaaaaaaaacataaaatatcaattctaaagcaatatgcaaagtatacatttattttaagactttttgcttactgccttaaaagtctgaaaatatcttttgaggggtctcgaatagaagtccacaaagttttgaacattttattgcaatgaaatttcctttagcaacaacagaaacaataaactgttaagatttattaagcatttactctaagcacttgactgacttatcttgccaatcatctcaataccctagagtttaactattcctctccatgaggaagttgttaactaagattcaaaaccaggaaggtctatttaattccaaagtccagactattactcactatccatattgtccctaccaaatactacaagtattagtaatcatttcttagagctgtgtttaaaaaatacttttgttaccacagtgtaaaatatattcataactagcatattaagaatactgtaagtgttcacagaataggagaaataagtgtttcaaatttaaaaaaacaggaaaaacaaaatttttgtttagatgtttttttttttttttttgagacggagtctcgctctgtcgcccaggctggagtgcagtggctggatctcggctcactgcaagctccgcctcccgggttcacgccattctcctgcctcagcctcccaagtagctgggactacaggcgcccgccactacgcccggctaattttttgtatttttagtagagacggggtttcaccgttttagccgggatggtctcgatct

SEQ ID NO: 53926 - DNA, 978 bp, Homo sapiens
agctggtgtcaatgactggcctggtacagaatacatatacgtgggaagacctagagacccacagtcagaaaaagaggatatgacagacaactgctattttgtctgcctggcacctctcccttattctgggaacaacaacatgtctcccttatttggggacaaactactacttctctgggggaactgcttctcctcaaattctacctaggcagtttgggtggggtccaatcatgctcctggccataagtctaaacatgtcccaaggcaagccaagacagactctttctctgagattttctcaattagaactaaggaaagaaaaaatagatactctaattttaaaaactaagaatgtgatcctggcaggtgccaaaacttgtctacagccacgtggatgaaatatctttggaagaataacagaaccatggagagaaaatcagagatgagagattgaagaggtaaaaagaatcctgacagtgaacaaggccctagagttccaatcattcctaatgcccaaatgaataatcccctcctggactttggtctcatgggcctaaacattcccctttgtctaagctagtcatagctgggtttccagcacttacaattaagagttctaatacacaaggatgaaagcagaaaaaaagagtaaatataaaacataagataaactgcatctaggaatcatgaggtaaaagcacacagagtttaggaaaaaaaggttaagaaaaagagagattaatttactttagaaaagaaaagggtcaaaacagaaattctggggctgatttggagaaaagatggatgggaggtgaacataagaggactttttttttttggagacagagtctcgctctgttgcccaggctggagtgcaatggtgcaatcttggctcactgcaacctctgcctcccaggttcaaatgattctcctgcctcagcctccctagtagctgggattacaggtgcccaccaccat

SEQ ID NO: 53927 - DNA, 3883 bp, Homo sapiens
ggcaagtacacacacatctaggccatcgttcccgacttttaagtatgaaagaggcgtggctaggggctagatacttatttttaacacttccattgaaacacccggagtctcccaaggtctaacctctagaagtcgggtggcagaacctgaatcagaacccgagtgagccttccttcctccaccacctccctttaggaacgcatgcctaaatagtcgataaaatctacttctcaatgtcatgattaacccaaaagccagccacaaccaatcgtgttattagagtgctaaaagcctctatccacaacaaacactccacttgggatgacattaaaactttcgataaaggtgtactttcaacgtcgtgctttagcctttgaaaatacatttacaaaactgcagctgcagtcaaaaggaaaacatcacacgcctcgaaagctgaagggcgtgcctttttctctaacgaagaccgtgtggccatttcttctcaaagggtctgcagtcacttaagatagcaacgcgtaaaggacagccgttctgagaagacaaccagctcccctgagatgggaggcgggctgcacgctggtaaagaggatttttcaattcaaggactttgaggagattccgcccagataagctggaggggagcgaatgcacgtccatccagcaggggcagggcaccgggaaagaccgcaaagaagaaagtgtccggtttaaggtcaacagtcctcgagggacgccccaggtggattccccgggtgggctccccgggtgggtggaggcctgcaagccccaccgcgattagggagtgggcccagggcgcgggaggggccgggccggccttttgcgcacacacacacacacacacacacacccgccttttgcagacacacgcgcgcgcacacacccgccttttgcacatagacacgcacacacccgccttgtgcacacacgcgcgcactctcccgcactcacacacacacccgcgcaccctcacactctcctccctgggggcggggcgggcgggcgctgccctcacacaggaagtcaggaaacccagggggcagagaagccacaacttcgggccatttaaaccctctcgcccacgtcagccaataggctgcgccggccccctccccctcggcgcctaacccccgcgcccagagcccctcgctgcgcgcccgacctccctttgcgcgcacctccgcggcgccgccgccgccgccgccgcgcctcccgcacacgcctccccccgactccaccgccctcggcgggcacagcccggccccggcgcgcctttgtgcagcgcctcgccaacctgccctccgtccgccaggacccgcgccctgcacctcaccgggagcccggcggcctcgcagcaggcggctcccttcttagtccgccccgcggctgcgggtcgacgacgcgagcccgaagagcgttcacacggctacggccgcggccggcccgtccccgcaggctggcctctgagggagggtaagttacagggcacgtcggagcgcgccggcgcgggggcggggctcacgtgacgcgcgggggcggggcgggaggctcacgtgatggcccgggcgagctgggcgggcgcgggtctccgggacggtctggggtggctagggggtgcggcgcccggcggggatccgaatagggggcagccagcgtacggtgtgggaactcgggccggcgcgggagcctgcggtcaagggggctcagcactttgtaaacaaggagtgggaagcgttaaaaaaacgctcgtagggaaaaccagggaagggcggacatagcgccagggtggcaggaatggagcccgggcaaagacggccctgccgtgggccctagcgctcccttcgtcggcccctggagctgcggccgggcgtgggtcagtcgttcacgggcccggaaattccactgggacacccgaaaaagtgctgcacgccgcctgagggagacggaaagggacccggggcactgagtccattgctggggtcgccagggtacgtggcaggacccgctgtgcacactcgggactgaggagacccctgggacgcggagagccgctccagggcagaaccagtccgtcagcatttagccttccacgggcctgagggtgcgagccctgcgggggccacagggtcattgtccaaagtcatccccgtttgcactgtggcagcaccgaacccggaagtaacagctttggcaggtctttgatggtgatccagtggcaggaggagctcagctggaatgggaatcaggaaagagacctggcttctgccatttattggcacttcacccttctgaacctcagctttcaaatgagagctggcttctaggtctagaatacagtgagtgtgagaaaaataactgagaggcgttgggacttcagtaactactcattccttaaccagttgttgattgtgcctgttgtgccaggatgaaatatttgttaataatagagaccagaaaggagaggggggaaaaaacaagcatatgtatgattcaagcaatgaagagctactctccggagttggctctttcctgtgcttcacttcgtacttgaagatgccacaatgcctggcttccttatcaaccagctgaactccgaattgtgccttacaggatgcgaagaatccggtagggcagtggcaagactttaacagctgtggtttacaaccttcttattaaattaagtctaatgcgagctaaagtgttaagatagtctccatttagaaaggaaagaggcttacaatgagaatttttgaaaaataagcctgagactgtgctgtctctatcgttgcatttgcttttcacagtccttggcacccactgcctttttgtctccctcggtttctaacccgttctgttttcttgcatttgttcagtataaggagtatttcctgtatgctttggcaactattttccatagactctgcttgtgttctccttataaaaccagaacaagagcagtgcaaaaaagaaaacgaccctgataggaatgcgctgataaccttactttccctactctccaaacctgaattgggcacccttggttttagcaagagatagaactcaacagtttgcatacacttgcggatctgcctgtaaccccacttcctatttcacagcctaatctcggatgataccacaatgcccacagtatgctgatcaccaccaacagcagatggaggcggataaaaagagctttctcgctagtgtgttgttttaaaagaacctgatggagagctatgatcatatgtaacactgcctctagttagtttttaaataacacttgtagcatatgtctggcgcctgtgctcaggatttcaacagatcattttcaggattttgacatttaactggcttcttatgaagtagcagagagttccaaaatgtagaactgaaatataagctccacacacaggcagagatttgagtctgatttgtttgtgtgtatatcccaagtgcctaaaagcacttggcatacggtagatgcacaatagattcctgttaaatgtatttttaggtgaaaatgtagtctgtactttgcataaacttgtcctactttcttcctagttctttaataagtaacctacttttcattatatatttttaaatgaaaaaacaaaattatatctggcatcactactttggctgggctataaagaaacaggaatttggcagtatgtattaaaattacaaatgcatatatactcggagccttgaatttcatttccagggatttatgccacagatgtttccacacataagaaataacaaggtgtttcttattgttgagaatagcaaaagattggaaacaagctaagtatctatcaacaggatactagttaaattatgatagagccatatgttt

SEQ ID NO: 53928 - DNA, 5907 bp, Homo sapiens
catttgggcacacaatgtttctatatgaaacacagctaagatataaataatatttcttgattcaaaaataaaagtccttccctaatatcgggaacaaggcaaaaattcatgcttttgccactcctagtcaacattgcactggaaattctagcaagtatcaaacagtaagtacatcggtggaggaaactttatgtaaatttgtataatctggtacagtagataaaaacatccaaacaaattatagtattaaaatccataggattggtatattgaggtgggtgggaggataaaaggagataatatatatcagcacattcctatcaaggcacagtttcccttttgcaatatgcccttgttctcattttagaaagagattacaaggggatttcatggaaaatagtttcaggagcaaaacctggcatatggcatatcataacaataaacgataaagatggttcctgctccctccaggctctgtaatgctccccgattcaccgtctcttacaagttcccttaacctaccctcacctttgtgaatagcctatctttaagtctgttcccacttaattcatttgagtggacttctctctgacaagaccctgactaatacacttgattaactgctttcctaaacaggaacagtttgggaacacaacaggtctttgataaatgtttgttcaactaaaattagaaggattccaggaacatctcagcaaaaaagtaatagcaaacatcctaagagaaagtgaaatgaaaagaggagaacactgtatcagaaagcagcaaagaaggctcaagagttgcccagtttcaaaacattcagtgaagacatttcaataagcatcaaggtcattgaacattttgtggtgttcgttatgacatctgcaagtgaccttcagtactcaatgctctaaggtaatgctcctaaaagatattgcaacctcccaacagtgagattttttaaaataaaaatacaggtttgccaggaacttcttcccttgcctctactcactgatatctcaaatcattagaatggaagagggagagggacagaacatcctcttacctaggcaggttcttacatatggtaatttgcataatcactggcacatgtaaaaccagccccctctatcacaggatgccagctaatgcttaaaaaattcagatttgtgtcctcaaatacaagcttccataactttaaaaaattgtgagaactttccatttttattctaactttgatattattcataccttctaaaaatacaacaaacaacatcatatgtcaattaccattcactcaaaagaatatatcttatggaaagagatgagttgtatcttaatatggcaacctatctaagaaaaaaaggatttttactaattccttagatttgcatagctattgaagaactttgattacgaaaattattgaggttttggaagagaaaataagtcagcattcagggaacactgatactatagctgttgatattatcaagacagcatttagggagctgtcatggcaaccataatttaatcctccatgagtgtcttggaacacccaggcacccccggaaatgaggagggtgattcagcgggcggcacactcctgtccttatgagtcaggaaaataccagtgctctcactcacattgctggaggcaccattctatgagatataaaatgcagccactatgtgatctgtgacagttgcacaagagcaaaatgttggcttcattcaatattcctgccaagtctattttgattgattttgagacaaatgttcacttcatgactaatgcagagccttgatctctcatctttttgtcttttaggcaaatcacagcatagtcttcactttgatctttggggtgtaaggtcagtgggaaggtttaaagctttgaacgtttttttcaccaccttactggttttgtttgaaggttagtgagagaaaaggttaaaattaatggctaaaatgagatagttttagctttcatttcctggtataacatcacagattctagaattgtcaggactaccaagtttaaatctagatgtgcagtaaagcctctgtgctttgcatattctataaaatctgtgaaatcaaagtgaactgttctctgactctgaaatatctattcactatccacggtgtgctaagtccaaaagatttattttaacaaaaggaagagaaacaggcaaataacatggctacttagaaaaagcactagagccagggtcacgcctgtaatccgtgcactttgggaggccgaggtgggcagatcacctgagattgcgagtttgagaccagcctgaccaatatggaaaaaccccgcctctactaaaaaatacaaaattagctgggcatggtagcacatgcctgtaatcccagccacttgagaggctgaggcaggagaatcgcttgaacctgggaggtgacggttgaggtgagcagagatcgtgccattgcactccagcctgggcaacaagagcaaaactctgtctcaaaaagaaataaaagaagaataaaagaaaaaagaaaagaaaaagcctagaatagccgggcacagtggctaatgcctgtaatcctagcactttgagaggccaaggcaggtgaatcatttgaggacaggagttcgagaccagcctagccaacatggtgaaactccatctctactaaaaaaaaaattgccaggtgtgttggcacctgcctgtaatcgcagctactagggaggctgagggacgagaatcacttgaacccaggagacagaggttgcagtgagccagcattgtgccactgcactctgccctaggcaaaaaaggaagatcctgtctcaaaaaaaaaaaaacagaaaagtccttgccatgtagaactttctgaccatttttttctgtttgattaactttctattttgtgtgcgtgtgtgtgtgtagaataagagagaatttaactaaatatatatgaaatcctatttcatatgggggaaaatatatgaaagaaagcaaaagttgtataatagttaaagaaattgggggaaaaaggtaaaacaaaaaccatctcccttgggtttgacagacaaattgtgttggctctgcatccgagcatgtggcttctctaacactacttttaattatgtttttcagctcttaaccaatggaaagtatctactaatacagtttctagccaggcacaatagctcatgcctgtaatcccagcattttgggaagccaaggcaatgagagatctcttgaggccaggagttcaagatcagcctgggcaacatagtgagaccccatctctacacaaataaaaataaaaaatagtttcccatagcttcacacaaataaaccaagttgctgcctgctttcccagtcttgtatgaataagattcttcaaagtgttgatattgaatttccttgttgcaaatccacattatttctgtaaagtttcccatgccttcacttcaatggttaattgaaaacaggagtagattcccctttgtgatgtgcttctcttaaatcacaaagcttccggagccctccttcttagtggctaacaaatttatttattctcatattaatcagtctgttgaaacaagattgcatattctctgtcaaactggttccacttcatctcgctgaccttcgttctcctgtatgtttgcagtaccccactggctgatacagaatgggactgcattgcaagtatgactcaaaagaggcttcagtttgattaaaatctgctctttgatatttactttttaaacttttagacatatgatgtttttagtttacacaaattcacattctgttgtcagaaaactttattttaccctatttaaaatggtagttattttcacgataggtataaaataaaagaggagttctgaaaacagtttttttttttttttgagatgaagtttggctcttgttgctcaggctggagtgtagtggcatgatcttggctcactgcgacctccacctcccaggttcaagtgattcttctgcctcagcctcccgagtagctgggattacaggcatctgccaccatgcctggctaattttttgtatttttgtagtagagacaaaggtttcaccatgttggccaggctggtctcaaactcctgacctcaagtgatccacacgcctcggcctcccaaagtgctggaattacaggcatcagccaaaaacagtttctattaaagatgataaggggaacaatatggaattccttacttgattgcacttagtaataacattctacccactggatagggagaagaagcagtagaaagatttcttgaggggatttctttatggaactccccaattagcattctagctctgtcattagttagcagcgccatcttggacaagtcttatcttggatattacctgctatgacctcagtttctcttctgtcaaatgagaggattggtttggctgattctcagatcctattcagtcgtaataggccttgattctttttatgaccttaagatatttgacaaaataagtcatttttggttcttatattttaaataacattcattataatatggtaatacttaacattcttgttttcatcctgaaaatatttttctcttataatgtttaaactgtatcttggataggaagaagaactattactatccccacttttcagataaggaaatttaggaaggttccataactgaccaagtggaacaaaggcagccttagactaatttactgatctttttttttttttttttaactgtcactgcattggccgggctggtctcacactcttggtctcaagtgtcctctcacctcagcgtctccaagtgctgggattataggcatgagccactgctcctggccttatttactggcttgaagccctgccattgccactggcaggcatgtcactgaagcctgggacgggacactgcagtacagagtgtgagaacagttcagctgaactaccttcacttcaaagccaggagcctgtatttatttatttgttacttttttcaatagatacagggtctcactatgttacccaggctggccttgaactcctgacctcaagggatcctcctgcctcagcctcccaaagtgctgggattacaggtgtgagccactgcacccagccaggagtctgtatttatatcccctccttgtacttgctctaattgtattcagaagaaaagctgtacgtggaagtgccaacctttcaggaagtggctacagaataaagtatgacactccatcaagttaaattaaattaaaatcacatctgattaaatcattttaaaagatgagcctggcatggcaacactttgtgtaaccaccatagctttgcagtgagtcatggtgagatgtactcccggtgttatataatatacaatgaattctttgaaaagtgatcaaaatttccaatacacagtattaaaataagtactggattaggtaaaggaacagagccattttactgcagtaagatgaaccttttttcatttgaatagcacagaaaaatatattgctgatctttttgctcttcctggcttccccttcacattgctgtttgaatgcttcgtctggaataacttaaaagaggaagaattccatggtgtcgcatacagaaggcctttctctgggcagtgcttgtcagttctctatgtaaatagggataacaaagaccccaagagatgaacagacaaaggacaaagtagacaattcacaaaagaggaaattcagttgtttaacaaacagtgggaaaaggttccatctcactagtaatcaaagatatgcaaattaaaacactactgagagacccaaagtgtttggttggttgtttttttatgacaatacagtaatggcatcagtgtgaaagctgctttcttgcacattgctaggagcagtgtaa

SEQ ID NO: 53929 - DNA, 1175 bp, Homo sapiens
gacagatatttaatagggggcgaaagtctttttacataaaacctgtcaaaaaagaaaatcgtgttgtaatttgggactgtagcctgctgtcagttatttacaggagtttgaatagcattgggttgggttgtattatgccacctaaaatccaaaccaaataggtgtacccagttaaacagacttgggaagagaagtgtgaagtgtcagcaggattcttgaagtcatggtggaggggaagagaagtggcctgcagatttcatcagcagttcttccggttccctcctttttcctaaaataatctctctgaatttatcacttctgttaggaacatacaatatgtttttggtacagattctacttaaatatcaacaatttttccactctgtcagctgttctataatatgtgattctgaaaacaaaccaaaaaaaaataacaaatactggaacgctttctgcttttaaagtttgctcttaaatgatgtgaccccttttatgatggatgttgttagctccaagggtgccagatttagcaatccattatttatcctcttctcctgggactcatcgtttttcctacattaccacatttcacgttcacagcccttttaatgctcacaccctgcactgttttgtgtacattccattcatcctgctcagccattatgggttattgccatctggtggaaaaacagggttgactaccagatggtagttttgaaattccggaagtgaaatgaagttgttttcatcagggaaaaacacatttatgtctcatgcatattctggtgttctaaaacaacgagcgtttttctgttccattgcacatggggaagtatacaacgatttcagctgctgaacacattaaaaaattgactttctatatacactacacaaaaatcgtgcttgtaaaaaagttaggtcccctttttatttcttttttcttttcactctgtcaacccaggctggagtacggtggcaagatcacagctcactgcagcctcaatctcccaggctcgagtgatcatcccacctcagcctcctgagtagttgagactacaggctcacgccaacacaactggctaatttttttaaaatttttgtagagacggggtctcactacattgtccaggctggtctcaaacttctgggttcaagtgatcctccctccttgtcct

SEQ ID NO: 53930 - DNA, 1994 bp, Homo sapiens
tgtttttcattacaaaaaaacagtatctcactattcttgggattaccaaacaacaattttcttcaagatagaccttaactgcagaagtatgaatctaatactggtcaatttttatcttttttataagtttgtttttataacactttctgtctgatacaaaaacaaaaagttaatactttttcctaggctgttatcccataaaacctagcaagaatgcgatttgtctttcggagcacttatctgacccaaccaaagtcggctaggtctgctagattaaacaaaactgatcatcctgtttcaaaaaaaaaaaagctcaactatttctttctacaatcatcgatttgccatttgtagttgttaacatgaaaagtctttcatcactcaaaaagtggtgggtgaaagttggaggtatagataatatttgtacctctttttggtgctttttccttctcccagagggaaacaatacggttcaaggactggttatgtttccataaaactaagcatctttactaaagtacactacggcttatctcagagctcaatgtcaccagccgatctttatattagcattacatattttctgaatggcaaatttggggttaatccaaaacaccaacagtatccgtaattgcacacacacacacacacacacacgcagacaaacgtgcactgaacttgctgcccggacgttcctccattgccccaggtgggggagtgtccagggctgaggctgggcgcttcccgtctcccggcgccgaagactggggtgggggcgatccaggaacgcacgcgaggctgcgcagtctccctccactgggttatctgaaccggcaaaccccgccggggagggctggggacaccgccgctccctttcaattctgcaccctgccacttccctaaactccccgcacaggccggcccgaagaagcgggaggagggatgccggcgggggtcactcaccgcgatcacgaccgtgtcttctccctgaaacttggcgatgtacttgtcgccgcggttcacttcagactcgttgagaggtctgaagcgacacatcactttgatgttgcactcggccaggtccgccatctttctcgcagccggggccggcggccgggagccactccccgccgctcagtcttgcagggaacgcgccggacctgagggcttgtggtcgcgagggccgtgagaggcagcagtcagctgcgccgcgctgcgcttccccgggtggaggcggccggggagccgggacttgaagagccggcgccggcagccgttaaccctaatgctcacttccgatccatcatggcagccatggcggcggcagcggcggcggcaccggggagagcgtccgcggctcctcagcgtccccctttacggtctgggcggactgcgggggctggggaggttctggggaccgggagagtggccaccttcttcctcctcgcgaagagcaggccgggcctacccgtccgcccgctctgccgtccgctggccggccgactgctgcccgatcactcctgaggccgccgttgggcgacagggcggtgcgggaggaggactgcgcaggcgcagtgggccaggcggcccggcgaccaatcggtgcgcgcgctcgcaccctgccgcggcggccgggctgctgtttccaccaccactcctggcccggggtcgcagattcaaattttactgcactgcccctgtcgcagaagttcctggggaggcagggcggcagctcccacccgccatcccaagccgccgaagaattccccagagctaaggcagacgcacttagctttcttttctttgagggagaaggggtttgctttaactacttaatgtcgtttgtttaaataaatcactaggctggtcccgttgcggtggtgtttgcagctaattggtcacagccagagatttgtttcttctccactcgcactgtgtcacttgactagctttaaaattaaaaacagaaagtactatattcctaaaaggaagtg

SEQ ID NO: 53931 - DNA, 448 bp, Homo sapiens
ttgttcttttcttctgaagattttggagggtctagttgaatttcaataattttaaatgactttttaaaaaaccacaaaaccctgtatgatccagatgccatctcgccacttggagagtacctattattttggagacatgtgcacttgctaaaattggcgtggaacagcctacagagtgcatgcctttgggtcctcttggattgattactgccattctttcttctccaacattccggaggcactgactcatggattacaaagtgtttcaaaattctaccacatatgcccctgccaactctagctcaatttttatatctttgcaaaaacttgacctctaatgaggtcttaggtttattttataatccactgagttaaaaataactagacttagattgcctttatatggtattcatctgtatacttagctcttaggctattggttaggact

SEQ ID NO: 53932 - DNA, 970 bp, Homo sapiens
gatatgaatataagcaaaatattaaatagctttaatataaaaatttgtctcacatctttcccttacttaattccttctactaacattacagtccacatctttagaatggtataaggcccttttttcctattctctccagtgttatcagttctttatgatctagtaacatcagatttcattgatttcatgcagtatgctatttcatgactgcaggcctttacaaaaatccctgtttttctgcttgcccaccaaggaggcaaatgcctatttattctttttagcacccagcctggtatcactcatctagaatccttttttgatttttccccacccaagaagtggttcctaaccactttcatcttttttagtggctaagaacccacttcacatactttataatctgcttgttaagcatgcctccctattagaatgtgtgtgatctctttagggagaggcatgccttctttacttctgtaccgctaagtggagggtaacaggtttcaccttgtatgccacctctgtaatgttacgtctattaaagtggggggaaataacctccaaacccagtcagacattaaagtctgtgatgggtacaaagggcactatttagctgccaaatactgccatctctgcttaaagcttaacacagtgtctggcctggggaagtaaaaaaacattggtacagttgaatgtattatttcactgttttattttttattttgacctatatcacttctataacattcctattaaaataagtaagtattcagactataaaaatttctagatgttaacatctctgtactcacagtacctgcaatcatgggccctccaatgattttccatcatctcattttgtcattattacgtaaacagcttttagagatcctcaagttgattaaaactgttagattaaaaacacttgatatattttgttcctaaccaaaataatgcaggtctatgttgtcta

SEQ ID NO: 53933 - DNA, 2209 bp, Homo sapiens
aggtaaggttacaggcttcagaagagagaggtactccaaacaaatctgcaagatattcgcaaggatcacagaaaaagtcagggatagtggtttattatcctccgaccaactagctctggagagggatggatacaaacgtcccagaaagaggacactgaaagtaagtcttatcttctagaaaagtaagtcgtccgggcaaacacgctgcaccctcgacatttccttgcagagggggagaaaagcctcatagagcagcaggcgacatgacatgcccgtctgaggctccacgtgggggctgcactgagcccaacaagcttcccagaccatggggcaatcaaattccccgactgtgcacagaacctgcgctcccggcccgggcagcggcgcgcaggccgcagtggccctggagcgccacccagcggcccacggagaggcctgtaggcgggtcctccacggctcccgactcgccgcacccccacagccacccagcccgttcccctctccggatgcacaaggcccaacccaagaactaagacacaaaatggctgccggcagcttcgtcacgtgacccctttgtgcctttcgggcccccgaactccgcgggacccgggtacaagtggccagggtcagcgggtggccttagaaggggccccgctgggccgcggcggccgggggtcgaggctgggggaggcggggtataggcccggccggcgactgagagtcggcggcgaagagaagatggcggccattttgtgtgggtttgctgctccgccgccgccgcaggcagcagagggagcgggcctgacggtgggtcggacaggggagttaacacgtaccgactcctcttccttctccattccggtgggcatctgcggcacggccctgtttatcgaggcgtattcgtgcaggtcgggcagatcctcacagcggaaaaccggcagcggcttcgaggcgtctagcgcccgcgcccgaaacgacagtttactcatctcaggcgcagcagatacctctccgctctggggaaacggccccggccagcgggatcatggagaaccgggggttcggtccccactcgccaaccgctgccggggacttgaggggcggagcgcagagcccgccgtccgggcactaacaccagccgggagggtgggaggctgtgccgctccgctcctctctcgctcgctctcttcaatacgccatggccaacatggcggacattaaaactccactgtgcgctcttcagccaaccccagccattccccacactgcatcgcgcagcggcgcgggcacgcgggcggggggagggagcgcgggctcgaggccggcgccggcacgaagcgcgcgtcccgccaacccccggcacccgccggcctcgcttcccgcgcctcgctgctccgggcccccgcccttcgcgggtccgggggcggacagggcggactgggcgctcggacaccgggcgccggctcttgggtcgtgctctcctgcagcgcacacgctcactttctcacgctcgctccctcccggcgccgctttctgacgggcgaacaaggtgcgggaaaactctctccaccagcacgccgccgtttggaaaggcagctggggagagtggcaggcggggctcgggccccgggcacctggggctcggagggctcggacctctggggtgctcgccagcggctgccccggggccacggccgcccccacggggcttcggaggggcgctccagaggcgccgcgcgccgccgtctgccgcggggggcgaacgcacagcctagttcccgcggcgccttaggtctttacgataaaaatacaaactgaattaggggcagatgctactttgagtaaacttttatcagcagttatttttatgtcctaatgcaactttggattataatgttttataggcaccgcatcaagtcattgatccgtttcccacgcattgggcttaatataaatgataggtatcctattctacaaagtagatttttttaaatcctgcattttcatctacacatatttactttttaaatagtaactgaagcaaaggaaattattacccaccactataacatttaaaagcaagatctacttcagaatttaaagccagttctttatatctagctcatgattctgtactcaaagagactgcggcttcatcatagccgtgggttcacactttcatcatttgtcctctgaaaaactttgtaac

SEQ ID NO: 53934 - DNA, 3556 bp, Homo sapiens
ttacattttatgaatagctaaaatgttacagtgaacattttcacatttttatggcatagtataaacaaaatatgggctaatacataattatttttgaagttcaaggaaagggatatatagatagagtatagagacacaaaaatcagaaatactatttttagccattttcacacatccttttacttcaacctgttaaatgattaaaaagtgaaatgagcatttacgtatttcaaagtgggtaaacacgctaaataataattcttgaaatgttcactctttcaaaaaataatctcttcaatcttatggaaaagtggtctagtgtactatttcagttgtttttattttatgtgaccaaaaaaaatacgctttagggttcaattactgattcgtcccactttctttttgaactaagggcacacttactatctccataaacagctaaaatgtttacagagaccagtaaaacctatgtcagatcgtaacacatttttgttcttgggaggctttgggcctaaatcccacattctctaatcagataactcaataagaacaaagatggaaaagatataatcctgcatttagatatgtgaacatcaaaatttttaaagccaaaagcaattgtgcacatattcttaaaaaattatcttattccaaaatatttgttatttttaaaacaagactatctgtaattcagttgaagtatcatttcaaaatgaaacaaacaataatgtgggaattattatatgactacttattagaaaaacctcaggagaaacttagaatagttatttaagaaatccctaggttcaaaatgaaattcaacttttacaatgttgaaggaactaaaactcagacatttggttaaattgaaaatacactaacacatataattttgtaatataaggaaaatgcaaaatgttactaaaaggataaatcgacagcttattactgaataattctgatatagagatgataaatcagatcagataaaacaactgcaaactgcatgcctgtccctgatgttccctcggctggttgtgacgacatgtctgctctcaccatagttcacagttcacagaaaacatttaaataacacaactgaatacttccactgactaaaatgaactttctttaagaaaataaagggagaagagaatagatcaaatcttgccccacctctttttttttcttccttttttcttttagtgaaactgacataaattgttgaggagcactacagcgccaccaacacagatcaatgcaaaacaaaaaagatctcccaccgtgtgcaaaaagaaaaaaaattagaaaaatgccaaaaattacaaaatgtctcccaaatgtaccgtataggagaaaaacaagatagacctgcaaagattatctaatgaagagcttcaaagaaataatatcatagactacaagttgagatctgatcagcaaataaaagatccactatttagtaacagccataacttaatataaacccggttatgtcaacctccaccttcattataccaagggcagcttttctgtagtttgtatccaagtaatctatcaagagaaccacaataggtccatttaaaaaaaaactatatccatagtttgcctgctgataattgagtcctggacaaattaggtaagacataatttttataaagaggatatgcacatatttggcattgccaacattactggcacaaaacaagtccatcttgaaatatctgagttcctctgtagttcacagtaattaaagtataatttatattataaacatttagctttaacaatgaaaaaaaaaactatttttttttcttttggtaaaaattaaccaggcaagattaggtagaacgtgcagagatcaaagctaaagaaaaatacaaagattggttttgttagaagaaacacaatgaaaatcctttttagccggtggctctttcaaagactgacataaatggtgaaaattacaaacttaccattagtgcaggcaaagaagacggcagttcttgaaaaaaaattgtaacaatataggctggatacttgtgtccctagaaacaacagcctccaggcagcatatggatcttccaacatctttaaaatgtttggtaaataaaaagtaatactttcttccatgatcggtggccgaatggggtggcttcccccaggatctgtgggcttttgggggaaatcggagaaatatccacagaagattaaaagcagaggaggcagcacagccagaagactctggggttaacaactttgcgatggcaagcaggcgagcgctgattggctgggagggcagtgtccctacagtctgcactatcccccgctgcccccgcctcctgcagctcggaaaaaaatgcagtgtgtgtgccattttacactgggcttttaaaagcacagccaccaaaatgacaaaagtctaagctcgctatgaagtgacactgcaagacaatagcacccacggctgcctgtgagctcgggggaatgccccttttaacatctgaaggaacactctggcttcttggatgtggggtttttttgtttgttttttgtttttgtttttttttttttaaaacagcattatcatgtttttcttgagcagattgttgatccttttcaaccactcgatagatcctctgcatgcaaacctggccatgtaaaaacgatgtccatcaaaatattttttcgatttgatctcatgaaggtacctagagaagccagtcatcctggaacaaaattcatgactcctttagctccgagatctttaattccttgggaaaaaaaatataatttcttactcacagtaactacgatgtgtgcaaaaagtaaaataaaataatgaatttagcggttaaatgaaaacaataggcatattccctccccctcccccgccccccttaaaaactgtttcaaaaacctttactggctgacagaattctaccactctgccttacaaacaaaatggctgtggtactgagttttttaggatcctcccactgtgcctcctcctggcctccaggaagtgataaaaatccaaaataaatacagtactgaaagtacaccattgagtctgaattcgggggaaacctttggtaagagggtcttagaaatgtgctggtcattattagttttttaaaattgttttgaaaagaacatcaatcactagagatttacttgactgtaattcgaacttcctgctttacatatttataaggtctttcacctatcttggcaggctttcaaattaagtgggctgggaaatttgatgctcggtctctagttgtgagctgagtcaggtatttggtggttgcaactgggcttttaaataaagacaaaatctaagactttaaaaaaatgaacgttaaacagacgcaagactatgtttgctaatgtaaagtcagaaaagtcgacaaagatcgtaatgtgtcaaatactgcatacatgtgtcaacatattcagtaaaaattctttgcccactaaattttctaacaagccaagaagagaacagggtttaaaggaactggattaagaaaggggtggggaattatctaca

SEQ ID NO: 53935 - DNA, 2081 bp, Homo sapiens
attcagattttactggaaaattagaaataattagatataatgaattttcagagttttagaaaatagttgaaatctactaagtcaaatctaaggtctcctttaaacctcctggtttttagttttagttccatctttcctattcctttcatttacacacaggcattattaacagttaaattgtatcaattaatattttaaaatattaaaaacattttacttcgttcaacttaaagacaaaattaatatatttcttgaggtcaaattatctaaaaaactctaccttgtaaaattgcatcttaaagcagtgcgtggaaactgatggcaagaaaccacttaagtgtcacaactctgcttcaagttaattcctagtccatttgattttgttttgcttttaagatcacgaagctggtgtacacttccgtgcgagcttagagtggtaatgaactccacaatacactgaaaagagcttgaggagacagcagatgaaggactggggctctggttttgtagctgaagcccaggttctcaaaggtcctaccaggcctgtactttatttctcctccgcgggcctctaggccaaatgcctggatgaatctgcgctcagggggcgtcctggaattacacttgggagagaataagaaaggaggaggccgatgtgcccatggacattattaaccttccggcaaatccccacagccgccaaactgcgtctcctcttccgctctcggcgcgcagctcacgctcgcagcgtcagcgacgccggcggcgccaaggcgtcgtggcgtcgggcgcctgggacgtggcttcaacggccccatccggcgccggcggcgggtgcccggcggtctttgctgccgcccgggggcgcagaggccgggccttttctttcagcacaaacgtcagtttgtaaaagggaggtgctggagtctgaggagttttcaggcttccgtctcgaaggaagtctggcaggctcggaattgtcatcttcctcaggcaaatagtttttcaccttagagccagcaaggccaaaccgcccagtcacccgacttcccacagtctcagcaggtacacagggcggggagcctcgggagcggctcccttagcaggacctgagggtttcgggagagtcctggctttgcacttagttttcccgctgcctggctgcctccgtggcggttgtgctgctttttatgcaggatgtaggatcgaaggcaaatcatcctttccctacgtcccctgccaacccctgccgctctcctctattttgtacactttatcattaaaggatttgaaatgaatgtaagttaatccttgaaggatgaaaccagaaaacatttgtcgtggtggcggaaagggacggatgcacttgggcgaagtaatgctgacatccacttcctagcattgttaggagggataaatgaattaaatatgtaaagtccttaaatatttgcttgctaatacgagtattcattgcgtgtgactatttttgtatttatgtgaacttcatcggagcatttgtcaggttctttttttttgcaccaagtgagcgttgcctgcctgcctgcctgcctgcctccctccctccctcccttccttccttcccctcttcccttcctccctccctccctccctccctccctccctcacacttttttggggagagaggacacaatgcaatccataacagcatatacacttgttcttttttccatcgaactttcctcttgaccatgttttcttctagtaatactgtatttctttactcccttttatagtaaaatttctctacagtgcttatattcaattcattgttcctacttcctctcttttgaacggtaagtcagatatttacctcgatcattctactgaaattgttgccgttcttcaggttacaaatgacctacctccatgttgccaaatccagtgtcagcttagtcttcattttacttgactcagcatttgacgtagttcatcactcggtccttggtgatattttcttttccttgctttctatgtatatataaccttttggttttacttattggctcattggccactcttcttacgtcctgtttcctggt

SEQ ID NO: 53936 - DNA, 858 bp, Homo sapiens
ccaggccaccacctgcaaaccaacactgcctcaacactgagcttgccccatagactcagtcttctgggctgccccagcaccaagctggacccagagcttcacaccccagaccgatcccagagccaggtcagccccagtagctccaggccctaagctggcccctgaaaactcaggcttcacatgtacctgaggctccaagcctgccccattgtcaggtcagccctagcagctccaggcttcagactgccaccagcactataccagcctctgtgaccctatcctccagaccagtagcaatcaactaagctttattcctgagttcagaccccaggccatcaaatccagcctcagattccaggcctatttatgtgtatccaacctctaggcctgcctcagtaccaggccagtctgcagatactggtacaggcctgcccagtgtcaggtaattttctgtggccccagacttgcctctgcaaactcaggttcaaggtccaagtttgcttcagatttacccactgtcaggctggctctcacaactccaggctttaggccagcacccatggacccagcctctagctccaccctagtgccaggtcagcaccaacaaaccccagcaccaatccatctccatggagcaaagttccaggctcatccaagcacctagctgtccctacagactcaggctaaaggtccacccctataccaagtcattctccatggacccagacatcagaccagttcccacaaataacaagattcaggtctgcccctgtgggcccagtcaattggttcactccagtggaccctagctacagacctgattttgtggatatggcttacagaatcatagtggatccc

SEQ ID NO: 53937 - DNA, 5093 bp, Homo sapiens
acacacacgtttcatgaggtgatatgcacacgcttaagcatattgctaaatatagttaactctaccttctaaagtcacaaaccaaacggcaagtttaaagttagctgacctctaaaaactcacagccacttttaaaacaataacaaatgtacaaagtatagtttggatccttttgtacacagctcctgaaagagagaaactttttttttcacctaccgacagacatattggaaggctgctaatattctgacttttacggactgtaccccctttaagctgggtacataccataatatcttttcagttttccacagctatagatacctctagcataacacttcaggattcagaagacgaatgtacctttctgtatcttaacgtctctactccatacctcccacctctgaaaaaataaccagccaaactctcagaacctaaaaccaagtcagagtaaacactgctaatacaatacaggtacttacatatttacccggcataatctccaggattccacccacaacctaacagatcctaactctctggcagagtgagaaaatctgctaatatctaacagaagtctaaatgaaccctttcagatacatgcagcttgttacatattcagaaagttaagttctctgaaacttttaccagttacaagatgtttcagcttatcacactagcagcatagttaagggcaaaccagagcagctacagaatattaatgaatatgttttcagacagaacactatactactcaccgctgtaagccataacttacttatcaagaagccaaacaataaaagcattacaatcagtggcaagcacgcttaggaaaactggcaccatgttaagttgtttgaccacttttcattattataatatgaccagatgtccccagtgtcactcccagagttaggaagaacaccaatgtagagctacattttcattcgtgatggtaattcggggctgatttaaattaaattatactgaccagaaagctgcctaattgttaaaattactaaatccagtgactttcagaattgctgattccatgcttctcatgtgcagaatgttgagggtattaaaaaataactttaatatagaactttacattaagaaaatcacaaacacttaaaattgtaggtttaggtctgaagtcaacacagacgagttaaacaatctatttgcttcctgtttacagaattaaagtattaaccacattctttgtccttttaactagcattctaataacatcttccaccttcatactcaattttgggataagtaaaatgactttctccccaaatgcctgtaatgaaaataccaatgttttttatttaacacttcaccatcttcagtcacttatataatattgatcaatgagtcaacattatttaaaaatatgagaattatagtgagactctaagtcctaacccctctgggccttgatgtccacaaatgaacaggtaactgccaactgaagttccttaatcatttctaaaattggtctactgtataacctatcgtaaaggacgtatgtggtttaagaaaggtgtctaatctaaattcctctagcatgttatttttgtagcattaaaactacaattaaaaaaaaaaaaataaaaaaacctaagggccaggttcaggggctcacgcctgtaatcccagcactttgggagctcggtgagagaggacagcttgagcccaggagtttgaggccagcctgggcagcatagtgaaatcctgtctctacaaaaaataaaaaaattagccgggcacggtggcaggcgcctgtagtcccagctactcaagaggctgaggtggaaaagtaacttaagcctcggaggttgaggctgcagtgagctgtgatggctcttctgcactccagcctgggcaacagagaccctgtctcaaaacaaaacgaaataacctagtaattctacccacctaagttaaccatgtggcatgttggcccaaagaaaccttaccaatgatgttaccaattatcttccgagatatttttaacatctttttactataaaagaagggctgaaaaggagtcaatactcattgagcatctactctcaagctaagttttttacattttgcatttgattttcagaactatagttaggaaggttacttgtggtttaaacgcggactctggaactagaccccatgccttctccaggagctcctgatgaccacaggcaacttacttttgctccctgtgcctcagtttcttcactcggaaaatgggaatcgaaacagtaccaatctcattagagcggttccagaattaaataatacatgtaaaatgcctagagctaaacttggccctcactgtcattattataaaaatgaattattaatgtagatattactgttcctatttcacagatgaggaaacggaagcttagagaatgcaacttactaatgatcataccaatgagtgcaaagttttggactcaaaagcacgaatttgattaaataaaagttacttagagagtaggagtctcataaatccaatttatgaagcctaagaaatgacacgcggtaaaatgatactagacacaggccgggctctcaggctcgcggaccgggtctgagcacaagctggccatggccatgcgtcctggtcccggggtgcccggcagggaccggcgactcttgacgtttataaacacggggaagtggactgcactgccgccaccgcacccccggtccccagcggctccactaagccaacttctacccggctcccgccgcccccgcccgcggcgctggccccagggccgcctcctggcagccggaggagaccagtccccgtcgcgggcgccgacggctggctcgacgctgctccaaggacagcagctcgcgagggagcgagagacaaaggcaccggacccgtccaggggagcgccgagtcccaaacgccgagccccgggtggcctcgctggctcccacctgcgcttgcccagcccggcgggagaccgcaggtgtcaggggccgttcgggcccggtcccccgcagctccggcagccccgacgtgacagcgcccaggccggcgaccctcacgttcggaacgcggctgggctggctctgcgcccgggggctgccagcgccggggacccgaggcgggtggcggcgtgcggacttcctcctggactagcctggaatcctgccccagcccccaaccgctggcggccgcccccgcccccgcccccgcccccacccccacgcccggcacaaaggtcccggcgcggcccggccggcggctttaagtgctgccgcgcacaggagaccggaggccgcggcccgcgctcccacacccgaggcccgccggcccctaccttttccgcgcggcgtccggggcccggcgcggtgggctcgggcctgctgttccgcgactcccgctgggcctctcccgcgggctggcggggcctcccgggtgtcgggcgcggcgggtggcggcggctcctcctcctcaggggcgggaggaggggactcggcggcccagagccgccccccggcaggaaaccagccgcggccccgcctcctctgcgcgtctgatcccgctcccgaggccgccgccgccctctccctccggaaacgcattcctctcccgccgcgtcagcccggcccggggctaggaggaggcggaggatggggcaggaagtgcgaccgggacaaaggaaccggctgcgcgggagcgcgcctgagggaggccgcggggggcagggccgggactgcgttgagacagtcgccgtgcctcagtttcctcctctgcgaagggcgggaggagtcggacgcgccctagagccccgcgcgttcctggtgtagcctgctgggcccgtgttctttaagttcctcttcctcggagccgcgcgttcgaccctcgctcccgtttgtccactgatgtcccgtttcgagcccgggagatcctgcatctcggaagccccctgagtcccgaggcaaatcgggaccgtgagcccccctaccctgcagggctccatggggccaaaaaccacgtggtccttctggaagggaactggctaagccaggactgcttttctggagtgataatgtgcttgcctgtgtctaagagaaaggtgaagaattgggaaacccatgggtgtcacgaagggtggtgagactggggaacgttttagaaaacctggtgagttgcgtcctgcttttgatagatttatctggaggtacctttatggggaacagggatgagaaggaaaagtttcttcctaaggagtacagtttctgtttcacctcttaaaaaaaaaaaatttggagattggggctggaaacaacgtttgaaagagaaggaaacattcattatgagaatggctgaacgcatgtcgattcgatgattgaagtctgtaccagccaaaatcatactgaaacccagtaatttagtatatgctactggcaagctgctatcctggtagcagaaaatgctgtgggttccgcttggtgagctgcagcaccctgttgggaaaagagctcaaaaattaccagatttatgaaatagaagtgtttctcttgcaggagattagggactggaatgcccatttggctgctgccaatcaatataagagaaaatgaagcgatcacatctaagaaaatttgctcattacttaccagcaaaatcaaaacttgattagccaatctgaagacctctaggaaatgagcactatttttcccacttaatggatgttcaagcttaagaggctaaatgatgttcctatattaatatctcaatggtcaaactgccattagaactcaacattcttgaattttaaaggtatcggttttaccattgttcagaattcatcagaattggcccagtctcagcacagaaaactgtatagttcaaaagcataattggtccgtgcctgatttgcactacaatttccagaatttttttccctgtacgtgactggtggaggcactagctagtctttgctacaagaacattatgagatttacatatgcacaactctaaactaaattagttcctccaggacaatttactgagctttttaacaccaccgtcaagcactgttgcaaggacagat

SEQ ID NO: 53938 - DNA, 657 bp, Homo sapiens
cttatggatagtaaattaaatgagacaatatctgtaatgcaaaaattaactgaaatactagatgttataaaatgatggtgctagtacatattttaactcctttcctttaaaataccttgggataccaccaacttgagcaccttgggtcagtctcgctggcctgattgggcagtgacaattaccccggggccttggtcagtaaccttaacactcaagacgttgttattttctctgttgtgtcattactgacgggctggttggagccttctaagaatgctctctatagcactaacccctataaaacagttagacctgtttaacttggtgatgagagttcagagaagaaccacagagatcaaagggcaaaagagtaaaagctaagagaaaaaactaaagccagtggactgactgagccaggacggttgagagctggttgctgataagagccttcacattctactgggctattactatgtaaagtaaagccactcaaccgttttcactttggcactgaaaaatattcaatctgccaaggtgcacctggggacccacaccctgctgattaaaattggcatgggaggagcaggtctttaaagagactacacttgaatttcatcaagaagctaaaaataggatagaggagcaatatagaagaca

SEQ ID NO: 53939 - DNA, 7282 bp, Homo sapiens
acttcaataaacatttggaaggtcttaattcggggaaaggaaaccatcatttatgtgcgtttcattaattatcaagattaccaagatttatgatttgcattttaagaatgtaagttccaggccaggcgcggtggctcacgcctataatctcagcactttgggaggcagaggtgggcggatcacttggggccaggagttcgagaccagcttggccaatatgctgaaaccccatttctactaaaaatacaaaaattacccggtcgtggtagcacacgcctgtaatcgcagctactagggaggctgaggtaggagaattgcttgaacccgggaggtggaggttgcagtgagccgagatcgtgccagtgcactccagcctgggtgacacagcaagactccgtctcaaaaaaaaaaaaaattaaaaaagaatataagtttcagaaagcaagaatatttgcttgttttgttccacaatgcctaaaacggtgtctagtgcttagtaggtagtcaatgtatctgttgaataaatgcatcttattggataactcagtcagagcaatgcattcttctttgaattggatttaagtttgcctttttaaaaatgtatcttttttagaaaattaacgtttgctctttctctgctaagaaaaatcagctttactacactggaggtgggaccgagggaaggaaacaaaggcattctgtattcacctgcatgaagcagaaaagccagcccgaagctactggctgagcttctgccctaggtgcgtctcctgcgtgcagcgttgctgcaaggcctggcagcttctaggagcctacacctctgtcatcgccttcggggagggatagggctaggagctctgtgcggaaccgcgtccagccgccgactcactgacacatcacaatgagtcacgtgctctgtgcaccgggcggatttgtcagatccgctgctgcatcacggctcggcagggctctctgggttctcagtgccctcctaggtctgcaatgcagtgcgggagaggaggaatatgggcttgtgggggcaggggcagcgcccggactcctcccggggcaggactcccagaaacgcaggaagcgatgacgctgctcagataaaccctggcgctctgcgctggcgtcctggtcaggagctcctctgccacggacgcgcctgccgtttctgccttcgttatctatttactgacctctcatctccccagaagatgttctcagttctcagcagtcagtgcttctcctccagcttcactgacctttctatgggggtaataaactaaagaaagaagtcgatgtttgagtagataaaatgtgttatgccagtgccctgggaatccgatacagctggcccaggaggggcctggggttctgctttgttttgtcttcagatagtgtctagctctcttgtcaggctggagtgcagtggcgagcctagctcactgcagcctctacctccccggctctagtgatcttcctgcctcagcctcccgattagctgcaactacaggtgcctgccactgcgcccggaaatatttcttacaggggtcttgctgtgttgcccaggctggtctcaaactcttggactccggggatcctcccacatcggcctacagagtagctgggattacagatgtgccaccgtgcccagctatgtctattcttgaaggctgtccatgtcatttccatgggcagccaggtttccctgtcaccagactagatgatttccaagagcccttcccactctaaaattctatgaacaatgatatttttttcccaacctagtccctttgagccaagaaaggaactcatttattgtattaatttagacaaacctacaaaggtagaaagattcttataattttatttccttaaaaatgaaatgtttatatgcttgtttttaaagcagggtcacctgggaaagtacagagctgtttacacttaaattcccatttgtaagggggatattctatccctcaacttccaaagtgaacaaagtcctaattcggagcccattgctctgcggcctctcatgccctggtagggccaggaccccagggaataggatctggccgctgggtcagcaatgtttgaaggctcccattttatttgcagccacagccagccaagttcactgtgagcagcacttcctgccttgtttgtgagctgcaggctgcatcaggaaataaagtttgtaaaattacattctctggctaagcctagccctttgttgaaatagccacattatctatgacgacagtgacaaggccaaaggtgagaaaatctacatgaattattctctcaaaaggattcagataagggcagaaaagaccagatgtttcctttctaagtgacaaagggcttgagaataaaaggtaggaagaacaacttgaaagattcacttgggcttctttctcactacctaagaatattactaagttccctaaaagcattgcacccctggattctagtctgttttatttttttgagatagggtcttgctctgtctcctaggctggagtgcagtggcatgatcacagcacactgctgcctcgaactcctaggttcaagtgatcctctcaccttggcctcccaaaattctgggggtacaagcatgagtcaccgtgcctggccatccctggattctagatctgggcctggcacataatagatattcagtaaatattaaacagatgtatgaatcagacagtcctggtcgtctacgtatctttatctactgagagttttgtgggtttttttgtttatttttttgagacagaatctcactctgtagtcacccaggctggaatgcagtggtgcgatcttggctcactgcaacctccacctcccagatgcaagcgattcttgtgcctcagcctcccgagtagctgggattaaaggcatgcgccaccacgcccaggtaatttttgtatttttattacagacagggttttgccatgttggtcagactggtctcgaactcctggccttaagtgatctgcctactgagagctaattcaagaaaaactactaaattataagctcctgaaggcagagattgggtccttataggacctggcaaaattatcagcaaaggtttcttgaaatgaatttgccaagagctcttctagacagggggaaagtgaggagacataaaagctaataataaagattggaaaaggacatatgtatgtattggacaaatctagcatttcttgaaaattcatgtattgattcactgatgacatataagcaaagttaaagtcatcttcaaccgtaaatgttaatacttattcagtaagagaaacagcatgactcaagtcaatggatttagggacattaatttggcagttttagggcaaaattctaagtggttgatgatagtgaaaaattgaattgccttaaatgcctaacagtagggaacttgttaaataaacttgatgctttcatgcaattatgttttcagataaaatcatgttttcaaaaactatatatggacatggagaaatttaaatttaagtcaaaaagatatggtggcagaaactgttgacttcctacccacaccacttcccttctccttcctaacacctcttaattttggtgggctttctattctctgcacagcagtgtgcttcaggggaggcagtcaccagccctgccctggggagtgaatcatcagtgagtggtgaatgtgaattcccctggctagtgatcttctgagtccggggagtataattcattccaggccagtgaggtggatgagagtggagaggcttctggaaaagctttcctctatctttaaaagcaggaaacaaagtcatgcttccattaaatgttaggaaaagcttccctctatctttaaaagcaggaaacaaagtcatgcttccattaaatgttagactctacatgtgataaagccaccatgcagccaggcctgaggctgagctgacaggcctgggaatgtggaaaaatgcaaaggccccagctgattgatctgctgatctgttgacttattagccttggaggctgcaggtcagtgaccaagagccagttcaacaaacacccacccactgcaaatcagtttccactacggctgatttgctggatttactcgcttcttttaactatttagatattgttgactgattttcattttgtcttcataaaagcatttaaggaatattaaaattgtctcaattctagttccttgttgagtaactgaagactgacttttgatgagttgtccagctaaataactcatcttatttccaaacttattatgtgagctaattttttcttatagtttaaaccaattgcatattgagtccaggttttctcttaattaccactagaagtatactaatgggatacatgtagaataagagagagagagaaattggggggaggggagagagagaaagaatgaattatttctgggttgtaggattgggaatatagctgatttatgcctttactgtatattcatctttgtatttctctattttctaaattttctgtaatgaacatatattgctattatgaacaaagtggaaagttgtttgttttgagacagagtcttgctctgttgcccaggctggagtgctgttgctcaacctggactcactgcaacctccacctccctggttcaagtgattctcatgccttagcctcctgagtagctgggattacgtgcgtgccaccacacccagctaatttttgtatttttaagtagagacaggattttgccatgttgcccaggctggtctcaaactcctggcctcaagggattcgtcctcctcagcttcccaaagtgctgggattacaggcgtgagccacggtacccagccctgaaagttgttcttaaaaactggtttgagggctataaaaggtatgagtgctaatctcagaggattgtagaatcattgagaattgacatctagagcttaataaagtggtggctgggctggtgaggctacacaaacaaggagcaattgaatcaattctagaagactgagtatgcgtaggatgagtaggaagaggtgaggcttaggacctctcgatccattgtttgtgtttggtaggggaggactgaaaggccatatttacaatatttaggccaggcttggtggctcatgcctgtaatcccaccactttgggaggccaaggtgggcagatcacgaggtcaggagttcgggaccagcctgaccaacatggcaaatccccgtatccactaaaatataaaaaattagccaggcgtggtggcggatgcctgtaatcccagctactcgggaggctgaggcaggagaattgcttgaacatgggaggcggaggttgcagtgagccaagatcgcaccattgcactccagcctgggcaatgagagcaagactgtatcacaaaaaaaaaaaaaaaaaagccacaatatttattgtctcttccatgcatgatgctttacaaatacgtcatctcctttcatcatcacaattgtgaaagtaggtagtattatcttcattttgtagaggtaagaagtgaagctcaaacgtgcacagaagtaataaatattggacctgtgattttaatgtacagctggcattaaatgtcgtgtgcaacacctctcacagatgagcttactggaagtgaaaatcagaacatcagagccaaagaaaggattctgacaaaaagctgttgtgattgtaagtgacaggaacccaactcgaagtacttaagcaaaaatggaaatttattgccttaggtagctagaaaggaatggagtgaaaccagcaaaaggcttgactgtgcctcgggtgaaggaaggtgtagactgtacaagaggtattgaagcatctttttccaccttaggagacagcttcccaaggctggaaagaggggagtgcggaacatgcctccaccataccactgcccacctcctgtgacctctgcagcaaaacctgaagccccaaagaggcagcttctcaaagtaaaagtggaatgaaggtcaggttggtctaaaaacccatccaacaatttgtggaaagggtttacatcattttgttatttgtatgtcattgctttttgcatcatattgtttgtccttacaaaacaaatctggacacagcaagttgttcattcgcagagaaagaaagcttactcacacttcctgtcatccagcagcaaagaatactgaccacagagtgacctttaagtgtaaggctttaatgagtattaggctgaatgcctgttttccaacctggtgcaaaatatttatattttagaaattgtgatttttaacattactgcaagaaagaggggcttctatttcctttttcctctatttagtccctagattaagaattggcaatttttttctacaaaggaccaaattgtaaatatctttgactttgcaaaccatgtgatctctgttgcaactgctcaactgcctttgtcttgcaaaagcagctgtggatgatatgtatgcaaataaacatggctgtgttccaataaaactttattttcaaaaacgggaagtcagccagattttgttcgcaggtcttggtttgccctagatcactgttttttccccccgagtttaaaatcatcatttttttgttggttttaaacccatgccagagcaagagaacttcacaattttctatgggtatactgtgttttagttatttggatgattgtccaaagaatcagtccacaataggaattattgttacctgttttgtgtttccgttggttccagagaggaataatcttatcaagtcatgtaggttaaaaaattaaaattagtaaaactatagcaatagaaaaataaatttaatgtttttaaaccttgcatttaaaaggtaaatttggcggggggcggtgactcacacctgtaatcccagcattttgggaggctgaggctgctggatcgcttgagcccaggagttcacgaccagcctgcacaacatggcaataccccatctctacaaaaaaatacaaaaattagctgagcatggtggcgcacacctgtaactaccttgaggggctgaggtgggaggaccccttgagcctgggaagtcaaggctgcagtgagccgagatggtgccactgtactccagcctgggtggtagggtgagaccttgtctcaaaaataaataaataaataaaataaacggtaaatttgattaagaaaaagaaagatgcaaagtgaactgtgagtagatggagggatcataaatttgggggaccaataaatattttcctcactgtggtggggaaattgat

SEQ ID NO: 53940 - DNA, 3279 bp, Homo sapiens
atatcctttcacctaaagctgaaattttcaagaacctattgacaacattaagtacgaaatcactgtaccagatttttttttttgtacacaaagaaaagcccacggtgtaattacttggtttcttccatcacttttgtcattaagtcttagcaatgtcacagaggcattttcctagttggtttatgtaggatagatactccttttttttttctttttgtttatggaatctaagaataagttcatgggctccctctggttattttgtaatgtttagattcctcacattatatacctattatcatctgataacaatatattatatgtaattgtatattgatcatcagagcataataggctgcgacagaaaagtctaaaaaatgagaagatatatatttcttccaagtgattcaaacagctttatgggaataatcacagaaaatattaatagagtactaaaaactaagtagagacaaatgctatgattattttatgagtgaaaaagtgaggtttggggagctatgtgcaatccagcaaaatggaagtcaagaataggtgtaaaagctttccattgttttccaaacattcatccaagtcctttccctcttcctgaaacatgtctactcaaaattcttgatagttctattttttttcttttgccagtaactatgatgtcacaagcatcaaaacaattactatatacttactaatcatttcaacttgtcagcaaggttgtcttatgtctgtggcctatatctgcattaaattttttttaacatttatttatttatttatttagagacagagtttcactctcgccactgaggctggagtgcaatggcatgatctcagctcgctgcaacctccacctcccaggttcaagcgattctcccacctcagcccaccgagtagctgggattacaggcgcccaccaccaggcccagctaattttcatatttttggtagagacgggatttcaccatgttggccaggctggtctcgaagtcctgacctcaggtgatctgcccgcctcagcctcccaaagtgctgggattacaggtgtaagccactgtgccggctacttttatttttttagagatgggggtctcactctgtcgctcaggctggagtgcagtggctggatcatagctcaccgcagccttcaactcctgggctcaagggatcttcctgcttcagcctcctgagtagcttggattacagaggcatgccaccaagcccggctaatttttaaaaagttttactttttgtagacggggactcactttgttgcccaggctggtctcaaaactactgtttcacgtgatgcattattttttaacctacagcagtgcttcaaagtcacagagatttttgtcctagatcattagctaaactgcttctatttagaattttttgttgttgttttcttaaaaaaaaaaatctagaaataaaggtaggaacgtttctttccccccaaggttgagaacagtctctttcatctgttttccagaattttaataactgcttcacagcctctcctgcgggttagatgtcctgagtgtgctgatgtttgcaacacttcccttttctgctgtttgaatcatctgcaacttcacagggttagtaataaagtcggctgacgggcagatctcatcctgaccctggcaatagtcactcttacctaaggcaactgactcaggcttctcctgggctctttttttcaccccactaggcagatttctctctatatatggtaataatgctcccaagcagaggccgctggcttccccaggaaaactggaaagtgaaatcacataccagagactttgtggtactgtggccacggtcgtttttctgctactaagggtgaaagtcgattattaaagcaattgcatcttccaagagcgattttcccgcatccctccgggcttgggggctgcagggacccagccggcacactccgcacgccctgcggatgactcactgcgtttgcactgccgcaggcgggctcggtggtggtggtgacgcggcccggcagcccgggaacgcaggcgggctgcaccctctggaagccagcccgggtctccgcgctgtctttcccaacatcaaaaatgctgctcctatttgcatagtgcttgaccttaattggagtgctgttagcgcccgcgattctcaccaaaacttagtgaagtgtgggtcagtgatctaggccctttactcgtcggggaaactgaggctcagatgaatgtcttgcccaaagtcacacctaaattgcacagcttagatgtaaatacataattgcagggggaggcactgtgcttatgtcgctccatgctgcgttttaggttttctttacaagggccaaacaccatctgctttcatgtaataaacttccattccactttaaatatatagaaagcagcagaggaagttcaagggagggcatgagcaagcatgtatgggagtcctatttgtggaaacatcactccaaatcagttagtttttttcctagtgaagttgatcaaaagaaagcccaagttattcagaatgctgagatttaaggaaatgtgtaaaaatatttatttctatctttttaatgtgatctcattagctttaaatagctggtcttccttgcttttttgggagaggaaaacaacgtatcttcaaaacagttacctaaaaatagtagaagctttaccaagggagccaggcgtgatggctcatggctgtaatcccagcactttgggaggcagacgtgggcacatcacttgaagccaagagttcgagatcagcctggccaacttggtgaaacctcatctctactaaaaatagaaaaataggccgggcatggtggtgtgcacttgtaatcccagctactcaggaggctgaggcgggagaatcgcttgaactcaggaggctgaggttgcagtgagctgagatggcgccgctgcactccagcctgggccacagggcgagactctgtctcaacaaacaaacaaaaagaaactttaccaagggagttgtaaatagaggtttgttttcaaatttcattttcaaatgcagcaatatttattttgctgtcgatattgttagaaagtgtgtaggagaaaactgaatgttgttagaatatttaaaaatatgcagcagtctcacaagcttcagtaagttttaagttcctttgggtgggtgtgatagttatgacatcaattgaagaatactaactgtagagtatgttagacaaaatacacactcaatggatgttgattaaaaccattcttactc

SEQ ID NO: 53941 - DNA, 3539 bp, Homo sapiens
tgtctcaaaaaataaataaaataaaataaaataaaataaaataaaataaaataaaataaaataaaacaaaataaaataaaataaataaaataaaatataaaataaaataaaataaaatataaaataaaataaaataaaaaataaaaataaaatataaaataaaataaataaaataataaaataaaataaaatataaaataaaatataaaataaaataaaataataaaataaaataagccagatgtggggttgtgcgcctgcagtcccagctactggggagtctgagctgagaggatcgcttgagcctgggaggttgaggctgcagtgagccatgagccatggtcgtgccactgtactccagcctgggcaacagaatgagaatctgtctcaaaaaataattttagaaaagggtggcaaaggctgtatggcctttgggaacagtctcattgctattcaccttgatcatgtcttccacctgcacaattcccactgcctttcccaccggcactccccttaaccctgactgcaaaaaattaatgaatgaattaattaaaaattaatacattataatcaatatagtctcactttataacactatcattaccaccttcattatctgttcctgccactatttttcacctggacaaaacacaaagacgtcaatcaagcaacaaaaaactccaaaaaaaccacacaaaaagcaaaagtacccgtaccccaactcagtagtctgaaaacccttccggcatttttcagtggactacagagcgatattgggcataccaattggtgtttccttttctaagttcagaagacaaatagaaatgtatgagccacagtgcttagtttttccatattgtggctctcatttttccagcgggatgcagagaaagtagttcttgtctgtcacctagtggacaaaaatggatttgcgccttgccactatgctctggtagctaaacttcagaaaccgcattgattcaaataaagattgttggattctatgagatgattctactttccgagcttcagagctccacaggttgaaaaaaaacaagatgatataatgctgaagacttgttgcaaaacagaacaggagttgatgcaaaatcaagatgggaagaaaaccacacttacagaaccacgtaataaatagctgtgcttggtgagggaatattattgtcattcatatgagtcaattgcaatcagaatactatgtggagcaatggctttaaatggccccatcctccaataaagcaaagcaaacaagaacgtattgctgactttcaaatgagcagaagttcttgtaatccccctgctaaaaaatttaaatgaactttaacccaactctttcccttgtatctagtaagtcatctagtcttaccagtttttttcttactgctactaagagtgagcaatagatgcttttccatatcagtttccatcttagctctgaccagactacacactgtcattagattcatcttccttaaacttgtcactattttttgaaaataccctagaactcaatttccctttctttccaaatacctcctccatctgatttcactgttactttaatccagtgtcatcctacccttacattttcatttccctggcccattgaagaagtgttgctcattgcagcctttgagtcttcagatggggtcctgtccttccctccctttgccagatgaagccttttcatcctgtaggatccagcccagctgttgcccctccatgtcactctcccttgtctgagtaatcctatgagggttataggttatattctataactgtgtgcttgtgcaaatacttgtcaaatggtttactattgatacacaggcttcagtctcatcttatccaaaatctattgggaaatattccaggccagataccatttcttatcccttttcaagccctcatcggggtctacatgtttgggagcactgtgagctcagtaagatacttgtcgattggttttctttatcagctcataattctgcaaggaagatggagctggtattgtaattcctgatttacaaacgaggacgctgaagcccagagcattttcaagacttgttcttgggaatggcagtgccaggacaggagctctgggtatttcctccttgtctagtccccttcctggtgcaccccacggtcatcatactgatagagtgatgcactaagcctgtatttattttcagatcgatttctagataacgagcacaagctcatattgtgaggagcagctagacaacagatgataatcagggtgtgtgcttatgcagcctgggtggcaatttcagttctttctgggtggcgatgccacactttcagcccacacccatttgtcctttttgaaaaccacaaacgagtgcttgggcatgtatgacattctccggcacagccctctgcactcatccaaatacctgaactggcttgtttactcctttaaaccacagtggctccaactgcttcctgccctcctagcctgctggaaggtctcctgtggttttggagctcacaggcacatgaggaataattaaaaaccactgccatgcgaaagggtgttttaacgagttgtcagtgaatgaccggagtcgggaagaatttctaggtagttcctcctctggccacaggatggattcattttccatctggaattgcaccatgaagcctccttggatgcttttgttcttccatgcctggcttgggccctgaggcttgggtgtgctgggcaggagcacagggtagtaaaatgaaaatatcatgtctacactcagggagttcagagggatggccttgatgaaatcagtccattaaatacctagaaaatagatgttaacaagattgttatgcaatgctactgatttagaatgatcgtgtgtattaatcaaacaaaagcagtagagagaggcataaattgattgtttaaggaaaatctaaatgcatagttgtaacaagtgacttttattttttctttctgctttgagacagggtcttgctctgtcgcccaggctagagtacagtgtctctatcacagttcactgtagcctttatctccttggctcaggtgatcctcctgcctcagcctcctgagtagctgggactacaggtgtgcaccaccacacctggttgattttgtactttttgtagaggtgggagtctcactttgttgtccaggcttgtctcaaactcttgggctcaagctagcctcctgactcgacctcccaaagtgctgggattataagccagccagaaatgacttttataattgcacctagaagtgtcatgaaatgcaatattagtacttctattttatgataatactattgacatataaagaagattgattttaaaatttacaagaaaaaaaaaaccccattaaaaagtgggcaaaggacatgaacagacactcctcaaaagaagacatacatacggcaaaaacatatgagaaaaagctcaacatcactgatcattagagaaacgcaaattgaaaccacaataagataccatctcatgccagtcagagtggc

SEQ ID NO: 53942 - DNA, 3049 bp, Homo sapiens
cagtggcgcgatctgagctcactgcaagctccgcctcccaggttcacgccattctcctacctcagcctcccaggtagctgcgactacaggtgcccaccaccacgcccggctaatttttttgtatttttagtagacacagggtttcaccatgttagccaggacggtctggaactcctgacctcaagtgatccacctgcctaggcctcccaaagtgctgggattacaggcgtgagccaccgcgtggcctgagtttcattgaaaaagaccacgtgtgcacagtgcctggggcacgtgtggtcctcagttcccgagatttccctttctacaagagcagtgaccaaattttaggcctctccttaaggcaccttccaagatgcaagtccccacctggtggccagtcaggccacatggaagtgcatgagggtggggacacaaaagtatcctacacttgcaactctttattttcactttctgcacttttttctttcatcttctcttttttctctggttctctcctttctcctgctagctcaattttccctccccaggtttttggaacccagagatctggctttctactgtttcactttgtgcccttagaaaggtcccttcacccccttggggctctctcctcttgaggagagggaggaagttggattacagtttaggaagatgtgattggggctgatctagttgaaatgatgaccgagggcttggaattccctccaaatgctctagccagcccacccagggtgctttctttttgatggggtcccagggacttctcagcacttccacaccaccaaactctctgattgctgagtcggctctagtaagtatttttctttttctcttctgcccacacttggcagtgtggggacagaaggaaagaagctggcgatcccatgccaagctgctgaggcagtcttttctctaaagtggtcatggagtgtgtgtcatcctctgcaaggcatgtatctgccaatgcaggggtgaggcctcggccacctccaccctctgccggagcattcaaacgtctccaactacagccattcccctgaatggctgcagaggtcaatgaagtaacgtctgaaaatgcttgtgggatctttgggtttccaaagcattcttctttctaactctggaataaggctcttccttaaaaatagaaagccatctgtggggtgaattttaatatactgtgcacaataatcccatcctcatgctgtggttgtgtccacagtcctggggcagggccaacatgtgaccacttaaattatttatcaacaaatttttctcctcacgtccacatggatgttgaaatggttttctaattcatttttaaaatatgctctgggttcatgaccccagcttcggggaatcatgacatcctcatcacttgacagtgccagcaatcagtcagctccaaagagcatgtgtacttcaaaaagactgactcagcccagccttagaggattctcctttggggtgcaggactgggttcaaactgagttttccaacactgggcgagtttcagcaaagtagggctgggataatggtgcggctcttgtgattaatctactccaggaaaggttgaatgagaagttaatgtggatcccccagaagctgcagagggttaagagcttttattttagcgagaatttaagatgcgaggcctgtcaggtgcacgtgccatcaaaaacatgacctaatcctattgattttcttttaatgttcacagactgggagccccgggagggaggcagacagcaccaatgcattgcgcaaaatgtctagttttcaaaccatgtaaacttggtctgggaaaagagtgggctctgtggaatgttgctccttcagcagctgatgtgaagatgcttatggtgaccacaagccaagcctctgcaggaggttataggagccccagctcatattaggaattctaaattcagataaagctggattattagattgaactctatgaaattgttcaatattcaaccatcttttacctataaaaatggctgtttcatatggtttgacatgctgtgtatgcttgagacttgactgtgaccttcttatctcatgatggcaagaaaaccccatgtggaatttaggtgaaatcctacttgtcctccaaggccaggtcttgggggattcatagagcatcctaggctaacatgactttaggcccgtgaagccactcatggtttctcacaacccaatcaaaactaatctccccaggccagatgtggcagctcactcctttactctcagcattttgggaggccgaggcaggaggattgcttgaggccaggctttcaagaccagtctgggcaacatagcgagatcctatctttctataaataaataagaattagtcttcctcaccctggcgtattgacgatagttagctaacactatttatgaaatagatacctttagttatagctattgctgttcctgaatgccctttaaaatgacaaatactttgaggatgtgagccgtcatggatatctctgtatctcccggtgccttttcacagagtaggcattcttcattgttattgcttaactacctgaatcttgatacttttactcagtagcaaaacggatcatgaccagttggctcttttcagaatttataatggggctatagcttttccttcatagacctttaaaaaattgattacagtcctttaaattggagttaaaagattgttatctttttcttctcatgaaccatataacatttctatgagcacaaatgcgttttgtgagtgttgatgtgaattcagagaatgctttagatcagcagtccccaaacttttgggcaccagggaccagttttgtggaagacaatttttccacagagagggacaggaaatggtattgggatgattcaagcacatttcatttatcattatactttctttctttttttttttttgagacggagtctcgctttgtcaccaggctggagtgcagtagcgtgatctcggctcactgcaaccttcgtttcctgggttcaagcgattctcctgcctcag

SEQ ID NO: 53943 - DNA, 4811 bp, Homo sapiens
ttcatccatgtccctgcaaaggacatgaactcattcttttttatggctgtccattattccatggtgtatgtgtgccacattttatttatccagtctatgattgatggacatttaggttggttccaagtctttgttattgtgaacagtgctgcagtaaacataagtgtgcatgtatctttacagtagaatgatttataatcctttgggtatatacccagtgataggatttctgggtcaaatggtatttctggttctagatccttaactcacttttaacagagctatgggggctttcagctcagcagtggctcttcttagcaggggactgaatgtgttccctttgccaaagcctactttgctttgcttatgtgatgctacttacaggatttccagattgtttttggtctcttcaaccatttgctttctttggacaggacaatgcccagtgatgaagatgaagctcttgttcttgacatctaatcccacaccatgactaataaacatggcatgctgcaatgggcattaatttatgggtaacagaagcagatccaagccttttagctaattaaataaaaatgcaccatacagcaaccatcctgcctgcttgggtgtaaaatagagaggagaaagatggcatgctggtcattgagagataattacctgcaatttcagagctggaatctagtgacaacataagaaaaataataacctctctggctgttaggattctcagttctagctgcgagcaaggagcaaaggcacccacagacttgccaaacctatgtcaggaatgacgaatagaaggcagaaatccacatccccaggtggtaaaattgttatccaccttcgtcacctctttcctaatggaggaagtgaggacaggcagccttggagtcctacttgaatgaggcctggaccttatgcagggtaataaaaaccaacacgtggggcctgtgctgtaaggtggcagagggcgatgactcaccccactcatgcaggttgagtcatttcaaggcagagttgtgccagttcagtacccagtaatattttccagtcgacgagtatcagtgaacaggagataaccagtcatttctagattctgctcagagtcccagcttagaggctccaccagctcaaagagacgggatggcaaaacagccaccttaatttccagatcatctgccagctcatctgccagctgacacacagcccatggctccactattgccagtgctgtagctgcaccagaccaatctggttcaacttttatgtaacaaagttgtgatttgtttttcagttgcccgggactcccaggttgaagatcatgagcatgccctgatgagccaaggcatgcaaccacaggggaacctaagtgcttggactgaggagtggggactgaaataagaagcggacactgcagggcaggatcaggatccaatcagatcgagccctggcatcacctcatggcaggatctagtcagatcgtggcttttgacatcacttcattgtgaaatccaatcagatcacaccttattaccctatccttataaaaccggacctagcccccagctcgaggaggcactgctttgggagttatcccaggtgttcttgttactagttgcaaggaataaaatcctcttgctaaatcctccttggttgtgcagatgttggcatggatgtggagagaagggaacacttacgctttgttggtgaggatgtaaattagctcaactctgtgataaacagtatggagagttttcaaagaactaaaaatagaacttctactcaacccagcaatcctatgagtgcatgagtgggtatctacccaaaggaaaagagaccatataaataatatacctatttattgcagcactattcacaatagcaaagtcacggaaccaagctgagtgcccatcagtggttgactggataaagaaaatgtggtctatatacaccatggaatactaatgaaaataatgatttcattctttttatggttgtgtagtattccatggtttatatataccattcttgcggcaatgtggatggagctggaggccatcatcctgagtgaactaactgaaaaacagaaaaccaaataccgcgtgttctcacttataagtgggaactaaacaatgggtacgaatgatcataaagatggaaataatagacactgggggctccaaaagcagagaggatggaagaaggacaagggttgagcacttacctgttgggtacaatgttcactactggtatattggggacactggaagcccaatccccactggtatgtaatatacccatgtaacaaacaaatatatgtacctcctgaatctaaaataatcaatcaatcaatcaatcctccttggttgtggtcattgggttgatatctgccaagtaaccactgagctaaaattgggagcttttacatattcggtatgtttcttttttcttttcttttcttttttttttttttttttttgatatggagtctcactctgtcacccaggctgaagtgcagtgacatgatcttggctcaccacaacctccacctcccaggttcaagtgattctcctgcctcagcctctcaagtagctgggattacaggcacctgccaccacgcccagctaatttttgtatttttagtagaggtggggttttatcatgttggtcaggctggtctcaaactcctgatctcaagtgatccatctgccttgacctcccaaagtgctgggattactggcataagccaccatgcctggcccattttcagtgcatttctgtgtttaaaggatatcacataactgaaataacattttttataaaccatgcaacttggctctactgggtgaagctcacgttagaggccaactttcaacatatttaaactatggaagcccccaaaagagcaacttacgttaaaggtgacttatagcagaggtagctaggctcagtccagactggacagtgctctcaaagtttatgtgcagaggcggcagtacccaggcaagtctttgaaagtcccggcttagaacttggcacaatcaccttagagattgttcactgctacaaatgcaggcattgatgcaggggtggggcagaaagacgggggagtgggagccttgctgctaattggtttagtctaagatcaagcctaacctcccttggcccacacaactgttactattaagtgagactgaaactaatcaaaactatttacacagatgtgccaagcctgggagatgaagcaattatgtgcccagacccatgttgatgagtaatttgtggcaaactcctctgtataagagggggtcatgtagtagcaaagtggggttgttttgaagagaaagcctgctgatgtgaaacgaagagctgacttggattccacatgataggagacaggtatatgcttggagtgcagcctctccaggggaaactgagggagggatgggggactaagtgatctgcaactcactcatgaaaacccatttcaacccaaaacagacctaacctcctccaccttccattaagtaatttatcagggttttaaaagaagaatccatatttcttacacttcctttctgttggacaatgcagtgatatgaccaagggcttggggtgtggattgcaggggagggaaggttaattagcaacacagattaattagcaaccagtcagggagacggatctgtgctctgattcatctaacaaaaactctggaggtggctatgcttaatatgctcctttgcagatgtcagatctataagtgagagaagctaagtgagtcaccacaggtcacaaagctagcaagaggagacagattgtaagatcataaaccaaagtcccaggcctccaaaccccatgctctttcctacaaaatatactatcttccttctgaaaattatgctcatcatagggacgaactttgtttcccaggattagttgggctcacgtacatgctaccatattgactcgggttctctagggtactggaccagaatgtttgttccctcaaaacttgaggtcctagggccatctaggaggagcggtgcaagaggctttgggatcgattgccaggctgtgggcccctgggggtgaggggcctgaacaaaacgtgaaatacggctccactttctgcatcagcagaggggaggctgggcgtgcctgtgcccccagaagtgaacccttatgtccagagcagtgaggaatgttgaagtcaggaattcccccttccttccctcaagccaggtcctcagaagcccggatgaaactccttgataggagatgttttgaaggaacctgggtaaagtgcttctgtggactgcaagatctaacaagtctcagagtcagacagtctgaggagtagacccatagatgccgagtgcatactttctctgggcgacactttgcatttacggaacaggtgctgggagccaggaggtgagaactcccagagactcagtccctgccctcaaggaattcccagtctaatcagggacatgagcttgtaaacctggctcctccccgacccggccctcagcccaaccctgagtcatcctgatgctcactcaggattggaggtcctggaagtccacagtatgggtgggagaagaggaggagccgctcactcatgcagagggaaggagagaagagtgaagtaatgaatgcatgcattcattcagcagctgtttaggagagcctttcccgtgtccatcactctcctgggtgctgcgactatggtagagaacaacacaaatttaaataaaaagtccctgttatgatggaggtgatgggacttgatctctttgcat

SEQ ID NO: 53944 - DNA, 2586 bp, Homo sapiens
taatggagatctccagggacacggatgagtgaaaagaggttttatgcattgatgaaagcctttaaaatccccaaatctgttcagaactagtgaaagatggagaggttggaaactagaaattggcttttggcacctctgagtctctccagctgagcccagccaccaaacacccttatggcttctcccagatcagccttgagtgatgaagccaacagggagggagctgctgatggaggagggagagggatgggagggggagaaagaggaaaggaaggaggggctgggggacactgacaaaaccccggctaggctgctcccaggggctgaggctctggaaaacaaatttggaaacattatcccatatcccacaagatctccattgaagacattaagcccagaggcccaaagggacccattgaagagacaaggccagagccagggatcttgaaggctcagccgttccggtgaaatcaaaacagcatgagccaaacagctcatgaagagataagggattagaccacgctcaaaaccatgtgaagatgaggaacttgctaacattcttgagttccccatagaaaatgggcttgttcaactcaggaatgaactgtgaaatgctgaattctactctggggtctctgatgaagcataaaaagccaaaaaattcttccacaacccatttgggggaaatggcacatgaactcactctctactgctccagggctggctacacagcagaccccacagccctgcatttgtttgtgattgcacccgagttgtgagttcaggagatttttaaatccactgataaaatgagttcttattggaattcagaaattaaacatgaaccagggggtatttttattgtacttttccctttactggtaaagtcttttcatcttgaattggatcccaatttttcactgggaagctgccatccagccttgcaggaaaaaaaaaaaaaattaaaaattaagcaaagaaagcttgaggcaactataagtagtggagtataagtaataccatcagaaaggaagttgtgggtggacatggggcaggttccttgctgttaggggatgcatgggtcaaggactgggttgggggcactcatactttatgctgaacattcaaaaaatcactacctggaacaccacggttcacaccaaggttccccagccagcgcattatgaacataatctgagctccccagaagactgtctcaattttttccaagtatgttttcagttagaaagtgaattttaatactaggcagagggcaaggccttttagggatctctcagaatcctgaaatgctgaaaagccacccacagaagttcatcatccaccccctgcagcagtgactcatacttatgtgttaacatgagctcgtgtgctctgctttcatgttctcaggagtcagaaatgactctataagatgtggcattattagccgggagggtttggtggcatggggcccgtcagaaccagggagatgggaagattcttatcaatggagagctcaagagacaagttctggacccagatccctcagggctgtggggaagggactgggcactgggaaacaggaggccaagagcaggtgctcccctgaaactctcattttcttagcccttcatctggtactggagcccctgggggtcagatatctgtctgctccctctaaattggttacgaaatggccaggacatcaacgtgatctaccccaagaagtccacttgatgatgctccagcttcactatacgagatcccctctggagtgaagcgcagagatccaggctgctgacttatgtttcttccttccctcttgtctttcatgagtgctgcccttgtcactgaggtgttgaggaggagggataagaaggcggagtttctggccgggcgcggtggctcatgcctgtaatcccagcactttgggaggccgaggcaggcggatcacttggggtcaggagttcgagaccagcctggccaacatggtaaaccccgtctctactaaaaggtgcaaaaaatagccaggcgttgtggtgggcacctgtaatcccagctactggggggagtggctgagataggagaattgcttaaacttgggaggtggaggttgcagtgagccgagactgcaccactgcactccagcctaggcgacaagagtgaaactccgtctcaaaaaaaaaaaggctggggggagttcctactcttccttcaccctcagactaaccaccacccaatggggttcaaagtttgtgagtgttgtccttctgagaatacacactgttcatctcttggtgtgaggctaattgaacagaaacacaatggttaatattaatcagaaaattgggaaacgaacagagaagaaaatactggtgaaagtggaaggtttgggacagagtagaaaaaatgaattgaattagttagggtaattttagatgctataaaaatataaactgttaaattttaatggcttcacacactagaaatttatttctaggccgggcgctgtggctcacacctgtaatcccagcactttgggaggctgaggcaggcggatcacgaggtcaggagatcgagaccatt

SEQ ID NO: 53945 - DNA, 1823 bp, Homo sapiens
gagctgagatcgcgccactgtgctccggcttgggcgaaagagcgagactccgtctcaaaaaaaaaaaaaaagaaatttatttctagctgttgagcagtttgatgcaggtatttttggttgagccaagacttgccacagtgtagcaatcaggatacctggttctctctctctctctctttttttttttttttgagatggagtcttgttctgttgtccaggctggagtgcagtggcgtgatcttggcctcctcctcccaggttcaagtgattctcctgcttcagcctcctgaatagctgggactacaggcgtgtgacaccacgcccagctaattttttttatttttagtagagatgtggtttcactgtgttagccaggatggtctccatctcctgacctcgtgatctgcctgccttggcctcccaaagtgctggggttataggtgtgagccactgcacctggctgggatacttggttcttttcatcttgtggtccgacggccttggagaaggagaaggtgtggagaaggcatccccagttcctgaatgcctggactggaagtgacaaagatcatttccacccacattcccattccagttctttattgatgtgtaacaaatcaccccaaacttggtgcattacagcagtgacaacatctgttttccccatgaatttgcaatttgggcagggcttggtggggactgcttgcttctcttccacttggtgtctcccaggattgctcaaaggcaggggtggaggtattggacaactcaccagcccctccccttcacctcaaaggctggtgtctctgtgtacgtcaactgtggccatagccaggacacccacacttggacttttcatgtggctgctgggctgcctcacaccttggtggctgggttccaagagtgtcccaacaggcctggacggaagctgtatcaccttttgtgacttggcctgataagcctcacaagcttacccagattgaaagggagagaacatagagaccatggcttattacaggagtgcaacatcatattatgaaacaatatgaagtgggagttactggtgtggtcgactatagggaatctgtcacaattcctttggtgagaactagtcatatgaggccacccagatgcaagatgagttagaccgtatagccgtagctgggcagccacttcagagtggcaatgatggcaggaaagcctattttggttgtagcgagtgacctctgactcatgcaataaggagctttttcacttcatgaatgggtccattgtaacgctcactggtcaaatggagacatctgcaaagacactttgtagggtgctggcagagataccagcaccacgctgtgagctcttgagtctctgtttgaagggaaagtgtgaccacatggttcccagacagtgttctgatgttccgacactctccacttttaacacatcccaatggaagtggaccaggccaggccgaccttaggctcagcttgacagctgcagaaatgtagcaaggcagacagatactctgtcatgggctctgtcctcaccagccattttcttgtcctctgatcctctcatttatagagcttctctgacttcctgtggcagtaaaacatttcagtgataaaagtaacactctagaacattcattcatccatttagttaacaaatttaatgagcacttactatgtgccaggcacagtgctgggcactagagagacactgcgaattcgaccagaaggacagtgttaccatgccgcaggtgctgtgcctggtttcacctgcagttcagcgtggggtatgctgtaatgcataaagacaaggtg

SEQ ID NO: 53946 - DNA, 3856 bp, Homo sapiens
acaaatacataatttaattataatatgatgctgctataaatagcgcctgtacaaggccctctggagacacagatggtggctgtctctctctctctcacttgcggggacaaagaagaatctcattgaatggaaaatttgagctgcagctccaagaatgagtagaaaatcccaagggaatggggagggagtattccaggcattttccagaagtatggcaacgtgacaaaatacgaagttttagaggaatggcaaatactcaccaaccattgaataatgggtcaaacacaaaacaagcagactactcagagcttagatattcagatttcagtttttatgcctgtcggcatcactaatgccacagaagcctcaaattcccctggacttggagaatggaagggatcacctgaaaatcgctggaaaacttaggactctgtcctccttctctaccaatgcaaagggctattcgccttactagcaatctctggggaaactttaaacaatgtatttgcaaatgatacttatttaaaatctttaaactgcaagacactattgttggaaatcagattgtcatcttctgaaagattcacttcttacttgcctctcttctgcaagagtgaagggtcgggaagagacttccgaagtcactgatgaacaaaataaaccagggcttggaaagggcccagagaacatctgtttagtctttttcttttggtagtgacaaaaatggtgtctaagacttaatcatcaccccttcctaaaatacacacatatgggaagcaatggtggtctttctgctctgggggtggttcacagctttcagtttggagctgaagactgccaccacacacaccattctcattaaagcagaatgacttgcttgccttcaaggatgatatttccatttctatgctttagtgcatctttctgtagtagcagagaatggtgtattttcaaatatgctccctgttcatgtatcacttaatgctctcacaagaccgtgatcagctggcacaaatggaaagagttcagttacttgcccagaaatctccaatagacactcatcaagaccagggatcgcacccaggtctctatttttggcaggcacattttctgccactccatagccctttttgggatagccacttttgttgcaaattcatatcctgtgagagctccagggccaacactccattaaaaacacaagagctgtcaggttggccctgtgacatttctctctctctctctctctctctctctctctgtctctctctctcatctactttttggagacaatgtttaaggagagatgttcaacccaagacaatgcctccaggactttgctttctcaccaccaaccacctgaccccagagagaaatgcccttctgacccctactggttatgatggggcatacaccaagtgcagagaattctttccaagctgatttcagaatattctccaaaacactctccaacaatgattggacaagaaggttaaacatagagaacgttgactcagtcctgattaaacaggctgaaaagacagaaacaaataatcaccacgtatgtagcaataatggagcaacaaagtaaatatgaaggcagaggcttgctatcaatatttaactagaggattaatatacagagaatgcacttccgagaataccaaggtgaccaggggggcagaaatgactcaattatgatacactgtcacagtcagggaagaagaaagtgttgtctgcattgtttaacttagtgttataaacgcacaactgaggcaatcacggtgattaacatggagatgatgatgagtgataacgccagactcattagcatgaagcatttgttgatagaaacggatagggaacaagttgtaaattctggccaagaatttctccctaagagattcctgtacatcgcacatcgcagtcttgcatatcgagactgttctaaggcttttttttttttttttggtcctttatttgctcaatgagaccaaatgtctcaagaatcacttctttacatcttggggtaaagtttctaaccataatgtgccctgatattcatttgtacaaacaaatatgtttcttagtctattgctattcaaccatttcttagaatggggacattatcaaagtattgaatatgcaaatttttccatgagtaagtaaatttggggaattctggattaaagtgtactttagcatatcaaaatggctttagtgtggtgagatacactgagattcttcaagagggatgtagttgtatatggcacttcccataaacattagtctataccatcgtctctatagaaatatcttaaataaccaagattccttaggaggctcttgaggaacggcttttctttcctgattcttttcttcaatcagtccagtccattgctgggtttcctctacaccatcttgcccacacttcctttatgtatggagtgagatggtcaccagctggttttctgaaaatcttcataccagaggaggtgaaaatgctctgtagtatcatccagagaccctaccctcgagtgtgctaggaaggaccatatactcctgagtcttctctgacagcaatgatccccaccaatgtcttgttctctttcctattagaacagcatgcagacacattggcaccaaatacctaaaagtcattgctcctcaacaggaaatgacacattttcagtcccactgggattgcatcatattccgatactatttcttgaagagctaatgctatgtgaacctctaagattacgggaccttatatgttcccatctccatttccatgatttaatattgcaagattccggcattttccttcttgtcccctctgaaatcctattcttccctccactctgtgtctcactaacaactcctcctggagctgcacagaaatagagaccattagtctttgagacaaggctgagtacaaaaaagagttgaaacaagtgacagtgaatttcaggagtcaggtttctctgcaaggagccaggtttcatttctgccttggccattatgtgtttatttgggtgaacttggtcaggtggttaccacctttgttttttctctgtcaaaaagggatcatggcacccaagcagcatattaaaatgagcaaaagccacaaaaatgtaaggccacaaaatggtgaaaaatgactgccacagacattcataattttttaaaattttatttcaaggttactgcattgattctttctctgatagtgaaaaacctggtacgggtcaatttttttataataaacttcaggggatggtacatattcaagtggaaatgaatggacggcatggctgcgagtcagttagtcaagctgtatatattcagattgaaatgggcaactgtctaattgcacttacggagagagggggcaccaaggcacctttacctcttccttgcgtcttggtaagtgtttgcttgaccttggcttaggaaggagcctgccctgccgtaggacagtaagaattagctcaaaacgattcttccaaggaagagccacagagaagagatcaatgaagaatattaaagatctgtaatcttgctttgccttaaataagcctatgggtttgccttaggacaagactaaaaaaaaaaaaaaaagaagctgatcccactactgggtatctacccagaggaaaagaagtcattaatgcccatcaatcaatgagtggatacagaaaatgtggtagatagatagatatagatatataaacagatataccatagaatactactcagccgtaaagaggaatgaaatgatggcatttgcagcaactggatgggattggagactattattctgagtgaggtaactcaggaatggaaaaccaag

SEQ ID NO: 53947 - DNA, 1543 bp, Homo sapiens
cttttttttaatgttcaaaaggcttccttaggaatctgaaaagacagcgtgaatgaattcacgggaatgacttgccttgtgtgtgccctacaaggtgctgttggactatggtgtttttaaaacccacagcctgacattttacacagcctctttttgaaaggagcttaacttttaagtatgggaaaaatgaaatcattgctacttattccaagtatgactgttgttttggtaaacataagctaacaataaaaaaaattctaaagatgaaattctcgggcttctgccccctcctttcgtcctcctataaagaacgaagcccgcagatgcagctgttttctccagtgacgaagggcctttaggcttgtcactgactttaggcagtccacgaggtggcagcattgaaacaaacaggaaggcgcctggggcatctggaccgttgaacttaaaaataagcctcaaaagaatccctatgaacaataagggaagtctggtattagatgctgtattagggtcaggccaagaccttatctcattttgagcttctttaacttgcttgtgtttattaacaaagtatctcgccttctgctctgagccttgtctccatggcccctcccccaatggcaggaggaattttaatgggaagatttattgaatagataagaatgatttactttgcatttttagtttataaggaacccttttctagagctaatgtcaaattttggaaggaatccaccataaaaactgtccaaatggagcagtttggattctcccaatgataatgtgacctcccaaagggtagacagagccagtttgggaaagtaaactagtaagctatgtgatgtgtaaaatgtgagtactttcatttagtgcaaacaggctatatttcacagctgtagtgtcatcggagagatatatttcatgtctagtctatcatagccatgaaataggacttcttaaggcatgggaaaccctctccaaaatttaccactcttttccgcagcaagattgaattatgtagatgaagtacagtcaactgaacggtgactgaatgattgagcaaccttggatgccaacgcccatgaccctgaaatgtactgttgcataatctcatgttagaaaatgttaatattggaacatgttaatgtgtgtgtggttttgatttttctccttaaatgtactttataaaacatgcacattcaggataaagaaagccaccccagcacacacagttctgcctgtatttactttgttaatacattacatttattgtttatagaacagaaaatgacatcatccattcttttggctcttcatattctgatgataccataaaatgtaggaacttggatatttttgaaatgaccaggacatggaaccgctttgcctgaaaaaatgtttcaggcacttctcgcttcagagaatgacagtctgcctttaccttccaatgtccttccccatcctgtacatttaaccaggtgaaccgctctaagtttttgtattttactgctcttttatcttcttgtcttgatcatgtaacttg

SEQ ID NO: 53948 - DNA, 2408 bp, Homo sapiens
taaggatcccatcacttgctggcagagcattaaccagcttttatgcatctgattacataaaagtatataaatattatatgcccatggagtttattatattgatgagaatcagcaagatgaaatagtaagactctgagttgagtctataatagcaaaatggaattatgatgaaggttttgaggtctcattgactgctgcttgtgatgatgcttgaagaatctggagcctgcagaacagtgtggatcaaagtatcaggtgactcaggccactgggtcaactcttcagagttagacctgacccctggcttgaagcatgctcaagtccccatgcaatattctgggcattgacttagccagaaggtgacaatcaacagaagtccttccaggaaggtcagacagcccattacccacaaacagagcacttggagtccagattcatgactcagacaatggagaaacaggaaagcaagtcaatttgaaaagaactctgcactgactgtgaaatgcaaaccggacctgaccacccctgatcagtagacccgcgtggtttggattgaacttgttcagatggtgatagcaacgggtcctactgtttgcaatttgcatacctgccctctgaccacagtagactctgtgacaggaccgactggcccctctgagaagccatcccttgagtgaccttgagattgtgcacaaatcaaatgtgttaacaaaaccgctcctgctctgacaatattgaccttcaacattcagggaagattacctagatttggaatctgatagaactttccattttctacacagctgttgttcacttttattttttttaacgatccctaccccctttcatagtcaaggagaagagagatgagatgaaacaaattagctggcgacttcatagtggctttaattacctctctggtaagagaagaaactgcaacaacagctaaaatgtttgttatatgatcagaacttcatttgttcacctcacccctcttccctatcccagaaaggacatagagaaccaactggtggtcactacccttcatccacagaaaatcttcctgagggctgagaactttcaggaaaggtacaaagaaaaggaaaggcacggcttttttcatgagataccttcagctatgggaggtgcctgcgcagtctttgaaagccacattttacaacttaagatgtgtgtaggacgacaccattttctgaatttaggcagtgactcttctgtttcatctcttggttttgtagagggtgtctgggctgtgtggtagcaggaattttgtcaacctgaacatgctacagggcagctgggggttaagtttgaccaaagagaagtttgttttgcagtttaatcaggtcaacagtgacagcgtcctttaaggaagcatactaattagggcggccctttctactttctgcctagctgggtagtgtcataccatagaggaaacattgatatacaccacacgccccattaataaatgactgcagaagccaagactgagtgagcttcaatagaggaaatgggagaaagctggaaaactgacctgttcaccttagtctaatgattaactttaaagtatttaaaacctctgattgcttatactgactgtttcccttcatgtacgtctgccgggaagaatttcacaggatactaacaaaacacaaaggccagtgagaggaaggccaccgtttaaccgtgactggcccctgatcgacagcaaaccgagggctttaaaagtcgttacgcttttctattaataaaaggatgaggaggtgctgttcccaagggtgtgcttctctctgtgcacaattataaactctggtttcctgaaccccgttttgtggcacgcccactggaaacactgttgtaaaactgccaactccatggcaggcaaaactgacaaactttgcctgcctgggttttgcaggattgggatgaaaataaatagtcgggctgtgctgcctgtgagatttccttctcctgtagtttgcaaacacaatccatgtcctagatgtgctgcgtttaaacaaagtatgttactccgttccttcagtggagagctgggattgtcaccatttggcaattactgatggagaaggaaatctcactccctgctgcatatacatgtggatgaaaggaaagcaatatttatggctcatgcttggagaccagatgctgtgtggcatctctccttctaggactttcagagaaactgaaagcgaggagcgcagccgcggagagaagagaggtacatggaatctgtcacatttcgtattttatttgatacctgattgtatggtgctgtctatgaccgtgggcttttctgtggccagcacagtggtgccacctgaaaaacaaaaacaggaacatgcaaaaataagaaaacagtagcgaat

SEQ ID NO: 53949 - DNA, 1208 bp, Homo sapiens
gcccagctaatttttgtatttttaatggagatggggttgtgtcctgttggccaggcagttctcctgacctcaagtgatctgcccaccttggcctccccgctgggattacaagtgtgagccaccaggcccggcccgatgaatattttccttctatctggtatctcatggcaaaattccttcggagagcaaagataagtgtcctctcccactgcaaacacacacactcacacatacacaaatgcacacaaacacttttgtatgggcctttatgtagtccaggagtctaggctgtgaagtgtttggctagtgacagaaggacaatgaaatcttccttgtaggtaaacttgaagttcatgatcatgcaccacactgctgaggtaattctgctaaaatgtgtggcttcactgcctctgggagtccaagcattcctgggaatgagacaaaacctcaacctgcatgagtcagcgagacttctctcttgagtctagcagcacacgctgcagctcctatcctctgtggatgtctacatttaaaataaaacctgtcaatgaaatggcacagaaactgtggatgctttctttaaagattcacgcttctgttgaaatcacactgttctcgcctcaaacatttaaggagaagttcatgagttcagagcatgatcttctaatgatgagcagttgtgtttctaatatccagtccagtgtggagagaacttcatgggtggctattattcattcataacacaaataagtgctaggtgcttgggtgaaagggagtgaaggtgataagattcctgccctctagacagtgagggaaagagtcaagtaaatagtaaatcacaatacagagtgaacagattgcattaaaatgaatcaatgcattctggtacaacagagagaaaactggggtgatgcaggcagcatatggtggaaaaaagcacagaccccagaagtagctttgtagctttgacctgcaggagtgacctggataatgttaagcaagttacttagtccattcaagtcttagtttcctctactctcaaacagaaatgccaatgcttacctcatttagtcattctgcatggctactatgaagatcacgatgatgcatatgtacacatattaaccatgagaatgtgacctaatatttttttacttagtcttttgggtaattggagtgggtgcctctgtgtgtgtgtgtgtgtgtgt

SEQ ID NO: 53950 - DNA, 3241 bp, Homo sapiens
aacatttcatgcacataattcatttatttgtaacgtgcattgtttattgtttccttctacctggcagaagagaaactccaaagggcagcatctttcattgttttgcttaccctgtggctaggatggtgcctggtacatgacagatgctcaggaaatattttttaggtatatgaatgcataggtcaatgactataaatgatgtattgaggtgactcaaattccctaagatgaaaaatctgtagagaatgtacagggaacctgtctaaattaggaatgcccaaacattctcgttccttttccaaatttttgttttgtagcataacggatgcatagtttagccttaaaattttattaagtactcaacctctcaggtccttggtctctgcatttataaaatgagtggtttgatgtaatggaattactaagagcccatcctcttacaatctgtgaattaatgatgagtagccaggtcagtggatgagcaaaatagtttagagagaaaaactatgtgtttgtctcaattatatcacaaaaatagctaaaagaaccttttgtaatctttcatggcctcagcttcttatctataaaatgaaggaattggactagataattactaaggtcttcttgagctcaaatatttcatcactgctctgaatatagagagttttgctttgttttccagtgtccttttgaggttttttttaatgattcatgtatcatgagacttgtaaaagaatactggtgcccttcctccagaaccttccctttttggggtgcttcctgtcattcttaccatcagggaatccatcccagatttctagccggtcgtagcgacagaacatcccccctggaggatttgagtcaggctccaggtcaaagctttcaaattccaggataatctctgacatctttggcacaaagacaatataagtgcattcaaggctgttgggatatttttcagggaatccgggggactttatcactccactaggtgttgtgtagttctgggaacattcaggacctatgagtagaagagaaaaaggagtaaagtgaaaatcccacttaaacaacttccccaagaaataacctgggtaaagacagaacatctttctaataaaagcccgccagtataaccactgttctaatcatgtattagtcagccttttcatattagtaaaatgggtatggaaagtcaagttcagatttattgtgttaaccttagctttccatttgtatggagcaatttaaagacttctgctgttgcagggaaaaatatgacaaatataaaatcatgtgggaacaatgaatgagtaagctgcagaaatctcaacagagccctagagaaataattatggccccttcaagcttaaacctttaaatcttgaggctgacagccctttattggtgaaatagaacatttataaaggcgagggagagaattcagtggaggcagtttgggtttcagattcctacaccagtgactcagtaactctgccagatgtgacctatgcctctttgacaaacgaaatgtgaaaggtaattcgtacatgtaccaagggtgagtgactcattctgagtggtgttgacacaggtgggccggtaaagtgtggctgttagtgagggcacgataaactgtgattacaggccatgatgccggaagtcacctgatatcaatgctgacatcctaaccttccccgaagtatcagacacagtatagtacgccattctaaaattgcatgttaatagatgtgtgtgtgtgtgtaatgcatatatttataatgtgtaattttaatgactgttcagtaccaccaggactttacaaattatggtgatttgtcattgaaattggtcaagagcatccatgcatatagtgcaggttgaccttatgcctgtatgaatgactccaatttcaattcatggtaaccagcatagggtggtattcactacacaattcaaaaactgcccttcttggccgggtgtgcacaatggctcatgcctgtaatgccagcactttgggaggctgaggtgggcggatcacctgaggtcaggagttcgagaccagcctggccaacatagggaaaccccagtctctactaaaaatagaaaaattagctgggcgtggtcgtgggcacctgtaatcccagctacccaagaggctgagacaggagaattgcttgaacccgggaggcagaggttgcagtgagccgagatcacaccactgcactccagcctgggtgacagagccagccagactccgcctcaaaaaacaaacaaacaaacaaacaaacaacaaccaaaaaaacccaaaactgccttctctaccaacatgagcacatcagctcagtccctgaataccacctgctgctatgatcttcaaatagctacacttaagacacttgtgaatcagagaagtctttatccttttgaatttcaggatcaaatctgggggtgttcagttcaacaactcttttcctgcatcattttctcacagtggcttgaaggcagacgtgatggggccccggcaatgacatgcaaggattcaattctaaataaggtgctttgttgagattgttcttaactaaacattctcccaaagtgccaggcaactagaggcgacttattagacatcaatagagattaaagttaactaactagcaggtctctagttttagtgattcaggtcaggaggctgaataccaacagagtgcatctggcagcctgttgagaaaacaaatcaatcctttcctcctcatgcacatatcggctatccatggatccatggcattgcagatgcagaagaattcttagatgggcccagtaaacctggtctgcagaggtctgacttatttgaaatacctctcaaaccttcttggacgtggctcacccttcaccatgagagctgcaaatgcttatctatttgattctggttcaaaagttggtaacgtggcaattcgccaggtcagttccaggtagagattatgacatgtgctgtatggtttataatcttagtttctaaattactctggtggcttctgagatgacagcgactatgctaatttgagtcatttatccacaaagaaaaaatatatatatacatacatgatattggggaccctttaggattttatatccacagtgtagaaacagttaccctggagacctccaaactcttccctggggaaaaaaccgctttggctacattcttgtaagccatggtttattagtatctgcatgaaacagc

SEQ ID NO: 53951 - DNA, 2245 bp, Homo sapiens
ggaaatacacagaggtattgttcatttctccatactttgggaaatgctttgcatgttaaaagaagacaaaagtgaaggaggaggaggagaaagaggaggaggaggggaggcaaggaggaaaaggaggaggaggaggaggaagaagaaagcattatgtttaaaatcctaactagcctttataatcaatgggatgtagctggaaagaacaccatctctgtattcattaaagccccacaagctagcatttatggagtaattccttttatctctactgcttcattgacaaggcaggtttgcatgtttcgccccacgctttcttataatttaactgtgatttgaactgttgactgtgtttggcctggcgacggtgcatccagctctgcaatataggctttttacttgaatcctgacatggtctgaatactaagtggccaaattctagctcacgttgccttccaagcacaaataagagaggtgggtgaggcattctgaaaaactaaggcatttctgttgaggatacgttcctctcaggtagcagagaactcagctaatatagtgccggtggattgcaacagggaaagaagctggtattttaattcacatatcctccaatagtaaatactaggcgctcctcttggcaaaagtagaagctatttttaaaagtatgtgtggggtggtgagtggggggtggggggtgggattagaatcccttcccagcaagaaataagtcattgcacagttaagtgccaattttaggaaattgaattattcaggaatactatagttacatttgtaaactggaaggctgctatcgttttagcacttcccttcaaagtactatccaacagggccccaaatagtatcgcaaatagcagctcctgtaaatattcaggagggtgtactgcgcacaagttgcagaggggagtattgccaaagaagttaaggaagcagcttgagtctccctctggagttgataccagctccactcgttaagtttcgcactggcaagcgtgctgccaggaatgcagctggtgtgccagcatccctccctagagactaaacgtgtcaccactgcaacgcacccagcctgcattggcctgaagcccaggatcctgagtttgcaaatttcgatcccgaagccggctgcagattgctctgttactgttgccagtgtggcaaacacggcattgctcgggatgtcgagatccccagtcacgacagcacagcagcccggcaaaggtgagaatgaaggcacctgtttggctctcattcactccctgtgttccagccgctggatgagagctgggaattacgtctgaggaatttaattcataaaagctagaggaggggtcagagagttgacccctctgtctgtctgggtccctgctctggaaaaagaaagctccagttcacaaggaggctatgaatgggtccaaagggcaccaccgttctatgcagggtctttttctctctgctcacatacagacggggctcccatctggggaaggtccctccccagacctcaccctccccacttaccaccctcggaatgtaaacatgttgtggattttttaaatattcagagaaggaccaacccctccctcctcatttaggcatcttcccattatttttcttaaattttctaccttaaaccttccccattctatagtaacagtggtaaagtgggtaaacatttattgccaaggaactcaaagataaatctctgcctaaacccttttgcaattaaaaggtactttgccacagtttcaacgttagggtgtaatccgccaggtggttgttttcatgagtgtccctggctttagaatccacgctcctcaagctaaaagcctattggctccattatttccccagactcctcatcctatctacgtagatgcaggtggtgaaacattttgagtcctaacagtaatcacaggttaggtttcccagaagagtgctcaaagaataaagatttctttctaagaattcttaagagcattacctagagattattttttttctttgggaaagtttgaattatgggtttaggaaaatggccaagtaaggggaaagtgatgggaaggtgagaaatgtattcagtcactgaatagcggtttctgaggctttataggtatgtggtgctgaacagatgaatagtgactttgcctaagtcaggttttctctggtgagtacaagtgacccctgactctctacagtggagatggttaatggaaaggaagctaat

SEQ ID NO: 53952 - DNA, 1127 bp, Homo sapiens
catatgcagaaaaaatctagacggaactaactaggccaagccattaattggttatctctgggtagtgacattatgttccttattcatttctgtatttttcaaaatttttacaatggacaagtagtcctttataatcaggtaaaagttattttgaaaagcactaactacctatatataaataaacaaatcaatacctgtttgccttattttccatttgttgataaaacaacaacaacaacaacactatcttggaagtgaatcaaagacgggctttgctttttttttcttcccccacccactggatcaatgagatgctctgtgtgatatttatttttaggaccagaaagttaaagtgaattggatttgatccattttctgaaaggctggcaagaattcttgacattgcacaggaatttccatgtcagcatgttctcacatgtatgatctaatttagtctttacaatgatcccaggaaggcaggtagcaggcgatatcctagaaagagccctgagctgggagagcacagcataagagacccaggaatgagacactttttatgcttttaatattgcctacttcggggcaagcttgattctgatatctgcacttgttactccctttcatattttttgtggggggatgggtgtgtccttactttaggattagccattaactatcggtgattcatttttccactggttattgttgctagacaatcatctcatcaactaatacctcactgatttttctgtgtgcttagagcatcttggtgtggacaaagatttattgaaaggactacaagaaataagacaaaataagccctggatcaaagacatatgtcccataattcaagaccagcttggaccacaaagcaagaacccctaaccccctctctacaaaatttttttaaaaacattagcagggtatggtggcttgtgctgtagtcccagctacttgggatgctgaggtgggaggatcacttaagcccaggagtttgaggctgcagtgagctgtgattgtgccactgcactccagcctgggtaacagatcaagaccctgtctctaaaattaaaaaaaaaaaaaagaaaaaaaattgctcaataaaagtttttaaataacaggaaaaa

SEQ ID NO: 53953 - DNA, 832 bp, Homo sapiens
cgtggcctgacatttttaatgcttccttgatctctttcttccagccctgcgtgttctttgccactgtagggggcagtgcatagcgggttgtggattaaataccaagcctcattctgccaatagcacttttaggaggggaaaaatcattgggtgcttttataaatagtcacgccgtaggtgtccacagaaagcaacctttattcagggcttttaaaagctgcctgctttttagatacaaaccaatccataaaactaccaagttcaaattgtcagctattatctgggcagtaagtttcaggcacctctgcaggctgatttgatggtttttgtcagcgcaaattaggatcctaggtttaagtaacgcaatctggctctaaaaattaatttaacttgcccaatccccacaatacacagcccggagttcacatttactttgtgactcattgcatttgaattaaactagagggctaagaattttatgcctgaagcagctctgactctgaagaacagaaacaaacacatatttctcccatcatttgctgcttcagggcaagaaaaagaaagccactgtaatttggagacaagacttttccagacaactatgaacaacagcaaccacagaccagtactaaacagaaatgtgttgtggaaacctggacttcagtaagaaattagtaggagcatatcaaacagatgcaaatatacaatttttgatagatatggtgttggcatgaattctagacgtaaactcaaagggattggaaacttgtttgtaaatgaacatttaaaacacagattgcgaagtgttttttggaagcagagaatcaattaa

SEQ ID NO: 53954 - DNA, 929 bp, Homo sapiens
gaaaaaaattagaaaatgcatcagtaggattctgctttttgattagaaatagtacctattttttctatatccactccaaagactttcactgtctatgttcaaggatagtacccacaggcttcttttttttgagacggagttttgctcctgttgcccaggctggagtgcaatggtgcggatcttggctcactgcaacctccgcttcccaggttcaagccattctcttgcctcagcctcccgagtagctgggactacaggcgtgcaccaccttgcctggctaatttttgtatttttagtagagacggggtttcaccatgttggccaggctggtttcagtcgaactcctgacttcaagtgatgcctgcctctggctcccaatgtttgcgagtgagccaccgtgcctggcctgtacatacagacttctaagactctagttgagttttacctgattttgaaatgtataaaaatgaagtcacagaagttaggacagcagttgcccttgagggcaaaggttggtgactaaaactgacatcagagggcttctaggaagctggaaatgttggcctctagattggttttgtggatgtatccaccttgcaaaattttatcaaatcttatacttgggttgtgtatttttctaaatatatattatactttactaaaggtatatattcttctctatttcatatggaaaatagagatgtagtttggcttaaaaaactcagttttccataaaacaaggattttgttttagtctaagtgatgctctaaaatacaagactagagtgaggtacttcccttggatacaaaaagccaaaaactcagtgattaagataaatagtattttaatgtaacattttttaaaaatccaaattaatcctaaaaaatccatgctagtaataataaagaaagattaaaacagaaaatat

SEQ ID NO: 53955 - DNA, 4490 bp, Homo sapiens
agcatctcttaaaatactgcttggtagctgctgagggaaatccattgctaaaatcacaaaaccttgaaaaagcatattagagagattaacttccatcataaagatgtgatttaaattcctgttggtatgaggccctccacttgcggtctcttattaaaacaatataccacagtaagtagtggatgttcttttcttctaattactgtgattgaaatctaagccagacaaaagtaaatatttgatcattagttaataacaattgctgacgacttactgtaaagataattgcatacccttgcctgcacttactttacagtgtgaagtcaaacatgcctacaaccagatcccattttaaaacacattatttaggttacatggtactgtttagaccccagtatagtttttcatttacttaacagtgagtgattttaaaagctaagtggaagctgcaactagcttagggattttcagatatcctggtgccttacactgtatatgtcagattcctgtattgatactatgtaactttcagtcatactccagacagattacggaaggtgtacaaaggcgggggagggagtttcatcaacccacaaaccgatatctctggccgtcacccaccagaggaaacggcttaggggagcagcaaaggaaccaggaagtaagatctcctggtaaagtgttcattaactttcaacagccatcagatttttgaaagggagtctcttctaattgcctttgggaggaaacattattaagataattggcatgctgatctgggaaggtagacagctctgtcttgtaacagaggtaaggaaaagccccacagcccaaggatcaacgtcaggagggagcccaaagacctgaaatcctcctgctctaaaccgcctgatctcatttcttcttctctcctcccagataaaagtttccttcgcccgggagtcggttgttcccggctgatcccgggaagccccgcctgagccccggtccggggcgggcagctgggagccggggcgccgctgtcacccgcgcctctgcctgtcacttaccgttgcgaaaagcgccggccggggcgaggacgagggcgagcacggcgcagaggagcggcagccccctctccattctcccttctccgggtccgcaggcagacgcgggagaacgaggacgtggggggaaatgcagcaaagaggagaatctaagcgatccgaagagccccaactccgcctagagctgtacaatcctcagcccgtcttggagaaaagaaagcagcgaggcaatgcctggatccgagaggaacgcttctctttttgtgtctcaagtcgcctgcatcctgtcatttagctccggcttcctctcccttttcccacacttgttcctcttccaggagccactgcccgggccatgtctcaaaaaaaaaaaaaaaaaaaaaaaaggccgggggggggctgtgggtgggagggggaggagggaggtagggcaacacacaccaaagccaatttccaggaagaaaaaaaaaaaatccggcttgtttctggacccgttggagccgcggagctggcgcccaggggaggtccgggtgtctgcgggaaggaggggaacgagcaatgaaaagatgagcgggagacagaggagtttcaccaactgcacccccgcctcccctcctgcggcctccccccactccggagcccttccctcgcttcctcccgcccctctccccgcttgggctcgcctgtaattgcctgacaggagactgggaggaacaactttccctccgagtgctctccccgtccgtctgtctgtctttcccagagaccctgcagggatctccgcgggaaggaaggcgctgggagtctgcgccccggtcgcgtgggtgcgggcgtcggaggaaggggcgcggaggtcagtgccagccgcagggtctggccagcccacctcgcgtgctcgctctgcacccctagagggagagctgggcagctcctgcaggcgcagatcccgccgccgcgcagtgcggagcgcccgggaggtggcggctgcttctcgcaacttcaaatcccggggcccgcgccctcggcggcgaggaacgcagggtcaccccctgccactcctcatcgcgccatcctgagacctgtggcggggagcagcggggcacccctggacgcccctgcccagagctggagggcgaggaggggaaagccgggctggagtgggagccgcaccgcgaagccgggcgaggggcagcagtgtcgctgtggtgtgaagcgaagacagaccgcctgggcgggcgaggccgggctgcagccccacgcggcctccctggcccgcatcagggcgcgcggctgggtgccctctgcgcgccgcggaggcttcattgtttcccgagatttggtgcccgttcctctggggcagagggaacaccggagggtgggaggtgctgcgccttccaagcaggggggcaatcgccgcccgaccccgcccaaccttgtctgggagcccaggtgctagggaggggtgtggaaatcaggggtcgggcggcccccgtttctctgtgcatcccgagggagggaaagagtggcgggggaggggtgctcttcgctgcgccctctcagtgtccgctcccggccacagacaacgtgcacgccggccctggagctcctgccacccccacttcccacagcggctcgtgcccccagcccgctggatgccccccaggcccgtccccgagggttttccgagaagtgctgcaggaagcgtttgtagatgcgaaaagcaaggacatttctgggaagaaacaggttgcggtcaccgatcaggccccggagaagggtcagtgcccacggggcacctcccagggagtttgtgggtaaggtgaaaaggtcacacgcctcctggggattggcgtctacacacacagccaaagtacagcctgattcctacctggcacaaatagctggccaaagggaggtaggaatgctggcaaggagactctggtcaaaggttttggcggaagaaaaaggggcgggcagggagaaagcccaaggcgcgcgggccccaggccaggactgcgcgctcgcgactcgggctgggagcagtgacgtgcgcccctcggggtgcaggccgttcccgggccagtgggaggtgcacccacggagcccgcactcgccactctcttgccccgggtcaagcctgtcttctcctccccacgcgcctcgggattcccagtcgccaagttggaaactcggcccccccgagcgcctctttcctctgccagtttcctccttcttctcagctgtcggacccctgggaggcgcggggtgggaagtgggcaccgaagggctgggagttaaatgcctaagttgagcggaaggagcactgtcgaagccatgggcagccctgcgcccgggcaggcgggcaggcgggaggcgaggcgggggcgccgaccgcgcccagcgcagaccccgggggagtgagcgccgcagaggcagcctgggctctcggctactacccgcgcgcggtcgccgcctccccaggtgcagccccgccagtcccagcccccggctgcgccgggcgagcggcatcatcagatttagggtgacccggagcgacctcggtccaggctcggagggagaggcgcctctcaggacctggcaggttgacagggaaggggaaccgggagggagcggcggccggggcggcctggagtctcggaggcccgcctgcgtcctggggggacccgacctccgcgctcgctccggagcgcccgtttggatagctctgagcctcggcggggtgagcgagggggcacacgagggagacttgagctgtgttgtttttagaaaactgccgccaatctctcttcccctttccctgctgagtgtgcattttccagcctagacccgccaggccagcaaataaagccaccggatcgtgcactccggagcgactgcccccaccccgaccttgtctttcccgaagggaatggctcctccggcgcctcaacgcacagaaaacgcctgcctccagctgagcgcttttgccagctttctccaaccagtgaataagggatgcactatggactcagaaggaaatgtcatatttaagttctgcctctgatttctctgctcttagctgatctaaggtttttctagactccttagtttccactcacagtgctgggtaatggagccctaccgcactgattgagaattgccggccagtgggttggtacagagcaaattgtccttgctaacaacctttttcctttgctgttggattccactaagtggtgagaggggtcagttttagatttttgcaattccccagcgtggagacaggccggctctatacgagaataagtgataggcagaggaagaatttggcagtgttcccgggttgattttattttggtctcttgaacacattattcttcctgatagaacaaatccctggacttggtaggacccagttccagggaagggaagagtcctctaccg

SEQ ID NO: 53956 - DNA, 1017 bp, Homo sapiens
tgagccactgcgccaggccaaaagcttgtatttttaatcattattctctatgtcttccagacaatgatccaaagtagtcatttcgagtagtcggacttcgaacttcaccaatactccctgcccaccaacaaatctcatgcagggaaatttgaacagttcctaatgctggccactccaaatctactgccacacagccctgcctccttttccccaagcactttgtcctacagcttgacacagcaagaatattcctgttcccttaacgcatttccaggaccgtggccaatggcagacaccaggtcattaaacccagtcacagctgaatgactaaagagaggacatgatagctttaattaatttttgcaattgagccctgtgtttcttgaataagattattacttctgagttcctctcaattccatatcgaaaaaactcagatcaaaatgccaatttccttccatgaaatggtctggaaaataacagagataaaaatctgaaagtatttacaaatatcgattgttaagtggagaaaaagaaatgagtgagtttggaattagccaaagtccgtgaggagtttctgaaaaaacgtaatctaccaggagaaaagctgtggttctagtgatgactaaattatgaaaataaaattaaaagggggttgagatacggatggggtagggatgtaaaaagtagaaattgaagtttgctttgtttagtacagagagataaggatttggggaagagggggatgggataggggacattttctttaaatgagacaagaaaaagtaaacaagttatgtcatgtacagaaaggagaaatgaaccaacatccagctttcagtttgctggctaactatttaggttgatgcaaaagtaattgtggtttttgccattaattttgatggcaattacttttgcaccaacctaatactttcacttagactataaattctcacctgtggttaggtataaaccatgtaagcactaccaatatttgaaagagaaaattgttctcgc

SEQ ID NO: 53957 - DNA, 707 bp, Homo sapiens
cagagtagctgagcctccagagtagctgggagtacaggcatgcgccaccacgcctggctaacttttgtatttttaatagtgacggggattcaccatgttggccaggctagtcttgaactactgacctgaggtgattcacctgccttggcctcccaaatttctgggattacaggcgtgagccactgtgtctggcctggactagggaaatcttaattgctctgagaaaatgcaatctcctcttctttcctccctccctccttctctgtcttttactctctcttctctccccgtgagagagctgcactttgcactctttcttaagccaccgatcttctcaatggactcagaattttgacagcttttacagtagggaaccctaccacagcacggaccttgatacctctttgaacaggcgaaggtcaaggcaaaacacagagtgaaagcttcaataaatatttcaaaacacactcttgccacatcacctttcgcttatttttacaatatgctgcacgcttactcactctcacactcacaaacataactgcacaaacatcatttcccattcttttgatgtttaaatactttccttctcctatcagatgaagtttatattatctaggctttgtctctgacaattctgatgttgttgttatggaaatatgtcaagacatttctttgtaaaaattcccaatgaggctgggcacagt

SEQ ID NO: 53958 - DNA, 500 bp, Homo sapiens
gttagtacatacagaacacatgtcgggatgctttctcagtggacctcatcttcagggatcattttatttccacagtttagtgcctccttactagaatagagaactccataattttttctaaagattctatcagtcttgatccaatgtgctaggtgataaatgactgaacgctggccccggaggggaagttagcaatgagtcatgctgtctcctagtaaccagtcagtaaatagcttccagcaaatattttaaacctcaaagcacacttacctttggtattatccttagacagactatcctcatctatatctgcactctcatctctctttcagaacttctaagaaaggagaaaaagtgggatcgggtttgcatatgacgtcacccccttgaaaacccacatgaaaacattcctaccccagggagtctgtctcaacaaaccttttccttgatttgtttctctgtattttgcttgccctcaaatgttatgaagccatgtatac

SEQ ID NO: 53959 - DNA, 501 bp, Homo sapiens
ccccttcctaaactcttatttttaaaggggaaagggatatgtccaaatctagatagagctaactgtagagaagagttctagaggtcaggttcagagggagctacagtccaaaaggagtgagcaggaacctgtgatcatgggcagtcaggagagaaacagctgcaggagagagttggggccactgctcccctcacccctgctctttgcctctaaagctgagccacctccctgcaagaaaagcttggaatttccctctgcttgagtcatagcctaagactgggattcccaaattgaacttcaaactggtgctcacatatgaggtatgtcctgcagaggtatgaggtgtggcttgggatttcatcatcatgtctcagaccaaagagtaagcgaaaggtagaaccatggcagagtcagtgctccagcaaatgatgggcagttgttttttgctctgttctatttggtgttttatgtcctgagtttttaggacagattttaattcat

SEQ ID NO: 53960 - DNA, 1003 bp, Homo sapiens
tctatgcttttcagttatctagtgctgtctaacaaaccaccctgaaactcagttgcttaaagcaataatagccatttattttgatcacgaatctgcaatttgggaaaggtttgatgtggatgcttcacttctttgctgtggagctttggctggagtggtaagaatccagttctatgatggcttactcacatgtctggcaagttggtactggctgttggctgggagcttagctgaagttattggctaagtttcctctccacatgggcaggtccatgtagctgtttggatattctcacagcatgacttttgggttctaagaggcaggaaatggaagatgccaatcttttaaagcctaggcttagaatttgtttcagcatcacttctgtagtattttatttgtcaaagcagtcactgagcctgcctagattcaagggtgagggacataaatcccaactctcaatagaagaaatgtgaaagaatttatgaccatctttaattcaccacacacacgccatcccaaagttcaataaatattctatgagaaaaacaggccgcacttttgggtctccttaagactccgacatgtcatttcagcctttcacaatcattgaaagccttgttagtttcactttcctttagtagcatgcctctgagttagttactcaatataaccctcagttcaggcccagagtctgaaaatgttcccagtgatgaaaccacaggggatgattattcacctctgaatggcatcccctgtctggaattcaaatttatccatgttgtttctatagctcttcaacaatttgaagccatggtaattattgagacttctcagtaaggatgcaaaaagtaagaagagaagagtgcccaagagagaatctcaagaacctctaaagttaaagaaacagagatgaagtttagatcaacaaacaacaggcaaaggggtaggaagaaaaccaacagagtgcagtgtaacggaagctaagtttaagtgttgactagc

SEQ ID NO: 53961 - DNA, 1099 bp, Homo sapiens
catcaaatcttgttggagagtttttatagaagttggcctccaagctcccccagtcttccagaagttagtgtgtgggtcagaaaattccatctttctaatggcttggtctttcctcagccccaacctgaggctatttagggaccccaccctaagttacctcattaacataaacttaggtgtgatcaaaaggggttcattatgaataacaaaagacattcctatcactcaggaaattaccagggtttaggaactcagtatcaggaaccaggggcaaaggccaaatatatttcatattaaaccactttgaagcaaaggagagatgtgtccctcctgaaaggaggccaccttccacttatcttttatataagctgagagggtctcagctcaaaccgtgcttcccagagcccagaactcctgagctcatgtcctacaagcagttttctctggggttaatacagcattagtagtcactcaggacatttacaatgggctggaggcctttatataaaacactttgacatttttattgtctctctttaaagaaatatttgcacaacaatttttattttattaataggtacatttttcttgcagcaagaaaggattatttgcagacactaaagtatttacttttcccataaccttgaaagtattggcctcgggtttggaattcactttccctatcaggaaagtgggatagagaaaattcctcaaacgtgaccagtgaagattaacaggccaatttgggagcttgctttttagcaccaccagtcacgttaacatttttggcttgccagagcaaaaagggcacattctgacctttgtacattaccctctctcattaccatgcttcccttcaaaaggagccagggaagcccacagatatggagaaccagagaagaagcagaaaagattgcagctgatcctgagttgatgcaaaaaataataataataaggcaataaaaaagcatcaaaagccaaggatgttactgttaaattagacatttatttatttatttatttattttgagacagagtcttggtctgtagcccaggctggagtgtagtggcacaaccttggctctgcaacctcctcctc

SEQ ID NO: 53962 - DNA, 995 bp, Homo sapiens
tgagcaacatggcaagacctcatctctactaagaatacagaaaattagctgggcctggtggcatgtgcctgtggtcccagctactcaggaggctgtgatgggaggattgcctgagcccagaaattcaaggctgcagtgagctgagactgcaccactgcactccagcctgggcaacagagagagacactgtctcataataataataataatagaaatgaatgaggtgtggtcccctccatcaaagcccatgtccttaccaagcttaatgtctttacacaagaacgcttaaatcacttctccctctagtcaaagacaacccgtattattttcttaggcagtttgagactcttagaatcatctcagtcaacctgagtatgaccaactttcttgagaaacaagtccttttcttacccacctaccaccccttccagatctccaggccatgttccagccagtactcattgcttcagtggtgatggcctcctcatgtgtctcagtcaatcattcattgtgtaaacattccagcagcatcacatcacccttctgaagaagtcactgaagctcaccgctgcctgtaaagtcaaatctagattcacctgaggacaaatcagattagggccacatcaaggaactaacataaaattaagatatgtggcataacttaaataatttagccagtgaaattcctagccaggtctgaatgagttaagtaagaatcacataagaactggcctcacctgcagtatttggggctgcattaatttttgtgagtggcagcccacctttgtgcatataaattgggtaattacacgagtaaattggagtttttgcactgagaatcagcacctggaaataacagaaggccagagaaagcaggccaattgaaacttttgcccttcatatttgaaagcagcactttctagacagcttgaagactgaggcttgaagagacctaacaggaaagaagtgggggaagagcacctaaccattctgtt

SEQ ID NO: 53963 - DNA, 1299 bp, Homo sapiens
atcttagaattcccgcatttccttcacttctctctgtttccaattgcccctggttggctttctccttgtcgggtcatcagcaggtctcattaattcggctcacagatcactgacccagcaaggcataattgagcgtcagattaagtcctttaattgtggcatggggtcctgagctcctcagagaaaaggattttgtgtgggggtgaaataacaagggaaataagaccaaacgattgcatcccaggatgtttccaacaattccacaagcaggtagtgaagggaaaattagtatatcataaagagaggggtgaggctccattgtgttctttgacctggggttgtagaaaagttggcagcaaggctgactggcgatcagcagagacctcacatctgctctggatggtgcacatggagagaagtaaagatgacctttctccccttcttaacttggagttgtgcaatggaatgaggcaagaggctttgtttgcctagaatgtgaattattggccatcttccctcgggcctttagatacaaggactcaaatttgtgaagcaagcttgagtttccgttcctgtctcttctcgcctttctgagtactgtgtaatcatcgtgcagagataattgagattctggttgcaactgaaatctctgctcttccggaagtttcccttgactttgggattctccagttaatttttgtaagtatattctatggagatataaatgccctaaaaaagactgccatgcaatggaaacctctggttttacaaaggagattccagctctattgagaaagagcagagaacaaatgtggaaaaaatacaaagacacaaccccacaacagcaagagtgaagagtttggaagtgatacatgcaacagggcaattgtttggcaacttccttcctaccaagagccaaaactgcaagaccaagctaggaagagtacacagcgaatcacgcggcctgtgagtactattaaataagggaataatttaggtgaagatgctgtcctgggctgaaaactcctgcattgtaattggtggatagaaaagaaacattgggaaaatctcaagtgagaaatccttggtggatttaactctccattcccaccatcccttagcaaacctcccagcaagttgaggagtcgtgccagtggcatacaatgttttggtttaatagacgattgtttatcttggctgctcaaattccacatgtcatctcctaccttctcatgggttgaatgatgctgaattcatggaagagataagaaaacttgccctttggaataaaataaagaa

SEQ ID NO: 53964 - DNA, 980 bp, Homo sapiens
aacagatcttcagagagcatcctccagttggacagacagctcttcttcagccaactatgacagtaataataaagggtgcagttctgtgctgtgggaaaaggcaaagtaaacaaaaaagtgcactatgttccttacagagctttgctttgaaacatgacccatcatcattgcaaaggagggaaataatttcccacccttcagaaacctccctcatttgaacttaaaattaggaaacaatgagcttttctgattttaattttactttgtcaaataaataaatttgtccaacagggcaaagggacgacgtgattacaaacaaaaccacattgaactggccatgtgaagtctcaggactccatgagtcagctcctaaagctttatgatccagctttccttacctgcaaggtgagattccaaaagctgacgtcccatacattgagaaaagttctccagtaacaaccaaaagaaagtttctgaactttgtgaatacatagttcaaatcacagcatttatactactttaaggaactttcttaagagactcatgtttttagctttggccctcctgctaatttttttctaagaagaattgcaacagaagacaataggattaaaaaacaaaatattttccaaatcctagagccaacataaatatggtgtgtgtgatgtgtggcaggatgagaggaaaaaaaggtcatttggacctgctccagaccctttggccaacctagaaggttattttaccagtccaggggaaatggcagagtttaccccagaatcaatactggggtcagaaaacaaaaaaagcactgcaaaaaaaataataatcctttaatttttgctgtgaaaaatgaacacttcttttctctatattaagcatacagcaaaaagtaattagttaatgaattatatgtttatgaattaaaaggagtttttgtatgtgagttaggaaaaaagatttggaaaaccacaaacagaaga

SEQ ID NO: 53965 - DNA, 1355 bp, Homo sapiens
aaaaaaaaaaaaggaaaaacgaaaagaaagaaaagaaaaaacatactttggtcagcaagtcatctggtgattggtgcttctcaccgaaatcagattactgaacgtgtataccgcatggtatagatcaggtttctgggatgcttcaatttctcactgacaatggttaccttaccttctagatctggccttttgaaataaaagtagctgtgctcaaaatatacaatggtgcctctacatttatgaaacatcccaatggtttgtcacagcatcagcagtaggccccttaagtgatccttttcagtactcgccaccctcagttccccctctgttatgcaacgttgtgcaacaggcatagtctgagtgaggaatgtctgtttgaaacaagttattgattttcttttagagttgaaagctaatggtagactttgccctgataatgattttctaaaacaacagagtctgaacattcatttggcgagctgtaagataacaggtagccttgttaccaaaagaatggctcctatggttggctttggccagcacagaaagaaatcaagcatcatctattgttctctttctgcaaagccagcacaaccttacttgttgataagcagtaatgaagcaatatacaggacaaacatttcaaagcatatgggcttagttagtgagcatattaaaaatatcccgatacaaaaataatgtgtgaggagattaggctttacaataccccagtctctactaggggctttataaccacactcactggaacaaatgtgtattcagagacccgcttcacaacaccgttcaaataacacatcagtgaggccttcagcaagaaaaacacttcgctgagcgagttctgcttatgcaaacaattgttcatcaactgcattaaaagagacagacattttcttccattacacttgatgaggctggccaaaaaggaaactgagctgttttcttgtcacggtgagcaatgggaagcttgagataaaccactggacagaaagaaaacactacaccatttcctttacaccctcaaaagaaccacattttcctttccttttcactcagtgtaaactatatgcatgtgtcaaacagtcttgaaagatctggcattctgcagcaggatttagtaaccagctttttaagctcgtgctgttctgtgacaagctgcttgtggagatgtgaagggaaattgcaaggtcttgtagaaatttcaggtgtatttttaagttgtttctcccataggcctgaaaatttgcttctgacagagaaaaaagaagttgaaggacttgttttctctgctgtgtgttttctgacactgttcgcctcaaactttatcagctacaagt

SEQ ID NO: 53966 - DNA, 1122 bp, Homo sapiens
taaattatgaatgataaaaatctgcaaaattttgtatgtccaagggcacatatagaaaacaaaaagtaaaatacaaaacattcaggcactttggatgaaaacctgtgatgaagatgatggtgagaatgatgctgatgacaaaaagactaatggcattcccttgagattcacaatccttactttagcaattcacatgagctgtgaccctaataggaattccatattctgataagagtagcaatttaaagatttggtagggagcagaaatcatttttatgccattaaatcatgtgaagagtgtcaactgttgactctgttgaaaagtggccagtgctaatattggtaattattttcttcagtagacttatgtacaacctttaatcaaaacaacgttaacttttgtctacccatcgtgccttcccagccttccgcacccacccacacatgccataattatgtaactattgactgaactcttgtgggtcttgaatgttgaaaagcttaattgctcctaaggatgtgagtaatggctgaaaagactgcaaagcacacccgtttccctcatgaagtttttagaaatgaatgttttggtcttaattgtatttgtcttcacctcatctttcacaccagtgcttagatcttttatccccgcccccatcttaagcaataggaacactgaaaataaaaaggttgctctacaaaacaagccaggcactttagtatctgggctaatggcaacccaaggtagcttcaggagttcctaccacacagggcttctgagcatagcatggccatgagtcacagagcctttggctgagggacaggtcacagggcagaataaagtgctgactttgcgacagtacagaggctctctccatgtgtgatgggcacctctctgcagatggcttatctccaggtctatttctttctttttttttttttgagacggagtcttgctcttgtcgccaagttagagtgcaatggcgtgatcttggctcactgccaccttagcctcctgggttcaagtgattctcctgcctcagcctcctgagtagctgggattacaggcacctgccaccacgcccggctaatttttgtatttttagtagagacggggtttca

SEQ ID NO: 53967 - DNA, 560 bp, Homo sapiens
ccaagctctgtgctgcttcagttgcacagaggagtatttattgctacttcctgcccttgaatgttttgcagactttctctattctgtttaaacaaatgctgtgtttcacctgtcagagccccatcccctggaataaaggaggcccagaaatctaacaccacggctatcacttttagggcctagacccctggtttattttgttatgtagattggatgagctattaatatatcaagtttacatgtgtagtttctgtctttatctctgttatttgcacttcaaacctggaaaaacagttgagaggttatgtaagcattgtcctgggtcctgatctgcaaatttctttgccaacttttattggtctttgaaaactgcattcctttgtcctaaagaatgctgtctttcatatcctgtcattagtattatacaatgttaggagccaatttgtcatacagatctccaaacatacttaaaaagagaaaagggtctttaaattagtcttcatgtatattaaaaacagaaaaagacaaaaggaaaagactgaaatcttttaaagtaattc

SEQ ID NO: 53968 - DNA, 723 bp, Homo sapiens
ttataggaaaaaaaatgattagcacagaccagtatgttaacagtgtgttaatacagataaatttttgttttctgattgtaattttatgggtttctcccaaatttttctgtagtttttagtattagaataaacttagaactagagcttaaaaaggtacattttttaaacaagtgagaaaggtgggaaagagaaaactgaaaaaggaggagcagtggtaagcacgcactttcataagtccacaaaacagaagccagaaagtagagacaggttacaacactgctttaaacttgctcgcagttctggaaaacaatcaactccggtttccacagccagttagaggagtaagctgaacaccgctgaaccaggagtcaacggtctttacttgcccttggtatttccccagtgactcagaatgttgtgggatgtcagtattccaggaaaagcaaaaagtgaggggttgagaggatgttttgagaataaataagtttggagaatggtgactctctgttcctatcttggtgactcataatgcacatgaacttggtagaattttgagaaataacagagtagaaagatacgcatatactggtttaaacaagtgtttctcaaacatacttgtaaacagaacacattctctgctgctgaacactgggcaatcctgtaccacatagtgtatatactaccatttaaaaatacatggaggtatcactggagcaaaaacaa

SEQ ID NO: 53969 - DNA, 574 bp, Homo sapiens
ctatcacatgatccattctgtccctttcttcaggaattcattttttctttctggaactttcctgatgtttttgaagaccatgtgtttgtacagccattgcataacctgtctttgaccatggccagctgtggtaatgctgtcatttgtcctaaagatccttgagagataccagctgcccaatgagctggcctcaagatcctgtacagcaaaagcacataccctgtcctgtgtcattcctgtgtctcaatccagttctctgcatagtccagagcacattattcactcaaatcaaaacaaacccatgaacttttcatatcattcctctattcctctgagtcatacatcacctaaatggtttttgatccaagtttctctgggaaacttttaattgattcttgtgctttttccacattcttggtgcagaactaacttccctcaaccaattaccctggtctctaacacaataacaaacttacttttgcttaaagtcctaataggtaattgctatagattttattcaaaggaaaaaaaatctagccatatatctttgtagattgtcctactacactcttgt

SEQ ID NO: 53970 - DNA, 1533 bp, Homo sapiens
aggaacctgctgaatgggtattgtgaaagctacttactatcccaccctccagagaacagcagaaaagatgtacatttctatctgcagtgagacaaagagtcacaagtgggcaccatcatggcccccttttccttcttcccgaaatcacagtccaaaaaactgagaatagagctggcctataggcccaaatccacagttaatctgcagcaaaggtgttatctataaaaaaggaaataagagttgattgtgtcaagcagcagaaaaacaatcatgggaagggtaatctctgagccgcaacaaacgaaaatttggatgagaatgtacaaaatattgtgaagagaggcaaaagaaacatggaatgtgcacaaatgatagaagaccataaaattataggagtgagctcaatagccgatttttggctttgtaacaaaatacgtgactcagcaaaagtttcatcactccactataaatcattaatttctctctctcaagatctgcccttatctacagaattatcttttttttttttaaagacagggtcttgctctgtcatccaggctggagtgcagtggcatgatcatagctctccataaccttgaactcctggactcaagtgattatcccgccctcagcctcccaagtagctagctgggaccccaggcacaccaccaagcctgactaactttttctcttttttgtagagacagggtcttgatatgttgcccatgctggtctcaaactcctgggctcaagcaatcctcccaccttggcctcccaatatgctgggattataggcaagagccaccatgcccagctgagttattagcaaatagctagtaaattaatgcaaaaatccctagtaaattaataacaaaaagataagcagtctgcatcaaacaggaaaaggatgtaaacaagccattcactaaagaaagatgagcaaaccaataaatcaacctccaagtacaaggttcaatcttactcgcaaatcaatcaaaggttatcaaattgctccatatattttcttcaaattaatgatatccaacaaatactgctttgccatagaacactaaaaaataaataaaaataatgatatttaatactggtgtggtgaaatgcgcatgttcttgcactgctggtgaatgtaaaaaaatggtacaatatttatggaaaccaatttgacaatgcttacctaaaccttctacagtttgccattttcttaagctagaaatattacttttagtgatatggcctacaaaaatagttgtgatcatgtaccaagttttaactgtgaggatattgttttaattacaatagctaaaaattgacatgtatgaaagtcaggaaaattaagatctatctacacaatggaatgccattcagctaataaagtgtcttagcaaaataatatgtaagacaagaaagtatttgtgactaagaaattgagttttaccctttggacttccataacttccagtacacccatcaaaaacctccataacatatttttatgaattaatgtctgccttcaaa

SEQ ID NO: 53971 - DNA, 1363 bp, Homo sapiens
ggtaaagaaaattaaaaacaaaatgaaaaaacaatttctggtgaagaatgagagagccaatgacacagaaggaaataagagcagtactacaaaaggagcaaccaggatgcatctgccaaagccaaggagacaatgggtgttcacagattcgaagtccaaccaacccagaccttgactacactggggtccacacttcccactaacaactttatctctgcaaccacagaaattactggaaatgtcttaatgccccaagaactggaagccactctgacaataaaatcactttcatacaccagtccccacagaccatggtaataaggagacatgacagcaaatacaaagaaaagccattgcttagacatctaaaatcagttatgtctttcaataccagtccaagaaagagaaacagaaactcaaacactgaccacattagtgtttatggtgaaacacaactctgattagacaattaacatccaggctgcctaaaactaaaagcaagcttcataaacaaaccactaataagctgttgcttcttctttggaaagagaaggttatttataaattgctgccacctaaaaactgacctgattcagtactgtcagacagcgaagtacacttaggcaagtggcaaatgacaagggaaaaaaatcacctcacaaagtgtgacacttcatcctaagtgtaataaatgaacaaaacagaatattgcacaagactgtgaattgtttagccgagatccgccactgcactccagcctgggtgacaagagcgagactccgtctcaaaaataaataaataaataaaatgtaatctttatagtttcccactcataaaaagtaatactgaagaaaaacctctgaattcggtaagttagggttcctagcatcaaatattccatgtgagatcttaaaaacaacaggaacatcaagaaatcagagcacctagcacgtatgaccactctgggagacactggctcaactgcctctgtccctaatgcaaatttaccagctgaaatccttcagagatacattcgctgataaacaggctacaataggtgtagaaagatgtgggtaatgactgactagattgcaacctgtctgaatcatagaaattgaaagaaaataagctttgccaagacacagaagccaagatttcaagcactttgggacatgcagttccactgctgggatgtttattcagaggtggctgtaagtttcacttcactctttcaagtatgtgctcgggggctgcacaccaaccgagggagtgaaaagaaaaatcagatcaatcttgcatgaagcacttggtgaggagtggaggccagacgagctgggcagaaagaatgaagtacaggaagagt

SEQ ID NO: 53972 - DNA, 603 bp, Homo sapiens
catatcccgaagcagtgccctgttcagcccctccaggaagcagggtgggatgcagcaagcccagccaccagcatcaccagctctacctgtggactcagtcaattttaaccaacatgactgctcaaccaatccatcacaacaacttaaagtcatatacaacatacagagtcacttctttacccactgagtccatccactcactcaaatgaacacaaataacagattctaacaggccacctcagggtcaaagagcctaggagttcactgaccccacctttgattccaattgcaacagcccttgggctggaggtttatggagagggctgagaaactgccccaagcagaaagcctcctgcaccccgactcctgcctgggaccaaaactaagcgagaagaatccaggcaggggcaataacggggtgtcggcagaggcagaaggtttccccagcaattaagcataggttccagctcaggctgcggttaggccaggacgtaagggcagcgtgtgatgggcactgggggtggccatggggaaggagagaggagcaaagcctgtgttccccaaaggttctcttaaagcagagcattggatgacaccacaggt

SEQ ID NO: 53973 - DNA, 2791 bp, Homo sapiens
ggctaatgattaatgaagagttaaaatacagattcctggaccctgttccagatctactgactaagaccctggagcaggggtgcggggagaatccatattattaagaagctctccaagtccatctctaacaaagcatgcctaagtatcactgaaacggaacacttattttaaaaatgcagaatgaccaatccttgtcactttttaaccagcacagcaagtaactcagaccttaatcctcaaagttattaaacattaccgttaaaaccattttgcaagtaacagagttcctctgcaccctcatctatctggacctctatgaaaggaatcatttatctagaacacagagagtaagtttgtaaaacaaacactcacacacacacacacacacacacgttggcatcctcttcatttgtggggcctattctgactgcacatgaatcccaattacaacatcatccaggagtccctgggacacctgccactgagacagctccagaatttggcatctccagatgtgttgagtccccaaagaatgaagtcccaaaaccatttactgatggtaaatggtatttcctcttcaaggaaaattggaaataatgtcctgggggtgaataagaaagaggtgtcccctggccacttagaatagccacatcctgcccacctcttcccaccaagcaagctcaagggtgacccaatcaacttaaatatcaactttcgtttctaaaatacttccacacacacaagcacaccaacctccaaaatgtggcttatgaaaccattctttaagcctcctaatcctgttcactccctccagatgagatcattatctgcagcctttatataatatttgtagccaccccttggaaataaatccgcacctatggactttctcaacctcataacttcatccttcagaacttgctacatttccaccttttccccagcactttccctttcacagcctgttaggccctgcaccattttccccccactctgtgcccaaggcctccaatgcctggaccacaccttaccctccaggccagccctgtctgtccatcaagacttctcaggcatcctcttctccaagagcttttcctgaccatcacacccccaaagcagatcagcagtctaactccagcccactgttttcttttgtttagagacagtctcgctctgtcatccaagctgaagtacaatggtgcaatcatagctcaatgcagcctccaactcctgggctcaagcaatcctcccacctcagcctcccaaagtgctgggatgataggcatgagccactgagcccagcctgtcccactgttaatgttcctaaaaaccacaatcgtatggaagatagagtcaggtgtcaagcgtgagcctttaaaggctgtgaattatttttacatatgcagcacaaaaccttttgttgacactactttaccttccggttattataccaattctttgatgatcttcacagcaaattttttttaaaaattgtctatacttgcttcaagtgtgtcttcctcccataaccccattccaatcaggcttcctcttccatcatatccacagcagcctccacgatgcttaacacaaaagtctgttgtctgtcctcatcttatttggtctatcagcagaatatgttaccctctctttgaaatactctataaacttggcttgtaatcctccaactaactgatcaaggcttttctaattttgagagtcaatggttgactcctgcctccggaggggtcctgactcaacagtcagctatgccaagcaatcatgataacatcatgccaaggcaaatatcaggctgccacttattaaatgccactccacaaaaatgtgctgaatggatatgacgttttgaaaagaactgagcaggagatcaacagtaaccccaacagagcatgctgcattaaaaataaaaaaataataaataaaacataaaaaataaacatataaaaatgacctcctcccacaagagtttaaaaaccaggaaggatatttttgccactgaaaaatacaactccgtagaacagtggtctcttgggaaattttaactggcagctttcataccataattctctttcaatgaacagaggacttgctttattttcaagggaagagtccagtatccagtgagaaaaagttagcgcatacttattgattccactttgtagtagtttgcattaaaaagtttaaaataataacagtaggaatctctactgtccagtccatagacactcagaaatgtagctgagcaaaaaattgtgataaggtccggcatgatggctcatccctgtaatcccagaactttagaaggccaaggcatagtgacccacacctgcagtcccagctaattgggagactaaggcagggggatcccttgagcacaaaaattcaaggctgcagtgagctgtgattgtatcactgcactccagcctgggcaacagagtgaggccccgtctcttagggggaagataaaagttatgataagccactttttatactaccaataaattctaattctacaataattgtatcagtcattgggtgaataaacaaacatgacagaacattcaactaaaaaagaagaagaatgtttctcattcaggatatgtccatttaaaataacaaaagagttaaacactaacaataattgtgtattatgacaaccaaaagtccatcacacacagcaataaacgaggggcagagttcatccatcaaatagatgatcaagcagtgaatgtcctcatggggcaaggctcccaaggataggtccaaaccc

SEQ ID NO: 53974 - DNA, 2804 bp, Homo sapiens
tggtggtggaggcgggggccacacacaggttagcagtagcaggaagctatgactacccctgggctgaggggataaggggaggtagcaccagagcccagggtggcggaagtgggagccatggaggactcaggggcaggagctggaatttggggagagacttgtttgctgcagagacacagcccaaaacagagagggagaagggaactactttggggctatgtcatcccggggcctcctatctcccaccaaacctcccactggccaaacccaaccagaggtcaactgacacagctgtgctttgtatgattctctcagctactatttgagtttttcataacaaattgggaaaccaaattaattttaaacaaatttaatgacccagggttcatgagaatacaggaagccagcattctcacacactgcgcctgagtattttgcacacatttttggagaggcggggggacagggagctagaatttggtaccacgcatcaaaatgcttaaaatgaaatatacccattgatccagaaatttaaaatgtggaggaagatacatagccaagatgcatatattaaatgggatattttaatatataacaatagagaatgggaactagctatacacgtaaaaacaggaaacaggttgaacacattcaatcaattaaacacaacagagcaattcacaatgttgttcaccgactgttacataagactttgtttcatccctagtttgaagaatgtattatctacagccatagacaaaagaactgctatgcacaactggcagtgcttgtctatatttcctggcattccataataaatatatacgtgcagttttaaatatttatcctcttaaataactagtgaatacatttctttctttcccatctcttcctctcctgttcccaataaaatgactgtccaattcacttctagaccccatctcttcaatcctgtgccacatcttgctacatttatcttcacaaaatattccctttatcatgtgactgtcctgtaatatgagtcatttccaatgactcactactttctaaaagtcaaaatccagtgttcttggccaagcactcaaagctcatcccaagccggtttgtgaccagcctcagcgttgcctcaccgtatttcgatgttcaattgttctgttcactgataaaccccaagcacccaaaacagtgtctgagacagagaagatgctcaataaatactggtcaagtgaagagacccttatgtttttgtttattctcttccacatatctgcaaagctttcacccccagagttccaactacccaaattgtatgtatcttcccaaatccagtttataaaccatccccttggccggacacagtaactggcacgcataacctcagcactccaggaagccagggcaggagcatcactcgatgccaggaattcaagaccagcctggtcaacatagcaagactccatctctataaagcaattaaaaattagccaggtgtcacggtgcacacctgtagtcccaggtattccggagactgaggcaggaggatcacttgagcccaaaaattcaaggcagctgatgaactaagattgcattgccacactccagcctgggtaacacacccaaacccctaaaaaaaagtaaaaacaaaaactccccctccatgaaatgtgctccaactctgaagtatttacctaggccaggtgcagtggctcacacctataatcccagcactttgggaggccaagacgggtggatcacttgaggtcaggagtttgataccagcctggccaacatggtgaaaccccacctctactaaaaatacaaaaagctagctgggcgtggtgatgggcatctgtaatcccagctactcgggaggctgaggcagaagaatcccttgaacccaggaggtgaaggctgcagtgagccaagacggtgccactgcactccagcctgggcacagggcgagactctgtctcaaaataaataaatatttacctagaacacatttgtcacttaatagcctatttcctgtatatgcatggtaatttttttactctagataaggtctccaaaggcaggggccatcttcagctttttttagcatagaacaaacaaagcactgtgttgcataactagtgtgtcccagaaaaaaataaaaataatacccctattgggtataggaaagaacttacacaagagtttctaggagaatataatcaacaaacacaggcctatgctctcctagctgccaaaagaaatgcgtggacatgccaggccatgtcaggatcaacgcccccattcaccctttatcctgtccctcagagctggctcaagaaatgctgtgtgattattctagtttacattccaggaaacatttcagatgtggggaaagaagacatccagacactcttcccttgcaatgaaaacgaacccaacttgcaatatgaataccttcgtcctcacctgcagaggtgggtccccagtgtgactggccaggaatcttaggcagaagaagtgagcttaagccccgataaatatcttactcataccccagaaaaaagagggcaagccaaaactcaccttggccaacccagttctcctcactctagtcccgatggatctaagagtgtggaagggtacgaacagtgggtagtattgttacctgatgaactggtagacagaaaacagaaggctttactgagggaaggtagtgaatatggaataatccaagcctaagtccctaaaccacagtgtggacgtagctacaggatattctgctccagaactcaaatctgtatctgcaagct

SEQ ID NO: 53975 - DNA, 1120 bp, Homo sapiens
tgtctcaaaaaaggaaaagaaaaaggaaacaaaaacaacccataaacataaaatagggtcacggacatctccaggcagagatctcctgcctctcctctggagaggttacctcctctgaggcctggtaactataatattgggtggtattttaaaaactaactaaaatgttgaatatttctctactatttataaaagaaataatccaaaacaaccaacctggaagaactttaaggttactcatccagcctaagagaagaaagatctaccctctcctgtttacttctccctagcaaacaagagatgttgactcagaccaaaaggaatttttctgacctggaaagaaaagcctcactgaaacatgataaattccaaatggctctgaatcctaaacaaaaacttgaccccgaagtagctccccacttccctgtcacattacttaatccaaaaatgacctgatttttcacaaagaaaggctcccaaatgacttcaacataaagattaattccttacacctggctatatgaaacccaactgcatcagaagaaatactcctacatgaatataacagagtagactattattaggaataaatgaaccctgatgaaggccttgcacctacctctgatttcctctttggagctatggacaaacagttatccaactgcacctcgtggcatctgtacttaaatccagcacaccccacactgcgtggggtccaagttaaagtgccacagcaccccaacatcctaagtgtggcccctaaggggtggatgccataccacggcacagcttagatcacagccacttgtgatctaaggacggaggggcctgttcccaatgtctcctcaggattgctgatgtctgaggtggagttcccatctccttgcaggatactcctactcttggccaagggagggatctatgatggtatcttcaaaagatttccataagatcacagggtgctcctgagtctcattaccacagacatctttgtaagcaaagaacacacatcaaaattttttttttttttttggagatggagtctcactctgtcacccaggctggagggcagtggtgcattcttggttcactgcaacctccgcctcccgagttcaagtga

SEQ ID NO: 53976 - DNA, 712 bp, Homo sapiens
gacatacagataaattgtgtgcagctggtgacctgggccttgatgacaagggcatctagtgagtgcaagccttatctatcagtagccacaaaaaggacaataaaatgactctgtggttaagtggcctgaaactgcacaagtcatttcctctttgtgggcacccaagtccttttgtatagaaatgagggagttggatggtctctggggttcctatattgctctaccagtctatgatgctatatcagaaaaattaaacaaactccaggcagcctttttcccacaagtagaaataaaacagccattcctaccaacacataattagatcttgaaaacaacccataatacaaaattaaaagtacctaatctcctctacaacattctgtattaaacacgcatttataagcatgttcccctgcaatcgcagagttcaaagttctgtagacaccattcacccagaacagctttccaaaccctgagagtctggtggaggtgctggaaacaccataagcaagcaaagtcacggtcccacgcagattactggaaaagccttctaagagcaagaaaagtcaaatatggagaagagcgtccacgtggctactactgactggacacatttctatatttaccatgtactctgacagcagctggggatggcaggatggcatggtgcacaccaccagtgaattaagaaccaaacacccagtctgaaaat

SEQ ID NO: 53977 - DNA, 736 bp, Homo sapiens
aggacccaaagtacatcagtccttccagactgctgacacctgcaagcacaaagaactaccaccttgtactctgtagtcaaaatttatttaactgaagcaagtctgagcacagcaatgagagattgctatgtttattttttttttgaacgacaacaacaaaaaaaacagtccaagtttatatacataatgatttataggcactttgaagcctttaaggttttctttctgctcccggtctctcatctctccattcccaatcacacacactgttgccagaataacattcctccagccctgttacgaaaccccggcctgctggagaatgaaaaggtttccctactgcaggtgaaacacaagtatgcaaccccctccctccaccacacacacacacacacacgcacgcacgcaggtgaaacacaagtatgcaaccccctccctccgccacacacacacacacacacacacacacaccacttccatccaacccctccagactcaaccattaccacatactgggcacaggccttttcagcacccgatatctgacaagcaacattcaacatgtcaacccggagacaatacaagatccttgcaatgcattctggatcaacaagtaggtatattaagtctaatttattagactctaggcatttcgaggcttcacagtatgtatgatgaatctgtaggcaagaaaaacacagagtaaaagccctttattctctattttctatctagt

SEQ ID NO: 53978 - DNA, 2574 bp, Homo sapiens
gttttttcatcatgccacatacagcttaccaaaatctttatttttaatttaaatcacaggaaaggcaaatgctgtaatgagtctgcaaatatttacaagagaggagtgaagaaataagcccactaaattcagtgagacaagtataatgagaaataatcccaaggctcatttttctcagtttctcagaattgataggacaacaataaaaggaagggaagaaattttgcaagactaactctcaaaaagaatagctatttgcagaatgaatcacagctattaatcttttcttgaaaaatatatgacagcagggtgttttccctgtctctaactttaaaaggccggctgccaaagggctattcgatgaaaacattacataccatcattgagatatgcactctttcaacctgagaacgcttattgaaaggtaagaaaaaaaaagaaacgcaatcttctgaaaacattaaactacaaaacagtcacattaacaaaagtacagctaagcctcacaatgcaggtcttctcaagtacatgcaaaagtagtaaaatggagacactctagggtaggaggcctgaagtaaactgcactaatccctttgtccacccccacccatacaaattgtctttgaagtattttgtgagatatcttgattttatttttaaaatacatacaggccaggtgcaatgactgacacttataatggcactttgggaggccaaggtgggaggacagcttgagaccaggagtttgagatcagcctgggcaacacagcaaggctccatttctacgaaaaaattttcttttaattagccgggcatagtggcatgtgcctgtagttccagctgtttgggaggctgaggcgggagggttgcttgaacccaggagtttggggctacagtgagctatgatcataccactgcactccagcctggaggacagagcaagacaatcaatcaatcaataataaataattagtaattgattaatcggtgataaataggtaaatgagttaaaattcatatagaatttacgttacgccataatatttgcctttgcaatacgaaagttgagccttcaaataaatggaaaaccacccctcacaaacccatacctccctcagcaatactcacacccagtgtgaggaacatactggaaggccactacaaatagcaacatgagggacagccatcgggcaccaggcagacgagggacccacggaggagctcctctatgaagactccagtctagtgtctcttccccacctcccaccctctctttgaactccctctctcttctgccctctacaggaaacaaggtgatatcaaaataaaggggtctgggacaaggaaacaagaagctcacctctatcaatggaaaacataaaagtctcactactacaatgaaatatttgcctgcctctacttacactttataccaaagttcaaagttaacaccgttaatcaccatccacaaaagcatgactaaccaagtgaagattaactagtcatttcctgattacaaatggaagtagaattttcccagtatcattgacagtgactattagaatgtgttgaaagtcccttacaatcactcttccaaaaatgctttaagacaaaatttaaataaaaattttattcactaacagctgtccaagattccaatacaaacataattctacgttgtgattaaaaagaaaaattattcagcttaaaaaaacaactagtgacaaacatgattagagttttgttttgtttcttttgagattgagtctcactctgtcacccaggctggagtgcagtggcaccatctcggctcaccacgaactcctcctcccgggctcaagcaattctcctgcctcagcctcccaagcagctgagattacaggcgtgtgccaccaaacccagctaatttttatatttttagtagagacggggtttgagatctgtggggtttccccatgttggccaggctggtctcgaactcctgacctcaggtgatccgctggtgttggcctcccaaagtgctgggattatgggcgtgagccaccgcaccctgccatggttagagtttttatcaggtatttgttctggaaagcagactcaaaattaatataaaccatctttctcaaaactcctaatataaagctaacaccaattcacaaaagaagagagtaaattatgcttctgcgaaagtaaaatcaaagctgtttttttttttttaccataagcagtcatagaaagaacaaagctgttttatacttatttcccattgacaaaattaaccccaaacataacaatcacttattcagaaaaaaaagtgtaaaaagtaaccatatggttttaatgtttcctaatctcctaatttattatttagaatgttaaaacttatttctcaggttcaaaaaaatcctttaaaaaacttttactataatgccttatcagttactcaactactaaaaagtaaattcattatatcaacaaagcactacaaaaaggcatgtgagtgatacacttctgcacttggaaaatctgccaaattcccatcattgaagattacacatataacaaatatatggg

SEQ ID NO: 53979 - DNA, 1448 bp, Homo sapiens
ttctcctcagcctcagcctcccaagtagctgggattacaggcatgcgccaccatgcccagctaatttttgtatttttagtagaaacagggtttcgccatgttggccaggttggtcttgaactcctgacctcaagtgatctgcccacctctgcctcccaaagtgctgggattacaggcatgagccaccatgcctggccaaaataggtgactttagacatcccaaaaggtcagaagcaacaaactcatgtctccctccccttttacggttgagatgctccacaatcccaactgagaacagcaagacacagttacagaaacagaaatgagaaagcgggtgaaggggagaaagggggacggagagaagcaggggtctgcagtattgacctggtcccaagaatacggggtgtttatttaggtggttgagcaaatagtcggtgaggtcaaaggtatctcatgcatacaatgtgcctttcacttttcaacaggagccaagggttattctgtaactatgtgctcaggcaaggaagatttcccacttctccactaacaacagtcagaagccaaaagctccactcaggtgcttggctacattttgccttaaaggacagctgaagtggtgcggttacctccaccccaacaaggactaagaaagacgtctgcccaacactatggagccgattttaccacagaggtgaaaatcctatcccctcccacaatgagcattctatttgggggaggcaaaaccacagtgctctggtttgaacatttgtgtcccctccacaattcatgctgaaacttaatccccaacgcaacagtagagaggaggtgcctttagaaggagattagccttagaaaagggccctcggctcccccaccacgtgagtgctcagctgctaggcaccaacctagcagcagaatccaggcccacaccagacactggcacctagtttggacttcccagccttcagagccgtgagaaataaatctgttgttttataaatcacccaacttcaggtattttcttatagcaacacgaatgaactaagacacacagcaaaccagcatgaaacatctaggaaagtaggaacacaagaacacagcacaccacgctagggacgcctgggcccgcaggtggttctcagaactgccattgagaatgcccacagcaaagggcccattaggcaaaggcccaggaggaagaaggcaacagcagatgggggcgtcttgctgaaaaagctgagactctggactgcctcatacaggatatgggtcttactacaggcaataccctcgaatattttctactctattctttctctgtctttaaagccaattttaacctacgaagaaatacaacctcctcttctcccactcttgccccaccaccaaagacaaacacacatatgctagactaaccatcctacatgatacatgcatgtatgacttta

SEQ ID NO: 53980 - DNA, 590 bp, Homo sapiens
aaaaaaaattaagaaacaaagaagccactaaacaataactctactatcaaaaataatttcttggctgggcacggtgactcatacctgtaatctcagcaggaggatcacttgaggccaggagttcaggaacagcctggccaacaaagtgagattctgtctctacaaaattaaaaaaaaaaaaaattagctgggcatggcagcacacacctacagtcaccactactcggcaggctgaggcgggaggattgcctaagcccaggagttcaaggttatagtgaggtatgatcacccagctgcactcaacctgggcaacagagtaagacctcgtctctaaatataataataatttcttaatactattttaaaatagtaacacatttattaaagccatgaaagtcaaatgtctcaaatttaagattctatgtacttttgcaaatatgcccataagtagcccaaacttgtagccagcttcatatcaagtagaaataatcacaagcatctgtaatgaaaattgtcaacttcactgatttcactactttttaaatgataaaaaattatgaaagacgctcaaaaaagcagctatgtacata

SEQ ID NO: 53981 - DNA, 2032 bp, Homo sapiens
tgggcgaaacctgtctccaagaaaaaaaaaaagaaaagaaaagaaaaaagaagaaaatacatcctgaaaaccattgcaaattctactcatgccaactaggaccatgcccaggattctggtccccagttaacctcatcagtgacacatttttctgccgctggtcataaaattcagagtaaacgatgccccattttgtccttgcactggaagggttctgctgatgatgcttcagtatactattagaaaattctcctctcttctagataaacctgcatctgtagacataaaatgtttgggcatataatttaatttcctaaaccagcttccttattggcagactttgatactcctaaaaatgcatctgttcctgacccctttgcaagcactcaaagtattcattctgtaatccaatattggcctaaactatgaaatgctagaaaatgctataattatctacatgggccactttaagaaaacctcatgcaatcagggcttagtactaacatgagaaaagctaggataaacattagctgagtaaagaaaaagttttaaaatcacatcaacttttttggagtatccaacaatttccacatgccactgctatatgttattttacacattctttttaacaaatcccttcaagaaaggtagtatgctccccattttacagataaggaaacccaggttcagggagaggtaagcaatttttccaaataacacagctagaaagtggcagagcattattccaaagtctttccactccaccacactatgcctcataaccatctgcagaagagcagctttggaatgaaggatattaggagaggcaagtgaattgtcactgggaagtcactgtgttgcccacaatttccttcttcctcttatcacgtcacactgtctacagaaggacacctcatgatgagtcattttctagttggggcactcaagcactaaggcccttcaacttacagacagtgtaatatggaaatgtgttttaatcctggaagcactgagtttggattaatttcactttactcattcacagaagaaaaaaattcctgagaacagctcctacctaaaatgcaagaactagaaaagtccaagcccaccctgtgaaagggcacacctggaagctccttaagttggtgacggatgacaaggaaggtttaacagcacaggaaattcccccatggtataaattatactaggtgtgactgaaacggctaaattaggtcatgatagatggttgtgtcagacagaacaggttatgcaaacaaagactatgacatggaggatgatttttgctgcacaaaaagaatagaaagaggcggaaggaaaaagctacagaatcataggcactgaagataaatgaaaactaaaataaatgaagacaaaattaaatggcttccagtaatcaaaattcaatactgaaacttttttaaaaagaaaaaaagaaaaaaaaactcaatactgagaatagatacaactcaatgagaattggatatgaagcacttttttttttctaataggaaccaaagaaatatactacggcatagaaaactggctcagaacagggtatgcaacggattttattcacacgtgtaaatctttaaacttaggtcctaaatggtcctatcacattagaagaaaaacaatgtacataatatttaatcaatgagtaagcacttactagatacactgtgctcttgagaactgtttcacaagtggccttgctaaagtagaatatcacattttagctagaaccacccaagtatttctaaaagtgactggtatctattccacgcatcaacaaaagggaaaaagaaacttctagaactttccacctcaaacatttcactgaaggatgatgcacatagcaatcaaacattccgattttaagcaagtaaaagagagcaaagaaaaagtattcatataaaacaggaagtgagagggacaatttgaggcagccaattcaacagcacatcgcctaaggccaaggcagaattattttcagcaggcaacatgctacgca

SEQ ID NO: 53982 - DNA, 2314 bp, Homo sapiens
aaatgggaaatactgcacccaaacgaatgcgctccccaccaaagaggactctactacaaaggaaatatatccccgggtgcttgggagaaacttcagcgtgggctgttgtcaaacacagacacagtcggtaaaacaatttaacaaaacgccttttcacttctgacacacagtagaggaatgctgtgaagtggagacaatgttatcagtccaccaggaaaaagggaaatccactcaactcccaagtcaggcccggccccgcagcccagccacatggaaccagcccgggataggtaggagctgaggtcctcgcaggaaaacttttcattccgcgactcttccaaggttgtgctttccagagcccagcaagtgggatcagctcagtaaatgctcgcaagcgagtgccaagtgccagcggtggccctcccgggaacgcctccccgaccccaagccggcgactccccaaaccctgcagcccccggacgcgacgggccgcccctgccggcccctaccagcaggggacatggaggaaaagccccccgccgctgttccgcccccgcccgagtaagggagaggaggcagaaggctcgcaacccgcctctgtcggaagggcagtcacgaaactctcctcacaccaaaagttcccagtccccggcctgtgcccccggggcctgggagccgggaaaggcctggggctggatttcccggcctgcgccccccgcgcgctggctcggggcttggctgggtctgcagactccggggaggcgcccagggccggcctatgcgccgctgcccggctcgccccgcgctaccgaggccggagctcccgggcggagggtgagggcgggggccgcgggacccggctgggtgtcccagaggctgcgccccggcccgcgcagagaactttggcgcccgcagtccggggcggggggcgcccgcgaggcccgaccggccgcactttccctttccccgcctccctgcgcctctcctcccccttccaggaagcgccatattgatcccggcgccgtccccgccgccgccccctccccgcccgcgcccccggcccctcaccttggcgatggccttccggtagcgggtcaccgcctgctggatgaggctgaaaactttcatgtggccgtccccgcacggcacgaccacccgggtccgtccgaagcacacggtcactttcatgccgccgccgccgcgggcgggcccgcgcccctcgccgagcgcagccggagcagccgaggccgggaccgaggacgctgggcgcggaggagccgctggggactcgggcgcgcgggcggctaggggcgcgggcaggcggcggcgacgccggggggccgctcagctcgcatgcccggcccggccgccctcgcctcgcctcgcttcgcccggggcttgcctcgcctctccccgccgcggcgcccgcagcctccggccacctgttcggcgtcgcggcgcgctcgccggcggctgcccggggctgtgtggcgctggcgctcgctcggggccgctgggggaggggacggcgggaggggaggggaggggaggggaggggagggggaggagcagggcagggcacacaacaccgcgcacatgcggcagggggaggcgcggccggctacccgcgcggggcggagcgcaggaccgcagctcgcgcccccgccaccgccctcgggggccgacctccttccctccttccctccctccctccctccctccgggggcgcgggacccctcgccccagtgccagcacgggcaggcggccgtctgcccccaccagccctggcccaggcgccccccagcccccttcaccccgcccgcccagcaccctgcagggctgcgtcgcccctcctcggggacgccccttccacgcctccagaagtctccacggagccccccttcccctttctttgtcacttttaatcccattcctcgaactggagggttttgggtgcaggcgctcccggggaaagcagtttgtgctcagtgcggtgagtcccctcctcaccgccccggaggctccagcccgagcctctccgcccgcggggactcgagcctgcagcttgctcggctgggtttctgccctgcccgctccctagctctgctgcagggccggcagcggcagttctgcctgaaacgcaagaattaatagtctgctctggggagacagtggggaagccgtgagcgaccgggccttttccagaggccactatttaccttgaagtttcctgttgaccctctgctgacccacccgcttaaatagattagaacttaaacatcgcaattctgatacatttatttctttgaagtt

SEQ ID NO: 53983 - DNA, 671 bp, Homo sapiens
agtatgtcaggcatggcgctaggaacttcagataagttatctcatacaatcttcacaacactatagtttttgttcgttaagagatggaaggagcttgctcggggtcaccttggcaagctattcaatggactagaatgattcatcttccaaatgtctacagttccccattgagctggagagagagggcagcctccctaacgagccagctctacagcttcagctcccaaagcttgcagagtaccagttgccatgacaacaggacaaaatgcagagaccctagctgctgggaggaaatgacatgagccaaaagagtaaaaactcaccccggtactggaatgtatgagtcacttacaaagaacacctgtaattttgagagcttaaaccaccagagggagacagagattgccacaggcgggggaatctgtctgtattccaaatgctgctgcctcccagcgctcccgccttttccccacactaagggcctctgcccagtctcccaggctgacccttcctctttcagagctcctcaaactatctcctcccaactggagctcaggacttgggacctggccccttgagggtgacagaaaggtgacttgcatcttctgggggaaaaagcagaggcattcagaaacgagagcccttccagaaaaccagtttgcacaatgacc

SEQ ID NO: 53984 - DNA, 491 bp, Homo sapiens
tcaagtgaatacatatattcttccctttgccccttttaatacagtgtactgtattttgtatattatttgtagcttcagaacacattttaacttagtggtcttttcctatcagtacacaaagcatttctatgtattttacagctgcacagtactccattatgtggatataatttcttaacaactgatggaaatttaggtggtttccagtctcttgatattgcaatgttgcaatcaataatcttatacatgagcaagaatatatgcaatataagttcccaaaagtgaggttactgtgtcaaagtttaatcttgtagacagatccttctaaccacagctgccaacagcagagagttcctttgccaacaatgtgttgccaaatgttttgatctctaacactgggaggtgaataatgatctctcagtgtagtaggtttaattttaaacgtttcattaaagcatcatacatatacagaaaagtatacaaaccataag

SEQ ID NO: 53985 - DNA, 1552 bp, Homo sapiens
cagtctgcaattcacagatgttttatttgcatgcacgtaatggtagggaatggtccagactctctagagggtaagcaagtgctagaaagcgtgtgaggatcttatttcaccagaccctaagggttgagacaagaagtctagcatgcacgtaggatactcctccccaaagctatcaatctttgcagtctgcggaaacaaaagtgaaaacactcggggtaaggatgcatgagatgcccccccccacacacacacacaaacacacagagttgtgtattcgtgtgagcacgtaaatatgtagaagaatacacgcactctcaccttccctccttcgaaggaaaatggggccgcgggagaggcggccaagatcgggttggggaggcccgggatccagtccagggggtggcagggcttacgggtcagcgctctggggagccgaggtcacttacaggataccatcttcccgggcctccccctttcatccctctccccacacctcgtcgcccccaactcctctcctccgccccagccccgccacccattaaccgggaagggaagtttcccggcgcctgcagcccggctccccgaccctcagcggggttaccttctgcagaagcagggcaaggggcaggggacaaggggagggggaggcagcccgaaggagtgaaagacgaagccccggcgaggaaggtgggcggaggcggcggcggcggcggctgtcagctcgcgttcccctgctcacagcgctgccattactgtgcgccgaggccgcctccccggccggccgccgccaccggccccggagacgcggggggtggggagcgaagcccggggagcccgcgcgccgacactcacctgtctccgcgaggaaagacagcaaagtccaaggccgccgccgctccccggcgggacaggggcggtagggagggggggaaaggggagaaggacgggccgatcacgggatccgtaaaacaatcgtcctcctctgcctccggctttgcccaacacacaccctccggtctccttcttccgctgctgccaaatcccccccgccacccggaaagcaatggtacaggccgcgttacggcaagcgcagggagccaagcttcgtgtgattgcgaaaggccacggaaattaatattccaagtgattccttgctgggcttgctgtcaatgaggcaattgcggttcgctgagctgatggacacagtacccacccactacccgttagttcagggactgctaataacaatatgttggaatggtgctttcaacagaagtatgttttccttgtttcagacctatgtgaatatcctaagacaccacaatcctcttgccacacacttccatgggctttgcaaatgatcaaaaataaattagcaaaactacttttcctctctgacaaactctttttcttgttagtttttatctacagagaatttcttggacatacatgtattttcgataaagaaacttcacatctttttcactaataccccaccttcaccaagccccaagcctatcagtttgaagggttttcctcccttggagtttta

SEQ ID NO: 53986 - DNA, 2340 bp, Homo sapiens
tatttttagtagagatggggtttcaccatgttggccaggctgctcctgacctcaggtgatctgcccatgtctgcctcccaaaatgctgggattacaggcgtgagcccccggccgacctttctaatctaaaaaaaaaaaaagagatgaagtctcactgtgttccctaggctggtctcctgggctcaagcgatcctcccaccttggcctcccgaagtgttgggattacaggcccgagccagcgggcccagcatgcggaccatttccagtcaaatactgggataaactgcaataaatgaccctaagaagcaggtgaattgtctcaggagctcaagcttcttttggagaaggactcaaccagctgtgactggctgtgaatatggaggaaaagggccactagtcaaggtatgtagatagcttttagaagtcagaagaagcacgcctgcagtcccagctactcaggaggctgaggccggaggatcgcttgagcctggggagatagaggttgcagagagccgagaccacgccactgcagcccagcctggacagaggtgagacgctcgcggaccttagcttggggttggcggcgttaggaagaaaccgacctcgagaccctgaagacctgacaacagccgttactctggctgacaagtcattggatttctggcgcacgcgcggcgcggcacgggcagcttccggtttccagccttgcccccgcccctaccttccgccccacctccaggctagttcctcctcttggccccgccccctgaccttccttctccctatccctaggccccgccccctgacccgcaccttcccgccgcccctccccggttccatttcattgttggattgtggcgcttcactcctgctggcggccggcagggggcggagttcgagcctggatttttttcctcggggcctcccccgggaggccgtcccggcgtgggggaggggaggacggggcgggaggacgcggttcggtcggctgcagcgctacttttggtccggggtcggcagggaggccgcggctaccgcatcacagctgacgtgaggactacgtggggccgctgccggctccgggttgctgggcggcggcgccgctgctgagcggcggtcgggctcgccgtctccacctcctcgcgtccgtaatcagtgacgaggtccgctacgtaaatccctttgcggcgggtaagtggtgcgtcggctccggccccgagacccagcagcgggcgacgcggcgcaggaggtggaggtggaggcaggaggcggagcggagccgggtgcggtggagcagcagaggccgagcggagccgtgggcggcgggccgggaccccggggccgggccaaggactggcggggcagccgcgagttcacctgacgcggcccctcgctcggcgcccccgaggccgccggctcgccgccccacgcccgcttcgtgcgctcagctgccccgggacccgcctgcctcctcgcgaacttgggacgagttggaaaatcctccctgagagagccgtgcggctcaggggagcggtttaactcggaaaaggaaaaggaatccagaagtaaggacctcggatttgagtgcccccagcgcctctgccccactttacgagcgcagtttagacgaaagcggacgcagcccgttttcccccaaaacctgggccggagggcctcgcagctgagtcattcggtcccgggcgcgggcagtctccggagtgggaagggcagagccgcgaccgctctcggaaggcgcattttcccttctgcctgagtcttgcctttttagggccatctggtaaggtttccagagcctgttgaatctggggaataaacacattattaaacatactttttttttttgagacggagtcttgctgttacccaggctggaatgcaggggcatgatctcggctcactgcagcctctgcctcctgggttcaagcgattctcttgcctcagcctcccgagtagctgggattacaggcatgcgccaccacgcctgctaatttttgtatttttagtagagatggggttttaccatgttggtcaggctggtctcgaactcctgaccttccacccacctcggcctcccaaagtgctgggattacaggcgtgagccgccgcgcctggcctcagcatgtttcttgatcctgttgcgttttatttgtatatcagatacctgagtttgaaatcacttaggggtttcctgcatgctgctcagtgaagcagcggtgagtttgtaatcacattttaagaaattgggacttacagggccagtctcaaagtgtcactgaaattgaaagagctcctttaacactgtggcttacgtacgtgact

SEQ ID NO: 53987 - DNA, 1484 bp, Homo sapiens
gtttttatagggcttgggtttcagtgagctcgcctgtgacaaagcaaattgatggcagtgataggctagtgatgtcattgtgatgtcagtcctcctgcttatcctgcacatgcttgctaatttggaacactttatgttgaactgtggtagaggaaacaagacagttctgtctgcagaagcccattatggctgtaactggagatgacacaggtaagaatgttaaagaggggttttcagttaattgtgcagattgttttgaagtttaggaagtattcaggaacatctgagtgtttcagaaagtgttactctcctagtcacttaggtgtaagactttttttgaaatatacatctatatattcagctcactttgttagggcatcttagtgtgattgtttctttgctcaatattctattgcttgcttgactgaggcactaatcctctcttcctccctctatcctccctcccctcctccccactcttcccctcctcttctcttcccctctcctccatctctgtgtctctctttcatatgcataccattctgccctactaaaataagctgttacttcataggcaacctgttgcaaattcaatctagccgcagattaaacatacagtatataccgttcatgttctgatttcattactgtggacaaatgcagctccaaacagaataggaaaaacccgcgtgttatggatgtttgtgtgcctacttgtttctttcctcctgtatttaaaatggtctgttcagctaattgagttcaaaaggctgatgtcattacatttcctggaatcgtatttcagcaggggaagtggaaaagttaaaactccaagcgagctgcacattgacgtcagctccgagtcatgttgtgatttagtcagttcctttccgctttgtaaaatgctgctgacagatttagagttaactagctcaccactgcctctgcctccaagctgccttttagactgaatagcttttcttgttagccctactttaacatttcttttgaagtggttgtctgcttgaagagggaaacacgtcatgaaactgtaatgcatgaacagaactcaggagttgtctggccagcttagtggtaagatcgagcctcctactgaggccgtccctgcatgcgcctggtgagaaatggattatgtattgtataagctggcgggttctttactcttactccatcctcttactccatctataggaacttgcgattcagagctcctctagtgttcagtcagggaagtgcttgtcttttacttgttctcccagcctctggtatttaaatttgtaatcggtaatttttcactaggtttgcttttctcagtaacaaagagtgattttggaagacttagttactaataacctttgtgtgcttgcagtgttgtttattcagtggtcttgtttgtaatacagtactgaatttgcagttgaattaagagttttaaacaacttcactacaatttagctcttcga

SEQ ID NO: 53988 - DNA, 338 bp, Homo sapiens
cagtgttatcaagggcccagactcccgctcccggctgtgtcatcttcagcatgtatcattcattctcatgatcacagcgcggctactgaacctctaggcattgcctcagacaggaagaagggctagagccaaaaattggggctagctgaggtctggcccaactgcaaacctttcctggaagatcctcccagcaactttcacctacatttcattggctagaaataggtctttagtccctagctgtacaggattctgagaaaggtttattttcgctttctaaatctcagtttcagagcaagacaagagaaatgcagatgatacctggctgttaggttgct

SEQ ID NO: 53989 - DNA, 904 bp, Homo sapiens
ctaatggttatcttacaaaaagcatgtgcctggttatgtttgttatgtggctttgtacagtccttacctaggatcgattggctgttgagttcggggggcagaagtgcactgacccactgtggattgtgttggaaggctgttcctgtagtcatttgccttgtgttgcttccagggaagctgcccgggagtgtcgcaggaagaagaaagaatatgtcaaatgtcttgaaaatcgtgtggctgtgcttgaaaaccaaaacaagactctcattgaggaactcaaggccctcaaagatctttattgccataaagtagagtaactgtctttgacttggaccttgtttactctaatcaaggcaggagatgcagcagtcctacttattgccatgtggacttgtgggaaggacacgtgtgacccttaagaatccagtttggattagtgtttgaaattgaattgggaatgttgttccaggatgtggaatgcagccgtgatcacacttaccgagcttactttgatctgtttgtcaatagcatgcaaaaaatgctttgtttgccctttgcttctgctttttttcagggaagctgccaaagaatgtcgacgtcgaaagaaagaatatgtaaaatgtctggagagccgagttgcagtgctggaagtccagaacaagaagcttatagaggaacttgaaaccttgaaagacatttgttctcccaaaacagattactagaaatatttaactatgaactgaaggcagcatgtatagttgcttttgaaggaatacaatatatagctggcaagaatggtggcttcttttctttgtatcattcatcttcttctttaatcacttaacattcctaaaatgcttcactgtacgtagttaagtcgtagctataacttcaaattttttaa

SEQ ID NO: 53990 - DNA, 642 bp, Homo sapiens
tgggacctagggctgtggcaaccctgacgttaccatcctgggcttgctttcttccaggtgtgtatgtagctccacagatgctacagccacgtagtcatggcagtcaagaataacagctaccgtgtacagagtgctcaccctgcgccaaggggcttccacatttaattctcctagcagcccaacaagtgttgatgctgttaccattatcctcattttgcagatgaggaagcaagcttggagagaagttcagtagcttgccaaaggtcacatggctcaggaccaagtgcagaaccaggacagcaagcctctgtcctggcggttctcacccagtctggacccaaaggcaggaaagtgttaagaaacacttgctggcaatgactcaagcaggtggtggctgcagagagagagagctctgtggctctgagtggctatgtgtgggaacacccagaccttcctgttcaaatgcacaaaagcacattttcgctcctctctggtttttcaaatccctgatgctgatcaggaaaaaatgactctacagtttaaggactaaggactagctagctattggaacatcaaagtcacagttatgctcattgaaatagaatcttacagctaaaagaggtctcaccggtgtaatttttt

SEQ ID NO: 53991 - DNA, 1498 bp, Homo sapiens
tttgaacaatttctattcagagacttttgatatatgatattatgaataagataatgttagaaattccaaattttagaacattaatccatctcaatattaatttaaaaataaatacacatacatacatacatacttctttggtcagccagaatttttttttattagccttttcctcacataaccagccagtgttaaaatagatttgatgtcatgaaggttgcagcttttaggcagtataattttttttcctggcatgcataattctgtattatgtacatggtttcattcatccttttatccagatgtctgaattgatgtaacccagctggattttattggagtttagacctagaagggtagaagacaaatctaccttatcaagggtataacatgcctaacctattagtctttctattcaagtaacctgacttaatatcattaaatgctgggttgctgttgctccaggaatacaggattgtggcagtttggtggggcagggaggggaggttggagtaccagcagagggtttcatagagggaacaccccatgtaacaatagagaaagaagactgagttgctggaggggcttagcagaaaatctatgggaactcttccacagctggtatggacttcacgcaccaaagcacattgagattagctgtggtttcttagggattttcactacaatcaattacttgaatacttctagagcatttagtatcccagacacccctgtttcatgattttcattttaaaatgagtcaggcagtgattacctatgttcttaaaaatccatcctggataaaaagaactacagaaacaaaagaacaaagtccaaagctacaggcgctgtgaagagcagaatgaacagtgggtgtgtgcttggctcgaggaaccatggctgacagccaccagacctgggttctggtcctagcttttctgttaaaactccctgtgtcgctttggcaaggtcatttgacctctgtttgattgggaacctctgttttctccacattgaccttgacatttgtgacactgtgatgaaattcacagtgaaatgtaaatttcaaagaagagttcatcagatcttatttgttacctcatccctgtgaacacagcttctagattcttagtatcaggtcatgaacctataaaattatctttcagaatgtcttcaacatcaatatttttaataatccattctgaggattgcccagcatttaagagaaaaaagccttaggctgaaactggcctgtgatgaaggcagggacatctactttgattctggtaactggattaagattttcacacatgaagactttacttgggcaaattttgttttacttatgttatttataaatgcaccaaaactgtgactgaatgaaaattttccaccgcaggagtttcctctgcccttctcaacctaacagggccgcaccaagttaacagaaattatcactggcttagaaaaggttgtggttttcagtgtacattaggag

SEQ ID NO: 53992 - DNA, 638 bp, Homo sapiens
agaactagcaccaaggggctgggggtaaaacattctgccccatgatccaatcacttccaccggtccccaccgccaacactggggattacagtttgacatgaaatctaggcggggacacagatccaaaccataccacctcccaaatataaaatgtgatgctataaggacaaatactaagctacaatgatatttttagttcatagtgtttgtcattgtgaaatgtttattgattaagaggaaatctggccagacacagtggctcacgcctgtaatcccagcactttgggaggctgaggcgggtggatcatctgaggtcaagaattcgagatcagcctggccaacatggtgaaaccccgtctctactaaaaatacaaaaattagccgggcatgttagcacacgcctgtgatctcggctattcgggaagctgaggcaggataatctcttgaacccaggaggcggaggttgccgtgagctgagaacgcaccactgcactccagcctgggtgacggagcgagacgccatctcaaaaaagaaaaaaaaagaaaaagaaaagaaagaaaagaaggaatctatttagcaaagaaaagccttgggaagtaagttgatctttagacatgtgtgaaataggatacttgag

SEQ ID NO: 53993 - DNA, 1101 bp, Homo sapiens
aaaaaaatgacctactgtgggtaatgagggcacatagaacagctctttccataagagagtcattccaggacgggtgcagagtggtgctcctgtaatccctccgctttgggaggctgagttggggggatcacttgagcccaggagtttgcggttgcagtgagctatcattgtgccatcctactccagcctgggcaacagagagagatcccatcacttagaaaaaaaaaaaaaaagaggataattccagcctcatcctcgggcttttgtgggaagcttcttccctggtgggcctctttcttctccaattctccttcctgttgacatgctcaaacactctggggctggctcattcttttgttgccaaatgaggaacaggctaaagagcccagcgtggagctgtcaccccgttctgctgggatacacagctgacagtccaacatgtccatggtggtgggcatgggggtagatttggtctgagtctggcaggaagccagaggagaggttctgacaatgatatagatgtaaaaggaagacgatggggccctggttgctccctcttgtgacagaaaacactgcttccaagtatcgattcccaggatgaaaaaccaaagaaactaataaaaaggacagtgtgggcacgagtgctgcccttttgttccttacatgttcctgcttgagttgtgcaatgtcgggtaaatagctgagcggtggaataaagtcactgatttactaagttgaaaaaactgatgggttaacccatagctgaaaaagtaagaattatttttgagatggggtgttgttgatggctgatgtgatacttcagttcttatcttcttttttcctttttttttgagacagagtctcatgaccagactggagtgcagtgatgcaatcttggctggctcactgcagcctgcgcctcccaggctcaagggattctcctgcctcagcctcccaagtagctgggattataagcatgcgccactacacccggctaattttgtatttttaggttggtctcgaactcctggcctcaagtgatctgcctgccttggcctcccaaaatgctgggattacaggcgtgagccactgtgcagggcc

SEQ ID NO: 53994 - DNA, 2913 bp, Homo sapiens
ggcctcccaaagtgctaggattacaggcgtgagccactgcgcctggctagaggtagcctctttagagagcttttctggaagcgtccactcacatcttattggccagacttagtcctgtggccagctgtcatctttgagctgggcatactgctgttcctcacaaaacaggccttgaaactatgggagatgggagaacagccattggggagcacagtagccacctctctcacttccaacttatgcctgaccctgctagatgctacactttgcctgctcacaggtacatcctagttctcaaggatcccacatatatataccatttctcttcttgaaaagtatggaaggataaagaaggtagagttcgacaagacagagcctgggcttcctaaggccatttagtctggggacaaatggtgaacttgcagtggtgaggtagataaatcagtttccaagtgggctttctcccagatgccagagaccctggctgtccctgtttcatcatgcattccatcaacaaatgatttacttaggaaaaaatatggggcacaagtgctaccctccctcactcgttccctcatggtggctcccttctcggctaagctggaacatgacctcagaatcctcaacacaacgtccctggcagttactctggtccaaaagacttgacactactacttaaaactattagccatccttatttcttgtgggaatttttatttggacgcacaatttctgggtagtttctaatttcatataaatatatttctcatggtggaattttaggtatatgcccaggcgataaatgtaggtatttataggcggcaggctttgcatttctcagatttcaccactcagtggctgtaatcactctcattgctggaaacttgttcttgtgattgtttaacttactggactgtgagtttctccagaatggaaactataatccactttcgtatcctcaaggtgcctggctcagtatactctcaaaaatgttatccagaaatgagtcacctgacttgatcaaggtcaagtggctatcaaagtaaatacttcccctgtagctggttacactgtggactgcctactaccaaggacaaaaggcaggcctcatttggagaggaggtcggtgacaggaggagcatcagtagcacaacacacagaatgtcttggttatttcacaactgccttataaatgctcgagtaaccgtcatgagaaactgactaccaggtgaaagggcagccatactctgaggagacactacagattttcctttccacaaaaggttcaggtcctgggctaacttggctcagtgttttctgtgttccagaaggtgactcagggagttgtgcaaatgactgactcatatttcatggatacgagtatggctgatgtaagactgcagttatctcctcctgattcaattaaggtagactattcttgattgtttttatcagtagatctataaattatacaagttgatactaatattgcttatgttttaaatagtgtggttccacagaaaattttgttttttctgtgagaaacaaagctactattgctaaaaaagtgtcaagagcactgacttagctatagttcatctgagttttttttgagacggagtcttgctctgtcacccaggctggagtgcagtggcacgatctcggctcactgcaacctccacctcccgggttcacaccattctcctgcctcagcctcccgagcagctggagctataggcgcccaccaccacgcctggctaattttttgtatttttaatagagacagggtttcactgtgttagccaggatggtcttgatctcctgacctcgtgatccactcacctcagcctcccaaactgctgggattacaggtgtgaaccaccgcgcccggcccacctgagttttatatttacctggttacagtgaccaaattcttcaacagtgatcatggagaaagatgagacaaaataattcccaaatgattctttctgctcaaagaccagggtgggtatgagtagatccaggtcaattttttttttcttttaagagacagggtctcactctgtcacctaggctggggtacagtggtacaatcatagctcactgcagcctcctactcccagactcaagccatcttcctaatcctcctcaagcttgaggacaggccttgttacaatgctcagtgtgtacctctccccttctccactccccttgtccacattctgggctagatccacactctattgaggaactgtctctgtattttgattcccgagtgacacagtgttggagatcctgtggctagatacacaggttatttctgcatatggctactcctcaaccttgttgcctgtcttactctggtctgagagctgaaccccacagaaataacaaggctcccctcatccctttctctgaaagattagtactagtcctaagtggttagctcccagcttcctttaggacagaaaaaagagaaggagagaagtgacacttgtttttttactcacaaagtcttggagataggaggtaggaggttggggtggatgtagcttggactttggaattagaaccaggttcaaatccccaattaggacatttctcagtattttgatcttagataggtttacttatcaaagtgtctatttataaaatggggtataacttaatcagatttagatgtaagaaatagtatagtgcatggcagctagcaggctttcaacgaacgacatctctcattactatcattttgacatcacatttatctgctcagagttggttactgttctgcaatttttcccaaagtgtcactgtgtgtcaggcagggagtatctgcctggaggagtttgaagtatgcatgtagggtggatgagttgtgggggtcggcacccaggtaaatcactagcgaggctt

SEQ ID NO: 53995 - DNA, 3902 bp, Homo sapiens
gggaggggggcggggcacaaaaatcctggcagaccagaggctgtaccaccctttgttaagggtatgtggctacactgatctctcatcctccagatgctcttcccagttaacactgcccagtgaccttcttggacaggaagcatgcagccagccatgctgtcaccttagtgccactgtctctttctcctcttaagcccttcaaaccataatttgaatgtaaatgttatacattttataatgaaataaaaatagcttaatgcatctgagtagatatgccacacacctatggtccaatgactggatgctgactttcatatgtggcccaaattacaaagcagcaatcagaacagacaacaacagacaacaagggaacttctctcccacgggttcagcaatctgacccaaactccatagccccagacaatctgaatacacacatgcaagtgtaaatatgccccagttttcccaggaagcaggaaaatctacacagcctcaatgaagagcactattttggactgttgttgtctacccaccctctccagggctttaattctttagaacttcccttttacacttcttttctcatctggtcagcattaccactttgcagccacttattttccatggacatctgccacttatcctaacaaatagcattaatacagttgagagcatggagcgtttaaaatatggactaataaatgtataaacagtactttgagagggagggaaagcacaggttaaaaaatggctagatgtagagaattaaatgaaatgtttataaagccgttcacacgatgtccacacattgctgatgctagataaatatcaagtcccttattccttctcttaccttttagtaactggatttgtcacgaacaggtactgaggtctgcataaatcaaggcatgatttcatctctgggcctcagtttcctcatatataaaattaagacagttgtactattgtactagtttttttttcaagaactagttcaaaaacattcccagctcccacccccacccccccaccccacaagactctcctcaagactccttcagtaaatatttggaaaaagggtgggaagtttgtttctgccaccttatattcttcccaataaaggcaagaaaagtcagggatggctggcattgtgggcgtcgggagggaatgcgaaccaacatttactctacttctctcccagccaggcatgttcacataccttgatcttagtcaactggcctaagttaacttgttcccaacatgacaaaacccgatggcattctaaaagcaaagcaaagcaaagcaagggcagtcgatgagttgtgttaacttagttttctatctcatgttaacctccaaggaactcaaaacaactccacagcgaattcaatattaaaatagctctgggaccccaagatttatttcacagcttaaagcaaggtcactatcaagtcctcggcaaagctcaaaatacaatagaaaactcccaaatcaagccccagcttatttaaatgcttagaaaaaaaaaatagccaggtgccgtggctcatgcccgtaatcccatgggaggagtccagacgggaggattccttgaagacaggagttcgataccagcccgggttacgaagcgagatcccatctctacaaaaagttaacacacacacacacacacattcaccaccttagcctggcttagtggcgggcgcccgtgttacaaagggagatcccatctctacaaaaagttaacacacatacacaccctaccttagcctggcgtagtggcgggagcctgtagtcctcgctactttggagacacacacacacacacacacccgtagtcctcgctactttggagacacacacacacacacacacacacacaccttagccaggcgtggtggcgcgcgcctgtagtaccggctactttggaggctgaggcgggagaatcgcttcagcctaggagttcgaggctgcagtgagccgagattgcgccactgccctccagcctgggcgacagagcgaaatcatacctctaaaaaaataaattagaaaaataaaaagacaaaaagagccagcccggtttcggagaggcaggtgcagcctcagcgccctgggcctgcgtccccgaccgggccctggctgcgctcccgcccgctgcgggccccggggacgcacctcgcatcccgcgctgggccccgttccgtccagcccgggggagtggaggaggcagaggccgggtggggaagggcctccagaaaccgagctcccgacgacgtctcccgcgaccccagtgcccgagagaggagcggcccccgggagcgatcccacaaccgcgcggggctgcgccgccccgaacctccccgcggccgccgatctgcttccagggcagagggaaggggcggtgacggggcggggcgggggctgcggcgagggcgggcgccgctggcgagggagggccgccagcatcctccctggccgcgccgcaccgcgccgcgaggagtccgggggctgcgcccacgcccgctgcccgcccgctcgtcggctagtcccgccgtccggcgcggacacgcgtgcccccggcttgaaccggaacctcttgccgaggcggccgccgtcgccgcagccgccggggaagcggacaccaactggggaagcgcgggggggaggcggcctgcgcggcgccgcccgccatggccgcggcggggtgaggtaggcgcggcggccgcagtcgcgcggacccgagcgctcctccgccgcggataggccggccgagggggagccggggccgtcgcccgctcgtcgccgccgccgccgccgccgcccatggcgaggccccgccgccgccgccgctgctgacccggcggccggccgccgttccgccccctcccgtggcggcgagcgggcgggcctccccacacgcccccgccgcccgcgccccgcgtccacccgcgccccgctcccggggactgggagaacaggatagcagcaggagtcggggggccgccgaagatggggaacactacctcgtgctgcgtgtcgtccagtcccaagctccggaggaatgcccactcccggctggagtcctaccggccagacacggacctgagccgcgaggacacgggctgcaacctgcagcacatcagcgaccgggagaacatagacggtgagtgcggcccgccgagccccctacccgcccccgcggcaacagtcgcacagccaacgtcggggcggcccggctgctcttgcttgcccagccggtctcggcgacccgtgcataaccggggcttcgcccgcgcagcctaggcgcccggggccccgcagcctctgggcgtacccctcgctggttacccccaagtgagcggccgcggaaactttgcaggcccgcggcatcgagcacggcgggcctagggcgggtgtgtgcgcgtgggtcgcgaggtgacaggagccggccctcgtccttaatggagcggccagagctgggtgggggcggcccgggagctcggggttcccggcactacctgaatgcagcccgaagccaagttgtgcacgcgtttgtcctataaaagcgaagtgagtggattcccattttggaatcccggtgtctccaacctcgagttggagaaccatgttgagtcagttccccggaaccttacaaatggactccacttcccccgttcccattctaccgttttttttaaaaaatgatttttttgagtggcggttccaggattagtcaaatagcttctcccgagaatgctctttaaaagattgtcagacacctttgggttaagtctcagtttttgcatgggcccgaattgcagtcctatgaatttctgatttattcaggtgacttttggttggtctggagtttgcaaaaagaaaaaaagctaagactaattact

SEQ ID NO: 53996 - DNA, 927 bp, Homo sapiens
acttatttataaagagttttgaagccttctgtgaaagtcagcttcaatagggaacattacctgcattaatatatttattaggcagttcatttctgtgaattgtgtttttatacttcattttttccagctactcctttagtgtttttttcagaagtttgagttatttatggattagcctaatagctcattcttataattactgcaattttaaaaaccatctattacaaaccaaagtcttcaccaaagcaaagcctgtataaatctgattgggaaatggttctaagtgagaattgagcccttctctaagtgtggaaattttctgttgtgcattttcctagtgctggtttaagtccaagctcaccatgtatatgcttttgaaatgaaccaattagggcatgtttaactatcagtaggcttaaacaaatgtatttcctcgtgttggaatttggacttaggactttggaaggtggaaaattccaagtgcaagtgaaagatttctataactgggctccatacttaacagccagtcctgtctcaaacttaatctggtaatgtttattgagctggtaacgtttatggagttatacatgagataggctatcttttctgtaggacattggttatcttcactggaggacttttgaaattgaaagaaagcaagagtaacataaatttgatactcagctagagaagaagatgtatttatatttaacttgtcctcatgatataaagacttgctttgtgtctttaaaaaagtggttgctgtttttactgcagtattaatatcttaaagccaatacatagattcatttcttctttgttttccaaattcaaaatgaggagacatttatttctgtgtttcctactactacttgaaaaaatgttgaatattaaaaaattgcagaagaataaacagcaagagctaaa

SEQ ID NO: 53997 - DNA, 3353 bp, Homo sapiens
taggtcctatgtctgtgcttgcctgatttttcctgtgactatcttttacagataaaatagtggaagaatcatcatgtatataagttcaagaagttttcattaagctgctaatttcctaaagaaatctggatcatggtgcatcctttgtttgtgtgtgggaggatatagtgatactgaatgaatcatgtcttgctctgtagcaagaggaatatttggtaaagttgatgttgtttgctttggtgagcagtggaggtggagtgggatccgaccccagtggccctaaaagcagcgagccctagaaaccaggcccacctgggttttcctggctctctctcacttgtgccctcttgtttctcatgaaaatgtgaagctgctgtgatattttggggtctctgatttggcacaggtagcttttcagtgactttgcaactactctttctgcatatcttcagtttgagatgaacatgtttgtgcaactcagcaactcagcacctgatggggattctggagagtgcactgtgggatctaggatcaccttacccagttcccaatgaccaattcatgaggaagtcgcaatctcacaccagaatctcactggaaaacaaaatcagactctcacctaaaaagtagggactgaatatgaagtaaacttttttaaagcaaatatgttttcaaaccgcaaaaacagatgctttcttttggcagttttgctcatcaaacctaagctgaatgtgaacggagactaatttttaactgttaattcacagcctaaatggcaatgagtctgaattctaatttcaaaatcttatttgaactctgtgtttggctgactgaagtgaaaaatgtattgttgtttactgattcagaatcataccctgcagcattttaagccaattttgagcaagtcatggccaagtgtaaatttgcgtacttaacatttatttgttagtcacacagccagcccagtggataggcctgtttgaagtcaggctgtgtgcacctatgccagtgccggctctgctttggggtgggattttgggtgtaggacgaggttcaaaggacctggctgaggacggccacacgggttggacaggccgcttctggagaagcccactcaggtgttgttcctggatcacctttctaggccaagtgtaaaaggagagggaatttctttgttaaattcattcctggtttcagggcccttttgttaccttctcttccacatgagctcccgtctctgtgctgcaggaagttcagaggcacggtttatcatgggtgcttggcaccactctctctctaactatgtggatcctaactccagtctcctgatggtcagcttgacgcgggttcactggatcagtgccttccagtcctgggcaggtgctctgtttctgttattctagaacccccgacccagggaacacagagcttgctggtctgccttcattttctcacctccaatttaagaccaagtaattttattttgccttcatttggtatttagaagcgtcgggtggcttttgtcagggacagtttcatgcctctctggcttttgtccgtgttgcctggtgctcttctagctggccctgctgactggagtctgtgatggactcccattttcttgagctgagtcacttgttttcctccaggatgccgttccctacagctcatcctgcttgttttcacttactttcctgttttctgcccttgctcttatatccaggcctgttagatctgaatctagtcattctgctttctcttcagaggtttctcttgacagtaaatataaatacagtaatttctgtgggccagatatggttctcagtgttgggtgaattttaattcagtctccgtaacaatcttaggtggatactcatctccattttgcagaggggaaactgaagcacagagaaagtcactgccccacagtcatcagggtgccaagtggaggagtcagggttgaagtcagaaaagctggctcctgagcctgcactcttaaatgctattctatattctttttaaaacatttttttgacttattttgtattctataaatatttttgactcatttttccatctaattttacacctttctattcttttaaaatttttttaaaatttaaatttaaaacctacagtcgtcaataaaacattattctatattcttgctggctcgtggcacctcagctgtctggaatcttctatgtggcctccttgatcccgggatgagttagctttttcatatgatattcagctacaattctatataggcagttgtgttttgaaaaaagcattggacttagcattagatccgagctcctggctgcagtgcatgactgattgtgtggccttgtctaagctctgtaacctctctgacctgcgtttccctgtcttgtagtatgagctgactcgtgggcatttgagaagattaaatgtgagtaagtagcaaggtacttgacacataaaggcaatcagaaaatggcagttattgtgcttgtaatttaaaaagttgaaagctgttatagactttcaagatatgttgttttatgtttacatttagtcagttaattctggtttataattgattaggccaagaagagaggtctcttaatcagcattccattagagatttatttatttatatttgcttatttttttgtcatttaagagttaaaggaatagagagaattgtgccatttaaatgaaatctttttagcattagttacgtgttaggatgtctgtttatccttcatgatttttttgttttattgctaaaaaacatggactcatttaattgtctagctagtaaaaggcctttataaaatttttctctaagagcacaataacatagtatttgcttttatttaagtgcagtctttgtaactgactttacattttgttagatggtactgaatcaaccacagttactgctttagttaatagcactgaaaaatcacttgatttgtgaatctatttctagtgttttgtatgctgaactctccacctccccagtctcctaaagtaaaatgactagttgtcctttggtggtgtttagtctgtgtgatgtttgcctttaattcatttccacttttttttatagagtcttttttcatttatttaaaaattttcggccaggtgtggtagctcacacctgtaatgtcaacacttcaggaggccgaggcagttggattgcttgagcctaggtgttcgagaccaggctgggcaatgtggcaaaaccccgtctctacaaaacatgcaaaaatcagctgggcatggtgacgcgcacctgtattctcaactacttgggaggctgaggtccgcggattacctgagcccagggaggttgaggctac

SEQ ID NO: 53998 - DNA, 2653 bp, Homo sapiens
gtctcaaaaaaaaaaaaaaattctgctgaaagaggctttttttttttggtggggtggggagacgtacattgagggtgtttgttgtaagcagcaggttattttggtacactgtacattttattaagggatttttcctcctgggtttgttgaatggtggcggatgtctcagtttggtttcagtaactgaatccttcagagacccatgcaaagaaaccttttgtccaagaagaactttgacctgcctcagtcctgggttgctggctatgaccagattaggtaagtgattaaaaatagcagaactcttttgtagacataatcctttgaaaattctcaaatttgcttattccgaactcctataagcttacaattatccgaaggtcacttacttttcacctaatagaaattataagaagataggggttagagaagagtttttcagatagtatctgagacgatcacctcaacatggaaatgaggaaactgaggctggggttgggagaggtaattcccataccagtaacaaggtggcagaacagagagagggtgagagcctggctctgtggccacactgcctggggctctggggacttgactaagttgtgtggactctcggagcctcgtttctcatctgtcaagagggagaagttagtaatcatagctcctgcagagtagttatgaggattgaatgagtcagtataccttagagcattcagacagcacccagcctagcataagttctcaaatgtttttttcttttcttttcttttctttttgagacggagtttcactcttgttgcccaggctggagtgcaatggcgtgatctcggctcaccgcaacctccacctccaggtttcaagcgattctcctgcctcaacctcccaagtagctgggattacaggcatgcgccaccacacctggctaagtttatatttttagtagagacggggtttctccatgttggtcaggctggtctcgaactgccgacctcaggtgatctgaccgcctcggcctcccaaagtgctgggattacaggcgtgagccaccgcgcccagccgttattttctaataattgtagtaaacacccccctgcatttctgcattgccttggggcttacagagtattttctcactcatctcatttgatgctcacagaatcaacacagggaggcatgtctgatactattaagtgcttgccagggtctcccagctctcacatagcctgatcagagcctagtcttgcaactcctaagtctagctgagaaccaaggcgtgttcccaagtgtgcctggccaggcgcataaagatacaaaatcgatgctttaaaacttgtgtacagtgtgttctttagaaagtccctgacgctgttgccaagaacctgtttgtgttagggaaatgcctaatccacactgtcctccagccacaccaggttggggagtctaagtgaagatgtaaggggtggcactggttttaaaaacaaaaacagaatcatggtttctgcctctgagaacctgctcccaccccggtacaatggctgcttccaaagaggtcctgctgctgtgtgctgtgttcccaggagtggccatgaagattccacttgtgctgtgagcatgtatagtcatacctcctgcatgcacgggagacacacactgttcctctgccccagaaactgccaggccgatgttggagccgctgccctccaaacaagactggtttcaggcttgcagttcccatttcccacagcactttgtgataatagttcatttgacttactctttgttgttttctcctgttttgatcaggagccttggataggcctgaagattattgcattggtattgtattagattaaaaaattggctctcgtaaactggtacttcctgattggaaggcggctgtttaaatttattcatgtgctttgacctaggaatttccactttacagagtttatcccaggaatactcatacatgtttgcaaaggtagggattcatcatagcattgtttattataactccgtaatagaatattagttgagttatggtacattcatagagtgggatgttatatatggcttaaaatgaattttgtaagtgtgaatatggaaaggtatccaaaaatatataacaaagaacagtatggtaagaatgcaccaatgtttgtttatagcatatgtagtgtgggaactccaagggagaaatgaatgatttaatctggaaaaatgtgttgtaatagttgggagcacgagtgtaccttgtggagggaatgtaaccttgctatggaggactttctgctttctaacttttacatctgtgtaaatctgtataaatgtttagttagatgtattgcttttgcaatcagaaaaactacaaactaaacaacaaaaacttacccttgttagtgactcatccagtgcccttagtgaccaactctgaccccaattctcttctaggagggcagtctctccatctttatgctgctcagaggcttcaggagaggactgcagcttccttttcaccctgggggagactctgaatcctggccatagccagcagcaccaaggagcccactcagtcttctgccatctgggttcctgtccaaattaaaccctggctcctcttctcccttcactggtccagcacgcgcacacacacaca

SEQ ID NO: 53999 - DNA, 1997 bp, Homo sapiens
aattagccggatgtggtggcgggcgcctgtagtctcagctactcaggaggctgaggcaggagaatggcgtgaacccgggaggcggagcttgcagtgagctgagatcgtgccaccgcactccagcctgtgtgacagagcgagactccatctaagaaagctggtttagtttgaattctagaaaaaccatagtttaacacgtggctttgtaagcaggactttcaaatgtaatcatgtttcaaaaagacaggaggctttactagcgataacgtggtaagccagagagcaatttttatttatatttaggggcagatgatggggaaacaccactgtggtcttgagacagtggggtgattatgaccatcatcatcattatctctgtcatttctcacacttcttgattttacctgcacgtttccatttcttaagaaaaacttgctaaaccctaaaataatataaatacaatcttaatttctaagatttcaagaggtttgaggtgttgtttagtagcagtgtcattgcagtagcttgaaatatttataagtaataacccaagggtagcatttctgccatgaaatgccagaaataatgggcatgtctgacactttggggagtttcttggcttcctgtgatttctgttctctggcttgctgagtctgtttggcacaggtcggatgtttgtgcttggtctggaatttgaaacacgtggctgtaaaccacagatagtttgataaaggcataacaggcaggaaaacaaaagatatgcttttaaccaaaaaatgtaggcctgcccctggcatttcccgtgatgaaggtgtttgaggctgtgctttgccgttcatggtgtagctcctcattcgttttcagctatcagaaaggccacttgttctggtgctccttggctcagctggcaccaggtcactgtctcatcctccagccagtgaaggagaccgccttcactgtgggaaccagcggctcgcattttaattgtgatctggtgacttctgtacagcagcagattgatgacagctttggaggggaacaggtggctcagtgtgattgaatcgttctttaactcattcaacaagtaatggccaagtacctgctctctgttggacaccatctggggccccagggcagtcacgaacaaagcagaccggagagaaaacaaagcaggaagttaagggtggggacatgggtagggccggtgtagcagaaattctggagccaggctgcctgagttggaatgcgaattcccattacttgccgtgtgactttggcaagccctttaatttctctatgtctctttcctcataggtaacatgagggtaatattattattatatgagttgtactaaataaattggcatgtgtaaaattcttaaaatggtgcctgccatgtaactactatgtgttaggtattaggacagtgcttatataaagggatgttatggtgttactgttaggtaaggtgacatccttcagatacctgaaggatatgagagctgaaccatgtgactccttggggaaggagccttcccagcagagtgggcatgcgcctggtgggtttgaggggcagagggagtgtgggggatggaggggagtggtcagagaggcagcaggggcagggcatgtccagtcctgtagccactgtgagtactttgcactctagaatgggggccaatgtggagtttgagcagacgtgctcctaatgcagttttggcaggattcctgtggcaactatggagagaatggacaatggagtatccccagggggtgcagtgtgggttagaccctgaggcatgtcaaggggcaaggtcaggggatttgctggttggctgcattgggtgggaatagcgagggtggaggatgagtgcaggccttgaagggtggagttgctccttagtgactgatgtagactggaaggaacaggtcttgagcctgttgattttgatttacatgttagtcaacaggggagctgaacgggcagcatgggagtt

SEQ ID NO: 54000 - DNA, 631 bp, Homo sapiens
ggcctgaaggctatgctgagtgagtgaaacccagagcacttctgagcaggttttggttggtttggttcctcttttgttggtgcttttgtgagggccaattctgtatggcactagacagagctggttaggctcaacaatacagtgttaccaggcgggttgagaatggacacccacaagcccaggagcctcctgaggccagtcccccatagtgcctgggccacacggggctgggcctgttaaccagggcaggctcggggttcatgtcttttaccctctacaacagtgcagcccagcaggtcattaccacctcacctccacgcatggcaggggcagggggagcggtcagggcatgcctgtcctgctgctgtcacccaggcgagccacacattccacactggcttgaatggcagtgactttgggcctggcagtgtcctctgccagtctccttcactcacaatttcatttcaactttgtgttatagtgaagtatttaatatgacactttttttttattctttaatagttcaaatagtaatgtatgccaaggtcagactaatattttgtttactagcttagtaattttcttcttgttcctacctgaattaatttatatgggagcaagtgctgccttt

SEQ ID NO: 54001 - DNA, 1041 bp, Homo sapiens
ttttaaactaagacctatagtaaaaaaaaaatttatatttgaatccagttggtttcttattggtaaacacacatgaaacaatatttgtctttatgcatttcataatgttatattctgaactttctgtttcattccattttttaaaaaagatgagtcatgatcctctaaatggatttcataatctcctggaggttccaactcatagtttgaaaaacactatactgtactgtgacaggcggcgaatccagaggaacacatggcttatttccctgactgcttttacttttcctgtgtgtgggtgggaatcttgtactcgttcatcctggcagtacctgagtgagaaataaggaagctaagtaccctgcccaacggcacgcaactaccagtggtcaagctcggacacagtcacttctgggtggcccccaggtccagggtttcacagtccagcagcatagaagccgtttcagcttctgttgtcctggaagacgcaaaggcatccagaagagaggcacatgatctgcaggaaagactccgccgtagcggttcagcgcaggtttaccaaaggttgttcacctggaatggactgtgaaccccccaccaggaactgtggcacaggcagaagtcaaccagggtgaaatgcagctttgcactctgacatttgccccttgaaaacctggagcctggtagagttaggggtggaaagcaagttttccatcagcagaggagcatcttccatagctcccagaaggatcagttaaaagtgtcagtccgatggcttccttcgggttttgtgaacctcagcggcttcgcctgccctttgcctttaaccagccagtggggccctgcatgaggtgcccggggaggtggtgcatgcatagcatccttagtaagcctggaggcgggtatgctctctggcagcagctttcttcctggctttcttgtggaattgtcctccttaccaagatgcttctgccagggtaagaggaaggccagtgagtgcttgggaaggaagttggcagtaacttccaacaaaccttgccc

SEQ ID NO: 54002 - DNA, 758 bp, Homo sapiens
ctcaccagtggcagaaggaccccgtcttgccactggatagtgtatccgctccctttctcctgtattttgctccttgagatttcctgcacttagcatctctgcatcttcaccctcatctcacccttctggtattgctttgccattatgatctgagaagatcctcttctgaaaatcaggaaaccatggtgaactagctagacagtgagaccatgctgaggctggaaccaagagccttactctgaacctaacaggaagcgattgaactttcagaaacacagagggcaaggacctctctgccaggacctgtcttatttgcttatttgcactcactgctgctgcagctgctctctgtgacagcttctcagagtgtgcgggtggaggggtcattccagagcagaggggctggtgctggattggaaagctgcccaccactccaggtcagaaacactagccgtccctctacccacagcctgcacaagttgtgtcccagatctcagtgtgggtggtgcccctgtcaggagggctctttccattgagcgcctctgcagggtgcactgctgtgctgtgaggaaggcagagcagaggacaatgggatcttggcattcccagcattgtattgtgtatcagctacgttaggccttagttagagatatttggggaaatggttgcagcggcacttttggaaagtataaactgctggtaaatggaggttctgtacactgaaagtgaaggtgtgtctccttgacactgccttttgg

SEQ ID NO: 54003 - DNA, 420 bp, Homo sapiens
cttcgtctacttcctattctcttccctggaattttctcctctccatgactggctgtgccctcaacatcttagaaatgtttctatgtcttttcatttttgtttcattggctttgcttatttagatttcactttgaatgcacagaatgtcacgttcctctgtgcccagatttcgaaataagagcaggtcctggacagttcagagcaggccagaggtctaattggaagctcccttcctgcagcacaggaggtgtgccttggggggaaatggccacaccaggatgctttgttctgggctccaaagtgtgggtgatgttcctgctacagtgcactttgtgtcctggccgtttgtgttcatgacgacttccctgtcagggcaggagctcagcagggcaggagcctccatgtgcattctgaacaggg

SEQ ID NO: 54004 - DNA, 555 bp, Homo sapiens
atccaggacaccatattgtatctagttgccgtgtctccctagtctcctcttggctgtgatagtttctcaggctttccttgtttttgatgatcttgacagttttgaggagtgctggctagtttttttgtagaatgtccctaacttgggatttgtctgacgtttttgtcatgattagactgggattgtatgtttttttggaggaaaataacaaaggtaaagcaccatttttagcacatcacatcaaaggtacatttgatcaacatgactcatgactattgatgataaccttgatccctggctgaggttgtgtttgtcaggtttctctgctttgtagtcactctttttctccactttctgtactgtgtatccttcgaatgaggtcactctgtgcaaaccacacgtatgcaggcagttgtgttccacctccctaggtgatgcattctgagaagagtgcttgttacatcagcctgtcaggaccactggtcatgccaagtggggttgggtctcagcctggggaggccttggcagggcccagccattgcagcacggctgtcc

SEQ ID NO: 54005 - DNA, 1848 bp, Homo sapiens
tgggcgtgtacatgctgcacaggaagaacttgagatcgggcgagcactggatctccaccagcggccagaactggtgcacctccaggcccgcctcgtcttgcgtgtcgtggttgaactgattgggcatgtaggtgtagttgtagccgatgcccttacacagcggcacggtgatctcttggcatgccagctccttggccgaggcggccgcagcgccgctagagcgctgcagcagcgccaaggcggccagcagcgaggtcacttccaacaggtaaccccactccatgctgtgcgcctcggcccggtgccctcgccctccaggcggcgcgcagaggggtgccggggggggggcccacgagagagccgcagacgggtacagcgggtgatctggggtctcccttatgcttcgcccgggaggggggtctgccgataatctaaccccttctaggggcgcgtccgcagcggcgcggcccgcagcctgggcagggcccttccgcactcctttccgccgctccgggggtttgaaggcggctgcaggcgcgcgccacagtccgtaggtccgctctgctggccccgggtcgcgctcagccctcgcggcgcagagcggccgggcctcggctcatcgtcccgcgctcgctcgcctcctctccgcgcgcccgaccacttctccccgccgcgccgggcggcggtgactccgccggacagagagggcggaggcgccgcaagtttcctctggggccgcggtgcgcagtcaagatggctgggccgggccgcttgccgcgccgggtcagccctggcggccaccactcggcccccgggggctcatgcccgcccccaaggccaagccgccgccgccgccgccggagttggggacccgcctcggcccaggccgccgccctctttctccggcgtccgtccttcgtccgtccgccgccgggacagacggacccccgccgcctggaaaagtcagcgccgcgctccggccgcagtcgggcgaggtgcacacagtctccttcctgctggacacccaggagcaaatccagaccggaaggcggagcggacacctgagtggcgcggcccgcgcccagccgccgcctcctcctcggcgggagcagcgcccttagcccaacttcccggctccagccccgctcgcgccgcgctgccggctcatgaatatttatacagcgcggactcggtctccgcccccagccccgcgagccaatcgccgggcggtagggcggagtccacgcgctcccagggctcagccttccttaaggcagtccccgagtgtccgcactgctgtgcgcgctctctgcggatggagagttttggtaaccttgggattgaccgcagagacagagtgttggccatggctgtccccatggcgctgagtgcgtcggaggtcttggtccccttaccccgagtctgcccttggggacagggacggggtttggtgcagcgcgcgcctccccggcgcgtttcaaaccagccaagcccctgctgccaccctccgcaaatgtgggtgatctgcaggcggctggggtctcgtgctcctcggggcggcaggaaggtctcgcagcaggcgagcgccggggaggcctgccggggctcggcgctgcagaagacccgggaaagggtgtcctccttggggttctcagaacgatggtttctgagacttggagatgtggggggtgtggagtcattctaaactggggctggacccgggacggcccgggtgagatgccccggagcccagccttgggcgcgcgaggggcgcgggggacaaatgcccgccagagactctcctcccgcctccgctgcgtgacctgggggagcctcagtttccccacc

SEQ ID NO: 54006 - DNA, 693 bp, Homo sapiens
tttatgcttttgaatggaggtgctttaaatacatgtaaatgtatgcagataagcatatgagttttaaaatgttgcaggccttatagctacaagtaacctcaattgtgtgttttctgtgagaaaatcttgtcacattactttggaaatttgaatacagaagttaaccccaaggaataaggtccctttttctgggtaacatggactgtactgcccttgcctagaaaaaccatgtgaagtttacagatagaatcctgtgaaatgttgtaaatgtgaagcgatgattatacaagaaaatggatttatcaataatacattgccctggggtaattctgagcttgagcaaacagttcttcaaatagcatgacatcgctactcctaagtaaagcatacatttggaatgaagaaggaatgattacatttgcttttcaaaagtgaaaccagtttaattattaacttatttcctgagtcaagtgcaggtctgaaaacaaaggtagggttttttctttctccaaacctgtctgcggtcttatcttcttgggattcacattggaaacaaagaaatgttcaaaaaatgaattctcttaggcattatgttagagcttcagctgttttgaataattagcttcattttttaaatatttgaaacattttttacttggagataagaatagcctagtggacgatgagagttac

SEQ ID NO: 54007 - DNA, 976 bp, Homo sapiens
agttgaaattagcaaaagagtatgccctttgtcccaggccttctcccagggcctgggaatgaggaatctaaaccacggtgaagccacctctgctaatgatgtttgtttttcctaaatgacttttttttttttttttttggcaaaaggaatgtgagacagtcttcttcaggaaggtaatccgtgtccccctccatcagtgccttcaggtgctgggcatttcagtttacagccctgctccctctgccgtccttgctgcctgtaggtcctggctcagtcctggtgacttccaggtcatttcctccctcgccttgaccatgccgggcccagcctctttcactcaagccagggcttcctctgggccagtctgcgccaggcttctccgtgtgacccccgccgcctgccctcccgccgctgtcttagccgcacccccggacctcccagggcgctcagcagttccgcctctgtttccagcagcttctccacacctccgtcttcccaccgtgcagcctggacgccaggcctgtcgcttgcagccccctcgggaccttctggcctccccgtcagcctcgaggtcggctctcatcagaagctcaggggttgctcgttgccccctcgcctcccacgcccacctcccccacaggaaataaagactctcctctgccactcccacagtttactctggctaaaatcaacagtggctcttgattgataaatcctgcggatacttaatttttaaaattatgaaatagatcaagcattttgaaaaacacagatcataataggatactctcatctgcccaatagtcagatacagagaccctatattttgcttaaggtgtgtaaagtgttttttttttgttgttgttttttagcaataaaatgtaaagttttttttctttggcgattatgaagttttaagatttaaaagtagtgttattttatgtgttttaaaaatgcacacaaatggtaatgcgct

SEQ ID NO: 54008 - DNA, 633 bp, Homo sapiens
ttaaaatatcagactctctttcagtaagtaaagtaagatattctgttggaaagattgtctccaaagctctgaatgggtagtcagagaatgtgccagcaacataaaaatcctccttcagctgggggtgtcttctgataaagacatttcttagcttgtccctgtgagaaattagttcacaagtcttttctgttgacacattcttctcttgtcccaggaatgtgagtttcagaaatatgctgagctgatcctagaaaggtttcaaagtcctcggcagctcaatgcttttgggacaagtttgtttgttttaataaaagttaaaataaataatttaggcaattaattgaaaagatgaatacgatttcaagtctgtatagccgttgtcctggtttaccctacttgaaaagtatttgtaaataccctatcccagcagttatttgcctattatgatgtggatttcagtgcaactttcacatgactctttcggcatttgccaatctcttttgctgattcaagacagaaaatcttggatagaaaatacctaggcactgagctgttctctttattttatttctgctaccgatgatcatcctcatcatttttcactgaaattctaaatggaaatccataattgtg

SEQ ID NO: 54009 - DNA, 1581 bp, Homo sapiens
tattgtacatcttaaatacaaatatatatttatgtgtaataaaacaggcacctctttttaaaaatgatttttttaaacatttcatggtcccacttacaatcagaatggaaaatgctgaaagcatagtggaaaatatttgagggatactttatagtcggaactgtgaagaaaaccccaggatttcattgtgggaaaccagctctgctttgcagatttaagcagctaaaataattgtgacaactctgtagtaagcatccctgtgtttcagagtttgttggaaatgagcctcctcctcccagcttgggtctgctggaggaactccttcctctggtttgcagagccatagcccatggggctggataccattagctgtacccagggtaagaagttggaatacttgagggaacctcatcagatttctttcagtgtacactcagtctcacacaagcctttttagataactgcatgtgaaaattcagacccttggagtaaggcacttgttctttcttgctcagctgttcgcccacagcaccaccgaactgcacagacagatttgcctgccctttggactgggataattgatccaagttaataatgctcatggcccaagcttctaatatttcacaatagtgaatttttttctctttagtgatcttttggtataccagtccacaattccagcagatacaaaaatgtaactagaagaaaataaacagcaggatttgaaaaaggatatcaggtcctctcagtgagagaaaaaatacacataagaaaaaactgagaagagaaatgaggacatcagttaaaaaaactatttgaggcctgtagaggaaaacacaagctagttgattattttaaaaaatctgagtaaataatgttagtcaaaagggttaataggaggtggataaatctttacaaatataaaaggaagaatatgtactatgaaggaatgctagcaccacttagcaatttcagagtgctttcatcttcaaagaaacttgcatgttaactaattaatccttccaacacccttgtgacgtagacatgacaaacaaggacagaagccagcctgaaatgactaacctaccaaactcactggttgaggaagaattatgaaagcatgacaatttctagtgagaaggatcctgtctattaatgatagggattttatagttgtaatttggtttacttaggtgctttctgtttattaaaaccaagcagcagcaggatattatatgtgtgtgcacgtgtgtgtgtgtgtgtgtacttctaaaacttgtttagagaaatacaaagccaatagtaagatattaagtaaataactgatccatcttgagctcagttaattctatactaatgtgaaattctcaagtaacgcaaacataaaccatcagtattagcagcagttaggtagttgtttcatatgacaataattgatgcatgtagatgagaagtaccaactataaatttcaatggggtaaaggaaataacacttattggaagcttattgtctgtccaatcctatgacatgaagtttatatattctttcttagtcatttgaacaccaagacaagtattcaa

SEQ ID NO: 54010 - DNA, 1222 bp, Homo sapiens
acataggagaagatgtaagagtttgaggtggatgagagcattgcttgagaacacatagaacaagaacagagaagtatagaaggacaggatcataggaatcatatgcattttggggtgaatctgatgacagacaactccttttttcacttaaccaatgtgtgccccctaatatagaaggcacaattccagcaaaggaaaataccttgaatttaaatatagacagtatttagtatcacaagggagcggagatgaaataaaacatgaaataatttcttgatttctacaccaggcaaaccaaaaattctatcagcgctgtgtatagggacaatcagttctctagtactaatgaaagatttggttaactctattctttttagaactctttagcattttgaggactgaaattacaaaacaacttgttgaaaagtgtatatggcattcttaaatccaggagaggcatgagtagagcaatgggaatgtgtcagtgttgaaagtaaatatactttgtgtcaaaatgcactgtggggccagtggtatgtgataagatacggaagcttgctttggaactctccttgcaagtactgggactggggttttaataatataaaaattcttggggctttctgacaaggaatgcttgaaagcatacatcactgcagcaggcttatcagtccacttctaggacaaacccagaaagaattttcctgtattagtcttcaggcattacatttgcctcagctgtcagttacatttgctgaaataaaccaaccttagtgatctttgcaacatgtagtagttttaacagcacattggaattgaaaggaacccatgatttgaataaaaaatagtaaatttggctgggtgtttctgtcatttttcagagttctataactgacactgataggaaatatttttagaaaaaacaaaatcaaacagtggagtactatgtccttgaaatatacactttgtgactctctatgcactgtgaaagtaaacatgtatgtttctatatagttttaatcccttgataagagcgtagatttgtggatgtttaacttaacagctgtgccaataaaacccagcctgatacagtctttatatgcctgctatatttgaagatattgtttagaaattttttacagaccttcttctcttcactattcttcacacctccatttagctcccttcagtggctgtgtatgttcttttgaattacagacat

SEQ ID NO: 54011 - DNA, 483 bp, Homo sapiens
ggtaaaatgaattttccttcctaaaataaaaaagacaaggcaatgctgataacttttcttttatagtatttcaaggccttacactgaacttcaaagaaagccagacttaaaataacctgaatgcagctgcattttcatcagttttgctgcacttttacctttaccgccattcatcatctaagtcaaacagtttataaggagaagacataaattctaaccccaagccaggaatgctatcaatgagtttggaagtttacattctgttggcatgaggtcactatttgctgtcactggtgatcaatgagccggccagtgtccttagccctagcctatctttctgagtttagcaagtttcccagttttaatgagtttacttacagtcctcagaaaataattttctactgaaattcaccaagtcccatttaggtgatttaaaatagcaaacaatttttaaaagcagtaggaatctaaattgccatccac

SEQ ID NO: 54012 - DNA, 2319 bp, Homo sapiens
gcctatacaggtccacacacaagatacttacgtgtccatgtgtggctccgatatatgctgagctcagacatgacacttttcactgagtgaatgtaaatatttcttattgatttattaccaatttaggttctgtgacacagaaaaattaaaaacatgaaaagatgagtttaacaagttaacagtaatctgaaggaaaaaacactatgggtttgtcaaaattccttgtagggaaaaaaaaaaactgaggccatattgtttatctgtttacctgttaacaccattaatgccctgaggttagataatgcaaaagacctctaaaaaaagggataggatgttaaatgcaagtttaaaaatgtttgttctaacttgctaacaattcctcaaaaggatcttttaatgagaaactgtgatatagagtaacaaaatgggcagcagtggctcgggaaactgcagacttgacttctaatctcagttctgcctctaaggaatgacaagatctgaactactcacctcctcaaactcaattttgtttttccatctttcaaataaggtcaaaacagataacccaagtatgacctgactgcactaccatccggcggggatatcaggccaagagaggaggaagctcagcagctcatctggatgtgcccggtgttcgcggaggggtgataacagcatttctttcgctgtggccgtgagcctttcacccgtccctgccctcagactctccagaggtgacgttcctgttagcctgcgcgcccacccctcagctccagctcacctctctcttcttaaatttgtcccagaccttgcaccagcacacagactccgacggcttcaggatactgtgccatgattacacataatacataagcgaacgcgaaacgtgtaaataattacttgggataggagggcggtcagagccagcaggggccctggtggtcagctaggccagccccttcgctcctgcactccacgggcagagaggcccttggggccggtgcaggagccgtctccctcgggctctcccagggaacgcacacccaataaatacagcacctaaacaatgaaagtgctcaaaacaaccccaggcggcaagtattcctaatatccgtaatttacagagaggaaaaccgagtctcccgtggataattgtgtctaattcatttgtcgcggacctggcgcagtcgctctcccccgcagccccgcctcctccccgcgggctcagggcacaaaaagcgcacacgcacacatcaaacgccatgcgcacgcgcacaacaaacgtcacacgctacgcacgcgcgtgctgtcccctccccgcagccagttccctccccttcgggccagtgcgcattgcctaccccgtgctacaggacttcgctgagcgccaggcgcagggactggacgcatacggacccccgggagccccggaactcgcgttcccacgccagacctcatccccttctgacagagacgccctcgtcccaccgtcgccgcaggcgccaggggtccctccccaccgccgaggtctagccgccgcccgcccgccttcagggcagcgcggggaccccctggccctcgcccagtgctccggggctcacccgccgctcctcgccgcctccggaggcgagggattgtttcccacaagggactggagtccagggaaggactcgcctggagcgggaggcggggatgcacatgcgcagagggagaggccgagcgcccgagttaggctggtggatgcgatgcggggcttggaagcggcgctagacggtgcctgtcagctctggccgcaaccctcagttgtaaaatgaggctgatagtgcctacctagcaggggttttatgagaattggaggcgcttacgttgtaaaagcatttaaaccggtgtctgacacataaattgttcagtatatttctcacaattatatatcatgctggtcatcataaggctctcctgcaaaacagccttgtatagtgggttgagagattactgtctcagttacccactcctgcttggaaccaggattctgtcagtgtccccagaggttgtggatcaaatcaatgtgcctgttagacacaagccaagagaaggaaaggtgtgcttgaattcattcacgatcatgcatggtaacgtttaactgaaagactggaagagaaaactaaaatctgtgaccagtatggttattctctggaataaggaaaaacagaagctagcaattcaagacccaaacataaaattgtttatatgtttaaaaaaaaaaaagccgtttgagtaacaaatttgaagaagaaagcacgcactcatttcccaaaacca

SEQ ID NO: 54013 - DNA, 1170 bp, Homo sapiens
attctgatggaccaactggtgccactgggaccagtaacccatagcaaaaaatggactcagttgatcctgtgacccccttcaagaaccgattcaacacaagaagacagtttcaacagccctatgatttcatccctgacccagccaatcaccattccccattctctagcctcctgatgggcaggaggctagagaggttcaaagtttttcatccttgaaagactgtagcctccaaattctcaggaaggcagatttgagaattatctcttatacttgcttggccaccctgcaattattaaactctttttctgctgcaatcctgtcgttctcagtttattggcttttttctaggcagcagccaagaagaacccacatggtaacattctcctgattagactgaggttgtgagtttttaggaagcaccccacaaacaggttgtggctttctcatagtgtgatatcagatggcatgatatcaacatgactttttactggttaattgaccatgattacatgtattaaattaactgaaatttgtcctgaggctgcctccctacctttagggccgatgtaaggactgcaacctaccttggtatgtaaacaaacaaagcatagcttgttaaacttttatagctggctgagtcagccagttacagaagctgagctaaagccagttacaggctgccaactaatcagaccatttccaaataaggccaaagttgagctgtaaccagtcaagctgtttctgtagagcacttctgttttctgtctgtaaatactccctgcccactttatagaattctctgaacctcttctagttctgagtattgtctgattcaagaatctttctttgctgaaatgaactcggctaaacttaattttctaaaatttgtcttttaacacttggttaaggtggtgtctgataggtttctccctatttttccctttccagtctatatacagaagtgggtctacatgtccagcccacactcaaggggaaaggaaataagctccattttaaatttgtggttatatttttaaattaccacactgattagtaaattcagggagagattctttgagactatgcaaataccctatttctacttttctactgattttagttatcattggtggatcttggctgcaaccattactactgtggtgttccaaa

SEQ ID NO: 54014 - DNA, 1501 bp, Homo sapiens
atgcaaaattgagggctcaaattgtggtttcaatttacacgtttcacagtcctctgagaagagactaaggttggaggatgcaggaaggccttaaataattcaccttttgactcaagtgctctgaagattccccaagcatttttggaaacagaacactacctggttgagactgggttcaagtacaccacacagctacgttctggtggtgctcaaggggcaaatgctgtgctaaatacaagtcaagactggattttagtgtggcaaggcgcattaactcagaggaaaaagtgaggatttacatcccacctgctaatactgtgggtaaacggatttctctctctgaatctttaatagtcacatttattttaatagagatggttaagtcgaaaggatggttacgatgattaaatgagccaataatgaaaacagcatgttttgtaataatagaagcagctcacctttattgagtcctgtatcatactttacatctattaccctattcagtacccaaaggcccccatcatttgccagatgcgcgtcgagccgcactgggaccacctacagacgctggaccagagcccacgtccctgcggctttggagcgccgcgtctgcagcggccagcgcgcctcacatggcggctccggtcacgtcacacaatgcggctgctccgggcgcccactgcccagcaccgcaggcctcctctggccgcccctcaagcaggtcgcgcaaacgccattccgggcaggggcgccagcgcagccagccaacctccccaccaggcggctcccacccagggccctccgcggaggccgctccggggccaggaggcggcttccaggctcgagaccccgcctcccaggccctgcccgcccgcaaaagccttcgacacacctgcagggtctcggcctctgctcccggcccgcgccgggcccaggccccgccctttgcggcccagcccagacccggaggcaccggagtcctctccccaccctagggcgtaagaccaaaaaaacgccaatgccagaaagaagacactgcacatgcgcagaacgtttccctagccctactccagaactacgcttcccagaaggcccggctgcgactccatcttggatgacgtcgtgaggcgcggccgcctccagcggcctgagtgattgctgtcgggtttccgggagagggcgctgtccttgctcagtgatggccggagagctgcaccctgcacgtctgggcttgaagacagaaatccaccgtgaggtgctccaaggaacactgatgggcagttttgttaaagtgattgaactccgtgggtacaggagtacgtggagtaatgaaggataatgccctgtaaccgcttcctcttaggaatgctagctttcacaattgtgcaaacggtacgcgaaacgtaataaactacaaaatatgtataagctaaaacagaaaacgagtataccacttcccaaaagcaaaagcgcttaatgttaggtgaacatccttctcatg

SEQ ID NO: 54015 - DNA, 1319 bp, Homo sapiens
gagctacaatttccgtttattgctttaaccattttgatgaagtagctttccggccgcaccttccccttttttcccccgctcccaaagaaccgctgatagcatgaaagtcttttaaactgtatggacgagatctatttcctaacatttaaacggaaaatgacacgcagcggtcctttccttgagcgtctgcgtctaaactgcccacagacctcccccgcagtatatccctttggagtgccccggggaaagccagggctgcaggcagttccagcaccaactcagaccgcatctgcccactgcctagcggggcacttctctaccaatccgaagggctgctcgcccggcctcacgggaaaggtagtttccaggtagggcgccaacagcatcaagctgtgcgcgtgggctctgcgcatgcctcgtccgccggctacgtctgcgtttccgcctttccttttgtttttctcaggttttgcgtgggaggcggtcccgggatttcaagggtctacgcgcttttctatggcgaatgcaacccgacgagggagtggggtaagccccagtgggttgggcagggagagagagggagccccgcgcgactcctggggcgggcggcagggggccggtaccaagtggtggggaggaggcccggggacctcataggggaaggcggggacggcggggctgcagcgtgtgggccacgacgctaggccggttcctcaaaggcgcggcctctgtacggagcagggtacgcagcgtgtgtcgccccatttgtgggggccgcggaggagggcatgtgcgcttgcgcagtccgcgcgctgagccttgcgggaggggcagttctcttgtctagcctgtgcgcgtgtgctagggcgccgcggtacgtgggcggggaaaggcgggtgcagtcgcccgccagaccggcagactcggttgcacgtattgcattcatcctctttaggttccgaactgacctccagtcaggtccatcactgcatcttggtatttgctgttcctctgtcctgacttgatcttgcactcaggaaagatcttcaagaattacctaattttggcctggcgcggtggctctcgcctgtaatcccagcactttgggaggccgaggcgggtggatcacctgaggtcagaaattcgagaccagcctgaccaacatggtgaaaccccgtctctactaaaaatacgaaaagtagccgggcgtggtggcgcatgcctgtaatcccagctactgaggcggaaaattgcttgaacccgggaggcggaggttacaggtagccaagatcgcactattgcactccagactgggcaac

SEQ ID NO: 54016 - DNA, 1653 bp, Homo sapiens
aagagcaattccgagttatctttacgacagcttacaggctggtaatgctcatgtccagcgtgttttctcacggttagcgtccaatggaccagaaaggagcaagtgaagctctccacactggcgcaagtgtaggtggtgctgcggcagcgtcgcggggccacaggaaccgacctcgtctggagaaattccactcgtgaattctgccaaatgaggaagtgttgaggacggccaaatcatcagggggatgtaattcatgagaaagctgtgtaatttaaatactcataatttatttcagctaacgaataaaactgcagtactgcacttgccgcatctgggaactaactgcccaatgcggctgaaacctcatgccctttcaaaaggagtggcgcgagggcttgtgggaaatgtagtctgcactttctaagggagcggcgcgagggcttgtgggaaatgaagcgtgcactttctaagggagcggcgcgaggacttgtgggagatgtagtgtgcacttttcggcccccgtcgcgggagccgcttcgggccttctgggcatgtctgccatatggctccaggtttgtttttctccccggcactctgacggggagggctcccggcatctcctggcgtccgggtagaggacgcggagggtgagtaagggagggcaggggcgagggtggactgggggttccgcgcggcctgggggtgggagagagggaacgcctttgccgcctggcctgggtccgaatcctgcctcggttcttgtgctcccaaagggaatgcgcaagtcccgcgcctgtgacaagtgaggttggattttctcttccctgaggtgaaggatgcccggaggcctccgcaggacggcgcagaaacgggccttctgcccaatagatgcgcgcttctctcattctttcccctcagaatctcgctgtcctcacaaccacctgtggtcggcgtcgccgcggtgtcactgcgatgccgaggcgaatggggtggggggaagcgcccgcggggcggggagggaccctgcaggcgcggactccacacccagcctctggccagcgtcactcggcttgctgtgtcctcgcaggtcgcagcttcattgcctgatgtcttcgggaagtattttgaagtcatcgtggctgtggattggggaatttcttgtttccactgacctgtgaggccgcgcacgcggagggaggcaccccaggccctccggcactgtccagcctcgcctgtgtccccattagcaccagtgggcattttcagagggtccagctcatggctcaagtgacaggaagatgtaggagctttctgtcttgaatgaggattcgaaccaaagggcttaggcccagctgtcttggagcaaagcagctgttgtggggtaagaagggaagggtggggggcgagggcccaggggccctcctaggaggacacccaacccgttgggctgacacctcactagagatctagagcacgggtgggaggagcagaggctcgatttgtgtcctttccagacccccacaggctgggagctttgtgcccattcagatgtgggggcagaagagggcaaggccgaaggagcagacagcaccgcttcttggggagttgtgaaggcatcatgcggagggaagagcttagcagccaagtggagga

SEQ ID NO: 54017 - DNA, 790 bp, Homo sapiens
catcatcgaatggattcgaatggaatcatcgaatgaaattgattgaaatcatcatcaaatggaatcgaatggcatcattgaatggaatcgaatggaatcatcatcagatggaaatgaatggaatcatcactgaatggaatcgaatggattcattgaatggaatcagatgggatcatcgaatggacttgaatggaatcattgaatggactcgaaaggaatcattattgaatggaattgaatggaatcatcgaatggtctcgaatggaatcattatcaaatggaatcgaatggaatcaccgaatagaatcgaatggaacaatcatcgaatggactcaaatggaattatcctcaaatggaatcgaagggaattatctaatgcaatcgaatagaattatcgaatgcaatcgaatagaatcatcgagtggactcgaatggaatcatcgagtggaatggaatggaatagtcaatgaactcgaatggaatcatcattgaatggaatagaatggaatcatcgagtggaatcgaatggaatcacaatcaaatggcatcgaatgtaatcatcatcaaatggaatcaaaaataaccatcatcaattggtattgaatggaattgtcatcaaatggaattcaaaggaatcatcatcaaatggaaccgaatggaatcctcattgaatggaaatgaaaggagtcatcatctaatggaatcgcatggaatcatcatcaaatggaatcgaatggaatcatcattaaatggaatcatcatcaaatcaaatctaatggtatcattgaac

SEQ ID NO: 54018 - DNA, 926 bp, Homo sapiens
cggggatgccgaccacaggtggttggaaggagacagcgagattctgaggggaaagaataaggagagaagcagcatcttttgggcagaaggcccgtttccgcacggtcctgccgaggcctccgggcatccttcacctcagggaagagaaaatccaaccttacttatcacaggcgcgggacctacgttcccttcgggagcagaagaaccaggacaggattaggacgcaggccaggcggcaaagccgctccctctctcccacctccaggacaagcggcacctccagtccaccctcgctccagccctcccgtactctacccccggcatcctctgccccgaagcagggagatgccgggagccctccctaccaggctgtaccggagaaaaacaaacctggagccacaccgcgcacatgcgcagaaagcccaaagcggctcccgcgaccggggccaaaaagtgcacactacatttcccacaagtcctcgcgccgctcccttagaaagtacacgctacatttcccacaagccctcgcgccgctccctgagaaagtgaagactacatttcccagaagtcctcgcgccgctcctttagaaacggcctgaggtttcagcgccgttcggtagttagttcccagatgcaccgagtgcaatactgcaattttattcgttagctgaaataaattatgagtatttaaattacacaggtttcttatgaattacatctccctgatgatttggctgtcctcaacacttcctcgtttggcagaattcaggagtggaatttctccagacacggtcggttcctgtggccccgctgcgccgcggcggcaccacctccacttgcgcctgtggctccacttgcttggttctggtccactggacgctcaccctgagaaaacacgctggacatgagcattaccagcctgtaca

SEQ ID NO: 54019 - DNA, 1001 bp, Homo sapiens
ttcatgaatatagtttcaaaagatacagaatttttatttaatagtgctttcccctcagtacttgagaaaatatactacttcctgcctgccaccacagtttcagaagagaaacccacagtcattccctgcagggaatgtgttgtttctctctggctactttgaaattttttttgtctttagttttcaaaaatttaattatagtgtgagtttgccatggacttaacttattggatgttacttcagactcgggaatgtgcagttttatatcttttgctaaatttgagaaggaccagccattacttcttcatatactttaaacacctccttcacttccttctgatgttacaaatgttagttcttttgttattgccccactttccaaatactgaaagaatcaaacctcatcccattccctcctgccttccggctttgtctaagctaccacaatcactcataaggaaaactaccacaggactttaatgagctctctatgccctatgccctgcccaatattttctctacagaggtgagaaagatcttacagagatataaatcagatgttgctcatctgctgaaaatctaccactaaacagattttaaccaaataaggcttatgataggctcacctttggactctagctgcctccctcacctcacctcctgcccttcctccaatcaagccctcccttcagccactgtgactttttggtcattcctgaaaaccaccaagcacattcctgtccaaggctagcagctgctattacccctgctgaaaagaggcagaatcctcatggctcacacagtcatttcattcaaatttctactctaatgttgacctcagtaaggtttcccctgactgttccttaaagtaatctaaacttgctttaatttctttcatagtctttaaaaccacagaacacttaatatacataaacataagtatacataatatacttagagacataattttgttttttttttatatttatttacttattttt

SEQ ID NO: 54020 - DNA, 2029 bp, Homo sapiens
gaatatcaatgtcctctgacacttcggaatagggggtagaaatggtgaaagaacaccctaatacaactccaacataaccatgtagctcttgggcacaagatttttcatcaggtgaaagtaaatatttgcttcctaaggatttcaatctccctcagtcttcacaaaaaatgtataatgacaatattggccaaacaagttaacaatacatttaatgaaaaaacattaacactaaaaccattgtaaagaataggactaggctatcgattttcccagtaatgttacttaacctctgatgagttagtccacagaaaaccataagcgtcagtgcttcaaagaaaaaatccgttttaatttcttcatctaactttgttgctatttctcaaaaggatgttttaaacttgctttgatgtgtgtagaaaagtagtactggcttaggggtcaggagaagtgacttttagttctccctactaacaaactttgatcctgaacaagtcagtaaccttgacaaacaaaaaacaaaaaaattattttttcttctaacaaatgaggcaaaattaggtaattctggttttttgtttgtttgtttgtttttgagacggagtttcgttcttgttgcccagtctggagtgcaatggtgcaatctcagctacctgcaacctccgcctcccgggttcaagcatttctctgcctcagtagctgggattacagtcataggccaccacgcatggctacttttagtatttttagtagagacggggatttgccatgttggtcaggctggtctcgaattcctgacctcaggtgatccaccctcctcggcctcccaaagtgcaggattacaggagagagccaccgcgctaggccaaaattatgtaattcttgaagatccttcctgagtgcaagatcaagttaggacagaggaacagcaaataacaagatggggtgatggacatgactggagggcagttcgaaacctaaagaggatgaacgcagaacgggcaacagagtccgtatgtcgggcgggcgactgcacccgccctttcctacccaggtagggccgcgccctagcacatgggcgtaaacacgctcaaccagagaactgcccctcccgcaaggctcagcgctcggaccgcgcaagcgcacatgccctcctccgcggcccctacaaacagggcaacgcacagggcgtagcccgctccctacagaggctgcgccttagaggaactggcgtagcgtcctggtagacatgctgcagccccgccgtccccggcttctccgtgaggtccccgggactcctcgccaccacctggcactggcccccggctgcctgctcctggagtcgcgcggggccccctctccgtccctgcccaacccgcggaggcttacctcactctctcttcgggttgcattcgccataagagagccggtagacccctgaaatcccgggaccgcctcccacgcaaaacgtgagacaaacaaaaggaaaggcggaaacgcagaaacgcagaggtagccagtggatgaggcatgcgcagagcccacgctcaaagcctggcgctgttggcgcccaacctggaaactacctttcccgtgaggacgcgagagcagcccttcgggattggcagagaggtgccccgctaggcagtggacagatgcggtctgagttggtgtgggaactgcccgcagccctggctctcccggggcgacccaaagggatgcactgcaggggaggtctgtgtgcagcaagtgtgcaggttagacacagacgcctcaaggaaaggacagctgtgtgtcagtttcactttaaatgttaggaagtagatcttattgatacagtttaaaagactttgacactatcagcgattctttgagagcagggatgggggggatgggggaggtgccacaggaaagctacttcatcaaaatcgttaacgcaataaacggaaattgaaaagtcagaaaatagacataatccgaaagaagaaaataaatgtcacatgatttcccctgtgacattaaaattgcttga

SEQ ID NO: 54021 - DNA, 1726 bp, Homo sapiens
taaagctgtgcagtaagaaaacggcaagatgctacgttcactcaggtaaagcccctttcccgggtttagggagggcgaggcagtttaggctgggtcagtttgtccctgccctcacggtttgttggtcctggcaaaagagggccttatgttatttatttttcttagagacagtgtcttgctctgttgcccaggctgaagtccagtggctcatctcagttcactgcagactccgcctcctgggatcaagcgatcctcccacctcagcctccagagtagctgggaccacaagcaccacaggcgcccggcacgatgccggctaattttttttttttttttttttaagagagagaggtaggctccctatgttgcccaggcttgtcttgaattcctgggctcaagcaatcctccctcctcggcttcccaaagtgtagggattacaggcgtgagccactgcgccctgccaaaagagggctttagggcaccccagaacgcgagatccccctcatctgtaatctttaaagaggaggaagtgtactccaaatcaagcgatagtccatccgtccttggcacggtgactgccgggaggccaggaccaaatgtgtctccttccggcttttgcaccacactaactaaccggcgccaggccgcagagccgccctggccttcggcgagaactcaggcgagcgcggcgcacgctgctccggagtcccaccgcggaagttgaggccgcggattccgagggcggggtggagaggaatctggaaggacctggacccggtggaacgcactgcgcggacggcgcctgcgtccgcactcagctgttcagccctctttcttcaggctctcccctgaaagccgtccccatgccggtctcttttttctgccttcttgtttccctccggcgagtcagcgcgactgtgaatttccgtttccggcggtgtccatgctgacctgaggagtcgcggctgcgagcaggttcggtgctgcgggttggggtaggcggcggtggggtccctggttctggggcactgggaagatcgcgagtcgtgcgtgtgggaaggtcctcccccggtcctccgggtcatctttgctcccgaggagcggcatatttctcatctggcggaggtgtcctggggtagttgggtgagtgacgtgatgaatccctgcagagagcccagacggggagggaaggtggctgggcgacgtcgtttcctggcgacgtggtcccggtaggagacttagacctgagctggatctgttgaccccaaattgtgcttttcccaccaagaagaaagacagggagagaaacattagtacaagtgctgaactaaaatatagcagagaagaaacataatctctgaaatcacacagctattcggtttcaaagcgttcctagcgcccagctctcctaactcctggccagtgttcttgacattatggtaatacataaagactttgtttccgctggtgtgtgtctgtgggaagcctctgactcacctccgtgctccagtagcaccctgtgcagccttccaatgtcgcccttattgcgtggcgcggaagataatagtttggatttcctctgcaagtcagataatagctgtatccacttactggcacagtgcctagcacatcgtagacagacacaaatatttattcaacggaatgaatacagtaccttaattgaatgaaatggcatcctgctccgctttttttttttaatcaagct

SEQ ID NO: 54022 - DNA, 958 bp, Homo sapiens
ctcaggctggggaggggacaggtgtctcggactgcgggcggaggaaccgcgcacatcagagggcagcgtctcagggcgggctgggatctggggagggattcgccaggaggggtcagtggcccaggccttccaggctgagtggcgctgggcagaggcacgaccaaaggcaggaggctctgggactatttagggaggagggaggctcaccgaggacacagaggccaggctgggaggtggccaccagccaggggcggggcagcaggtcagggagatcggatttccccagctcccactggcccgcgccttgcaagccggagatttcccctgctccgtggaaccctaacagctactctggggccttgcgccccatcccaggaggcccaccccctctcccggccagttctaccttctctgtctcagcaacccccacccttgcgactgaatgaagcactctgaacagagaccttttgaaaaaagtctaaatgtccccttcttaggtgagggaagcaaaagggaaaaatagaatcgacaccaatgacctattccagtctcccctcccgactgcagaaaccagcagagccacatgggcccacaggcggggcaggcccagctgcaggcaccaccctcctccctgtcctgagccgggcttgctctcagagcctgctgctgtccccaggctagggatgcgcctcccagcgggaacccctgtggagggaaagccccgcccagcccgaagctcagtcgcgaggaactgccgtctgttgagcactgccaggtactttttgactcatgggtcgttttgctctaacatgtgtatcccttaaaactcagaagagagtctggtcttgtttactcgcggttttttttgtttttgttgttgttgcttgtttgtttttcttttgaacaaggaggaagaatatctataggcaggaagtccccaactgtcctagtccccagg

SEQ ID NO: 54023 - DNA, 1063 bp, Homo sapiens
ccttccatgtcatcctcagcgtcggtgcttgtgcagtacaggtaggtgacagagccggcaaggatgcccagggctgctcctctgtgtttcttaggagcccgctgccccaccgtgctcaggcagggcagcacgtgttggccacgctcaccagctggctgagctccacccggaaccctgtgctggggccttgggaggcctgatggggatgggctcacactcatccacacatcccttctgctcagagggcccagggcttcatttagcacaagttcagacatgaaaccgttaagaattccagcgtagccgcagcccagcactgaacccaatgcctgctcctctgactgtctaccttggctggttcctgtgtcactggaaggaggaaggaacccctcccccgtcaccacggttgttctgttttggggcctggcaccatcacccaacaactatttgctgaataaacgcattgttcacccactgagtatttgctgagcacctactggcagggcgccctgagggcgcagagatacagctgaggacagcgcagcttctaaccttgccatccccaaggtgcgcggagccctcagggtgacccagcttgctgacgagcaagcggaggccgagcaggtgagactggctgagtcagacctgctgccggggcagacgcaggacaaggctgcttttttgcccctggacctcaggatccaggtccgggacgccgcgggcaggggctctggaccgcgctactcgacccctcccccaccgcctgggtctgccaggcaggagggagccgctgcagccaacctgctcctcccgcactatcgattttcaattgacctccgcctcccactttacacttcagagcgctcagcggcctccacacctcctgagcaaggaggaaagccagctgggcgcggggcccctgcttcctccccgagggagtcctcggccaggccaccaccaccaatctcgctcctctccctttcctctctgtaaatgacacgaatggcattgtaaggactataacaggcacttggcctttctaactttttatttgaaaataaca

SEQ ID NO: 54024 - DNA, 701 bp, Homo sapiens
gtccttccttactttcagtgagatgttctaacctcattttttttctgctccagccctggaaacttttctccagggagccctggttccttttagtggagacagaatttagaaaccaagatgtgagtgctgggtgtgctcatcgttactctagaattcctgaaggcctggggatggagcgctctcattctcacttcggggagagagctgatgcaacagtttaaggggcatttggccatccttgtcaaacgtggccatgtgcccatctgcacacagacacaccatttgcaggaatctgttcgacaaagaggagcacacaagtgcataacaacaacccgtggaagcaaccagagtgtccatcaaggtcagctaaaaaaaaaaaaaaaacactgagctccctccctttctaaacgacactcagcgtacattgaaaataataagactgatttgttcaagttcaagaattactaaaggagaagaagcaactaatagagtggcacatgtaatctgatttttaaatacatttaaaataaaatgtgtgtgtgtgtgcgcgcgcatgtatcttatatacatgagtgtgtttgtataggaaatactctggaaggacgaagtccaagctcccaagtaatgttatcgctcagagagggtagtgagcagaggtatggaggctggtaatacaagcagaaaattatagtttttatttc

SEQ ID NO: 54025 - DNA, 574 bp, Homo sapiens
gctatcacaggggtgtaaggaaggcagagcaggacagggagattgggaacatgtttcacacagcaatccgggtggctgcgcagatgccagggcacagtgagggagaggctgcagcaagctggggccggcccctcccaggcaggaggaatggccaggcagggcaggtgggggtgagccagggtgaggaggatcctgtggcacctggcagccacactggcattccatactgatctgtgttacaacacaggcacccacctatcagagcagcctgggccactcgttgccagctgcagacaagggtcaggctaactggtgctgataagacaccagcccccatgcacctggtgtgatagggcgttgctgcctgccagtgtcactctggagcagatcagcaggggtgagggcaagggcaggggccgggaggaggctgcatgacccagggtggggaggccgacctagagaagcagagtggggcaggtcggggagacagatattctgaggggcccaggacctccacgttctgagacgctccgcacacagcttctggaaatgttatgtggaatgaaccatcatc

SEQ ID NO: 54026 - DNA, 1268 bp, Homo sapiens
cccttccgctgcgccccggacagcctggaggtgagcacgcgctgggccctggaccgcgagcagcgggagaagtacgagctggtggccgtgtgcaccgtgcacgccggcgcgcgcgaggaggtggtgatggtgcccttcccggtgaccgtgtacgacgaggacgactcggcgcccaccttccccgcgggcgtcgacaccgccagcgccgtggtggagttcaagcggaaggaggtgcttgtccgcgcgtgctgtggtctacccagtgtctgtctccggccacagttcgtttctcggtcggtttagtgtccgtgtagccacccaaccgtgtggccgaccattcgcgctttcatttgtccttcgcctccgtctgcgccgtctgtcctagggggaggggaagggggagtcctgccagcacccagctgggccttgcctcgggaggcaaggaccaggacgaggcccgagggctcgcgtctggggcatacttgtgccgctgcaggcgggcgcggcgcgctgcccgggcggggagcatctgccgggagggcactccctcccaccagcagttagcccccaacgggagggcccttgagtgaccacgagcagagccggggattggagaaggacgggaaggcggatcacctccggcgccgcccgccccgcccttctccggctcgcgctggtggagcgcgaccgccacctgctgggcctcggccttcctgcagccggcccacccagcaggggccgtgggagagtgggcgtggggactgaggtaggtagtacgttgccttgttccgcttctctgggcacaccacgtgcaggtttggcagggaaagggggtctggtcgaaagcacaatttgtgagtaaaggctatgtgggcctccctggggtgacagcagaggcctggtgggcagagccatccaggtgcccagcggctttcctcacaaccccctccagcctggggtaggaggatgcttggaacagagcgctctgatgtacacctggcctcggagctcggctctgccggctgttcctgtgtgaccttgacctgaccttcaccctgtggggcccagcttcctcaggggagagtggaggtgctcatcctgctctctggggacctggatgggacctgccagcagggtgcctgggcatcggctgtaattctccttataagaggtctgcattgtacctgttacacaggcgaggctcagtggctcagggaaggtgacggccaggctggccagtgaccccgtgggaacttgaacccaggtca

SEQ ID NO: 54027 - DNA, 2426 bp, Homo sapiens
caggagttcaaggccagcctaggcaacagagggaggccccatctctaccaaaaaaaatattaacaattagccgggcatggtggcatgcacctgtggtcccagctactcgggaggctgaggcgagaggatcgctggagtcggaggtggggaggctgcagtgaaccgtgatcgctccactgcactccagcctgggcgacagagcgggaccctgtctcaaaaaatagatgaataaataaataaaaacaattataatggaagtttggataggaatttaaaacatgtggcaactaaccctgaccctgcggcttcagtctccccgccgctagctgagggccgtggccgctgcacagaggcttgtgaggattcgggggttcaggcagcgcccgccgcgcatctgccagacgtgcggccacagggtaggagcagtaagaaggatccagggaaaaaagtccacgaatgagaaaggaaacccagcgtttgtagggctaggagaacaaagaaagaaaatgctggcggcggagggcgaggctctgcggtgcgtggcagatgggaatttgctcggtggcggctcctctttctggagagcttcccagcgtcccctcccccgccagcccgcggtgacgcgcccggcacccaccacagccggctctcggcgccgtcgcgccttcgctcgcccgcttaggccgtgctcgcggtggcgtgggagacagagagcccagggaggaccctggaacatgcagtggtatggaagacgcctaagaaagggcttctctttccactcacgaaaatcagtgtgtgagctcgaagccatttcccagcgtgtccgcctcaactccctcattcaacagatgaggaattcctccagggaaatgcagtgatgcgctcacggctgccggcggcccagcgccaaggggcgctccacagccccgcggcccgaagccctcgactcggctgccacgcaggccccgcggccccgctcggactcccaggatcggcttccgagcgggacagcgctgcagtccacgagtccgggcaggggcgcctccaggccggagcggtttcctgcctcgggcactctgctgtctccacaaacggtttttggaggcacacacacggatactttaaacacgtcggtgatgaatcggtacccagctgccagtggcggagcttcctgggcggggccgcgggcgcgcggcggcttcatttcctcgcgcgcgccggaagtggcctctcaggcgcggcggcgcgcccgggggtgggtggctgaggcggcggcgggcccaaggcgtgaggcgccgcccgggtgtccccgcggcgcaggaggcggtggagcgcagagcgggcgagcgcggtgagtacctggcccggcctcgcccgccggtccgcgactcccgccggctccggcccgggcggtgcgggcgccggggctgcgggctcctgtgtggtcgggtggggtcgcctagcggaccggtcctgcggggggccctgtctctcagggatgagcctgccggagtcggcaccggttttagggaaagcgcggccagagacgattggttcgcttgtcagtgttgggttttgttttgtttcgttttgtttttacctattcatcaccatctctgctcctctcagtggataaactttttaatcagtggtgacctcgtcatcgcgttaaaatagttctgccctcagcccctctttatctgtagatggcagagcgagcgccggtaaagatgctctgtcgtggagggctcagtggggcggaggagatggggagcctctggcgttgtcggagaatgcaccttaaaaatgactctacccttgagcaacgcaggaagcacgacagtgatacttctgtttgtgatgatggtattggcggtatgatagtttgattatacatctgaagcttctcttcctgagtccttggcttgttaaacttggaggtattttctagcgtgcttttgagatagatatgggatgtcgtgacgtttcaccgtcattcaaggctcgcgggagcagggccttcatgtctggtaattaatgttgttttttgaatgttgtattaaaatagtagcttcgatcttggaagtaagaagccaagtattttaggactgagtgttagcgttcattttgtattattgttcttgtaccatttgtttaaagttgtcatgtaactaaaagaatgaaaaaagatggatttccagtatttgtggctcagaggattttggcctaaataaacacagttccaaccagtttagaagctgcatttttctctttgtttttgtcgaggcataaaatacatatgaaatcaataagagcacgaatcttaattgtacagctcaatgaatttttacatacttattaccctgtggaaccaccagatatatcaaattataaccatagaacatttccatcatcctattttcctg

SEQ ID NO: 54028 - DNA, 544 bp, Homo sapiens
ctagcaactggggccaaccctcctctcctcagccagcaaagccggggctgcccagctctcacccagagcctggctcggggctgcacattaccttcatccagaccacagccctgggagaagcagggctcacagggcatgctcagagcaccggccagaaaaagctgggcacagaactagcctacagagaagtccaggcaggagaaatctggaccttggagtctgcgtctgtacagggacaaagtgcagatcctcatcctgggaagtacctggtgctgtggctgggcatgtctccccaggccccaaggaggaggcctgccccagtgccccagctgtggctggggtccaggacacacccggatgcactcaaggctgcctgacattcacatttggcgggtctgggtaccagagacctggagagccccatgggcagagagagtgggggagggtccaccagatttgggcagccttggtgggggtggggaaacaagccctgctgataaaccatcagaacgcgccccctctcctctcccagctcccgccagcc

SEQ ID NO: 54029 - DNA, 662 bp, Homo sapiens
taagagaaagagaacagtggccattatcagaaagaggtttttcaaatcttaaattttacttaaatcttagcatagaattatactttgggatgtcgctcctctacaaggagcactcgaaattttgccgtgggccgcctgcggagctggagagctgaggaggcgggtcctggggcagcggcagcgttaccgcttgcaaaggcgccccttttttctgtgctgattttcgcctgtgagacttcctcccacgggcgccgctggctagtcagactttcccgcgtgcctcctgccccgccctaacaggctaacttttccgcgccgggcctggctctttgctgcagctgccgccctcggtgcagagttcccgggagcacttgctggcttcggtttcgcgaacttcctggccgcggagctttcccttctacttaatgcttgctagctcggccgcaccgctccccgccccccgcccccgcccccgcccccgcccccgggatcgggcctctaatgccttttcttaacaccttatgtagctgattgccttgccgatcttgcattacgggcagactaagggccctcttaatgccgcttgcctaagacaaggtcccatagctggagcatgtttcttgtcttttttcctacttattggaggagggggctcaggtgaa

SEQ ID NO: 54030 - DNA, 604 bp, Homo sapiens
ttagaaattatgacattcccaagttctactccaatctttttttcgtatttatgtgtcacatgtggcttatttaataattctttggcaattgtacatctcagtctcacaattggcctgatggattaacattttgtttactcaaataattgtgcttggatgataaattagcctgttaacacttctttcttagcaatatgctcactgacaataggcttctttcacatggctgtgtgctcactgcatggatgggatggaatccaaaggtcccatcctcccgacccaagcagcgcacgtggtttcccagtaatctctgtgacgcaaaacctgagagagggaacggcccacaacatgcagtgtcctgagtggacacttttccaattctgttttgccctgttttggtcaaggagtgtgtttgcgcatgcatagaaagagggagaatgtgtgatacacacacgtatgctatttaggtactgacaccaagggtattaaacacatattaactatagaaaagctgatgtttggagctcatctttctgcctctcatgctgcctctaggaatcccctagggtacggaggtggaaacaaacactttcctgctgtggga

SEQ ID NO: 54031 - DNA, 689 bp, Homo sapiens
ctttaaaaaaaaacaaaaaaaaacaactcctcagctcaagcagtccacctgcctcagcctcccaaagtgctggcattacaggtgtgagccactgcgccaggcctcagggtattttcaagggtcaaagcagctttctccaaaatccaaaaactactacccaaaattatgcctctttcaacacccggcatttttagtgactcaagggatgaaaattcttatcaggcccttacttgcttacacattaaccactcgctttttgcccagtattccttgttcccataatgaaattatgaactgctgaaatactgttccttgtgaaggaggggataacttcagggccataaaaaaattttgcagaagtaatgaatgtctttaaacacactgcgaccagctgcagacacccagaagtctggttattcaagacactatgtgagactaaagaaacacagacttttcccccctcggttctctgaaactgcccctcccttagtctctagctgtgtaaaaactccccatgcctggcatggtggcttatgcctataatcccagcactttggaaggccgaggctgtagtgtactatgtcgattgggtatctgcagcaagttcggcctcgctatgacctcccaggagtggaggaccaccacgttgcctaaggaggggtgaactggcccaggttgaaaacggaggt

SEQ ID NO: 54032 - DNA, 2809 bp, Homo sapiens
cgctgccccaaaggactaggacacgggctgagggctatggaattctgagaactaagctgcttgagttttggaaatgtggaattagtaaaaccagctaattatgctgaacctgttgtcttaacatgaagataatcaaatctgccttgtcttgcaaacttccagtgattattacttaagacactattgggggggtgtacaaatggaaagcattacatttattaggaaacctattcaggggtgaaacagtttcaagtactctggaatcaggttttcaaaaggcttcaacaatccgacttgttcaaggatctaaagggtggaacccagtcatcttaatgatctgatccacttatgcccttgtttatccctgcgtgatccacagaccaacaccctgaggcgtctctggggacatgcacaagctggcaaccagacccacgtacacccatttaccccaatggaccagccgctgtaagcctgtagaccacggccactgcgcaccgccaacgcacgcagaggaagagtctggtctccccgtccgcagcgccaagaaagcgctgggggcggggagggctgctcagctcccccaggtgactggacccggaggttttcagatcgagcttgcacgggggccacctagataattaaaacaccaaccctaaaacagatctgggtgggggctaagaatctgcatttccaaaaagcgctcccgaacgagctcttcgcagtgatacaggttggacgggattaacgcttgccttcaggcagagccaatcaagataaatagggcgcgccggagtcctaccagttcggctatctgcagagtaaacagggccgttcaagcaccacccacctcgttttcttttgttcaggacaggactcgaggaaggatcctggcctcccctcctagacacactcccgtgcccccgggaaaccgggcagcactctcgccaggaggctgggagcgcgtctggccgcgccgcccccattactcacttagttccactctcaaaccaaagtccacccggccgggcccgcggactttcatgctctagacttaccacggaggcgagcaggactggtttctgttgctaccaggcaagcgcggctggcagccaagagccccgaaattccaccgaagctcaaccacgcagagggctccggggaaactccaggtgcatgtttttgttctcaacctgcaacagaaatccaagtggtggtggggtcccttccgcaaggtgggaggcccgggcgcgcggtaaacgtgttttggcgggaagcagcgccgaggccccgagacaaggtgacggcgacgttcccgcggcctgctcacggcactccagcagcctcggaccgcccggcccggcaggaaggtcggccccagggcctgcgcgggctcgggcgggagcttccgggcggggggcggagcgagcggcgcagcggggagagtgggggcagggacgggagggttcccggagggaagggcgcctcgcgggagggggaggggaggggaggggaggggagggggcccctggcgggcttccggggccctgagggcgagagcgagggcgacggcaaggtggggtgggggctgctccccggcccgccaagctagcgctgcctaggcgggagctcggggacccgcgggccgagcgcggctgaagggagggaagggaagaggcgctcgtaggtctgcgtccgtctccgagcgaccggggcggcggaaagggacctggggggggcggccgggactggagtggcggggccggggcgcccgcgcggcggctcaccacgccagggactggcccgtcggccccgaggaggcgcggggtccggagtccgggaagcggaggcctcgtgatccaagaccggcagccggacgtgggtcacggggtgcagaggaggaagtgccattgccgggcccgccaagatgtcaccaatgggaaacgcgtgcctgcaggtgcggccccgtggcccgcgcgctgggcccaggcaggaagtgggggaaggagagagtcagggcggcgggaagacatttctccgagttctcccgaagggagccaggcgcgagcgcgacctggggaaagtccagagtgccagccacggggaagggcgggcagtgcagagtggaagagaagccagcaagttagacacagcccctctctgggaggccgcctctaaaatggaactagcggacgtaccttggtttgtacatttgaccatggacacacgtaaagattttgaaaaaaaatctttgaaaaaaaatttttttaacgcaattcctaaacttttaactaacgcaattttgtggacctctgaatcttaattcaaatgaactggagaacaactataaagcaatttcgataatatgatcagtgacattttatattgcagaattgtaaattttgttgtcattatactgtaattttatttctttaaaagaccctttttagagccacaaatatttgcagatgatacctgatttcttgaatgtttcagattacgtggaaagtggaaatatacatgaaacaagatgtgctatgaactagtaatttttattaaagctcctgatgtatacatagagtttcattacacttgtttctacttttgtgtatgtttgactgttttgtttgtttggttggttttttttgagacacagttttcactctgtcacccaggctggagtgcagtggcatgatcttggctcactgcaacctctgcctcctgggttaaggcgattctcctgcctcagcctcccgagtagctgggactataggcccatgccactatacccagctagtttttgtttttagta

SEQ ID NO: 54033 - DNA, 721 bp, Homo sapiens
tgttgaatctgtgtgacaggcacattagcctcaacctcctgggctcaaatgatcctcccacctttagcctccccaacgtagctgggaccacaggtgcatgccaccaagccgggctaattttttttttaattttttagtagaggcaaggtctctctatgatgcccagactggtctgtaactcctgggctcaactgatccaccttggcctcccaaagtgctaggattataggtataagccactgtgcctggcccaaggcaagttttaattattgatcagtcaccatagggttcctgcctgtgagggaacaatgtgtgcagaagacttgagccaggggttgtattgtgcaactgcagctaggtctgagatcaatggtaggagatgacatagccttaaaggcctggtttggtgttcaaaggccagtgggaaggcatttaatggaatgtggtgtgaaaggagttttgctttttaacacaacagtctagatgctatctggaaaatgaatggtgggaagagatacatggagacaagatgggaaggaatgaaacaagtctaggaagactggtgggagaagaatgtgaaagaatgtgtaatgtagagaaaaatgactgagtctggagactgactgactcaccaagaaatactacgcacctaaaagatacaggaactgtagtggtaaagagacacagttcctgccttggtgggtccagtaacagtggagta

SEQ ID NO: 54034 - DNA, 4426 bp, Homo sapiens
agtcaactaatgtggttctcccgaagagcagagaaccagagctcagtgggggagagggaattagagaagtcacctccaaggaaagggcctgtcacatttctgcagcccctgcaggcatctacccccaccgggctctcatttgcctccaggctttccaaggttctggccacgtgggagaagtaactttctatttactcagtcttttcccttaaataaattccattttttacctgaataaagctttataacgctacccttaacagaaaacttggcagtttacaaaaaagtggccgggcacgatggctcacgcctgtaatcccagcactttgggaggcagaggcgtgagaatcgcttgagcacaaaagtttgaaaatcaatctgggcaacataaggagaccccatctctacaaaaaatacaaaaatttgccgggcgtgctggagagtgcccgtggtcccagatactcggcggctgaggtgggaggatccgttgagcacaggaggatctcggcagcgagccgagatcacaccattgcactccagcctgggcaacaaagtgagaccctgtctcaaaaaataatacatatttttttatagagacggggtaggtctctggggcccaagcgatcctcccacacctcggcctccctaaatgctgggattacaggcgtgagccacctcgcccggccgataatgactctaatctacagaatgcacaccggaatgtaatacctacaagggaaaagatcttcttgcttaggaataaagcaatctctctcttaatattcattaaagtagtaatgtcttattttatagtttataaattctgtgagagcaacgagtcactttgcaggaatagcacttaaggtatctttcacctacctggagaacccaagaaattttcatcttactaggaattcagagacaaccacgtatttaacttttaaaaatataactaagtagaaagaattatatgcgtgtatttttggaagaattaagatgacttttgggacggaacgactgaaaactacgctttcagaactccctgccgcctgaggctgtggccctgaccccggcgcagggcccgccccgcgcggttccgggaagccgccgccgccgcccgttgcccttcgcgcgcagccgccagcgcgcgcctcgcgtcccgccacgcagatggccggcccgagcccccagcgcccgcgagcagtttcgagaactaaagaggcgcgtcagctcgtccccgggccgcccgcgggcaatggccgagctcggctctccttccaccctccgccgggacacacgcggagccgagcgggggtcccaggcgcctagggggaggggttcccgcgcccggggcggccttggggggagggcgagtcgggtgccttgctcctcaaaaccctggtccacgactctgcggttgggggagccgggcagccggcgcagcaggagccgggccccgtccacaagtttcctacgagcagggcggaatcgacgaaaatacttaatacaaacaaacaaaaggaaaaaaaaaaggacgactaagctgaagagcgcgcacgagtcagattttcaccccaaatacaaacacgatacctctaggagcaggagaccaatacagggaccgcgctccgaggacacgcggcgcagccgaggaggaaaaagggcccggggccgagagctaaggctacgggaaccgggcgtgggaggagggcggagccaactccccacaaggaagtcttgtgcaactctcaggcgcctgcagccacgtgagcgcgcggctttcattttactcaggtattattactattattacttcttttgagacaaggtctcatttccgtcgcccggctggaatgcagtggcacaatcactgtcactgcagcctcgacctcagagcaagcgaccctcccgcctcagcctcccgagtagctgggacaacaggcgcgcgccaccacacgtggctaatttttttttctttacttttcagtagagacagtctatgttgcccaggcttgtcgggaactcctgggctcaagagatcctcccggctgggcctcccactgcgccaggcctgttctcactttcagagccctccggcagtcgccagctccccgccagggggccggactaacgcacccggccgtccgtgccttccccgcgctttcctgactccaaaatctcagcccgcggtgctcaccgcgtgggaccactgtctgggcgtgcggctctcgacctccgacgctgcgtctcccgatcccagtgggtccagttcttgccggtcccacgtacgggcccctcgacctcgaatcccgtcacccaaatctcagcgccacggcccctcattatgtgcagtcctcgctcggtcccaggtttgcggcgcttaaactcagatcgctcttccctgatcccaaatcccagccccagcccaacgatccccaccccaataggcccagtccccaggtagtccgggtacggggccctggacttcggatagtctccctaatctcaaatcccaccccccgtccccacccccagggggacccggtccccgctaggtcccgggtgtgcggccttcgacctcggagacttcggccgcccctcacctcggcctccgagtctctacactcccgctctcatatcaggcaccccggtggtcccttggagcacctagaggagggtgggacgcggggaacttggcagttgtagcagaggcagttgaggcttgttgaccatcaccatggaaacccccgcctgcgagcacggggcggagcctacgaggggcggggtcaggcgcgctgccggccccaatcctcagcgcctgcccgtcgagcgcacgcggctttgccggaagccctcctgctcccggcgagccaggccccgactaggccctactgcccggctcagccctttgccctggacaccaggaaacagaagcccaaggagcccgcgtccccaccccctgctacctgccggcgtgacagcgattcggtggccccccgaaccccaccttgaggaagacgcggcgcagtcctgcttccacgacggagccggaaggacgcaaggaccgcggcagggcggagtttctgcgtccggcgtccgggggcggggccgcgacggcgcattgtgacgcgccagagctgagccgccggttggccggctgggcgcggagcagagccgacacggctggcgggggaggcggtggaggcggacaagcgaggacgtttctggagaggagaagggaggggaggggaggggatagggggagggggaggaggaggagggagtggagcggcgggaaagatccctctgactgcccctgaggccctggaggaaggacactggtgagccccgcaggacactgaaatgtgcgccgaaaggacgcctgatggaagactaggatgggaaaaggaaatgagagccgatggcagggcgtggtggcgcaagcctgtggtcccagtaatttgggaggctaaggcgggagaatcgcttgagcccgggaggtcgaggctgcagtgatccgtgactgctccattgcgtccagcctgggcgacagagcgaggcgctgtctcaaaaaataaaataaggaaagtagtacactgaaggccgggcgcggtggctcacgcctgtaatcccaccactttgggaggccgaggcggacggatcaggcggtcgggaaatcgagaccatcctggccaacatagtgaaacccctactaaaatacaaaaaaattagccaggcgtggtggcgcgcgcttgtagtcccagccactcgggtggctgaggcaggggaatcgcttgaacccgggaggcggagcttgcgtgagccgagatcgcgccactgcactccagcctagcgacagagcgagactacgtctcaaagaaaaaaaaaaaaaaaaggtacactgagtactccggagaccgcctaaaggggtctcagagcagggcgttaggagggatttgtcaggttgaagttgctcaggtgataaattccgtggtgtgagaagcccccaaacctcagaatgtaactcagacccaggtcgagggcaagattttcagtcacagagcacctgaacacacagatttggtggctaatggctaagccagggacagattttctttcttttctttttttttttgatgtattgtagggctaataattgtaaccattttattttggtggatcttcttcatgaagagatgatgtcaaggcactcatcacaggttaagctgaacattgttactattgttattatttccagactgagtatcgccctgtcattcaggcgggagtgcagtggtacaatcacggctcactgcagcctcgacctcctgggctcaagcgatcctcctgcctcaacctcctgagtagcaccaccactctcggctaaattttgtattttttgtagaggcgaggtttcgctgtgttg

SEQ ID NO: 54035 - DNA, 1997 bp, Homo sapiens
caatggcgcgcagtctggtctcactacaacctctgcctcctgagctcaagcgatcctctcatctctgcctccagagtagctgggaccacaggctctcgccagcacgccccgctaatatttgtatttttctttttatagagacgcgtctcgctatgttgcccaggctgatcttgaactcctgggctcaagcaatccgtctgtctccgttttccaaagtgctgggatcacaggagtgtgctaccgcgcccagccttgtttttttaaattattttttgttgaagggtcttgctgtatagcccaggatggagtgcagtggtgcgatcccggctcactgcagcctcgacctcccgggctcaagcgatctctccgtcctcagcctcccaagtagctgggaccacaggcgcgtgccaccaccgtgctcagctccttcccagtttaactgtggttaaaactggtgtgtgaaggcaatgagagagacccgcgaaaaatgagaaacaagggttagggctgacgtcttttgcggacaaagaaaaagaaaccaaagtttcctcagaaaacttaagttgcctcacagccgcctggtatcaggaaacactgagcccgcccaacgcgggatcctccaggggcaggccgcctgaggcccacccggagcaggcggggcggccgcaggaccacgtggcccagagcgcccttccagcgctgccggcggcggggcgggtgccgggcgcgcctgctgcgcggggcgggacgcggactcccaggctctgcggagagcggctgccactcgcctctgtttttttcttgagacctagtctggctctgtggctcaggctggagtgcagtggcgtgatcaccgctcactgcagcctcagcctcctctcgcctcagccgctcggtagctgggaccaccagcgggcgccaccactcccggctacatttttttgtatttttagtagagacgtgggtctcgccatgttggctaggctgctgccgaactccggggctcaagcgatccgcccgcctgggcctcccaaagtgctgagactgcaggcatgagccaccgcgcccggccgagagcctcttttggctcctcctttcgcctttccggggccaggcgtgtgcagctctgtgaagggtcccctccctctgcgggacgtcctcgctgccgaggtcagaggtgcggagaacatgagacccgaggtgcgttccagcatgttcctgcagccctccactcccgcggttgcgtaactcagatccctgaaacacatcgcacatacacgtgactggtggtttctctctttaaccctgatagatacaggagtccactaacagagataaggaattgtaccatgtactccatgcttcaataactgggtgcttagagacaagcctgagttcttactgccatcctaacacccgcagcagaggttaacctactatcggacaagtggtcaacttttctgccttcgggaagacttggggctgggctgagagagataatctagaacttttatagtgatcccgtgtacatttccctagaatgatggattagggtatagtgattaaatatataatgtatactttaatatacattaaaaagttctggaaggatgtacttcaaaatgttatcagtggtttcttccatttttcccgtttggaatattggaacaaccgactatgttattttagccctttctccttccttcattgcttctccaaattcaggggcctcattggagcaaacttgtttgcaggtcatctgggcaccctcttgaaataaatcgtctctctttgctcttacaggtctcaactgcttcttaccaatattaattccagtgactactatcagaatatgatgagcaatccactcatcagagaagctgtttctacactctcctgaatgaccattttatagatgctgggaaaaaattgtattaaagactatgagttagctgggcttggtggctcacgcctgtaatcccagcactttgtgaagc

SEQ ID NO: 54036 - DNA, 1538 bp, Homo sapiens
aaaaattagccgggcgtggtggcgggcgcctgtagtcccagctactcgggaggctgaggcaagacaatggcgtgaccctgggaggcggagcttgcagtgagctgagatcgcgccactgcactccaccctgggtgacagagcgagactccgtctcaaaaaaaaaaaaaaaaaaaaaaaaaaagagttcgacaccagcctggccaaaatggtgaaaccccatctctactaaaaacaaaaaaaattaaccgggcgtggtggcggacgactgtaatcccagctactcgggagcctgaggtaggagaatcacttgaactcgggaggcggaggttgcagtgagccaagatcgcgccactgcactccagcctgggcaacaagagcgaaacttcgtctccaaaaaaaaaaaaaaaaaaaaggacaacttttgatccctgaggctgctaattccaactgtgtgcatgtgcttaacaaatacctccgcacccaggcctgggaagttggctgatttgtgtacagcaaatacggcaggcctgatgtagcagaactctgacgaaaacgaactggacgcgtatttctcctgcagcgaaggtcacgctgctgacagcctctgctttgcactttgtccctgggaaggaggcctgtggccagtcctacctcctggaaagccggggtgcgtcagaggacctgatgcggagcggggaccccatcctctccgtgtctccccaagagccggcggcagaggctgcctgcgctccttaagctaggtcagttctctggcccgcagttctcgttctcctaacatcctccgcagaaaacgaccttcattttttcctcttgcgccagtcttgaagcggggcgtcctttgggctcacgttgcggcgcccagcggcctcaagcgtcagctgcctccagggcctcaggagcagtggctagggcctgccctccagcgcccggggtcctcggcccagccctgctccgagcgcgtcacaatggcgtcgcggccccgcccccggacgcccagccgcggtcccagcgaccttcgctttcgtggggaagccggactgcgccgtgtcttcctgaagaaggctggggtaagagtccggccagcggacaagagggcagctggtagcagggtgggatgcccgtggcatagggccgagcccccgctaggcacgcgggagcagcaaggcttccggaagcgcagggagcgctggactggcgggcgcccgggattcgcgcaggccccgcccctcggcggccccgcccagggagcgctgcggcagtttccatggtgagatggtcaacaagcctgtaagttcctcagctacgactaccaggtacctcgggttcctccctcctccgagagaccgccgaggtgcgggctgtgagagggggagcgtggagcctccgaggccgaggtgaggggcggccggcgggcaggggccgggtctgaggtcgagggccgcacacccaggatcgagcggggactgggcccgctgggggtggggaccgtggggctgggatttgggatcagggcgagt

SEQ ID NO: 54037 - DNA, 1679 bp, Homo sapiens
cctattccaatgggcacattagtacttgattatgcagggagtgaatcatgccaagtcttcacgtacacattgctcctatcactgctgtgcagtgagccgtgactgcgccactacactccagcctgggcaacagagccagaccttgtctcaaaaaaaaaaaaaaaaaaaagtcctttaagggatacgaggctgtgtgtgatagtcgttttcttttagtttgcacttttttttttttttttggagacagtctcgctctgttgccccgtccggagtgcagtgggtccatctcggctcactgcaagctccgcctcccgggttcaaggccttctcctgcctcagcctcccgagtagctggaactataggcgcccgccaccacgcccggccaattttttttgtattttttagtagagacggggtttcaccgtgttagccaggatggtctcgatctcctgacctcctgatccgcccgcctcggcctcccaaagtgctgggtttacaggcgtgagccacggcgcacggcctagtttgcacttttattcacccccaaattctgtgtattgcaagtaagtctcaaattttgagaagcgagcaccatcccattggcatcgtgactaccaaccaccacatcactcagctgctttgctttccgggagaatccctgcgccgtgggttcgctcgcctttccatgcctgccgtgcaggcgtcctttgcggtcttttgtccacgtccgggtcaacgcctgacgcgccccttcccggctggacgacgcagctcagggcggggcgaggcgaggttgtgtcgcggaacctgacgggaaacggcccctctaggtccgtggcgcggcgcgcttgtggcagcgacgggcactgccgcgcatgcgcggcccatttccgagagtggcagggctgggcgcggtggggtcgcctctggggtcaaagagcacgccgagcccgccggagggcggggccgcggccttggccctttggcgcgtaggagacagcgcgccaggctggcagccggccttagcggcgtttgctgctcttgtgcggacgccactgcgcgccctagtggggactacggggacgcttcgcgctccaggaaggaggcgggcaccgcccgctctagcacagtccgggagctggacctcggggttcaccgctctgcttgcccactaaaagcccattcggcggaagtccagcgttgcatggttacagtactgagccccagacatcgttgccaagtataatgcaggctctgttttatcctggggcacttgtagtcagggttcgtgggcccgcacttcataatggagggctgcgggcctcgtctgaaccgtccagccagtgtgtcctcagtcgtcttggttgggtttttgaagaaccaacccgagattctggggcacagggagttacaagacttggggccctgatgtaagccccaaataaaatgattttggcccctagggccagatccgagtttctaaaaacagagcagcacttgtaaggtagaggaagcgtggcccacctgaatggggacttctcaccagagtttcacagcagcggaagacgaggctgaggaagagcacggcccatatttgcacggagaggcaatatgtaatgcctgtgctccacaagccaccccagctgactcaacaggagttttgctccagctgtcagag

SEQ ID NO: 54038 - DNA, 938 bp, Homo sapiens
tcgaagccgtgcccatttcctctgactttcccgatctctgtcctaaagttctagttaagaggagaagcttctcgggatggatttcggttgcccaagacgccttccccgacctcattctcaggagcctggctcgttcctgcggtgcgggggctcagatgcaagctcttttcagcgaaggcagtgctgcggacagaaacctcagtctcttacaggagcccccgtccgtcgcctaacgtccaccgaaaacccccctgcaataacgcccgtcacaggcgaggaaaaggccggcgtggccaaccacgaagcccccagccggcccaggccagagctcggccaggagggaggaggggccatcggaggcgcggccgctcagctgcagggccccacaggcttcggtgtggccgcagcccggccccgggggcgcagcagctcggaaatgcggcgccgggacacacgtgccgccgcgggccgcgcctccgctggtcgcgtgccctaccatcgccgccctcccggcttccgcagctcggcggcccagcgccttacccgcggcacacccatttcctgacccctgaacgcctctgccagcggctggggaagcccggccagtctcacctcccacgtggaaccccacgcctgcaggggccagattccggatgctgaccgctcgcgcgcctagggccccgaaatacaagtcccagcaagccgcgggcgaaccacgcccacttccggcgcgggcccctgaactctgcgctgtgcggagcgggattcttgggcggaggggaccatctttgagtcagcgacgcgtgtattcaagtcctcctcctcgttttttattacaaacaaataagaattattttaggaatacctgttaaggtgattttcatttgttaaaatactattgggggaaaaggatgtaaatacccataatttcatcttta

SEQ ID NO: 54039 - DNA, 1242 bp, Homo sapiens
cctgcttttgaaggactatctccatatccacggtgcatgtcagaggtatgggatactgcctccaggcggcccactgccctgtccaattttttaccagattttgcatgtcagtcataatgtatcacctcccgactgcgatcagccgctctccacttcccgcaccttcacttttcaaagattcccaggtgatgccaacctgctctgcggatggagcccctaagaccccaagcggcccagactacgtttcccagaggcctccgcggcctcagccacttccgcttccggtccagcctgtctccgcgtggtgcgagcgctgcaccagcccctggctggtggttactgtccgaacggcgtggtgtggtcgctgactctctgggcgtgcagctccgcagccctgccggctcggttcggttcgtgagcggccggggtcaggctgggtccctgaagcctcgagcccctggcgggtgctccccgcctttcccaggggcgggtcgaggggcgagccggggtgggaggggaaggcggcggtgggcagtgcccacccgcagtggctgcgccgtgtggagcgaccgctcgaggctggtgcatcacagagcgctccagccttgcgccccggccgacagattgggccactgacaaggccgtcccccggtgctgccaaaagtgtttggcgtggagctggctgcagtccaggccggatcccagcagccgttccctttcctttcttcccgagcgtacccacctggacctgtctgcccacctgtggagggaacgggcgggcggggacctggtctagagggcagattctagctaggctagggcacggagggacttcctcaatttcctctcttctttcccagattgacttacgcaggattctcagcccttgcctgggagaacagttcaggagacagatggccccaagagcccagatccaggcaagtttgatttttccatttcttgagaaaccacgtgtttcagcgaggtggggtttatgcctcttgcccggacaatgccctgccctgtgtgtggacaaagctacccgaaccaatcctggatgggtcccgcgatttccgtcctgtctacccattacgtagtcattcaccaagtagattattgctacccatgttttctagagtgctagaaacagaaaagtgctttgcaaactggcagacgatgaaaaaaatacacgttagcatgtaaagacgtaggccataaagacatagggtgatagcagtgctc

SEQ ID NO: 54040 - DNA, 1181 bp, Homo sapiens
cttgccgtggctcccccaggatatgatcttgggcgagtaacccagcagccctgactctgcttccccacttattaaacaggttactaacactgtcctatcaggtaggacaatgagaaggaaagaaccaaacaagaggagtatcagacgagaccaccagacttaagatctaaaatccggcgtcctctggagggcggatgagaagaggggtacacttggcggtctggaaaatgtcctggggccagtttcaggtttaggagcttgtgggtagcgtggtttcccacacgctgcctggcttcctactctcccccgcaggggctgcctctcctcccaccccggaaggccggcaccggcttcccgcactcgctgaagcccgcacggaggccgggtgagcctgccgcggcctccccctcccacgccccgacgccatgggccctgctcctctccgcagacgctgccctcccgcctcaggccccgggccccgggcaccgggcccgccctgcgtcctgaacctcggcatcccgctctccggtccacgggaccctgctctgcggaccgccgacctctccgctcgcggctggcctccctcggggcccgggccggccaggcctgctcatttccttggcggccgctggcataaggcggccacacggagggcccgggacagcggtctgatggcgcagccccgccttgccccggcgctctgacccggccagcggcctcactcaccgcagcggcgcgtgcccgcagacaaaggccggcgccgagcccgcagcagcgccagcgccggcgccggcggaatggactacaactcccaggagtctccccgcgagcccgcccgccgggccgtgggtctcggcggccccggcttcccaagagctctgtgggaaatgtagttctctggcgcgccctgcgctcgggccccgcaggtccctagggcgcggggacctcaagccgtcccgtttggactggtaatccggagactcacagcggtgacctgtcagcggacgcggagccgggacggagccacggccgctcagattagcaggatctgattgacagcatcggggtagcagacgctgagccagggactcaggaatacagggttcttgcagggcgtcgcggaaggaaacgaagtttttgggagaaatccgtttgataaagccttggcggcttcgaggtca

SEQ ID NO: 54041 - DNA, 1141 bp, Homo sapiens
ggccagggcgtcttcaaggcagcgctttaaggaaagggccatggagttccagctggggcaggacaggaggagccggggacggaggtgagattagtggcctgaagctcccagtgaggccaggactatgggagagagggtacggagggcatcagggtgcggggggtggttagggggtgagggcgtgcgacacagcgtcagaaagcggacggaagctgggggtgagcaggactcgggtgccgtgagtgtcttggtgaccactgtgagccggcgaggtccactgggccagaccctggcccgaggtggccccggagctgtgagcgggaggaagagggaagggcggagtctggagccctcacgccttccgccttgtgcgcggtgcaggctgccgagagcccggccgggcaagcctttccgccgtggtcagtgactcgtttgcacaaggactttttagggaagagagaagccaggccttcgctgtgggcctagcccctcaaaccgcaagctctcccccttggggtcctcgtcgtgaacgcccttctcgtctcccgccgggctcactctttcgcattttgctgcgaaagtttactggaaataggtccattcactggtcgattcagagggacactagaaacgcgatgcccatatctaacacatcctggccttttgaagagggataaaaaataatacccactagagccccgtgcctccggagagtggggcttcgcatttgcgcgtccgaggcccggcagggagagcttctgggtcctgggggcgcgcacatccggcgcgcgctgtgtcggggagcggcgctctgggctgggccggcagagggcgctgcggggcggccgtggaacaagcaggggagagcgtcaggggacccagcacagcctgcctgctgcgccctgctgccggccgcgccctcctccgtgctgcgttctcctgctcgacgctgcgtcctcatccaacactggcaccgcgcgctccttccagggtcggaggcccacagacccctcacgttcgcttctgtcaggagtagcggcagaatttcgataatttatgtctttgatggagactgggaaggtagcctggccgctgcgcaggagagctgcgcggggtccaggaggggagcgcggagtgggag

SEQ ID NO: 54042 - DNA, 978 bp, Homo sapiens
cttgttgaagatttatcttccatgcttcctgcaggtggttatatccaatgcttgattaaactcacattttttttttttggcaaagccactttatatgaatgctgtgcatttcctgttgtaccttcatcacatcaggaagcaacaatgtctggccttcttgctttcaatgttgttaaaattggtgagttcaggtgtcatggacctaggagtcaccaatcctctacatctttattgacaattttctccagaattcagagtcagtggtgagcataatggttgggagtgatgggttggagtcagacactcttcagtttgagtaatagttctgaaagtcacttgttatgcctgagctaggttgctcaacccctcagacctttcagggctgactcagctttaggagtggatactccattttgtgtgtgggactgttgtttgagtggggtgagttgtgtgagctggactttggcccagtcttggcagagtggtagttgtgatttagtggcattcgtttcaagcagatggaatttgtttagatgaccctaaaggtctttccaaatctgacgtactaggatgaattatcagatggctcctatagttgggttaccacatattaacggtaaatctgggggtaggagagctcaccattcagttgtaatagttcaatagagatgacaattctgccagatttggatcctgtgggcagagctgagaggtctgtaaattcacattcactcttcaaatcctggtttatagcagccagtcaagtgtgtcactaagatgaagataaattataatgactacaatttggtaattcatttactttactgaaatcagtgctcagtcatgttacaggcgcgactccatctggttcccatcaatgacagagggagcatcatgtttggacagaggggctgcatctgtgtctatgcagggaaagctgcatggattatccagcaaatcatggtgtagaccaccagc

SEQ ID NO: 54043 - DNA, 1519 bp, Homo sapiens
agttgatgcgtattccaactgagaagtgggggtgtagccaacaaacaatgaacataatccccaaatcatagagcaagacatgggtgatacaaatcatggcaaagaaagcattgtgcagactgaggggtttcttatttcctgagaaggacgtggattgcaatttaaggtgggatgggggttggtccgatatgtgagcctggctaacaagatcgggcaggaagtaatgtctccttcagaccccgcctgcccagtagaccacccgcttggcactgatctgggccttcgtgtaaccgccgagcacaggagggccattgctgcttggcatcactgccctggatgccgggatcacagtgctgcccatccctctgctgcctcctctctgtgtcctgtcagtggtcctgagctccattccctcaagggtcatcttcaggccatgatttgcatgttggctctctttggggcccatggtgcttcatttattcccaaaggtgccttctcctccctattctgatcgagactaaaaggcctcctgatcccattgctttgccaggacaatattgcttcccagggaagactctgctggcacattttaggcatttctggaagaacaccatatcaccatcatcaccatcatcatcagatcttccccaagtcccatctgggagggtctcatgggagccacatgtggacttggttagggagctctcctgagcctggactgatggctggcccagcccaggcttttgtttgccacaggaagagagctttgtgcaaacccttgtttaacctggccttccctctttagaaagagaatgttcaccagatgaatcatgcctaacatgctcactggagccagaggactttggctcccaggctgtttactgcagctgagactttgtcccgtaagtgttcttaggaaatgacaatggacagaaaattgtcattgtttttgctgaaaaaaaaaaaaagtttgaatagtttccttggcccaggctggttggtggcaaccccggccccagcatgctcctcagccgcctgctctccagtgtgcccttgcctgtccacactgctctgcaaccaggtgccctgctgtgcccttgctcaggggctggctgtgcacaacatgacacgtggtatgtgttgatgtccgatgggctcacatgggcagggctgtgctgtggctgtgctggaggccctcacctggtctctctgctgacttcctcccaccactgcctgccttgggtgggaggacacccggccttcctggtcataggcagggtggacttagagaggcagagcgtgctgcaggcagggtctgtgtttgggttttggcagcctggatgaaatcccggctctgccacctgccagctgtgtgtgagtggccaggtcccttgacccatcctgagttacagtgcccacttggctctgtttctggacctcagatatggctctttcggtctctctcctctttgtaacattagagtcaatctctaagacatcatggagttgccattgagct

SEQ ID NO: 54044 - DNA, 1122 bp, Homo sapiens
aggggttgcaaaggaatcaaagcatccctgacctctccttcaatcaaaaaactgtaaacagaatatgtttatttatatgcgttagtattttttctctttgcaggggtaattttatacctttatggaaaatcatttaaaagccttttatctattagaattaaaaagtatataagaaaaacataaaagcagtaagggcaatgttatttcagacaactcagaataatttaaatcgccatctggaaagcccatcagcgacagagccttctgtggcctcttttctctctctctctctctctctctctctcgggctcacaggtcagcccagagcatctgaacatgacccacgtggcccaagactcgtggtgacttctcacggtggcatggctctgacttggaattcccctgtagaggtcctcctgggtgacatcatgtgcattccatgctgtgaggtgtttcgagcctgtgagtgtgaactttctttatggacaggaagcaaaggaaggaaagtgaatttaggaaaacaatggtcatcttaaaaaagaggtcagattttaaacaaaagtttaccagcctgtttcatatttctacttatttggaaacaaggctgttgaactgtcctgacaggctctctcagacagagctgggccctacaatggcgttttatgcagggctttgtggggaaatttggtgaaacaagcccctgggagttctgtacccacccacgccacagggaagccagggcaagctctctgcttttaaagggctggtgtaatagagctcagggctggtgggttaacggcattacccttattaaccacctcatttaattctcaccctggtgggttgtatctcccatctgagaaaacaggctcagaaagttgtttcttgcctacactgtcagcactagtgagcgcacagaaccgtacctaggttcatttgatgccaaatgttcaccccaacagagggaggataaagaaggaagagaatggaggttagaatgagaaccagtgagtgtgcggcctgcagtcaaagtctgtaattgtctctcctgtggcttggccaggacagtcccgctcattagcttgtttggccaacagtggtttctaatgaggggacttggga

SEQ ID NO: 54045 - DNA, 923 bp, Homo sapiens
cgagtggagggaagaggataagggcactagtgtgagtgtccaggcctccagataacaagaaaagccatttgacccacagtggctggggaagttaagtggcctctcaggaggggccgggggcctctccttccttccctctagtctttagggatggctccagcacatgccactgtcaacacaagagataataactgctcacttctggggtatcccactggggtgcccagggttgcagggcccagcctgcagacatctctttttgtgggtctctgagtcatcctccagatgtctgccctggagaaaatcaggcatggagcccaggggctgcggtgtgcactttggaacaggaaacatctaacattgcttaaaaaaataaaagactctgctgtgtttacttttgaaacaacttgccagcccatcctggcaaactggaaggcagaataacttaatggttttggagcagatagaactctggtgtccaagttcaagtccagctctagagtcatgctccttacagtggcccaaggactgagtgtggattctgtcacgaacagtatttatgtggtcatagtcacaaatgctctttagtgattttcctctgtaaacacccaggtgtggacaagggcatagaacgctccactattgttatcacaaaggaacggctaagctggcactttgcagaggtgctctccagtgagaagcgtggctgacccttccccaggcttggacaggcccccaacccatatgccccttctgtaggtctccacctgcagctgtggaggcttcacacagaatgcagttcacatttggggttgtcacaggtacacattgtgatgggatttgctatgtgcttggagaaaggaacagcttgtactaattctgcaaggtatccatgggctgtgaggtgctgagtagacctcagg

SEQ ID NO: 54046 - DNA, 583 bp, Homo sapiens
ggactggggagagaaggatggagtcccaaaagaggtttgcctgcttctctcccagaccatggccctagggaatctgtttcaaaagtgtagctcatgcattgcggcccagattcctaacatctgtccagctgtgtggtcgccagggcctccagctgccagtcagatgggaacttgaaaggtgacgtgaccttcagataaacaaagcaagagctgaggtaacagcaaacatcaggcaaatatttgccataggaactgcgtttgaactctcccccgtggtgtaggtccaggtttgctagcacaacctgacctcggcaaccttgccctctacttgttgttttgagataattcattttagtgtgtaggttttccacaggctctgcttgagtcaataagtgatctcatgaccccagagcattctatttggggctcctctacaggaagcccaacatggctccagggcaggtgggtaatcttttcttttctggatggaacacacctagatactttagttatggtactcatgtcttaggaagagtgtaaaaaactgaagaagtaattaagaacatcttgaaccataaggtgg

SEQ ID NO: 54047 - DNA, 513 bp, Homo sapiens
tcagccctgtttccttcctcagaggctgatggggtggggctataagttcccgccttctaatcctgcttggtctttctgatgactagcctccatcctgaagctacccaagggttgccagccatcagtcaagtaaaccaaagattttaggagctgcatgccaggaagctgggacaaagaccaaatatatatttcacaatagcacagttggtatttcctgggacattccccgggactgtcggactaccagggctcatagggcaaatcagacccaaggccccaggggttcagatctgtgctcccagtccccacaccagttcccaggaaccaagtagtgaacccttcctgtgctcagtcaccacagtcaggcctggattccttctgcctccctttcctagccccacccctctctcctattccccttgcctctgggcagactggactcagcagctggggatccactgaaggttctcatactggagtatacatcagttcctacctatcagaaaccccaga

SEQ ID NO: 54048 - DNA, 737 bp, Homo sapiens
ccaaactaaggggcgggcggagccaagacggaggaggcgagtccggagcaaacataccggatctcaggagccccgtgactgctgctcttggctgactcgtcacaaagcatccagacgcgtctcggccctgcgtccaagacgcaaagttgtgcggcaaccaagcctagagctaagcagtcaccaggagtggagacaaaagcagtgaaaggatgggagcgaaaacacggatcccgagaacgaagccacgagtgcaaagccgggcgttgtgcaaactatcccgggcctctgctgccccctggcggacgccgcgcgggagcccagaaccggagcgctctgagcgaagccgactccatccgacaccgccgcctcccagagggctgccctgggaagtcactgaaaacagcctgcggaagatttctcctgtgtcacgtggggggaagaacagccgctacctgttagattgccatgaggttgaatggccaaaatggataaccgggaccagagttatcctcccacctgaaagaagcaggaggaaaccaacaaaactatagaaacaaccgttttcaaaacccagcacaccagatgcagaggacagtgatcctactacccagacagtttccgggccacagcacaggaggtgcgggaacccggacagggcttgaccccatgagctcaccctcacgagttgagggactaagccgagtcctcagggcaggcacggcgtccctggaggaaga

SEQ ID NO: 54049 - DNA, 698 bp, Homo sapiens
tccagagccagacactacaggcccccagcaagtgtgaaatccaggtgtgactttctaggcatggcttggtgaggaagggcctggcccactccttggctccctcctcccagccagaaacggttaattgccagctccagactgcctccagcccagccctaatcgccgatctcaggcggctgggctgcgctggggctgagcggctccagcccaggctggggttgtgtgagcagcaggagcattcttccaaggtaatgattaagctgagtgcctggcaagggcacgggctgagagcacagaaggtgagccctattcacacctcggccaggctgcggtggccaggactggtttgggaaggcagggccccggtgtgcagccacagccagcagcctcctacctacacaagggtgttcgggagcatctcagggccgaagactttgctgcctgccctgccaggactttgtcctcacccctggcaccatgcagctccaggtgttctggactgggctggaatacacctgccggctcctgggcatcaccactgctgcaggtaagaccctgcctcctggctgctgatccttgcacactggcaccacagatagggctgcctgaggggtgggaggtggccaggagacagcaggcacatctggccacttctgtgcttcaatttttttcccaagacccctagaaacactgctctg

SEQ ID NO: 54050 - DNA, 609 bp, Homo sapiens
tgtaatcagttagggacagaaagacttctagtcagcaggccgatgcactgcccctgcaatgtttctattggggactccaaaggtccgtgctgtgctggttgtgggaagccatgggagccagcaaatccttgtgaggagagcacccagagacagcaagtctggaaaggcaggtccgagatgaaattcacctatgacagatgaaagttcagcactaactgccaagaaaggggaggaggagagctgaggttgagcaacattttcttgtcagagaaaaaccccaggagtttaatcagcactgggtccaaagcaatgagcaatgagtgtgacctgccgccacccctcagcaagcaagaccaaggccacacaacagcaaccagtgacccaagcaagagaacagggctggggcaggacccatccacggccaagcactgaagccagacacacagcacacactggggtgggccccagcacatgacagagaacagctgtgaatcaaggggctggtgccacattagtgtgggcagttgctgggggcactaagggtggctgctctggggaagcttaatcagaagacctctgggcttctgcctggagttccagggagcaatc

SEQ ID NO: 54051 - DNA, 1233 bp, Homo sapiens
agtgaggggtctacctagctcaatggccctccctggagtttcagggtcttctctggtcagcttttcaaggggtaaccagacacccccacactggctgggcccctgaggccatcaggaggtgtgactggccagcatttctggagaggcctcgagggaggcacaaacaaggctcacgccacctcaagccagcacaagctccttcctcctggccacaggtggggaaacccttatgcttccccaacaagaccatcactgccactgcgcacgaggctgcaggtgccattgactcagcccagaagggacagaggatgtctgcccagcaaaagcctctgggcttttcttactcccaacccagggcacaacactcagtgaggaacctatggtccacccatctctgcaggcccagggaagtgtcagtaacttaagcatctctaaggcagagaaggtggctgtgggtcttgaccaaccaagactgctcagggtcgggaggggaggctgcaggcctctggtgggagcagccgggccgtgggccacattctctgcatgctctagggctggggctgagctgctcaggaaaacaatgccgctctgtgctcactgtgggaaagccaggccagatgagcaaagctcattccagaaacatggctggggacttccagcctccttaccacatggcctttccaagattccaggttgatgatgcaaactgaacgcagtgaatgccagggcccagaaggcaatgtctgctgtgggcaggaccacagaggctgcccaggggtggcacagcacagagaagtgtcagtgccgtgtttaggcacttggtagcagaataggtgataaatataaatgtcttcaaaatgaaaggaagtgaggggggaagaagaggagggaaaatgggaggataggaggaagtgggcaggcaggcaagttctctgccatggggccacggaagtgacagttaacccagaaggaacaaagacatctgaatcagatattcctttgtaaatctgtaaaggatttgcaatataggctttacttctaaaaattgttgtcgggtccatgaggctgttgccaggaagagcacacacaccattcttcatggcaactgcagtgagggagcagtcaggaggaagagtcctgtggcttctcagtccctgtggaggctaacgcaaagctctgtagaacaagccttagagtgcatgctctatggtctaatgagaaacttgtgtttgt

SEQ ID NO: 54052 - DNA, 772 bp, Homo sapiens
atgccactactgcctggttatttttgtgtttttagtagagatggggtttcaccatgttggccaggctggtcttgaactcctgacttcaaatgatccacccccttcgacctcccaaagtgctgagattacaggcgtgagccactgcgccggctttttttactttcttgatagtgtcctttgaggaagaaacaatttaatttcagtgaaattcaatttttctttttttctttgttgtttattcttttgtggtcaaatctgagaaactattgcctaaccaaaggttatgaagatttatttctatattttcttctaagacttttatagttttagttcttacatttagatctatgatcaattttgagataattattgtatgtggtatgaaatggaatctaacttaattattttacatgtgaatatacaattgttacagcactatttgttgacttgaactgtctcgacctctttgttaaacattaatagactgtaaatgaaagggtttatttctgaacttgcaactccagcctgttgatctgtatgtctatcctgatgccattgccacaccatgtattactgtagctttgtggtaagtttcgaaaccaggaagtctgagccccctccaagtttgttcttatttttcaaaacagttttggctattcagggtcccttgcacttctacatgaattttaggatcagcttgtcaacttctgcaaaatagaaagctgggattttcatagggatttctctgactctgtagataaatttggggagt

SEQ ID NO: 54053 - DNA, 2457 bp, Homo sapiens
ggggcgaggggtgaaaaacttcctattgggtactatgctcaccatctgggtgacaggatcaatcccaaacctcagtaccacacaatgtacaattgtaacaaacccgcacgtgtatcccctaaatttaaaataaaaatggaaattttaaaaaatgcaagcagtaacaccaactgcccaggagtgctgggggaattgcatgggatccccaatgtaaagcactagcatagtgtctgagcccacaatgggtgcacaggacacatggggttgctgtcccaaacccagtcctcactcagagccagtcatggccctgtgaacagcattaattaggtcagagagaatgattcacactcgagttctggagagcccagggaaactgttatgtcaccctggtgctatgtttacttctcctatcaggagtgattaaattcttaggatctcatgctcagaggttgacagttatattgaattttacccacttttaaaaaacctttggaagcacccgattatttgtctcagctttgatgagggctgtggaagagcaaatgtgtcatgacaagtcaccaaccacagggagcctcagagctgtcaaaggatgggccattctccaaaaattcaagcaaacgcagaaacgggagggcccctggactgggtatcttcagtcctgtcactttttgcaggtgggggttccaacataagtcatacagcagccatacaagcattagcacagcccctctaagtcgaagttcagggacccatgagactcaaatcccaggctgattttggtgcatatggccacctgcactttctagaagatccatatcagattctaaaatggccatgagaccctaaaaatattaggaaacgcacactgaatgaaactaaaatgatttatgttaggggtgggagagaacaggtccagaggtcagagctgggaatcgtgaggtaaagcagaaattgcaaatgttttccatcaaccccatcccccaccttgacacccccacaccccagaaacactgaactgttcccagttccccaaatggcttgtggttttctgtcctctctgcctccgtgctggcaaatattcgtccaggaggcagtgactgggagagaaagactaacttcttattcaccagatcggatttcttaaacaataaggagttctaagaggccatgccaagcaaacggccagactgtacaaaggtgccccttgagcaataaatagcaaatgctctgggctttactgataagcctccccagactccaagccccaccaggcatgcagacaagtgcctgcagtgattgcagcgcctgcgcagcggcccttgttggaagtccaggagtccgcgctaccccgcaaagtccctggccgctgcccgcacaccgaacctctcggggctgagtcgggctgctttctcctcgcgtcccggggcgccctcgggaactcgggagcgcgcggcgagctgaacaatggcctggggacacctggcaggtcgcaggccccaaatcttccccgccgcccctaggccaccgccctgcacccggaacctaccggcgttcccagagcggggcggacggggcggtgccattggccggtgcggagtgaggggcgtgctcggggcgggacggagagaccggggcggcacctttggccgtgccgggcgagaggcggggagcggggcggggcgaggggcgaggggcggggcgaggggcgggcctggccccgagcagctgaagcctggggtcagcaggcgctgcgggcgcagctccggtgcaagcgaggacacgacacatgcagtggcttctggactgcgcgatgactggacggtgagtgatgaacgagcaggagagtgcttgggcgtccatggagcatcccctccgacccaggactgccaccaggcagggacgctgaagcctgggcacttgtgcccttcggccgcagcgcgcagggtccctcccccgccagcctggcgcattgcgggcctcgggctcattgctgagagggggcactgcgcctggcacctctgttaagcaatttaggggctacaacctgagcaagacagatgagcccggccactggctacaccttttttgttcaccttgtccttaaccagtttcctagaagcactgatcctagagttggggagagagcctagaggcctctggcacaactctgatttcactgatggaaatcgaacgccaagataatagcagcagggggggtctgtctcacaatcgctgtctgtagagggctcgccttgctctgggccaagtgctttaacacgatatgcctcttactcctcacagcaagtgagagtcctactttcgttatccccttttcagatgtgaaaactgaggcttaaagagttataaaattgtccacctttaccggatgagttggtgatggagccaggatttgaacccagggcttgttgtgcccctgagtctcttgctcttcac

SEQ ID NO: 54054 - DNA, 1064 bp, Homo sapiens
ctcctctgagcaggtgcccccagctggtgccattcagtcatggccggagacactcaacacgttggttgtgtcctataaataagcaggcgtgcaggggaaaagcactcctgaaggccagtgagggagaaccatgcttttcaagtagtattacccagagctctagaagatgaggctctctgccaccaccacctcactgtcaaccacggcaatcccctttaatctgttttgcatacattttctatttgaacaaagagttccacagttaagaaaatttcaaacccattggaggtcaatattcttgttgtacagatgggaaaattaaggcccagagaggagaaggcatgcaacgaagcaccccagagctctttaggaagcattttctatgaataagtaaccactgcctgacttatgggaaattccacttctaagtgttcctactacatatggcaaaatgaacttcttccccacacactataggagaccggaagtaaatgtaaatcatgccgtgtcgtgaatcagaagtcacaaactggagcctcactgtccagtggactaggagaggtccccaaacactggtgggacttcgaccccagctgatgtccaggctcttgactccttgaattccttcccatatgagtcagaaaatagtgaaagtacacactcaagaagggagagtgtgcaagggggttgggagctgcttcctttatgggtttctttaaccaaggggtgcaatatccaagaagattcctggaaaaaggtggaactttcttgaaactgtggtgccacccatttttacatgaaatatgggtgttctggaactgtcatggtgcctgtgggtgtgtaatttagcatctcagagagttgcctggttaatgagcgtatagtgaggtcctagaagaaacctaggtcgaatccagcaccacgttggtttcagttggtcttagccagcttggcccacactctgatttttttagagtcttatgacccctagcttcttatgacccttattttaacagtttccttttgctggtcatgtgaaatggctgcctagaattttctattct

SEQ ID NO: 54055 - DNA, 2315 bp, Homo sapiens
tctcctcaggcaccacaggccccaagggctgggcagacaagaggaacagacacttccccagagaacctccaatgcaccaggcactttgcctctcctttgtttaatataaggtgatataggaatgattattttccaggcaaagagatggaggctcccagagtttaagtctctagtccaaggtcacattgcagtaaatgaaaggtgctggccatggccccaagctcacagccacttacaaaacagcaataccgtttccattaggctttggaggtctccacccagtatcagtgaacaggtctcagggacacagggtgctgtttgttgcccttgagccccaagctaaggggctctcaggctggcgaagggctcaccacccggggcgcgctcccagagccgcctgaaagagacccccccgtgttgtcactgcccctcacccgcagcaccggcagccttagcagtacggtttggggtgccttctcctccactgtctcatcccacttctccgaaggtgggcagggccacgctctggggccagcgtcacgccctgggaccagcggctccttgtgagccttctccccgcttccgaggggctagaggagggacgccatctctggaggctgaggcgccgacttcctgtatcatgaacctcgcctttgggataattttgcttgtattacaacaaaaagcctgagcaacggggaacaatctgtgccttttgaagatggcaaagggctttagccaggctggctggtatctcaaaagaaaaaaggaccgcccggaaatgtccttgtgtaaacccatggctctggacaagcaagtgagccccaggcggcaggaccttttctggggactgtgtgccggccccgcccgcctggggcgcggcgccgaggctccggggcgccccctggtgaccgcgggcgcgctccacatccagtcccgctcctcggcccagggacccctcagcaatgagagaaacggaaggggcttcccctggtccgggggctccgtctctcccaggggtgcggaaaaccagcatcccgccttgagagagttgccccgtcccctctccgaaggcctggcagaccactggcccctggagtgactggccagccccacgaacatctgttttctgggagccgcaaagcgcttcccagcctgcccgctctgggcagtgccttgtgtcccactcactcccttcttcgcctcccatccccaccttccacccccacccccactcccctctccacctcccacccccacccccacttccctctccattcccttctccagtcccctctccacccccagccccactcccctctccattcccacccccacctccactcccctctctacctccctttccactctccccacccccaccccagtggcaagaaggaaggagaatgtaactgctctacaagggccccaccaggaggcttagcttgaagggaaaggaattcccctgggcctctctgcaggagcttgggacactgccagaagccccaaccacaaacctgtattctactgggagggagcgccttccaaaggtgccattgacctctttcacacagctgggtattagtgaggaagcccggggatggtctcctcaaactgccagacctccccagatgcagcgaggtggcttctgagcataggggagtctgctgacctcatcctagttgccggactctccctctgaccccgtttcatgatgctttgcagaaggggctgtagtgaggctgggcccagcaagcccggacctcaacccctctgccttggtgggtgggccctctggatctctcccgaggatgatgattggctaaaggctgccccggctaaaggctgccccacacgtttgcccaaagtcagggacctgcaggtttgagaccaccacagagacacagtgggctgtgacagatacaaacatttgtctacagtgctcataaatgcagctccaagttcacatgcgcagattcccagcccttgcagggtgtgaagaacattgctgatgtccccattttatagataaggaaactgggtaattgcttgtctgaaactttttccttttaatatggtttacattctatctccagagaaaacacacttaacagaagacagaaaacatttaacaaatccaaagcaattaaaaatagccacaaaaaaagagaataacctagactgacagctcacagagcaaggaggtggcagagacctgcccaggtgagcttggctgttgcccccagctcaatcttcctcctctcctctctctgtcccttcacctctgatcagtcccagcctgattcccgttccct

SEQ ID NO: 54056 - DNA, 6195 bp, Homo sapiens
ggccctcatcatgggggaactctcccaatgccaccacaggacgtatgagttgtagccagcagagtgccccagtggtgccaggtgacagtcccccggaatacattagtgcatttgctaagactccatgtgttctcttgggcctcacagaacatgggctttgagggtgggagccaagaggcagacttgggagtgcccgaggccttgttctgaaacacctggggggctgacacccccactaccctcacacccctaccaccagtttccccaccagcgatgatggtagctactcagccagtgggctcctatatgcggttacacgtcagaatggcctgggaggcaggtgccagtaattatccctatattacccatgagaaactgaggaacacagatgttaagtaagttgctcaaggtgatcagccagcaagggtcagagcgaacgggattggtaacatctcctcatgtgaaacaggctgttatcatattcagagggggtcggtctcactgtgaactgcccaagcaggggcctctgcagaaaagcatttccctttcagagacctgccaggggcagtgaccaccatggaggagacgagaggagatgcagacccagcatgctctctacagaagcctttactggggaggggtcagagttcatggatcaccgggaggtgcgagtagagtgttctgaggacactgctggggcgggggcggtggcgggaggccatggcttgggcagactgcccaaaagtccagcttcttaggtcagagctctgctgcccatcctgcggtggtcttgccagggaatgcccaggcatcctggcttcacagagcctccctctgggggcccccatgggcttgctgctgtccatctgtctatgtggaccccagaggccagcagaggggccagtcctccttggcaggtccctctggcttggctgcttttcctgggactccccaaaaagccagtccagggggtccacagtatcagccatgggcagtgtgggctgctggccactgaaacgtgcggtgatgtctcgcagggacacagcagggcggcccttccggcaggcctgggctggcctgtggggtggcctgggttggccctgggccgtggccttgtccagcacagaggtgggctgtgccagtcgagatatagacctcacgtagtcatccaggctaggagagggtgggggctcctgtccaggacccccaagcagcatctcctccgtggtctcccgaattgtgggcagatgggccacggagagcagaagccgggacctcatcactctggcgagaggaggtggcaacctgttgggaaacagaagcctggtggtgagggcctgccatgcgtcccaccgcccctcagcgtcaccacactcctctggggctgcctgtaggaatccggtgccctgagagcaatttgaagtctacagagcccagaccagagctccgactgctgggatcttttcttcctgttcaggttaaaaaccccaaaggcttaagattttatcattatcgtttcagaatgtgcacagataagagaacctaacctaacaaacactggtcagaggaaggctgggtttaaaaccaggatcggccacgcactgaccatgggacctttggcaaggccacctctccaggcctccacttacccatccataaaacagggttataaatacccctggccgggatgttgtaggaaatgcatgaaataacccctgaatccctttataaatgcaaagccctctacagacagccctggtctctaacccatagggaggctgtgcaagttcaggctgggaattgccctcaaaaataaacaaagcccttgtgttttgtctcaaacccaagggcagctgctctctcttacctggagctgaggaggtctgggggtggcaggagaatggatgagcagggacagtccagtccaaaggaagcccctgggaagcttgggggccgaagggtggagggtccggcagggggtccagcgtggggtcgctgggaggaggacagtgcactgagtctcacagtccaccgtagcaggctcttccctgagcagtgtgaagaaccttcgcaggcaagctgcttttataccttcccagcagctatcaatcactgtcacgagggccaaaaatagcctgctcggaaggctgtcttaggaaaacagcttggtgggcggggcctggcccagctgccagcttggaggtgtttttctgcctgtaggaggctggggaatgtttacgctgcagggcaggaaaggggtgggttcactgctggtcaagtaggggcactgggagagggaggggttccactgggccctcacaggtagccccagggccacccctgccccaaagcttgtttcccactctgtgttacaccaccccatcatgactcctgtgaagttgggccaggtccttggcaactttgatgaaaaatcagcagcacaggaccccagtctggaggcagctgaggctgggtccctaggcctgctcctaggagagacacaccctgctcgcaagggaccaagggcggtctgcggggtctgaccctggtcttcttacaccccagatggggtgctttcggaggatttgtttgtttacttgttcaccagatatgaggtgctagtgtgtgctgtgaatgcactaagcacagcaaacgtagcagcggacaaaggtgtggccccctggagctcatattctagtaagggaggagatcaagccagagatgaatgggtgctgtgattcaggcaacagcaagaactgcctgaaggaaagcagcgcagtggcatgctgtggtgggctgccgccacaggtacagtggtcaggggtgtcttccctaagagcagatattggagcagaaacctgaaaaaaatgggaaaatgcacattccaggtggcaggggcagcacgtgcaaagcccctgtggtgagggcgcgccggacagacatgctcagggcacagcaaggggcctgcagactggcccatgtaggagggggtcagtggaccttggggtggatgctgtgtttccctctaggagggagggaaagactgcagggtttgaacaagggcactgcagtctggcttctgcttcaaaggatcgctgcagctgctgggactgggctggggctggggctggggggctgccaaggagcacctgggcaacattagaaagccactgcatctgtccaggagtgaccatgccagcaaaggaggctgccaaggatgagagaggcagcccctgggaagctcctgcactccccagacaggccacagatcctctgccccagccacagccccacctggaacacgcctgcctgtgctgcaggtgggggagaaagaggagtcttgagagttagcccaagcctgagctctgagtactgggcagaccccagactccctaggcaagcaagagggaccggcagtcccaagttcttgaattctaggtgggaactccatgtgcacaaaggcatcggggcagggagtgcctgagacagtgaccaggatttcagtggcacatggcacttctcaccttgcccaagctcttatatcttttgtagaccctttgtctagttcgctggctcttctttgaatttattagcaatgagcagattagtcaagagaccaaaagagggagggaggcggagaattcgctgctggctgacggggctttccctccattcagatgcggccaagctgggggagggtgaacagtgggcggctatgctgggggcacacacatcacctgtgtaggcatgtctggcctgagtcatggagagccagcctgtccccagtacagccaagcccccgaccttgtccaggcaggtcctgaggtcagggccacctgctcagctttcctccctgtcccccttcactcgtcttccagggtgcagtgcacaagcacctcctccaagaagctccattgcatctccttctgcgtccaagcccgagcccctcgtggccagggctgtgtctgctccatcttcctctgcctggcgtccagggtggggctggagggcagtgggtctccatgagtgagccatccccacaagctctctccactgagaggcacccgagaccaagaggcaagaacagaaccccccatagacctttgaactccatagatccatgctggcctctccttcataggaagctcagtgacacatctgtgcttgtagagcaccagtgagtatcaaaaacagctctggtttctgcttgtttgttttcctttttagcagatagtgcaaggtcatatctggaagctgtgtgtatatttgataacctttggatacactattttctctgtggatggcaggatgtttgaacctagaaaccccatttctaagttaccatgaaatccacattgtgcagggtcttcctgagtgctgccagggatacaaagaagtttccatggcgtccctgttctcacagggcttttagtgccaacgaggagagagaaatgggatttgtgaatctaaaatatgggtcagaaatactgcatgattcccttatataaggaatctaaaataggctcatagaggcagagagtgaaaatggtggttgcagggactggggcaggggaggaggaagtggagagttgctgtgcagctgatataatgtttcagctatgcaagatgagtaagtcctggatatgggctggacaacgttgtgcctacagtgaacaatacagtattgtgcactgaacagtttgtttagagggtagttcttatgttaaatgtccttatcacaataaaacataaataataaaattaaatgttggttgagatggcaatgagagaatgatattcaaagttaattgtgggaagactagtgtcagagcacattaggagtgtgtagtttcgagactgcggctctgggtagagggcagctgaggttgctggcaagtattctggcaaatgactcagcttggccaggcttacacacagagtgaccgggattggcacagaggcctggggtggtctcgcagagacagaggcctggaataggtcagaggcactgaatcaagggcccaaggggtgccaaccagcactactagcaaggtgcgtgcagaggactctgttgattagggccccaggttggcagcaggagagaagccatgtcacctgcagacctagggaaaccgagggaggttggggacatgggatgaaggctgttgtagaaattctggtatgggatatagggctagtgatgtctaagcagtggtgagaaaagcaagaccctttgtcagccctggcaagtggacgctgctgctgttggaaggcaccgggagaagggtgaggctgagacacagctaggacagagagtgcccacttctcctctggtgggtgtgggaccctgccgggcctggtggccataggacctggtggcgcaggaccccctcccaggtgcagtgtgggcagagaggtcccctgcttggcatgagcagacaggctgtgcgtccctggaaccacttcttcaccgcggtgtggacgtgcctgccggccagcagctggcttcctgtgggacacctgactcagccactgtgttctgcgctgtgcccctggccaggcatgagctgagcacatctcaggctccctcccacagggcctggtcacacgccccagggcacgtagtggctgatggtccttcctgaggggatggggccactcaggaggagggatgtgcaaggcctgagtgttcagagcatcccatccctagggggcacagggaaggtaggcagctgctctgggggaagggctgatgtgtggacccccacaggaagaagggactctgatcatcgaggggctcctcaacattgcctgggggctgaggcggcccatccggctgcagatgcaggatgaccgggagcaggtgcacctcccctccacctcatggatgcccagacggcctagctgccctctgtgagtacccggtggcttctgtgacacctgctcagcctgagctcccgggttggggatatcccgagcctcagggtgggagccctgttcccttatgggacactggcacaggagggtgacccagcctcatccccatgccctgtgactgcctcagtccacagcctcgcccagggtggcctctccctccttcctggagaacattccaggctcccatgacctctatttctgtttctcaaaccttcctgcaagccaccttgctggcaagaagggacgactacagccagg

SEQ ID NO: 54057 - DNA, 792 bp, Homo sapiens
gctcagtacattaagtttaattctttcaggattctgaaggagaatcccaccaagctataggaagcctccctctccgcctcttccagagaaatggatgggtgggtacctagctccttggcgccgagtcaggaagggtggggtgcgtgtcgcagtgcatcaggccctggccctcccgtctcagctttcctttctcccacccctcagatcttgtttctcttcaagctgcacctttgctgaatgacactgtaggggaggaaaattatcttctctttctacccatttaggttcactggctggggccctgtatttagattaacaaaagacagattaaggagaagaacaaacagaagtttgttaacacttgcatcatgcatgccctttggaatatccagggatgaatggtcagaatttgggcttaaatagcatattcacaaaagagcagtaagtttttagagaagtgacaagacagaggagaagggcctgagtttctggggaggcgaagggtgggaaggtcaccgcacggggagctgcgggaagggaagggcttcagcgggacgtgctgtgcaggttcctctggtgccctctccaggctgaggaggggctcgggttgtctctggtgattaactccatcattgcctagagagggacgggggcacaccttgacaaatttatgtcctgctttttggcaaataggggagggcaaagagcctcacttgtatcttcttcttctcaattgccagccgctccacttaatccttatgccaaagtggcagatctgggggccctgttctg

SEQ ID NO: 54058 - DNA, 1976 bp, Homo sapiens
aggagaccctccctaagtaccagcctgtttggttggttggtttgcttttgaaagttattacaatattatttaaggccttttcggataagttcacttttaaagtaggtgttatcaatctaatttctgaacgttatgggtcagaaaaatcactagcaagtggctcagaaaaagggaaaaggtacacttctgcaatcagctgaggagttcacacctttttttctaaatcaacatcatatttgctgttcagaggcaatctgaaaagctgcaaattcagctcacctcaaccccataatttcaaacgttagaggctggtctctgtggtttcctactggttcctgtggggagctcccgctttctttctacatagagcttagggtatttctcatatgccccattggctacctagtgtctcaggtaataaacgtatccgaagataaagcaaagattgctatgggagagtgttgtctcctaaaataggactgtcttgccaggccaggcctcaagaaccagagagaataataaacagcacaggatgaaatcagcatgattgcaaaaggactggactcaggaaaaacaagtttgtttgcccagaacaaattaccagaagggatcaaaaacatcttgtttttctttggtgataaccatatgctaccggattggaatgtttaccagaaaatggaataaagaccttcccactggcaaaatagagccagggttcacccaggatacatctggccccttagtcccatggaaacaaggcccaaagcttatccagtctgaccagatgatttgtggaggaaccagccctgcaaaatgtgtcccgggtgtgtaggacgcaggtgccttgcagctgcggaggggcagcgggatatccttgccaggtgcagtggtgggcagcatccccctgccctcagttcctcagtggtgatcagacaggaagcttggtcgatcagagccaagcaactgagtataaaaacagccagatgcatgggctatatttaggccctgagagctgcgattgtttgggatcaggctagctgctcacgtgccctgcctgagactcacgttgtgcagggtagggccctgtgccctcctggtcaacttttaacagagatgttttctcagacctaggaatgggaactcccagggttttctttcccagagagtccaaaggaaacagaaagccaagtctcaggcttggtggaaagaaccattgttcaggatccctgggctgagagttcttggtgggagacggaccactgttgttaccgcacatgagccacacctataactgcctttctggcacttgggctggggatccatgttgccaaacacagacccaaggcagcagtgctccctgctgagacagcgtgtgtgtgtgtgtgtgtgtgtgtgtgtgtgtgtgtctgtgtgtgtgtgcgcaagccagtggtgtgcaggggacaaagacataggaaaatgaaactgtcttgccaggatttttctcaccccagaagactctttttcctggaatgaacccttcaaataccactgggctcagggacacactggtccctgctgggtagtttcccagagatgtcccagccactaagggatctggcctctcttgggccagaatccccagaaatatgtgcagaaagatgcccagactgtgtccaccccctgcctcccacacccttgttccctttctcccttgtgttttgtaaatatcatgcgtgaccattttcaataatttaatttgcataaaaattgcctagaatcccatttgggagatagactgttatagagaggttaataggctctggagccaggctttctgatttcaaagtctggctttgccacttacaaatgtgcatgaccttgggcgagtttcttgcctcagttttctcatctgtgaaatggggattctgtgtggaagaaaacaaagtgctttctactattctctcactcagcagcaataatcacaaaagacttct

SEQ ID NO: 54059 - DNA, 2861 bp, Homo sapiens
cctccaccaacaaaccactgtattacttcaggcaggtcagcctctcttgcttcagtttactgatttgcaagacagatatgataatctgtgcttcatgagactatggtgaagatgaataaccagaagataagatgtaaaagtactttgtaaacaataaggcatcttataaattcattcattcaacagctatttactgagtgtctgttccctgctgagcactgttttcagcactgcagacacaataaagaactaaagagacagatcatgagaggcatcgggtgccactgcgaggtccttggctttgctctaataagttgggaagcctttgaaggttttgaacaaatgaatgacatgatctaacttaggtttaagaggattactctggggccgtgaatagactgtagggcaacccgtctggaagccaatataataatccagaaggtggatgaaggtggcttggtggttatagcagtggaagtgttgaaagtggcttgataatgaatatattttaacgatgaagccgacagaatttgtggataaatcacaggtgaattttggatgaaaaaaagaagagacaacagtgacatcaaggtttttggcttgagcaactggaaagatgatgggatcttcacccatccctgggaagaagactgttgcaagaacaggttaggtagatatcaggaattcatttggggggtatgttaggtttgggatgtccattacacatgcaaatgcagctcttgagtaatcagttcgatatacaagtctaaagttcaataacatttatgtcccacagtcagactggagttaccaatgcgggagtcttcagcatgcagcaatagcattggaagccaaaaggcggaggagctccccagggagtgggggaacacggaggtcagctggtcagatgactgagcacggccaggatggctgaggaggagcctggaaggaataagaacaaagagagatcattactaatgagcaacaaaaggggtgtgttgaaatcagactttggagccacaaagaaccattccaattctgggtcgtccgcttacacacggtgaacggagcacatttcttctctgagccttggttcctttcctgtaaatggagtataaccactcccatcttgcaggagctttttggtgataattaaggtgacttcgtgaaaagtaccagggtctcaaaaatctcaaaatttgtggaaagtatgcagtttctaggttggagaggctagagtttggtttcaaaagcctcgaccacacacaggggcggttacagctcttgaggtcccgggggtcacaggacgccttccgagttggggggaggagaaaacaaaaccacaggaagaaacgaacaacgctttcgggtgggcccgggaccatagagggtcgctccgccactttcctagagcgaccgcggcggcgccagagcgcggcgaggccctcacttccggcggcgcgggaggcgcccagcgagccagagtggtggctggtcccgcgcggtgagtgggattggggcacttggggcgctcggggcctgcgtcggatactcgggtccgctcgggagcgcgctggccgcaacgagggcggcgcgggcccgggcgatggcgtggcttgcgtctcccgcctccgggcagggcctggccgccgggcgggggcgggagggccacgcgggcccagggtggggccgcggcctgcgcggcgggcgggccgggtcaatgaggagcggccggcggagtgctgggaacgggaggcttggactgggggcccgggcgaggcgcggcccgcggcgggtggaactgggcgggtgagcagcagccccggccccttccgtcgctcggagcgttcgaggactagatacgtggaacaaatgcttaggcagcacagggctgctctgagcggttttcagattcagactcattgcaacttctaacatcttgatggtgttgccactttatcattaccctccccattttacgaggaaactgaggcacattccagttagctgggtgtgcaagaacagcagcttctgtcactcaggtttaacttcgtgcttgcccctgctggggagctatgcaaagcacgggtcgccgcgctggactgagcaatggaagatgtggctgccactaagagtacaggctctggagtcaaactgctagggtctgggaacccggccagtgccttctagcattgtgccctcgtttccttaacttaaaacggaaataactgcataaaggtgccaggagaattaaagagctagcacagaatcaagttacacagtgtctggcacatactagtatgattgcctcatccgtaggtggatttgacagtctgagtttctgactagatctgacttccattgtattaaatgcgtgtgcttttatgtataatgaccattatagttattaaaaaaaaaaaaaagcaacaccaacaccatgtacctaacacaatgtctcctgtgtggtagatgttctgtaaatatttgcttaagttaaggagtgggtagtcctaactgtaatcttgtgttatatgcggcttactcttacgctgaccataattacagctgatgtaattattaaatatccagataaagtcctggacctaaagtctcaattatacaataagatgaaaggaaggcaagaaaaattatgtttttgttttcatttatttgctttatatgtttgtatgcaaagaaacccagaataattgtttctattttaaattccacattctgacacaagataatgaaaaatagttccaataattttattgcttttgaagttctagattttccgacattgccacctatgtggggtttgtaggggtttttgttggtttgttttggccgttattttaaat

SEQ ID NO: 54060 - DNA, 767 bp, Homo sapiens
gccagtctgtgccgcagtgtacgtagaggcgctatgagcccgagtttcccacgtccagggacaaactgggagccgtgactgtcaggccgcgcggaggctgccctggccgcctttgcggtcaggtgaaggcgcagaggcagggaggccgggcgagcgcaggcgggcggagagcagaccacgcggaagaggccgagagagaaagcggggcacccggccgggggggtcatttacaagggacgctgggcacgaaggaggctggggcgaagatgagtccaggggttgggttgagagcgctgcgcagccgggctgagaagagaagctgacgagtgactcccgacaagggacgggggagagggaacctgggggcaggcagaggcctagggggtgggctctgagggcagccactcccaccggccctcccccagccccgcaggccagccacatgccccgtgctccagacgacccagctacatggatggcagcgtcctgaagggggatgatcggtagggagtgggtgcggaggctcacgcctgtaatcccagtgttcggggattcccgagcgggaggatcgcttgagccggggaggtggaagctgcagtgatctgcgccactgaactcccgcctgggcggcagagtgagaccctgtttcaaaaggcaccaggggtgtagggaaggagcgatatcccccaggcaaggaaggctgcggaggggccaggccaggagagaagggccctgagctcagtggacgggcagggtgcctgtggagg

SEQ ID NO: 54061 - DNA, 916 bp, Homo sapiens
ttaccacacaatccagcaatcacactccttggtatttacttacatcccaacaaaaaccctcatatggatgtctagagcagctttgttcataattgtcaaaacttggaagcaaccaaagatgcccttcggtaggtgagtaaataaataatatccagacaatggaaataccattcagtactaaagagaaatgagctatcaagccatgaaaaggcgtggaagaaactgaagtgtgtatcactaaaagtcaatctgaaaagggtgcataagtttccaaagatatgatattgcagaaaaggcaaaactgtggagacagtaaaaagattgccaggggctagggcagtgggagggatgaataggcagggcacagaggattttcagggcaataacactactctgtatgacactataatgttggatacatggccagatccacagaatgtagaacaccaagagtgaaccttgaactatggactttgagtgatgaggatgagtcagtgtaggctcatggattgtaataaatgcaccactgtggggggggggggatattgataactggggggctgtacatgtgtagggacaggagtaaatgggaaatctctacttttgttaccggtggagggtgtaccgcattttgaacaaaaaattggacaaaacgcacaaagcaaggaaagaatgaagcaacaaaagcagagatttattgaaaacgaaagtacactccacagggtgggagcaggcctaagcaggtggctcaagggcctgaatacagatttttctggggtttaaataccctctagaggtttccattggttacttggtgtataccctacgcaaatgaagaggatgaagggaggttacaaagttatttacttggtgtagaaaattagggtttttcccttttatttagttgtaggaagcc

SEQ ID NO: 54062 - DNA, 940 bp, Homo sapiens
gtatcacttcacagttcccacagactaggagtctacatgcgcatgctgagactctctgctctggtcagtctccctccttcctggaggcctggggaggactgcgtttacacattctctcaggttgttggcagaacacagctccctaaagcttgaggactgagggcccgtctgctggctgactccacctggggcaggccacatgcatctgcagtcacatgaccccttcccatcttcaaagcccacttgcggtatcaatctctctgacttccctttctgccaccagtcagagaacgttctctgctttttaagcacttgtgggattccattgggcctgtatttataaccccaaataatctcccttattttaaggtcaactgtgccacacaacacaacatgatcataggagtaataatagcaatgcattcccaggttccaggcaattgtggggacatttttgggggccgttttagaaatcttgctcaccagatcacttttttatttgtgcttcctgctcatgagattgctagcggttactgccctcccacttccaaactaagagatagggatctgctcctaacggtcaactcggcaggcctgacttcataccacagagccagataaactcacttggtgtttacatattgcaatgtgcagactgagattacatcttgacaaactttctgcttagcacagaagttactctgtcaaaccaatgcttcattatgagtaactctgctttcgataaatacccagttgtattcaacttcaaaaatgagccacaattaaaagaaaagaggccattctgtggcttttctgtggcttgctctgataaatacatgttgactcttatgaagggctgtgccaagaacaagctttcacaaaggcaattaattaaaactgaccattaaaaaagtaagtatatacaatatacttacagaga

SEQ ID NO: 54063 - DNA, 820 bp, Homo sapiens
gcaaaggtggcttcacagtcccagaaactaaagatgtaaccatataaaaatccaaaatcaccagaaataacacggtgaaaggggctgtgtttgtgagttacttatcactcacaaggaccctttaatactgttgatttcctttaaatattgaacttttcaaatatagtcgaaatacattttcattgccaagaggcaataaaatatttcctctgagagaattctggggcagtggccaaagcactggcttttgaccccaaagtcttccctctgtgttctggggccagtccactgagcacactaccgagcaggagtttaatcatttaaaaaatgaggtcaacaatctacagggctgctactaggatcaaataaagtcaagggagatgcagaaatgcagcacacaccactccaggcacacctccagtgtggaacaagacttccgtgtgactaccactcttgattcttgatgacctagagagtaaacctgcaggtctcatatctgctacaaaatgcctcattccaaccaaggtaaccaccgtccacccacctgggaagaaaacagcttctgctcaggctactcatctggccagccctggcccaagatgcacagaactctaagagcgaaccctgagccgcggagtatactactgacagaaacatggcaggcaggaaaaatgaccctcacttcctctaggcctaggccctcctttcccggcaactggtggcctttcccacccctcctcctcctcccaggaacactcccacattccaacccagcatgatggcccctcctcctttctgaggagaaagggcttttcatccc

SEQ ID NO: 54064 - DNA, 1321 bp, Homo sapiens
cagagctcctcaacctatgacttgcaggggtcctcaagggtagttagcgtggggatgggtggtgagaatagtgatagtgaggcagaaaagggttccatttttatttatttatttttacaatttgggcttccaaataggttttaagaaaaaaaggttttgttgcattaaagaaacatgaaaacggtaacataaaccattataacccccacccaataagttttctattaaaaacttcacccaggtggacaggaatacgaatcgtttaagatgaaaacagatttaaagaccaaagaaaagttagcaattaaaggacaaaatagttacctatgctttccttctggcaccccgaatgtacgcaggtctctcgagatcacacgtcagacgtggaaggtcctcacggatcactagtccgagcttccattttacagatgtgcacactcaggccaaagacgacggctgacgggccaacgtctcacagccggtcagggaaaggaattcacctggcacccggggcggccggcctagagccctgggcgctgaccgtttctgcgattcctggttccgctcggcccggccccaggggcagacgcgagcaccggggcagagagacccactgcctggagtcgcgctgcctctccgcgggctccacgccgggcccgcagcgcagggatgggtccttggcggccgcccccacccagcccagcccagcccagcccagcccagcccacctgtagccgacgcgctgccggcagccacaccccctgcccgggccgggggctcggccgcccttattggcggccagcggcggcggctgcgcgcggcgtgggggactccgatcctagaggccgcaggagttacctcaggtgggctctgagctggcggcgctaccgccctggcccgcctcgagcatgcccgagacgtggacgcagcaaggccgcacctcccccagcgcgtcgcctgtttacaccctacgcccctccgcgggaggacaccgagtggcaggtcacgtgacgcgggcgtcacgtgtccggccgagttgggtggaggcgttgccccggcgactgcagcgcgctgggggcgggctgcagcgggtgccgccgcgcggcctttctgtgcttccaccccttcgcagtgcccaggcgacaacccactgggcttggaaccgaaaagacttccccagctctgtgtgtgtcgtttagtgtctcctggccctgactacatgttattaatattagtgttttggaaggaaaaggaaattttgtctggcaaaaggatgttttacttggagaagaagatggaaaatactttcttacctgaggct

SEQ ID NO: 54065 - DNA, 538 bp, Homo sapiens
tatattagatatgacattgctgacctattttagatctccaacaatttttcctactatgttgaataaatgtttcattggactggtacacagaaaaaaagttatcaatcctaaaaaaaaaaaaaaagttaaaagggctaaactgctatccttgaaaagacttgctggcaacactggcctttggctggcttttgggaacatctatttcaggaggttcaggagggttcccatgaacctaactgataagagtcgttcattgtgccaaactatttacgcaataatacagttcatgatgaacacttgctttccttttgggagtctgaaccgcaaatgctaggcagagggtgcctacaatgaagaggcccagtaaaatccctgggcacagagtctctaatgagcctccccggtaaacaacatttcacatatattgttacaactcactgatagaggactaagcacatctcatgagactccactgaaagaggactctaggaagcttgcacttggtttcctccagacgtggctctatgcaccttttacc

SEQ ID NO: 54066 - DNA, 2005 bp, Homo sapiens
actccaaggatgaaatggaagttaaaggtaaacaggcaatagcgctgaatacgtaatttcagtaactcagaattttctccaacctctgctctaaagaagcttagctacagaagagcagttacctttgaaacattttccccaacataaagatatccggaatgtgaagctgccattaaaactgtgacacagatctacatttactgatacatcaaaacatccctaaagttcgaaatacgagctacagaatcacatcaaccgcctaacttgtctgtagcctaaactctagtccggagttcatctgcaagcggaattgggaagtatttcagagccagcatctcctcgcgccatccaggtacctacacacttgaggccaccgagtcacctgcgcagccgttgctcctccaagaccaatccgggctccccagacccaccggcctgaatctggaggacagcagtccgcgtgacaacagcgactcggagatcagcacccgtcgggaaagccgcgtacccgttgaagctggcgtcacgcccaaaggaacaaacgccagagcgtgtgtcctgggcaaaggcggcccgccgctccggtccccgggcagcagcggccggcgtcaggccgcaaggcgaggggcggggacaggactctacccggcagcccagcgccgagcgcccgcgccactccggccttgcgccattccggccccacgacggccggcggcggcagcgcggctgggctcagcggctcgcagcccgggcgccccccctgccggccgctcgctagctcagcctcacccgcagtcttgtccgctggctcgctcgcccgcctacaggtcgacagggcccaacgacccggcgagcaacttcacggaaggcactggccgacaacgctccgctgccgccgcgccccgcccctttgtgacaccacctaccaatcgctggacggcgctttcgctgccctccaatcagcgcgggcgggggcaggcctggcccccggacgtgggcggttgccggggcgccagggccctggggccttcttggcattcgctggaggttgtgagttacgaggcccggatgttgatcttttattactagcaacactggacccctgactcgtgcccacgcgggcgtctggagggcagccgcatggcctgctgggaacggcggggttgaagccggagccgccctccgtgagacccaccggggatcctcttccaggcgcctgatttgctggagataggcgatacaggcagacgctgtccagtcggtggcctctccagagtgaggggcgctcctggtgcgtttgggccggcctgtcctaacaaatctgctttaggcttcaccgtcccctaatgtttctggcctcaattgcctcatctggaaaatgggggcattaccgtgcctgcttgaagacaaaggcgaaaacagataactttctgtagtcctcatacaatttactgagaactgtaggccaggcaatggagtaggcaccctgggctcaaatcccagcgttgggtaagcccagccacacctcctgctccagtttccaagctgctgagctgcggtgtaaacagtaactggcttcaagccaacacctgcctttcaacctaacatgggagcccactgcctcgttccgttccccctaccgattttccaactccgtgaacctccttcactaagtgggttactcagctgacaaagaatgtcatctcactcccactgcgggttcactcatcctcgacttctggctcagaggagccagtctaatatgaaactaaacatctaatctgtgtctcctgtcctctctcattcttctgagaccctacccaccaacttatctccacagttcaacgaactattgagcatacactgggggagtatggtgaggcactgggcattgattcaccagtctcgccgttggttccttctgaaactccacatatgcttaatgctaaatagattggagacctttgaggacagagctatgatggtaatcatctttgcattcctg

SEQ ID NO: 54067 - DNA, 745 bp, Homo sapiens
aggctgaacctcagtttggggctttaccccatgacacccgcaaagggctgggcttcccttcttcttggggagagggtcaaggaagtggctgtatcttgaacacccattcctctttccttccatgcgcacaaggcctctctgagctgctgtcttccttaggacactttcagctacaagtaagttaattttgaactgaaagttagctaaacaattattatagaatgttcaccttcccactgaagaatttaggaggtaactggcttctgggtgggctgtgtggctcagtgtggacatggattcaggttctttccatatttgtgctgtgccatctttagagcgtagtgaaggctgtccttagccccacgatggctgctgcatttcaactctggaattcagttgctggaattcacactccagtctgtgtgactccagggcggtcattttgtttgtcttttcaaaaatgaaagtaatacgtacttatgataagaatttaaaacagtacagacctcggccttttgttttattcatgataggaatttcaaatactgtgtaaactgaaggtctgatcctcgcccttgtctggaattcccgcagattaccactgaagatgttaataatttccatgggccttccacaaacttccttggtaatcacaagctcagacctctgaatattccatacaagtgagatcccacttagatactattctgtattaattctttaagataggccaggcatggtggct

SEQ ID NO: 54068 - DNA, 444 bp, Homo sapiens
tgttgggcatggctctgacttgctttggcctcagggtaggtgggggacagttctttgcctctcgactgtgctcagccatgtagcttgctttggtcaatggatgttagcagatgtgactcacggaggaatggaaattaccttgcatagctgggcttgtcctcttgaactgctgccatctccatgcataacacttctttgaactccttcagcctgagccccagatggaatatcagtggagaagtttaaatctcagtgaggagccaagtccagttggactcatagcttgaaacagagctgccccattgagctcgcctaggtcagctagccccagctgacctgcagtcatgtcaattgtatgtcactaagattttgtggctcttttttactcagctttagctaactaatatatcaccatatcagggaattttggtaggacaacatagc

SEQ ID NO: 54069 - DNA, 1829 bp, Homo sapiens
atataaatttttattcacttgtttattcattaaacaaatatgtcagacactatgttagctgcggggatacagtggttgtaatcagacattgtccctgttctatgcaacttagagtccattgatagatatatcctatgtccttaatatcatctgttgtggcattctgagctgtctctagacctgttgcatagagttttatgatgaacgtctatgcaaagaaccttttctatatttggaattatttccttaggagagatttccagaagtggaattaacaaagggcatggacagttttcaaggctcttgacgtgtgctgcaaagttgatttccaaaaaaggtctggaacaatttcagggcactccctgaagagtgcccatttcaccgtaccctggccactgttggtgatttaccattaaccaaaagactttgacctgtatcgcccagactggagggtgtcccagctcctgcctccaggtccagcaaacactgtgggcactgaccattcaaggctagcctgaccctgtccctctgtgaaacctttgggggttccacaaagcctttagggttgcaggaccacataacttatccaaacagggatacttgagcatgaaaggggccaccatgaataatcaccctgggacaacaggcaaaactaccctgggaaatgggaacatgagatcatcctactatagataaatctgatccctttaacatagcttaaattcaaccctctccaccatctggccccaacttaccttttcagtctctttgcatcctgacatatcacacgatccagtcacagtcggcctgcaattaccaaccatgccttgggtgtcactgtctctgtacatctgctcccgccattccctcctcctgcctccagccaccccaccccccgccagtctgcaatgcgccccctcgcccatctgtgtaggtccaaatcccacccttgcttcaaaacacaaattaaatggtaccattcaatactgctttcattcaacaaacatgtactgactgcttacgatgtgtcaggcacatagagtacaagaccgaaaacatcccacctcctgtggaactttgatttgtgtgtgcaactgtgacaactggtcctaaagatgaacacaaaatgatgtgccagagagtctgccctgttatggttttgaatagacacacccaccaccccacaaggttatgagctctttgagggtaaaatccaagaggctcatcctccacccttgcaaaacctctgacacacccttggatagagcaggcacttaagcatttgccaagtgaagaattaatattaaagaagcttacctattcactccgcaagagttttctaataaccagttctgggttctccatgaatctgagatcaaaggggagcctaaatttccacataccttagagaaacacccccaggtcctaccactgtgactctctgtccaccctgatactggaagaaactgaagtcaccggattcactgattgctgcttcttgtgaggttaagtgactcatccaaggtcacacagctagatagtgactgagccactggaggggtcaggaggtgatacaggaaagaatcagaatgcatgagtggataagtcaccaaaggagtcactggagtggaggggcctggaggggaaggtgaccctgagtgctggaatggccagagaagaacaaacaagctaacagccccaaagacctccattgtccccagatcccattcactgtcatctcctgaagaacatcactctcacaccatcagtgttctctgctcctttttgcacaaaactcctccagagacttgtctagcctctttctctct

SEQ ID NO: 54070 - DNA, 794 bp, Homo sapiens
gttgttttttaatcaaagtataagttcttaattttaacgcactttaactgtcattttccaccatggcccgagtcgcggagtccgccttcctggcagagcgttgcgtggtcacagctgaggtctggggagcagaggcggcgggcgctcccggggggagctgggcgattccggcggggggaggtgccgatcgagcggccgccaggctgctgggggaaggagggccaggaggccgtgggggtcctcggcgcagactggagccgcaggcaccgcgcgcagccctcgcccgcatcgccgaggccccgcgggcccaggagcgagaggtcgggcgcccaggaccagagggcgtaggcgagagcaggcaccgcctccaaagaacgccctcgccctcccgcaggcgatggcgcccggccctgaccaagccagctgggggcatctccgcggagctgagccggggaagggccgggcagcccagagggtcagaagggggttttctcccggggttgtgagttctttggccagcggcaccctcccctgccggggccgcccacccgcaagccccgccccgaaggctggagcttccctgggggtgggcgacgccgagaccacgccccgaaggcgggagcggcttgggggcgggatctggccgccctcagggctccggcgccaagttcagagccacgcgcagtgctcttggccgggaggaggctgtgctgcaccagcacctcttgctccacatctccagagagcccaggtgaggcgcaccctcctgtctgcagggacagagccgcgagcgg

SEQ ID NO: 54071 - DNA, 431 bp, Homo sapiens
cgactgagcatttcacagttttgtgtcatcagaggaaaacgataactgaagtatcagaacatagattattccagctgttaatgatctatattagaaagtattcacagcctcaaagatgacatcacttgcctgatgtcagtgattccagcaggagctggaatcatgagggtgcattacccactgctgcctccagggggtgctgtgtgtcaggcagcagagcctagggcctttgaacctggatgagttctgaggtgtgtaatgggttcagaatagtgaccaagttcccatcagccaggggctcatcacccacacagtggttgggtggaaggatagaagccccttctctgcaggatggaagcccctcggaagcacatggctgtcctgcccttccctgcgcgacaccttttctgtgcagtgaggacagaagttca

SEQ ID NO: 54072 - DNA, 1615 bp, Homo sapiens
aaactggaggcagcttttcccgggcagctgaagagaacacttatctctctgtaggtttctgggacccggacaggtgtcctcagaatggaacatattgtcggtcaaggtaaccagctcttcatcactcaggtgtgtgtaccggaagggggtgcctgttcgctgcgcaggttaggcctaagcgcacctgcccttcaaccctgtgccgacgaggcccgaaggcttaagctctgacctggctaccgccgccaaccagatgcggtcccctggggccacgcgccgccacgtgccgccacagggcccgcccctcccgctccaggccacgcccctcacccacagccctcggaggctctctccgcggctccgcctccaagcgacctccgcaagtcctctcgtaacccctggagtagcgccgtccccgggcggcggccccgcccccgcaatccgggccccggggctgccccgccccgccggccgctcgggaggcgcgggggcggggccctgcgcgatgacgtgcgcgggcgtgcgcggtgacggcccgcgtctctgttactcagccgagcggccgaggccggacgacgcggcttggattgcggagccgcgagcagcgctgggtaacggccgcggcgaccaccccggacggcccctgtccccgctggcgggcttccctgtcgccgttcgctgcgctgccgggtgagtgcggcggacgccgcagggccgggacggcaggcggccccgtcgtgtttatgttattgtgccgctgccgccgccgccgccttctcctcagccgtaaccccctcctgggagtgggggcgggagcgcgcggtgggcgggggcggcgcgggaacaatagcggcgcggaggcgggggccagccgagggggcgtggggctgcgggacctgggtgcgctccgctgcccgccagcccgcctgccgccgcgagccccgcccgcctgtcctctcgcgtcctcttcgcgtgggtcctgcctccgcggcgggagaagaaaatggagcgggggggtgggtggcaagttctgaaacacttcggcaagggtcggacggaggtgtctttgcggcccgccgcgccctggctgcctccggggcggcggggagccggggagagcgcttctgccggcaggtccccaagcctgccccgcgcccatagggaccgtattttgcttctcgatgctttctttgtgctaacgttctgggcgaacgcaggcagcagcgctgaaaagggccagagtggcctgcagctctgggctgcagggcagagagcccaggcccgtggctcgggtgggaggtgtccatccagcttggcccgagcttcggtggtcagcgcgcatttctcttgagggtcatcggtggtgaccttttgactttttcaccccaccctcccatctctttgtctcgcatttgtgttcccgattcagagatggtagaaccaagtccattttaaagtaccctgatgaacactttccgtttttatttctgaaagttccctgcttggtctttactgcgaatttaataacatgttgactacatggcattgtccagtgattactatttttacctctgaaatccagcgatctttccagtagaattctggtccgtcagtc

SEQ ID NO: 54073 - DNA, 829 bp, Homo sapiens
gaaacaacttgaaggaatttgttgttaaatgactagtccccaactatcctagtgctaagaggttgttgaataggagcctgcttcttgttggtctgctttgccagcgggttgaattttgacatatttcagtcatctacatggttgagatgctttgttgcacgagtggaaatacaaaataatgtctgacattaggattccagtgctctagaggtctctggtcaagtcaatggtatgggtagtagcttttctgattcatgtggtccaaggaagtcattataaccacatagctttatatatgaatcatttgcctatgtcagtgaactgtgatgctgattgtcttaatcatgagctctttacctgaacatttagaagccttgcattcttactcttaatgcaggttaagttgaactttgatttcagaagtgagttgactgaaaggtaacaggagtattgaaatgagttatcctgtcattcaggtcaataggtggagctagagcaatccaggaatcagacctaggttcatttctcagttctgccatctggactttgtcatcaaattctggagctttaggcaagtgccttaatgtttttggctttaaaagtataaactgaggctgtcagaacttttttttatagaaggcttgttcctcagataggtggttcttgagaaaacatactaggacaaaaagagcccttcttgggtgataatcagaagcctaagttaagaacagtagtcaaagttaggattttgtaattttgtaattttcagaagccaaaaaaattgttgagttgaattttttctttaatatccagacttagaaaacaaatg

SEQ ID NO: 54074 - DNA, 3373 bp, Homo sapiens
aaggaagagtgtttgtccttagttttcatctttagttatccataaaatctgaactctaccctgaaaaatttgtcgtcattgtatttttcatctttcctcgatatctacttgttagttcaatactatcttttatcaattttaatgtactgttccaaagaacatatttgttactgttttcatagggaattgagcagtaggacgtttttcttacagaattaaacttacatttttctccatccactagatggctcaagtgcaccactttggcagctcagattgatccttgcttgctttgcttgtagtttctactttgagtactgtttgctttttaaaaactggatgagcccttacctgaacctagctttacatatatgtgatggcagatttcctcgcattttctgattatttacagacttctgaaaagctggtgaagtgttcttcatatcagtagtaaaaagtgcattacagtgcttagaagattttgttttttgcttttaagttattttagactttaattcaattgccaataatctatttagatttcttcaaactaggcatgcagttaataattcatccatttcttcctgattcatagtcatttggagtcattttccagcacatggtggtacctcaggagtttttgaggcacacggggctatttgcttcagttctgtagtaatatttatttagtgtttttgtgcttggaattgtatggggcagtggagggaaataccaggatgactaaagaggatattttcatcagcagggagctcactgcgttaattcgtttccttaagtttccttttttattattttttatttttattttccctgaaagcacacattggtatcttgagtttttgaagccaaataatgagtataatgaaatggctcattagagcttatgtttgtaaccaaccctgaggagaattttgtttttgacattgaccctgttgatattgcctgaaaaaatttaaaaaaaaaaactgaattctttagaaatattttatgcttatggctttctgttttgagttaagtaaaaaggaaaaggaattaagatttgttgaatgcttatcatgtgccagtttcttacttaatttgatgctctcaataatttggaagacaagtacaaatatctctatttacagatgaagaaactaaggaatcagaagttgcctaggatcaaagaaacagtaagttagagaggcaaactctttgtgatatcaagggttgttttttatttttttgcccaagagaaaataattattttctgaaatggcagaaacatttgtaatatcaactagttggatactttcatatcctaaagacagaaaactccaaacaaaggattgattgcctctcacagttgatctttgagattataaacaaatattcttgccaagctagagcaatcagtcatactggtatctcttttacagatacctttagaatgacagcaaacactataaaattgatttttccagagaaagtgtttgcacctaataatcttatttttcaggaataataactgaattatttcatcagtttgaaaatatagtgtacgatttaaaggagaatggcaagttattgatgtaaatacacattatttacaatattataactagattacattacaaatattgtaacaacaatttgtctttataaaatccccttgatttctctttattgtttaagagtccttgcagctaagccgtgtaaaacaggaaatatggctgtttgccagtgttcttaaggaagcaggagtgaagtaaagcaaacaatacaaaaggggtttgtttaaaggatgtacttaatttctgtgtggctgtggtatcatttttctggctctgttgtctttgtcctttttcactgcaaagttgaaattgtactttcacaactattaaaacaaaaataaccagtaatgcgaactgaacccaaagatatctaagataaatatcctcccatgactgtaaatttgtatcctccatatcaccttagaaattttcgtatgcattgactagatttattgctatttttgttctttttttatgtattatcagatattgccgtcagtactattaccgcatttacacaatgttgccttgtgtggaaattctaaacctttgctaactcttggtaaccaaaataacgataaactaaagagattattatcccatcttttgagagaaatgtaaaattattcatttgtctataaagaatctttgacaaaagtattttttaaagcatattgaatcctagccattttattattattagctgtgtacctaaatgatattttagatatgagtataaggaagacaaactttaggttgtcaaagaatgagcatgtctcatgtgttacagtcatggcatgacagttggattacaattatctcttgatgaatcaacttcatctaaaccttaattgcatattaaattatttagtcatttcctgattcagtaatgagaagtcagaatatatagtaatttactgggtagcatgttacatgccatagtttgcggaatgtacttgatcagtaaagtccacagtaaatcaaagacaaatgagaaaattcttttagaattcagttttttttttcttaatttgaagtcactttaaatgctcttatgtaataagaaaagaaccctaggtatatttaaatacttaacctgctataactttttgttggaaaggaggtagattttttttatgagtatttttttcctatgggaaaaaaaataactttggtgatgcagtatgcctttatctgtgtattgttaaaaactaaactaaacaaaaaaaacccctaagaacctttaaacttaacaaagtttatttgagcaggaaaaaggttctagaagcagacagcactctaagatggttcagaatactaccacttacaactggtgagctgttctaataacagggaaaaataggaaatgtcatacagaaattacctgattggtgcaggttggtgtttgccttatttgggcataatctagcagcttttaacctgggattggctgagactcagatgtgtggttataagggtatactcctaagttaggttataacttgtttacacatcaagctagagtacagttaatagtgtatggaggcagctttgggccaaatctgattgaacagtataaaaataagttttgcaaatatttatccttaccacatgagttacatcctaatattctttattctcttctatttcactaaaaaaaattcaaatccaccaaattcatttcatggcccatcggtgtgttggagctcattagtttggaaaacactgccatatagggttgaaaaattttttttctttttttaccctgttaacaactgactagtctgaaggagctcaaa

SEQ ID NO: 54075 - DNA, 399 bp, Homo sapiens
gcgcagggtgcgcgggaccgccggcccgcggctcccgggccctcacactccaccgcggccccgcgcagcgggcatgccggcctccgggcagaccctgctaatcaataggagaacgcgcagatcgcgaccgccgcgccactgcccgcttttatctccgcgcgccggggcggccccgcgctgctccctgccctcgccggcgccctccccacggcccgttactctcccggggtgccgggccgcgcgctctcccaggagccgccagggggcgccacggagccggggctgcctccgcctccctgggagccaagcaggggtggggggccacaccggcctggcctccccgcgcagaatgggaagaaggggcgccctcgctgtgcaagggagacgcccccaacccca

SEQ ID NO: 54076 - DNA, 1749 bp, Homo sapiens
tttctttctttctttctttcattctttctttctttctttctttctccttccttccctccttctcttctcttctcttctcttctcttctcttctcttctcttctctttcctcttggccagctcggtgactcaatctccttcctgtctcaggcccctcccacgaactggcccgtgtgtgcccggggaaggtcccttctcctcactgacctccacccacaccatggagagtggatgtgtgtgtgtgtgtgggggggggggggggcgggggacgctgcatcaggagacctctggttagggaatttttatcaggaaccacctctgtgacctttaccaacctcagcctatagtggggacaaggtcctacagcgtgggcctctcctttggaaggctttgggacagagttctgcccaccagctggaggacagtgacctcagggggagaagggacaggagactgctctccagtccctcaccccagccctcgcctttccctcacccacctttctttgcagcaagttcaaaggcaggtcatacaccagctaagcgggcacagctgggcacagttcccggggcctgccgggcagcgctgggaagggcggcagagagcgcggactggacgctcgtcttggaatgactcagccaggagcagccgccagcagcatgggccacgcagcaaacgggcgcgccgtgggagctggagaggccaggtcttctggaaccaggccagtgcaccctgcccgggcgtcaccccaccacggacattcacaatgacagtcagcacttctcagcacactgtggatcacacgcattagcctggcacctggcagcgccccgaggtgggcatcacggtgggattgggaggcactccagtcacagggttcaccagggccgaggtggcgacgaaaacccgtccctcgggcgtggcagtggcctggccacgtgcgccccagggcttgcacccgcatctcccgccggtggtaagcggggcctccagcagagcgggcggggctgctcacctggaaccagggccagccgtctcctcccctgcctcggccgcccggggcctgcctggggctccttcctcgccgcccggcggcagctcttgagctcccggcccgctcctttagccccgcaggctccctggccgtgaccctgtccccggcctccgtgtgatgagcaggcgagcagggccggggggatgcagcctgggccccgcatcctcaggcaggacggagctcccggctgctcggcgcctctgggggggggggggcgggggggggggatgcggcgcagcgggcggtcccagcgagtcagaagggtgcagcagccgggtcggggatggccgggcgaggctgacccctgccgggcagcgcgggtggcgccacgggcggaggcgacttcctgggccctggtgcacggcgccccctggcgggcctcggggaggcggcctcctgcgtgcccggaccgctcgctgcgccttcccgcctggcttccggttacccaacctcatctcgcccgagcctcatctgtagctcaccgtcctgtgcgccctgtgctgttggcagggcgtgtgggatttagagggttttctatactgagtcttcctcggagcaggtgaattctgcatagctggcccagttctgtgtcttaagtatggggagagagtgggggctggagaaatcactagcaggggaggagccctgaggttgccgagggggatcggagctacttcccaaggcgcctacaccgcc

SEQ ID NO: 54077 - DNA, 586 bp, Homo sapiens
tggaagataacacactttaagctcttaatggatagtttctgagtatatcattttgtaggtgtctttccatgattcaggctggaacttaacattcttactaagagaggtttagcattctcttatgcagactcctgcaaaacaacactttttcacagagatcacagttggatgtgtaacttgaattaagtcacggtaataaaagaaaaatgcaattgcagcctctgcaagttctctcaacatcaaaagttcaattgggtaataccattatcacagcaacagatcaataactgggacatggaatgtttatgttaacgtcatcttagagtttaaaaatgtgactgcagctccacagagctgcactatcaggaatctatttacccatgagagaattacaaattatcaggggcagacttcctcttctacctgcaagataagtgctcattttttattcaatggagtaacttgtaaaacaaactctcccctaacaacagccactgcacatacaactatagccaccaaggagcttgaggctgtgcattcagaaagctctatttgacagagggtctcctcaatgggtctccatagt

SEQ ID NO: 54078 - DNA, 594 bp, Homo sapiens
gctatctcgctaatacatacagaatttctagaaatccataaaaatatgacccaatcatcaaaataaaagaaggttggaaacaggcagtttttacacataaggaaagactcatttacacatgaaaacatgctaaagctccctcaggacagaggaattccagttaaagtatactgacttctttttttttttttccaaatcaaaatggctgcagtcaaatgtgaggcaaagcactattggtaggggtgcagggaatctggcactcaaaagtattgctggcagcagcgtgatctttcctgatggagaatgatttcgtaacatctatcaaaattacaggcgcttagactctttgacctggcaatttcatttccaggaattcgttctatggatatccttgcacatgtaggaaatgttgtgtgcataagatcagttattacagcactgtttataatagctatggattagagacagctcatcttccatcagcagggactagttgagtagattatggtgaatccgtgcatagggtcatctgtataaagacgaagaagctacgtgtgtcctgataaggaaagatgcattgctaagtggaaaagc

SEQ ID NO: 54079 - DNA, 526 bp, Homo sapiens
agtacagagaaagaagccaggccactcctctttcctatctagttcgagtttgtgccttaaaaactgcacatttaaaagctcagacacagaaggttggattgttggagccactccaaggcagcaggtcaggactaattcgcgaacaagcaaaagcctttggaaacaagtatgattgaggaaccagaagaataattccaggctggtgttttccaggatgactcagtgctgtcaaggccctgggatgaggtgcctggcactgcgggcacaacaaagagcaaggacagagacttgaggctcaggagggaaggggaaacatgtttgtgcttggcaagcaacatatgtgtgcaatcagctccagctcactgaatgttgagcgcccttagaggcaaagcagtgccaggcttggggtgagggcagagaagcagcaaggctgagagtgaagaggggctggcctgtggcctcctggctcctgggatgggctgtgtttatctcaaggtcccactgggggttgcatccggagtgggac

SEQ ID NO: 54080 - DNA, 1367 bp, Homo sapiens
cacagaaggaggttgtcagcctgtaagtaagggagccactggaaccggagtcggtccatttccagagctcggctcttaccctggtcatctctgggagccacagtgtccccaagctgttttggagattctgaagcaggatgcagggagaggctctcaaaggagacctccaacaggagctgctgggcaagtgaaatcggggctcggggagaagcagagactctcgagaaatcaggcagtgttcatagagatatgagagtcatgagaactacactttcctgagaggaaggcaggaaggggctgaaggcagagtgcagagaaacagggacaccaaagtgaaaggagacggaagggaactctcagactggtcagggaaagaactggggagacttcccaagtgccacctgcctgccagtgaacgctcataagaacattccactgagggaagagggtgtcaatctcctttcataaatgaggaaacccatgttcagaatggctcgggaacttgcccaaaacctcagcctcaaactgcagagtcaaaatccaaccctaggctcatctgatgccacagactcttcagggagattgacagcaggaaggggcctcagaaaccgagaaaggggaaattcagtgatgtcaatgatggccacagtgtattttagcagagtccaagggaaacacagcttgctcactttgcccacagtcacaggtaaataatccctgactcacaatgcacttttccaccaaggtggtactttgtctagcatcttccgcccgtctgtggtcggggtgtgctcccatcccagacatgaccttatctgttttcttacctctggatttccgcttgttaaacacagactgccagacgatgaccagcatgaagagcagaatgctgaggatccccacgcagcacacgaggacagcatacacatagagatctgaaaggcaaggacagacacgtgagtcagccttctgggggccgcagcagaagtgcgctggcaagagaacaatcagaattggaatatttgaaatcccagtgctacagtcaacaaggcagtgtggtattggtgcaaggacagacacagatcaatgaaacagaacagagagcccagaaatagacccacacaggcatgctcagttgatttttgacaaaagtgcaaaagtaattcaacggcggaaggacagtttcttcaatcaatggtgctgggtcaatgggacttccactggcagaaaataaaactaaaataaacctcaccttttattcaaaaattaactcaaaatgaaccacaaacctaaatgtaaaatgtaagctagaagacttcagaaaaaacccacaagaaaaatctttgggatctaagaatagacagagt

SEQ ID NO: 54081 - DNA, 2320 bp, Homo sapiens
atttctctcattttctcaataaattcttttcaaaaatgattcagaatcattttgaaaaatatgataaaagtttatcatattaatatatcagcaatgatttaacaatctcttactattggctactcaaagtgtttctacctgttccccatcataaataattctgtggtgagcattcatgaacttaaaccttagtacaactttcacaatatgttctcaagattaagttcctagaagtggaatagctgagtcaacaggaaaagaacatttgtaaagcccttgtggcgtggagaagcagttagttaagtgcttaagctgaaaaagcaagcctactgggagtagcaggtggctggctcccagggagagcctggagaagcaggtcaggcttatggttaatgagaagaaagggggcatgaaatggaatcagacattcaggttccttttgactctcccctccctggcctaggccccagggaagcccagcagaacctctgcccctggagtctatgagatcttcctgtgttcttaaggcagtcagcatttttgcctaagctagtttgaatagatttctgctcttggcaatttagatgtctggactgaaaataaaataagtagaaagtgccttagggcaaggtagcaggtgaagggtgcatctgcactaacatttaaggagagaggggcaggtgtgtggaagggagtctcctacaaaggatcagagctagtcatggatgcagaggagggctggggcgagagttctggaagcccagaagaaagcactgtaagaaggatgccttaatagcatcaactgctggaaaacatccactctgttttgctcctaggaagctactgggaaagtcttggaggaaagccctgtcagtaggctggtgggggcagagtcaggttagagaggtccagaagctgatggaatgtgaggagcttgagaaagttctcacatagctaaaaatcaaaactgcctttctagtaaatgcctgtgtctctgatgtgtgggctctgtagattaacagggtggagaactctgtgaggggtcagaattaggagagaggctgcagcatccatttaaacagtgtgaaactcagcaacaggactcttggattctggacaagacacttcatgacgaactcagggacagagcaaagttcacagaccaggatttgtggcaggatcccagggcacaggatggccacaacccagcaaacccacggccagtcctgcctttccacattggtcagcaaactactccagaacaggatggcagagcccttgctggcaggagaagatggtgaacaacacagtcaggctgccaggccgacagaacctcaggcaggtgaacacagcacctgcctggaagggactatgcaaatgtggtccccagaccaaaaggcagagaaacttgcctttagtcttattcatggagtggagagaaaaattgtcttacaaaagcttccatgcccatggagcacagcagctgatccacaagctcacctcttcatctgagctctttccttcgcttcagaacagcaggaacccaggagggacaaggttgcaggtaagaaccgcagtaggcatctctccccaagtgtccctagcagcatgctgcagacatttggggcacactctgcccaggcaggaggtcaggggcttcaaaaggcccaagctacagtttcagttcacagcttcctcaacatggctcaaagggggctccccacaggcagccagggctacagaatcagaaaacatctggcgactctggaaggctcagctggccgccaaacacacaggcctccagttatggacaccagccagcgggcacctcctgcctgcgtgtggctccccacacacacaagaccggtcatggccactctctgttttgttcttgaagctacagatctgtaaaaagtgctgccttgcaggagaagaaaagctcagaaagaccacctgagttccccttgattgagcagcaaccagtatgcctatgttccgaatttttttcccttctgttacaagcattccttttgttgcataaagataaccaccctgctgtgtccactcaaaacatgaaaacccccctccctggctgttctctgcaaacaacagttaaactctgagccattgaagccagggtcacaaattcctacgactgcagagtcaccttcctgtcatgtcagctaatgcaaagccctgccgcactcagttccagggcactgctctcaggctggaatgcccgcccagtggtgccagatcttccaattcatcctttacctttttatgtaaaaatctctctataaaatgttggctcaaaagt

SEQ ID NO: 54082 - DNA, 602 bp, Homo sapiens
cataagccaaacctctccctactgctttttgcaattttcacacttctttgactctactgagtccccactcacccccactcactcattctccttttaaaacaaccagtcatgtctgcacaaatcagagttgagtccagttcatgccaggctctcttctctactgcaatagctactgctgaataaaatctgccctgacccctttgaccagggtccagctttgtttacctttgacagcacacagcagtccaacttcagacacataagaggctttgcccagagattgggctgggccatgttggggcaggcacttggtcctttctgttctcacttctgtgtctacacagcacattagccagtgtccaggtaaagatctaccctcaccccatggcatgactcatgtctgtgaccaacagaggcccacaagatatgttctagtgcaacacagccaacccgggagcccctgggtggtggctgcaaaggggggcctactggcctgccccaccaccacctctacccagggagaccaagaccctcacctctcatttccgtggctgaggagccattggaccaggccgtccacttgttcctgtgcctgctgattt

SEQ ID NO: 54083 - DNA, 1240 bp, Homo sapiens
tattattccagccagtacggcccctgctgccctgaggcagccagacagagttctggggaataaagagggaaaattcttaagacacttacaagtgggagcagtaaaacccgaatgaaagccattagtgtggaccaagaagttgtcctcaaagcagggtgctggtggagaggcgtcgctgcatccagccgtggatgcccctctcaccaggcctggtcacctcaaaaggcccacgatcaagtccccgttccccacctcctggccaaggcagatccagccgctcctgacttgtcttcggagtaactctccgaagagagtgaaagggaagttgctgctccgaggaatctgccaagagctgtgtgtcctgactgccgtggaaaaaaggaaagcgaaccaccaacttgggctgcgctcctgctgcatctcccctcggggcctgccgctgggaagatctcggctgctgcgagagtacccagccccaggcgaggtcgggacggggaccgcgctcacgggaggcgtcctctgaaccttggggaggcgccgctgcgcccgccagaccctcggcgagcccaccggagcgcgctggcgacagtgacagcgccgccccccgcccgcgcccggaggtggcagggcctccccaccaggcccggagccccggcctccccggcgcggccgcccggcccccacccttcccgctcccgcctggccccgccgcgcttacccggagccggagcccgcgccagcagcgcggccgccgccagtgccagcagccgcatctccccgccgccgcccggcgctgtgacgcgggagagcgccgccgcctggcccggccgccgccagcccgccccgggcccgcgctcgcgcccgcccccggcccgccccttgggccgcctgccacgcggggccggggctgctgggtcccgaggcccgcaccgggcgcgggagccgccgcgcgatcggttcgctccaggatctgtggcgtctcctttcaacagccccatttcccagatgagaaaactgagtttctgcaaggtgatcgctggtgactcacagaacacacagctgcagtgcgaccggcggtcctctgcccacagatgcacttattcctaagggaaggcgggatctgggagccagggggtgggggcgcgtccagggaacctctggcctgagactcacctgctggtcgtgggcctcctgcgctcactccacaggaccctcgggagccaacaagcagctgaggggg

SEQ ID NO: 54084 - DNA, 2045 bp, Homo sapiens
gaggggagtgcgcatccagggagcggggctgtgggatgacagctgtcctggaccatgggaaaggggtcatgatgctgcagaggaaacggcagcacacagcctgcaccggagccccttactaaacccatcagcctccacttaccgggacagatcattcgtaaaccctgcgaggcaccagcatccgtgctaggcatctccactctagttagctttttaagacaattcctgacatttgcagagcctacagcatgccacatgtctaaatatttaagttatagatcaagccccacgcatggtccagccgaagtccccctgaccccatggccctgcagtccattcttcaggggccccttccagagggggaggtgcagccctgctgcctgccgccaggggaggcagggtcagatgggtagagcagaaggaagccaggcctggcctgggccaccttgaaccacagaccctccaggaccaaggatggctcctgagccatcagactcaccagcgagttcccttacccaagccctggcttttctcctagagttctgggcaatgctcagtccccagaggaaaccaccaggtggagggatcaggtgcagttatctgggaatctggtcttttggaaattgaaataaaagcatttcctccctccctctctagttcccagggcagccacaggctgtggtttccctgattcgggtcctcactttcagctgcactaagccattgcacacaaacctccctctctgtttgcctgagtgctgacccggttcctgaactctcaaaacaagataaaaaagaaaaaaattcttcgcatttgcatttgtgtgtgtacgtggggtcctggagccagtgtcaggacaagggcctctcttggggacagtggcctcttttcatgggaaagccccaggaagtgacgtgacctcttcaggctccatgcctgagcctgagtcactggctccgaggaagagtctcacagcagcatggagggtgaacagtcattacaaactgaccaaagtatcttaatgtgtcacatgtgactcaacaatcagggctcatctgcggtttgggagggtctcttttctttaggactctagggttagctcagggagctctggctgggtctgctcagccctccttgccacacagccctggccttgcctgtccaacactgtctgccagtggggctaagcatgggctggccaggagctgggatggacaccagtttactcagccacacaccttgagctcaggccacacactgcttgcctcagggaagtagctgtgagagatgggtgccctggggcctcagaagccaacatgaccctgctggtgtggcctgggacaaatccagccagcctcccctctcctggactatccatttgccttctcctagtaagtctccctgcctccaacccatctggggcactgcagccaggcactcttcctgtaaggctgtttaaaatcctacagaataaggcccaatgtcctcccagggctcatcaagccctcctcttttgctggcccatgtcacctctcattctcccctcttgcacaacccctgtagtccatgctgcccttgcccggggcctcagcagaggctgtcctctcttcttaggatggcacgccacctgtcccattcttgcagactggctccagaggctgatgttccacttcgggcaataattgactcaaacaagtgctaattactgagcaggttctagagcaatggcccagcaagaccagatctctcccctgacggtggtgacagtacagaggggagtgggagtatctctatgaccctggaggggaacagcatcatcccatgcaaaacagatgacatgtgaggaggctggacagtaacctgatggatgttccctgagaccagggagcaggaacaacaggggatggctcgtgacaggtctaggaggccagtgacatagtaaacactttagtacttgctggcagcaataggaagctgctgaaggatttcacctaggcagagatgtacgcaattagcattcaataagactcctcctccaggaagc

SEQ ID NO: 54085 - DNA, 494 bp, Homo sapiens
tcttatttctcctggaatatgtggagttttcttaattttgccccagttcatgggaacatgtgtaagaaaaatatttcactttcctctaagtgtattgaaagaaaatgccagtgcagacctgacaatctgtagacagtggctggggacggtggagctacattcaggccaggcccagggcttccagccacaccaggcagttctgtttttatatgaaatcaataagtttcaaatgtcggcaactgatttcaaaatactttcgcatgggatgagtcaacctaaacaccagcatgaacttctgctcccaaacacctctccaaacatccttgggagctcgacctgtcctacatactcccaggaggggaagcatctgcagctacttctgctttcactctgccgtagcctccgagtctggaaaatgcagtctgctccctgcttagacaggcagaggctcaaaacgccccgtaaactagaatctcacgagatgccctggcacc

SEQ ID NO: 54086 - DNA, 1323 bp, Homo sapiens
catcctgagctccatgagatcgcttggtatcctcctcctaaaagtgctttttgacataaactggcttcagtgctttccagtacttgccactagaagagctctctctaagacactctccctgaccccagccttcatgcccacccctgcctctgggtaccacagattcccttccaagctcaagtgcctgggcacacgcctcctcctgaaaatcaactctcctacagcccacacaatttgctcaggaaacggagtggcaatcccaactccctctgcaggctcaggcacagctgagagccattccatcatttccttcttgagaaagtgaggttttcacctgaaaaaggtcttcaagcctttgacatgtgtgaggcttggtggaacaagagctggcttttctactgcacttcgtccatgccaggcaccatgtagctatccactcatttaatctccaaagagccccgggaggctggtgccattattacgtagatgactgaagcacatagaggttaggtgacccacccagagtcacacagcccttagggctaggattctgaagaagtgaaacatgctcttaaccaactttgatgaagctctgaatctgtaaaggtttcacttcttctggtgaagccagaaaattaggaagaaagagagtttccattacgtagactggttgagtctcaggcgccttcttggtgtcccgtcttgctagaatatccatcagaggggcccagaagttctgggcaccattgagttcagggatcgccactgggcctgctctcagacaggcacacacctaaggccaggtgcagataaaatgggggcaggcttacccctgcccctgccaggccggacccaggggagggagacactgaggtctgacagggcgctggggtggttcatcctcccctcccacaggcccatccaggacagaacccaaaagacagtgagcaaagtcaaaccatgactcaccatctgttgaaacctgctgggaacaacgggtcctcatatgcctccgtggagctcctggccttgaagactgagcccagttgacctcatcaagtcatttattaaccactctctgtgtgacacccaataaagccgagctttccctcttcctatcagagcctatcaactatgtagcttcacagaagttgcccgaccttaatgtgcctcagtttccttaactgttaaatgggaatagtaggacttacattgtgggtttatcattgggattaaatgtgttaacctgtgtaaagttcccaggaaatgagacagtggcagagtcaaaggaagttctttctacccaactgagagatcagacac

SEQ ID NO: 54087 - DNA, 1689 bp, Homo sapiens
cacgagcatggattccactcccagtgcaatggaatgactctgaaaactgttaagtaggctgatgatggcatgacctactttatgccagagaccacctggacaactgtgcggataatggattggaggagacaaagcaacaagaagatgatgggaaaagttgaggagaaaagcgagggctgcctgtcacaggatgacagcagttaagacgctgcgtggaagtcacgtaacagcagcatttacaggcggcctgcctcatccgcccacactcttatcaatttgactctatcaacgcccaaaacgtcggacgtacatctagcccgactctctttaaaataacagctccagcattttaatcgagatcaaaaaggacccagctgaccctgcgcgcagggggccttatacaaagtcggagaagtagctgggtcgctggccggccagggactcaagccgcctcaggtgagcgctccttggcgctacttccggtctcaggtgaggccgccggaagcgggcacttggccctaagacccgctacagtgcgtcctcgctgacaggctcaatcaccacggcgaggccaaggcgcggggccgcggcccgcccgagaagcctgagctgggccccgacaccccctgcccgacattcggccgggacccccgaacactcacccagggccgcgcgagcgcccacaaggaaacagagacgctaccgccgccagccgccttggaacccagctcgacgggccgtggcgcctgcgccctcagctcaaccatagacaccgcccccaacagcgactccgacttctgctggtgcggggaggcccgtggcgcatgcgcctggctcagcgtttgtttttaagcacgggcaagaccacgtggtttggagggacgggctcagcagcgcctttctacttgcgtgcgagcagggcgagaaagctgtctccgctgccggtcagctgggtggcttgcgaaggacgcttcgcccctagcgaaaaataccctgctggcaaggcagttatgaaagttaagacatatttccacgtagagggggatgcgggtgtgccatgcgaatgtaaatcctcacaattaaccttgaaccctgcagagaaagtcagcttgggcagggaagttagccgcactttttggtcgccaggctgtgacctctcttgttgtctcccacgactgaacacgggaaggatggagagctgtcctgcttctctgttccccctccgccacgcgcgcacctgggcggagtgagtgcctacagagcctgcttacatgtgtacattgccttaagtccagcgtttagtatccgtcctcagatctcagaggtaggcggggtttcgaggcaggcgagaattttaccgtggtgcgtttgaagaaagaagatgtccacacagaggttcagaacaatgggaggaagttgagcttcgcctggggaaagaagcagcccacgatgcaggatggctgtaccagacagagcttctcagctcaggatcggtgctaggagaaggtggactttccagggccgcgaggcaggacgtcctctgggagggcagtgactgcgggtcactgcctgggaagtgctgtcctcacttggaagcctgaagtcggacaatagggaaatggggtcggaaaggggactaggaaatgctccataacatcatcttattcctcctgtcagcggccccaaccc

SEQ ID NO: 54088 - DNA, 570 bp, Homo sapiens
gaggagtcccctacccctggacagctcaggccccagaaaatgtgcattctggggtataactggcttccaagtactgcccaggccaggccctgagccaacgctcctggtcaggtgtgctcagccaacacctgttgcacccttctgcctcacccctgccatcagctcaaccatgtcaccagaaactcactggctggactttccacaaaaggtcaggccccaccagagggcagggcacagccctccttctaactcacatgagccagaggaaaggggtgatgtcacctcaatggagggaggacaggctcctggggcaaccagcagcaagcctgaacagagaaaattttcaaaacaaaaaagattccactgcagggaggagggaggtgagcttgggagcctctgagtgcccccaagtttccctccccaatgctcagcccctgaggcttcgggtcatgtggcccagcccacgagccagtgatgccaagccctagagcgcggggcacttggggccggctcctctgggagcagcacctctccaagtgccaggcatgagctctggggtcaggcagccag

SEQ ID NO: 54089 - DNA, 2101 bp, Homo sapiens
tggcaaaggaaactagatatcaagaccatcgtcatgggaataaacataataggcaccgtcaggagcactgattctaggacagatactgtgctcatttaatcctcccaacatcccatggggtgggcactcatatcagttccactttataaacagagaaactgaggtgcaagaggctaagctggctaatctggtgagtgacagggctgtgtggggttccagcgactgtgccctgatcactgcagtcaatatgtaagccagatttctcttagcgatgcagttcccatcagctgagccagagctgctccctctgccagcgccactcccacccccacaggggaatggggcagtttgggccagatagggacaaagtctggctgtgtccagaatggcccggtgcaggaacactgttttataaacactaaacagtctgggttggccactgggcactgttgtgaccttgacccagcctggcaggagggcagcctgccacccacccccacctgcatcccagcagggcatgagggctcagtatctagagccagagcccaagccagccctactagttcctgcccatacagtcaaggacagcaacaaggagtgagagtcaggtgccctgtgcaaccccctgcccagtccagactccagcagagttgccctgggtatctcttgggggtctcttctctgaggacaaggtcacatagcatccccaacccaacctcagaacctcaacccaaccccagaaaactgccgacaccatggccactaagactcccacacacacaaccctgtctggggtgccctagtgaggactactccctaatgcacccattgcagagatcagtaaacagaggccgggaagggttctccccagagggccctccaagctgggcagcagcagagcctggattctctcagcagcaggtctactctgaccccactttctgagaagcagatgagcttttgctcagcaacaaaccgcaattctatttagttggggcctgttccaagacactggggaggggctgctagggcctgcttgagccaggtggccgaggggcgtcaaagggtctctccggttcggcgaatgcgtactgcagcctgctgtggcctcgggattaccccgtccccctcccacatctcccggggggcggaagaagcgcatcccatgcaagcagcgacctcaggccatgccgccctctctcaggcctcagttttctcatctgtaatcggagaccgcggttaaaaccgtctattaggctccttggtagtccgaagctgcctatgggtcccgccaggtgcacagcgctgaccctccccatcccccgcacagccctcgcagctccgggccctcccctggccacggaaggcgcggggcagtctgaagtcctcgggctggagaaacccaccgcgagcacccgctcctctgcgcaggaccctggactagccgggtggtacgcgcgcgatgggctgggggtcccgggggaggccacggccagccaaggtcagagccaaggtcacagtctgttcctcctccccctccccccggcggggccagactcagggctgcgggcagcggcgccccaggacccaggagagaggagctgtggggccggtccccaggacggcaggagaagcagcggcgcagggaccgggagggggcgggccgccgcgctcaccgggcgggcgggccgggtccgcgctgcagcgaggtccggaggctgcaggtcagggggctgcgcggaaggggtgcgcgcgcgccgtgccaattacctgggtcacgtgacgcagccgcccacgggcgcgcgcccctgagactccgcgcgtcgtgacgtctccatggatgccccgccccgctcctggcgctgtccacggtgctggcggcccaggcccgaggtcgcccacggccgaaggggggactcctctctgagaccgcagaacggggctgaggccctgaaccccgtgtgctcgtcctaaaactaggacgaatgtaccagacgacaagcagcctttgtgtgtaggagaggataggttttgttttgtcgtctgtaaaatgggaatgctatgaaaagttccactatcttagggatgttttgaaaaaaag

SEQ ID NO: 54090 - DNA, 2289 bp, Homo sapiens
aagtgacacatattttatgaaaagactgtaagtgctcagatgctgaacttcttaggaatatcagcagcaaatactgactggttttgttttcaggctttggtttaataacagtcctattccaaatacggtggtgaataataacaaaaacatcaataaacagatcaatttttaaaaaggtaaatagggatgatttgtatctctccaccttgttcaatctcagattcagaaagctccacaaaacatattcattacttaatcctacctaaaatcctacctaacatggcaaatacaacttttcacaagtgatttgtttcttctcttgcagtgctatttgccacttttacaagctgaagtcataaatctttctaaccctaaaataattctcctttagaatgatacccagctgatctctcacaggattaaacattgcttcacagtatgagttagatagaaggagactggtccccccctttaaaaaccaactctacttgcaggtcacgatgtgggtccaataagaccggtggagcctggatggagcagaccttttccagaggcctggaaagcactttgtaggattggcttttcaattattaactggtgagtaatgcttaaaagtagcaaacaggtccccagaggtcagagatccatactgaattctgacggtgaaaactggttttactttttcgcgtagaaaaatgtgggttttttttttttcttttcctcctttctctctggcatgcatatatacacacacacacacacacacaagcagaattgtgcaagtcatctctaaagtgatttaacacagacttctgctctaaaagtttgtaaaacatgagatataaaatattaaacattgtctccaagttgtgctgtcagtttatgtgagactcctgctgctcataaccaaaattcttaagtcaattttaataggtaaatgtaactagtaagggacaaatgctttaatctagaaggcctaaagttgtttggattagtttctgattaagttgccaatgacatttaacaaaatcatttactgctttttcctttttcagtgaaagaattaaaaaactaattccttgttaaaataacacattttttggaatatatcagtgaataaaagaacacatatttatcagatgccttcccatgtgccaggccctgaactaggtgctttctcaaagttagtccatgtgttgataggctctattacactcgaggtatttccttgtctcacaggtggggaaccctcaaatttccttgaaaaactatatcaaacagaaaagccatattgagaaaagcatttaacaggtaccttgctcacagcagaagtttatgatcacaaaagaagagtgattcaggcataagcatgtaggagactattctaaaagcagaaatattctcaatgatttaagtttgaaccacaaaaagtctagaaggtgaggcctagttatagtagtctctatgtgcaggatttacatttttaaaaaatgatttggctgggcgcagtgcctcacgcctgtaatcccggcactttgggaggccgaagcgtgtggatcacctgaggttgggagttcaagatgagcctgaccaacatggagaaaccccgtctctaattaaaaatacaaaaatagccgggagtagtggtgcatgcctgtaatcccagctactcaggaggctgaggcaggagaatcgcttgaacccgggaggtggaggttgcaatgagccgagatcatgccattgcactccagcctgggcaccaagagtgaaactccgtctcaaaaaaaaaaaaaaaaaaaaaaaaaaagatttgaagtcaggggagcctgaatttgagccctggtttggtcagtggccagctatgtgacctggcctgcgacaaattactcaacttcctaagaagtgaactcactgtctctaaatgagagacaagaaaaatagttatgcctccctgagtggttaggactaaatcagacactgcatttaaagcactaagtagaatgcctcatagagagtaaacaatcatttaatggcaagaattacttttactattgttatctgtataatttgaaaaaaaaactccacctgcatttgactgaaaagaatcttttatgaattataaattagactttattgcatattgacatgaataattgcaggttgaaaatgaatgtagaactgcatcactatacattaaaaattaacccatctgcttcacatggcttcatctgtcccaaacttgatttgacactcaacttactaggctttattgagcacttgaagaatatt

SEQ ID NO: 54091 - DNA, 943 bp, Homo sapiens
ataatagtaataatacataaatattctagcattagtatcatctcatctcatcagaactcttcaaaatatttgtatgtactgcagctcaattagaggtggtctctgactttcatcagcttctccctgggctccatgacactggcctggagtgactcattgctctggttggttgagagagctcctttgccaacaggcctccaagtcagggctgggatttgtttcctttccacattctagcaacaatatgctggccacttcctgaacagggagggtgggaggagccagcatggaacaagctgccactttctagagtagccagacttgcccctgggcctgtcagcacctactgatgaccttctgtgcctgcaggatggaatgtaggggtgagctgtgtgactctatggtacagactggtccaggttcctggaggtcacactctggggctgccagccaaagggtgcccttaagttggagtgtgggtgacttcctgaacagagctggcactggggagggggtgctcggggtcctttctcttctaacaggccccagttttgtctcaatgacagtgtttctacacctgtgggttatgacaaagacaactgccaaagaatcttcaagaaggaggactgcaagtatatcgtggtggagaagaaggacccaaaaaagacctgttctgtcagtgaatggataatctaatgtgcttctagtaggcacagggctcccaggccaggcctcattctcctctggcctctaatagtcaatgattgtgtagccatgcctatcagtaaaaagatttttgagcaaacacttgaatatgtgtgtccttttaatttataatttatgtatgcattgatttaatacacattataaagaatacaaaacatttaaaaagggagacaaaactacatatgaatggccgggcacagtggctcatgcctataat

SEQ ID NO: 54092 - DNA, 4526 bp, Homo sapiens
cccgtgtcctgctgtctggtgaacgatgaaaaaaatgtgtgtcttcaagctggaattagatcccttcttttctttacggtgttcctgtttatccctccttcctcttcatcaggaagtgtcttctatgatgtgtcccccacattcctctgtgtttgcttgaggtcaaagcagcttagaacaagaaacagcttagaacaagcctgtaaaacagcttagaacaagcctgaagaaagtgcccccaagaccacatgcagcccgaggggaattaaaggccaggggctctgccttgcagatggagagtggcctgggtgcaaggccccagcatcagctacctcttgctacacacagaccaccgaaaacttagtggcttaagacaacgacaacattgattctcttttaactgtttctgtgttaaagaacatctgttcactcaacaggtctgtactgagcacctgggccaggcagtgctctagacctggggatacagcagtgaaccagagagatttcaggagagaaccctgttctcctggggcttggactcagctgtgtgtacgtgacagatcagaaatgagcaaacagtcatctgttgaacaatcagtgggcaactgataaagagctttattttcccctgtcccctatctgtttaaacatgctatgtgggccagttgagcaatctagacaggtcccttagctttcttgttcaccttcagataatttaaaaaagtggtctgagttacattttgagttacacaaagtctcattccaggggctgcatctgaattgagagggaatgggggacaggagagttaagggctccttctgcctgaggtcatgttctaggctgacttcctcatgggacttttgtgggcttctctctccacagctccccttccactcacagcctatgactgttatcttagcttctgcatcgtaatctatgtctcctattgttttctaatgaggttgccttgccccttgtagcagagtcactcttggatgagatccataaaaccctgctatgatcacctcctttgctgcggaatgtggggaagcagttggcaactgagtatggaggacctctgtcaaaactgagacagaaagaagtgctatttaacatctagtcacaagtaaataatgtgggttataatctgggctgtaggctggacgtggtggctcatgcttgtaatcctagatcaggtgggaggatcgcttgtgcccaggactttgagaccagtctgggtaacacagcaagaccctgtctctacaaaaaaatttaaaaaccgggcatcatggcgcatgtctgtaatcccagctactcagcaggttgaggcaggagaatcgcttgaacacaggaggcagaggttacagcaagccgagattgcgccactgcgcctgagcgacagagtcagaccctgtctcaaagaaaaaagaaaagaaaaaaagaatctgggttctgccatttatttatttactcaattttttttttttttttttttgagacggagtcttgctctgtcgcccgggctggagtgcagtggagcgatctcggctcactgcaacctctgcctcccaggttcaggcagttctgcctcagcctcccgaatagctgaggctatacgcgcgagccaccacgcctggctaatttttttgtatttttagtagagaaggagtttcaccgtgttagccaggatgctctccatcttccgacctcgtgattcgcccgcctcggcccccaacgtgctgggattacaggcgtgagccactgctcccggcctattaactcaatccttagaaaaacaaatgtggcaaaggtggaatcatacaacatatggccttttgtgtcttacgatattcatttttgcatctgaatgttcaaactaaataatatctaccttgtgaggccatctgaatcacttaggatggtccttggcaccaaatttgccttcaaaaaagcatttgcttcatttaatttcgatttattcacgaaggactaaaggacactgcaagggcggggagggagtgtgcgcctgcgctctgcgcctcctagagggcagtcaagggcttctggctgacccgagcggagatctcgcgagactgtcagacgtatggcgagaggtgtgggaggaagattgtgttgtcgcgagaactctgcctttgggccgtaggttagtgtggggccgtgtctcagtccacccaaggtctcctcggatcgcctggagaggcactcggacctggtaagaacgctgtgggccgggtggaggctcgatgaccgctggcccgctgggcccgggcttgtccgccccttcccgacccgaccgacaccgggaccggtctgccttctccttcccttccctcccctccacacgccaggcccgggcacctcttcctgcctgcccgccgggcccgggcctgtcttctccccttccggccacacgccgggcccgggcctacgttctcgccttcccgccacacgccgggcccgggcttgtcttttcctccccgaccctcctcgtgcccggccgtgggcctgtcctttcctccccgaccctcctcacacccggctcggacacctcctgctccccgccggccttcccctctctttaggtgtgacagctccaagtttcctgtttctctcgcctcttgcttggatgtggggcgaggcgaggtctgttttgccggacgggcacagaacataatccatttctagcttgtcaggtggaaatgcaaagaagatattgggtttttttggccctctgtgtgccaaacacatactgtcacatttaattctcccaataatcccgaaaagtagcttgattatctctgttttacagctgagaagagtaaggcttgctcattcattggttcattccaccagcaatcatttatttggtgcctgtatgttcaggatgttgaggatagcaatgaaaaaaatggacacctaattctcatggaactaaattcttgttgtggggaaaacaataatcataatcttacgtggcacgggatttaacatggaatgatgccatcaagaatggcagaagtagaatgacagaagtcagagtgctgaatttatctgaccccaaaggcagagcttttttacttttaactgtgcctttttgtgtcactttctaatcagggtcgggttcaccacagtaattgccttttggatggacttagctttccaccacgcacttggtaatttggaactaagtttatagagactcttgagttacttattggaatgaggatggcacaggaagtcatagttggcccatttttataccgagatcctagtgtgacatttccaaactttaaagtacttgagaccgtttgagaaagacttaccctaaggatgcagtggcttaggcaatttacttggttttctcatttgaagatttgctagcttgcagatttgttcagataagtaaatgagattatgtatgtaaagtccagcacaataacgttcctttcattttctcctttcctgccttccagggagcctttgtccttgggtctctaaggaaaatcctactctttgaaagttttgtggtagtttttatctaaataaatctctacaattacattattacctttgtgcaaacaggcatttcggaaatggaaaaacatgttgagctatggaaggggaggaagatgtccttctcaaagggagagaagatattttagaactacatagtacccctcaccccccccttttttttttttttattaaatcagtatagctgtgccagaatctcaggatccggtgtaggggtttcataaaactccataggatatcctgacacatatccctcccccggttgagagtccctaagttagtgttttataatactttccctcacatagtgttagcattcagagccagtcattgctgctgctgatggactttgaactcagtctcttatttcaaagaattagtattttctgcttggttggtgaatctatgacacgagttctcctctaggtggcaagctcaccattgtgttctcagggactatcacagtagtgtcagtttaggtactcaataaatagttgttggatgaatacataataccttaatacttaatgattccttcaacataccaggtgtggttagggactttggactcagatctgggattaaatcttggctcttctacttgggagtttgtgactgtaggtaatatatttaaccttgtcaagtctgctttttttttttttttaattaatggtgatgataatagccactttaatgagggctaattgagatagtgagttttttaaaaaaaggctcggcacatagtagactagatgtaaatacttactgaattcatttactcagtaattaattgttgaacacctactatacaacagtgaacaaaaagacaaagtccccgccatgtggaacttaccttctagtatgttttctgaagggagatcagaaaataaatggttgctacgtgccagactgtggttagtactatggagagtaataaagcatattaagggggattggaggcaagactttt

SEQ ID NO: 54093 - DNA, 2141 bp, Homo sapiens
taatagaattacaacattgtctagatttcatcttttggcctgattgcatatgcaggctatgaggattatcttggagaaaagggaaagctagaagtaccataagcatgatagtcacaggtaggtagggctatattgccaggcactgtcctaaacattttaattcatgtaattcattatagttcatatataattctcattgagttgggcccattatcgggtggagcaagtggggagaggagaggctggagaggagccccaggtgccatccgaggtccttctagctggccttaccctgggggccgggcgggggcagcaggcgtctagcagggaggcccagcggggagggagctgcaggggggccgcgagcgccagcggggactggctgggagcagggcaacaatgggcggagttttccgctcctccccgcccttggcttgagcgctccagctcgctagtggcccgggcgaactggagttgccgtgtgacgcgtgggcgggacgaggcccgggctcggggacctttcgcactcgggtcaggggtaaagcagcctgtcgcttgccgggcagctggtgagtcggtgacctggcctgtgaggtacgtctggcagcccaggggccgtagcgggagcccttgaggccggtagccttgcagggctggcgccgggcaggagccgggtcgcagcggctgactgcacaactgcgtgcgaatcggcgaccggggcgagggcaagggctcctgaggccgcttggaaagggcttttgggaagtctagaaagccgcatgagtcactgttgctttcgtattagaaatgccttgttttcgaattagaaatgccttgcggtcggttttcagttactactttagaaaattgatgtgctgggatttattgccctcagttgcttgtataaaggtggacaaatctgagcctagtaaactctgaagtgttaaatcttaaaatgttcaatagtgaatttattattatcttattttaaatctgttgcgatattaacgtttgtttgtgtggttttaaaaagattacagagaaccagattctggatttcagaaactgcttgtcttgataaggaatttaaaatgggctggggctaaggtaagatgtatataatccttgagttaatgagttgtataaaaaacaacctttaggccgggcgcggtggctcacgcttgtaatcccagcactttgggaggccgaggcgggcggatcacgaggtcaggagatcgagaccatcctggctaacacggtgaaaccccgtctctactaaaaatacaaaaaaattagccgggcgtggcggcgggcgcctgtagtcagtcccagctacctgggaggctgagacaggagaatggtatgaagccgggaggtggagcttgcagtgagatcgcgccactgcactccagcctgggcggcagagctagactccgtctcaaaacaaaaaaaaaacccaaaaccaacctttaaaaaaaagacggaagaaagaacgtgtgaagtgaaaaaagtctcaaggtaaaattgcaaaatattttttaacataatttttttaaactaaaagctttacagacggtctaatgcaggttgtctcatcaaagataaccaaattgttcagttagtatttcgagtgtagtactcatagaacacataggtatcctgtggatagatgctgcgcttggccttttagcaatgactaggatgccaggcaaataagtaaaaagtagaggtctttggaggggcaggggcaggtggcaaggggggcagagaatgtgagagttggaaggtgaggttacagatgatctagtctgagctttcattcttacagacgaatgaagcctggagtggctgtgatacagacgttgaatcaaaactatttgcattggtatttggcagtgttttggtttttctgagcctatcatgacatacaagggtactgtttatttatttatttatttattttgagatggaatttcgctcctgttgcccaggctggagtgcaatggctgcgaccttggcccactgcaacctccgcctcccaggttcaagcgattctcctgcctcagcctcccgattagctggaattacaggcatgcgccaccacgcccggctaattttgtatttttattagagacagggtt

SEQ ID NO: 54094 - DNA, 2532 bp, Homo sapiens
ggcaagtaaaaatactttacaggtgataatacactaaaggaagaacaagctcatctgggagagagaacccaggactagaccttggaaactgtagttctaaacccaaatcttaccccttctggctgtggcccttcagatgggtcacttaaactatctgggcttttgtggcttcatatgtagaatgagagtgttatattaaagagatgaccaagattttttccagctttattttttatttttttaaagaggcttgtgaggagctatttttcagctttaaattgtagtttgtgtgggtcacaagagttaaagctctttggaaattttatggttaagccatacagtaatgacttagcttcattacataaccacttcatttgtggttagttgctcaattctggtgccatgatcttcagacttcacaaatagatttgtgcaaagcattgtgtaagcatggcatatatagtttaaagaattccttgttgcggaaactccaggttttgttattcgtttgaagggtatgtgtgtttcctcctcctttacttcctccacccccaaatttaggacagggatactagaggcagggaagttttagaaagcacttaaacttttaatgttgtctcaaaacataaacatttaaggcagtcctcttttgaagatggcaaggcaatattttggattataatggtgaagataaaaagacatttttagtaatcttttattgatttgaatattaggatcagagctgatttggtccaatctttctacacgtaagaaaacagtcaaaaatatccatacttggtatatattagaggatttagactattgagtttttggagtaaataaaagattgccttttgctgtgctgtatagtgaaagactagatggaaatctaatatttattaaataagcacgacctccttacccctaagtctgtgagtctatattcctcacatatgaattaggaagttaggttccacaagggcaaatggtgcaaggtcatagccctgataaatggctaaaggattctgtcaggtcctgttcacagcctgtcagctaaacctgataacaataaccactgcaatgtggagggcttacggtgtgcaggtgctaggctaagtgccggtagacatataatatctcactttaaccttactgcagcccctctgtagcaaccatccttgtctccctttttcctgaggaagttgaggcccagagagattatgttactagctcaggggtctcaagcttggagacacagccataactcaggtttgtcagactccagagtgacctcttaacggtcatgcttgctactctggctcttgaacctgaaacaaatggtgaataactgttgaaaatggccatgtgaactagttacctcatacaagtctctttggatgtaacatttcgtacagctggcttaggctcattgtgatttgaattcacccatggttggggctcttcatttccgctctgaaggcttcctcttcatcacagtgcaagagggcaagcctttgcatagctcctttcttggcatctgggctctgaaagctgacagtgctctaactgcgccacagggaggaggagggacagagagagccaaaggcagcaaaggggcaagcatcctgggacttaccataaagaaatgaaacagattttcttcgtggctgacagatgagttctcaagatgacttttgaaggataacactccttttaatttgaaaaaaatgtgataactgtgtgtggaaaaatcagttttgtaacttttaaatctcatcctacattctgtctatagctgataagggcaaagtccaatgtgtgaactcttgctgtagtctactcttattgtgtaatattaatacttgtgattgaattgagaggacttgctttaggaatctagtaatacagtcagcactgtatgtatttgagtttgtctcccgtatgttccggaattctggagttttgacattgtgaagcaacaatttaattttattgattcaattttacactgtgccaggcattgtggcattccacacaaatggtgagaagctaaaagtgagaaatttggcacaggtgaagaaggctgggtaacacatttgaaagactgctaaacaggtcttgcatgactggcctaagtgcaaagtgaagcagcccatcacgctccagctctccaaatcggagccggcatttcacccatgtgatacaggtatttttcatagtccctgcagtgagttccaagtgcacactaatgcttctgcctaacacaggcagcttatggcatgcaaaaggaggctgcaaagtaaccactgttggtgtgtccagggttagaaaaatttccacagggatttctgtgaaatccaattaaggcagccctttctttttaatagatgattatggagaaaagagactgacgaaacaaaatcagcaaggggaagttaaaaaatttcctgaattgttcagtttcttgtggaaactctagttcctgaatctgagtcttttgctgagatagtgtacagaaagtttgttttgctg

SEQ ID NO: 54095 - DNA, 1080 bp, Homo sapiens
aaatcttgaaaatatacattttttctggggagatacttcatagatgtcattggataattaaaaggatttgtggtccccccaaccccacccccccaaaaaaagttttagaaactcactattctttgggaaacatcattctttgggattaacactaggaagctaacatgtatgtgtttcctaggtcaaagctcagattcacagttgcataagccgtcacctggaatgtcttagaagccgtgaggtatggctgtatgaacaggtggaccttatttatcagcttaaagaggagacacttcaacagcaggctcagcagctctactcggtaaggtgactgcatggctagaattggtttgagcatggcttctggttgccagagagtatcttccttgtaatgcagtgttaatatagatcagatagaagtttaatctcaagtgctgtttggtaacttgagtatatctggtgcttttggtgtcattgtggctagttggtttcatttttcttttagttattgggccagttcaattgtcttactcatcaactggagtgtacccaaaacaaagatctagccaatcaagtctctgtgtgcctggagaggtaatgaccctttttgcgtattttaacttttgactcttgaactttggtatactaaaagaaagtcgattttgtaactcattgcttgtgttatatttaacttctgtgttgctaggataagatcattctgcttcatgtatttaatattatacttgctgatacatgaataagccatctatctttggttgagtttcttagagaagtgtaatcatttaaaattactcacaatttggcttttgttttagatgaagttgatgaaacagatattccttaaaaatagccaattttgtttttttttccccagactgggcagtttgacccttaagcctgaagattcaactgtcctgctctttgaagctgacacaattactctgcgccagaccatcaccacatttgggtctctcaaaaccattgtgagtaatctcatatgcttcactgggcacttctcatatctgtggcctcacagctggtcttaaaaaaaattgctat

SEQ ID NO: 54096 - DNA, 856 bp, Homo sapiens
aaaaaattggctgggtgtggtgatgtgtgcttatagtcccagctacttggaggctgaggcaggataatcacttgaacccaggaggctgaggttgcagtgagctgagatcataccactgcattccagcctgggcgacaggatgagacaagtgagactccgtcaaaaaaaaaaaaaaaaaaaaaaaatactatgaaatggagagaccattttaaaaataaatcaatattccatctcaaaaaggagacaacgtttttaaagtaataccacttgtgtaatacatatgacttaacattttcatattcataatttttttccccctactttccaatttgttcctatggcagtttattacggagttccaactagaacagtcgtttcctgctagtaatatgatttagaactccactagcactgtcaatggatttaagtctgtaatgtaaacaaggtgacaccctatttggaaagagtattaacaacctttggactctggatgggtcctccaaatattaaccttgaagattagtgacggccaggcatggtggctcacacatgtaatcccagcactttgggaggctgaggcaggcttgagctcaggagtttgagaacaacctaggcaacacggcaaaaccctgtctctgcaaaaaatagaaaaattagcttagtggggtggcatgcgcctgtggtcccagctatttgggaggctgaggtaggaggatcgcttgagcccaggaggtcgaggctgcagtgagctgagattacaccactgcactccagcctgggtgacagagtgagaaagaaaaaaaaaatgtggtaagatagctataatcacactttgagttagatgctggtgaccacc

SEQ ID NO: 54097 - DNA, 1017 bp, Homo sapiens
ggtaacaagatataaaaaaatagcattcagagtttataaagagtttacatttacaatcctgaaatttcaaattatctcctaaaataattcgtaaaatatgatgacactgagccagcattcccgtgtgccaagagtttcctaaaactcagtgctgttgttctctttagatgggggatatattcttcaacctgccaatctctacccagcaggccttatttatctaagttactacctggtctgtgcaagcatttgattttgcaattcctgggctagaggtgaaagatcagtctaacagcagacacttcagagggtaggctgaactgggagtgggcaaagagactggaacatcttcccaaattttctggttattgggaagctttcctcatccacttatcaccaccataatgcccttaaccaccagcagcagggacaacttcaaatgtggagcaaaacaagtcagatctgtgacttatgatcaacttctattgtcagtttccaggagtcaggaaacacatctaagacatgcctctgaactctaaggatctacagataattactactcattagcagctgtttcaccagcaaacttcaaacccagtatctctagtttttgctcagggctttggttctctaagccttcctactagccaagatgactgacagctggacctcccaaccccagagcatggacaggcagattgtgtatgtaaatgtggtcatgtgttagaagcctgtgtatcaaacagagagggtacaaaataatacttcttttttgtttctagttttgcgttggtgagctgatgatattttatgccactcaacaatggcacttgatttaacattagtgtttccacctattacgtggacttgaatgatctacctcatgtgtttcatcattctgtttagctgccagaattgttgccaacacagtaacattctttttgaaccactttagctaacttgaccaccacctttaaggaacttaaaacttgggttagcactatttatttctcattg

SEQ ID NO: 54098 - DNA, 425 bp, Homo sapiens
tgaaatcaatcactgttcttttaagcgagttgtcatgttctgcgaaataatcactatgaactaagataaaggaacctgagatctgattacaaaaaaaaaggtgacttaggggcatgctgggagtaggagaggaagatgtcagatgagctaggaaggcatgggagaaccttggccgtgtgacagccaatggcatgtctctcttgtttcattttattttttccttggataaacaagttttgcaattagagcttgagaacacaaaaggcattcatgcttgatttctagcacattaaccagatgatgcaagagccgaacccctgttatgtgctgtgaagggctctgtctcacttgttctctcctgtaaaactactatcctctgcttgctagaccctcttgtggggctttttaggctatgacataggaca

SEQ ID NO: 54099 - DNA, 4501 bp, Homo sapiens
aaactgaaatgttgcacaaataaattattactgtactcaaaagatggcaaacttataaatgattaatttgtaatgtcaaaagttttctgtctatgtaattagaaaaacaaaatagaatctagctatatccatttagagagtcttaatcaaagccatggtttctttatgggtttaaaaaataataaacatcatcatgacttagatttgagtccatttcttctaaacatagtatacaagtgcacagtctttcacctaactgtacaaggtcgcgaggtagcagtgatacctctgggttctactggtgactaggttctactgagacgtgaactgcataccagcagagctgtcttcctcaggatccatgaagaccagcccagcaagcgccatgcaaaggacaacactaccagaaagtgtaccttcataacatcaccagggcacagtccaagtgttatttcagaaacaagagaaagaaaagtcaacagacaaaaggtaaataattgaaaaacgaacatgacaacaaagtatgggagtgaaatggtatgatgtctgggatttgtcttaaaatactgcccctctttccccagaactaagtaggggaaagggagagagagaacaagaatccagaaagttgattgttaatgctgggagatacggatatggagttcattctactattcactttacattctgtgtttttttaaactgccataataaattatctttaacttgaaatttaatctggtatgaacccaatttggttaaaaaataatacaaacataaagcatccagaaagttttttttttttaatgaaccaaaaaatttatgttgggtggtgggatgaaattaaagaataagtcaactgacttcacaaaactgctgagcagaggagccactatttacagcaagcagctcttcccaccaagtctcacacatacaccaacatttactggggccaccatcttattaataatctacccatgcatacagcattccttgaacaaagtgggacctaaccctgaaagggcacccaaatattacccacgttacactctctatgggagggctttatccactagccctttcctcaaagaaagaaaaatacgtccaatttctcagactaaagaaaccaggtcaagtcaacaggagaagagaaaggaaaggcaaaaagatccaaccctgacgcacaagaatgactcacattagaccgatgataaaaaccaaagaagcacaaatcactgcctgtcacttaacgggaagatacctgctaaagctttactctgtattttctcaacctctccttatttccttactagatccaaaggcatacaagacaagcaggaaatatataaggaactccattatggcagataaggaggcacgtcaggcaatgacacaccattcctagtaactccatttcataaaggcactgatctgtcacccactgatccccagggctgattaaaggcaatgagttctgagaccaattactagaggtatctacagagactgtggaccatttctgaaacctgtcccacaaaaagacaaaagattttcttggcaaaatatttctatattattaatagtaaaaacaaccaagattcaggtgatagcagctttggctgatcaggacaacttaaaagattttgcagatgagctggcaaaggtccaagccccaaccaaggggattcttcgatcgtgcaagtcctagggacactgtgctcagtttatcttcctaggacaaggtactcattacccaaatgttcagactcctgacctttgccaagtgagtcatatatcctatctctatatagataccacaaaaggagtggaaaaaactgccatacaagccaattccctaggctgaaggcagaaattacttaaatcccattctgacatctttctgctttgagttttaagagaagttttctttaaaacaactagtctgttcctatcttacagataatgtgactcttgtgatgttttcctttggccaccaggaatccctgagccaaatgttacaggccaaatctagcaactggattgaacttaaagattcagtgatgatatctgaagagtcttagcgtttgtgtcgtgtttcctaaaacaaagactccatcataagccatgtgaattcctacttcaggacggacaagagtcagaagtggtaatacagggaatggcataagtgattttcccttgacactacagatgcgttctgaaccatattttatgacacctgacaaagcagaatttgtcaagccttgtttaagagtcccagttggagcacccagttggaaaccccatttgccattcaattacccataactgtcaatagtgttgattttacaatgtgtggttttgaaatagatctgcacaaattctggtgccaggcaccaagaaatggaaatcaaaataaatctgaggttatatgaaataaatatgcaatagcaaaaacaagttttttaaataactgcctttgccttttgttttaattcatctaacttaatttcaggggcagaaaaacaagtcaagtttacaatgactttcaggctgttagaccctaatactctaagttgtttttttccaggattttgcttttcattcaacaacaaattgtttagcaactaataactggtctgaattctttctgcctatctaaaaagtaaaaatatggaagttgatgactatgattaagctttttaaagtaatgaaccagattaacaaatcactataccatcacgaactaatcatcatatacagaataatttcataatctgcccactcctttttgcttttacataacaggaagagcttggcaggagatctctggcaatactttgcgtgagctcacatctaacaagcttgtccctttaacaagagcaacatcaagcccctgagggtgataaatcaatttcctgccctctctgatcatactgattttgtgtgtgtgtgattagacacctccccaagaaaaaaaacaccttcatggtcgctgttatgattagtatattgaatgtttacaattctaggtgcaactcatagtaaaaatcaaatcacacgagttgttgggatccctgtaataaatagctccttcaagctattaaggagcaggtgtagcatttgactacagttaaagtgctcttaaacaattctacttgactctcacactggattagttacccctcactcagacatactgatgcatgtggatgattaagcaactgcccgctgtcattagtattagccaacctaagcttggcaactctgctcccattagtcaatatgcaatgcttaccaagactcactgtatttgtctccaaacctgcttgtttccattattacataatttaaataaatattgagtaatcaatgaaactggagtctggaaagaaagtgagctgttatttccacaaaactaaattgaatgctttagaaagacttgataaaggtaaacagtcttaccaaaagattgctgcaaaattagaggtggttgagacaactttaatattcttacgaggaaaatgtaacttaaaatgtggaaggattcagtattgggctgctttgaagttttgatgttccggcatcactttaaagaaataaagactggacatcgatgaaggattatgggtggggcttgtgcaggaaagacaagaaatggcacaaatcagaggacccatattcaaaagaaaattccttgacactacataaaacattgagaaatcctaaacatttctgtttctaaagttaataaaatgtttatggtgggtatgtatactgctgaaaaagttatttccacccttaaccgattcatcattcatctgaggatcccaattctactgaaagaggaactaaaccaaggtctggaccctccagtgcatttcctccctttccatgatgaaaaacgttaacaaaaccagaaggggaaaagttagcctttggtgaaatcttgccctccttttagtggctgtctcctcaggagtctttgcttctctgagccctcagggtggggctcccagtcccacccctctagaggtccaagcttaaagactacctcttctcctctctttacttcccacgtgcagcccccattatcttaagtccaggtattctcagctaggagttgagcaaagcaaggcaaaagtcaacccacacagtaaggtacatttctcttccctaggatgttttgcatttcagaaggtctatgttccacaactgtaaatgcctccagttcaagagtatacaaaagagaagtgaaaaaattcaggaccgtggaaggggggatattttggaactagagagaggaaggaacatgttaatcttaagacgaattagttacaaatagaaagaattagactaactccatctgtttttgtttgtttgtttgaggaagtgttgacctttccaagccagtttccctgtctataaaaatatggataccatcacctgactcacaggattaaatgagataatgagctgcagagtacctagtagagtctaggca

SEQ ID NO: 54100 - DNA, 606 bp, Homo sapiens
cttcccccaatttctatacccaaagattcttttaaaagtagctaggtcccctcccctcaatgcatcccaacagcggcagcctccagtgttctgttaaaaagaaagctgtgtggtgaaccggcggtgttacttgaagataagcactccacccttctgcacactctcaggagctcaagtacgggacactcaaaatgtgaatatccgttggttgatttgtactatcaaatttactcaaaattaatgtgcagtaagatcaaaagcaaaaaaaaaatgcttcttctctttgcatgagtactcccaacccattctcttcaaatgaatcatcatctaagatctctgatgtagttgctagatttagagaacttgtacattctttgcaaatggcagataactgcccttgaggagatggttagcagcactcttagacagaggactcactcagtgtagggcactctgcaggaccaggtaggatagatacgtggtctctgtgggtgtctaagttgtcactccccagttcaaggatctagaacctcaaatcatacacatgcacaataaagcaagatgaagatgttaaagaggacagaagaaaccaagtatggttagctg

SEQ ID NO: 54101 - DNA, 1723 bp, Homo sapiens
aaataaaataaaataaaataaaataaatgtcatgcattcttctccatgtatttattgacaaattccacaagagcgattacctggccacactaaatagaaagcacagttatggagtaaacacactcagtccaaaacacaggggcacgtgcatccttgtggcacttagtaccaagctcattcacaagccagcttccaaccaaccaaaggagttgccaaaagggctgtttcgtacagggactggagtttgagaaagtgagtacttccccaaaacttaataaccaatctgtagacacaatcccgttctctcaaaaactgccattaggaagacttgataaccccaaacagaaaccaccccctacccttggttctcatgccacggcagttagcatcacgcaatataaagagcatttgttgactgatcctacccatatcctgacccactgcttcagcaactgcactgaaccttctcaggtgtaaatagctagtgcctatttgatcattaaagcaggatgcaggaaaaataaagatttccctttacttcgccgtagtagaattggcactgattgcggtattttaatcggttcacaccgtctgttagtgtattctaatgaaccacagcatctccggagcaacacttacggtctctcgtccccggaggcagtgtctcctggaaagttcctggggcaccaagtttgcgcgcggctcctcgcgctcagggtgcgcgcagccagccctggcgcgggcggaaaggcgagcgcgctgagcggcgcgcagaccccgggcgcggctcttgctgggcgcccgcgccttgatcggtcccggcggtcccgttcccctgcttgccgggccctggtgctaggacagcggcgctgcggagcccggcgtctggagctggcgggcggccggatgcgccgatcctctcccggggggtcaactgcgagctagacgcccagccggacctcagaggctccaagagcggggttggcgggtgtggcccggcagcagagggtttttggaatgcagggtgtggccctctaccacggcaaaaaagaaatgagtcagcccgttcagtcctaaccaataagcatgttcagtgtcggttaaggcggaactttcctttcttgatttataccaagcttagaagcctttcacagccttttctttacgcctttgacaacttcgacacaacttctagaaaagggtaggttgcctttgaaaacgcttgggaaacaaggattaatcttacgaaagatacttcagtggatgtacattagtttcgattagtaaaagtttttgagttaggcagagatactgggtgcaaagaggtgggacctggtatcaaagcagatttggatcagacctctgacactgtgtggccttgagtaagttaattatcatcaatgagggggctaaaatgcccacctaacagtttacagattacaacagtccccccatatgcagtttctctttctgctgtgtccgttaccccgccccttcagttgcagtctgaaaatattaaatggaaaattctagaaataagcaatgcataaattttaaatttcatgtcattctgagattgttaaaattgttatattttattattagttactgttaatctcttactgtgcctaatttataagttaaacttcaccataggtatgtataggaaaaatcatagtatatatagggttcaggaccatcgagatttcaggcatccactggg

SEQ ID NO: 54102 - DNA, 981 bp, Homo sapiens
aaaattagccggacgtggtggtgcatgcctgtaatcccagctactcagaaggctgaggcaggagaatcatttgaacctgggaggcggaggttgcagtgagccaagatcgcaccattgcactccagcctgggcaacaacagcaaaactcatctaaaaaaaaaaaaattccagatccttcagttgacaggtcagaccagatgattcatccacctaccatctaacactgtgcctaactgaaatgcatgactttcagttagaggtttcactttggacatatctgtttacctatttgaatgtgagccctaagttatttttatattttgcttttcctctcaggctgagaaagctgctgctaaaaactctcagagtaaaagtatgctgatatcacactccagggaatttggtttctaagaaaagcccactcatttttaaaagacaagatgaagagaacacagacttcaagcaagttgggagttagggaaatataactcaaggtctcaatgacttgcccaccacccctgctttttcagcaatgctgtttgggggaggggatcatggtaacttaacatgggaaagatgtgatcggataaaatctcttttatcattcagagggaagaggaattcacaaccaatcacttcaatccttattttctttttaaagcattatttttattgtggtaaaatatacataacataatttatcaccttaatcatttttaagtatatagttttatggctttaagtacattcacattgttgtgtaaccatcaccaccatccatttccagagtgttttcaacatcccaaagagaaattctgtacctattaaacagtaactcccctctcagcccctggaaaccaccattctactttctgtctttatgaatacactaggtacctcatatatgtagaagcatatagtatttttccttttgtgactagctgatttcacttactataatgtcctcaaggttcatccatg

SEQ ID NO: 54103 - DNA, 1712 bp, Homo sapiens
ttaaaaagccaattgtctatgctccagctggtatgtacaaaccacaattgccagagaagttcacttttcagaatgggtgtttgtcctgttcactctttgtttattatatgccagacccagtagaggcagagtggataaaatagcaaacaagagaacagtacttcctgcctttaaaagaatttagagtgtgagaaatattcattcactcattcatacacacacacacacacacacacacacacacacacagtgacagacactatccatgaatgaaaagtaaaaagtgagatgaaaggttaaaacacaatctggttaagacagtgaggaaggtccttgtaagcaagccccatcctcagactcagtattcaaggccttctgtgggaccaggtcatccaagtgccagagccattgagtatgaaacacagaaaccaacaagttcttaaagcagaatacaaagatgctcagggcttaagaaattcactgaagacttcttaacttctccttaagtcagagtccagcccaaaagatatacagagttggcaattatccatgtgatgttaccttaggacacccataggcctatttctgccttaaaaggttctttgcaaccacctgccacagtgagccaaacgctactactagagatcttgtagttacagaggtctccctctgctctagatgagtcacaatgaaatcttatcagaaagtggggacacagtaatccatcactggcttttggctctggcatgaccctctcctcttgtctgagggatccacacttataaaattcttcaaggtaaactgcccctcttcccttctaacctgtacataattttgtcattaatctctaatgctatttgtcccatgtctctctctccattctatactaataatctcagaagtctgactcatctccgtatctcctggcatctgtaccctcagctcccacgcacacagtagatgtcaataaacattcagtgaatgttcacatacaaggtatgatttcagattacaatgtccatagtagggctttgagggagtggattgtgaaacagatgggtcataataggaaagataccaatcaaaggcatggggaaggctatccggttcaagaagcataccacagagtagctgaatatggcaacagggtacttgggcacctgagagagggcagacgcaggacagaaggagatggtgtgagggagtaggaaacaagacttctccatacatgatagcactcagaaccaagctagcacctgtcagagaaaaaaaaccagacataccctgaagcagaaaggagagagagaaagggctctctctctgtcttcatgactttgtttatatggacatttgccaagagcagggctatgggagaccaggagctcaaaaagaagcaagtatttgcaacagctgctatggaagtcagctaggaaattaataagaaatgagatcaaggacgtcaactcacataccagttccaaaaccctctggagtccctctgtgcacaaggcaatgacctgggtttgccagtccatgagggctgggtcctatcctgcaatgccttctgatccagctatgaggaagttcgcaggctgcccaagagtttatgggaaaaaaagacactgttcttggccctgcattaattgagcttccacatgtagaaatggtttagtgattagtaaacgcaagaactcccaaatcaaacactgttt

SEQ ID NO: 54104 - DNA, 1274 bp, Homo sapiens
gcaaagctaagtgattaaccaaagtcctacagactatcagtagatcttcaacttgaacccaggcagtctggctactgatgaacctgttatagctccctctgtcccatgcaccagtctctgaactcccagactgtggcaagggccaaaaaagttattctgtaggaattttttgcacgcatcaaacagaagatacaacaagcactcacatatgaatctggtgagcaggaggaagaacaggttggagaggaaggtgattaaaataatcctaacttttcaaaaccttatttagaaacagactaactcattatcttttgtgagaatggagcaaaatgttacaaatggccaagtgtcccagtgccaagtcaaagagagatgagtaaccctgctcactgcagaggaacacgattgtgactaaagtactggagacacaggaacactgctctgggtcatacatcagagcctggtcacttgtcttgacaatgactgtcaagcctcaccttttagcaccctaactgacataaacctatgaaagacagcactcttgggctgtgtctctgcattgttttgatacgaccagaatccaacttcactgtggaaaagaaacagcactcaggtgaattctgttaaaaatcatgctaatcatgcaactcataaccttcaaagggacccatttacagagaactgacaagttcaaagggccagttactgctttgccaaatcaagtccccggcccaggacaacagaactggagcagtggcaatgagatgtctttccctttgcctgagcagtgtgccatagagcctgatggctccactggcacagaaggctaggcaaagctcactcaggaagcactggccatccctgacaagcatctccagtactactccatcacctccccagctccccaggtgaagcttctggagtgctcagctttccaaccatttggaaagcaaaaactagcagcagtgactgaactgaccgccaagaaaaacccaagaatacaaggacacagttggaagttactacccattagaatttgctatcaaagcaaggaaaagctacacaattttctgatatttttatttttcaaatgaaagtatagagccaataccaggcaattcctcaaagaatctctcatcgcagagctcggcatttcctagaaatgttttcagtgcctgtctttcctataattagactagtattacaaatatcctacctgtaatctacaaagcaaagagactgcaaattagagacatgcctaatgtattactttc

SEQ ID NO: 54105 - DNA, 1143 bp, Homo sapiens
agtgagactccatctcaaaaaaaaaaaaaaaaaaaagagatagcttatcaggggtgccttcagcattctggacaggacaatccttcattaagtgggaccctcccactcccaactactgaaaggtatttagcatcccacaccctcaggacattaaatcctgatatacacacccctcatcatcatgaccactgaaaatgttcccacacatttcaaaacaccagaggagagggatgacaccattccccactgacaacttctgtgtctacttagtgggatggaattcacattcaggaaatgacagaaaacaatactgatctggaggtggaactgtgagataaaagctgtaagtatcattaagtggtcaaaggcgatccaaaagagtagagcaagttttgataagaacaggagatggagacttgtaaccttccccagaatccagtccagggttaaagtctgccatgaaatgccttctcatcaacaccctggatttcccctacttaagctgattacatgaactaatacaaggaaaccaccgaactcggtgagcagcacatcctacacacttggcaatgccaacttttaaaacacaggtattgttcctgtcctcctgctcagggcaagcgttcttgccatgtgggcatccagggagggcagaacagtgacagccctggtgagcatgaagggcactgctggccttcccctgccgggcttctccagaggactcaaccataggccccacccattcactgctggactgaggagatctgacccctgtctagttccttcccgcctgtgtcagctgtggtcaaagggccattgttcccggaaggccagtgtgttttagccatctaggaacaatgccccttgttgatcctctgtgctccagttgaataaggtcatagactgttttcaaccttagtcacaatcaatatcatcaccttttattgtatagtgttggcattgatatgttttctgataacatctatatgctcaggtgagactgaaaaggtcggtgaatgagccatcttttatggatcctgttcgaaatttattaatgacacagtatacactaagtattatatgggacctgattctcaaacttatggagcttatttaaagtacaaagtgatcactttaaaatgc

SEQ ID NO: 54106 - DNA, 847 bp, Homo sapiens
gccaggagccaatcaaaaacaaataagtattcccaggattattaattccatacaaccgaggctcagccagaattcctctctgccatcaattatctcagaaacaccacagctattaaaagctacataaaccaccatctaaaaaagataaagcagaaagttcaacgggaaataattttgaaattgactggagacaccacataaaaatcaaattaaaaatgcagactccattaacttggattctgtgactttccaaactgggtggagtttaagtccacctttcagtcttttccaagaaaaggagactgcacacattagtaaatacaacaggcagagtagatattttaagacaatctacttttttaaattgtatacatttgcttgtaagcaaacagactgcttaatcactaactttcttttccctaagaaggaatctaatctatgcaaaaatccttggtagcaaataataggccactgcttcctgcctcttttcattacctcaccaagcacccatttccaaatttcccaatgaagcaactgcaagttctaatccctctatctaatttgcatgaagctgcggactagctatcctgaagcacagcttttatcagccctacaatacacccttcctgccaaagagagttaacatgccttggactggttttcaaggccaacacctctggctccagccttatcttctactgcccttcctcccagccctctccagcagccagactcctatactatctatcccggaaccttgacttaaaaaggcacactcaccaatctgctaccctggcatgccctgagattgtactaatacacctgcttctctgacccctcctcgtca

SEQ ID NO: 54107 - DNA, 727 bp, Homo sapiens
cccagggtttctgattacacttgcgtgtgctatggaatgaaggtactgacaacctacctccaagtgccaggagcagcctggatgatggctcccagggctcccaggccagtccttacaccagatcctgcaagcaggcgccgcctagagcctgtgagaaaccaggcctcaggccaaacgccatagcctcccctctaacctgatgttaaaatgcagaacacaacacccttgcacctaaacacattcctgtgacagccacattagcacagactttaaccatgacaacccgagagaccatgtgtcagcacactggctttcctgaatccacaggtagaaaggatttggcacagtgtgagacagaaaacacatgctgcaaggaagtgactaaaggtcaggattgtgcttacctttgagggaaagggggtcatgactgggaatgggcagagcgggcttctagagggctagcaaatgtctgtttcctgacccgggtggtggcaacttgtcttcactttgtgatcataaatttgttttatattctttaaactgcgcgacattgtttaaaggcacctgcaatatgacattactgctaaaccaatactctagtttttcctcttgggatcacacatctctaatgaccatggggccagtaagaccacaagcacgtgagatgatcagaactcagcaatgttcccacaggtgggcatacaccccgtagcaaagtcatttgttt

SEQ ID NO: 54108 - DNA, 800 bp, Homo sapiens
acagaggagaatatggagataaccacacttacagtgtctgaacagtgtcatcagggtgtcctcacaaggtgacaccagcacaatggtagctcactgttcctatggtatggtttttgttgtggttctggcaacccagtattcctttgataactgctggatattctttcaataactgctttttctgcttaagttctcatttgcaaccaagaatacatggatggggtgggaaagttttgacaacctttggctttcataagtgcaggagatgacaaaaataaaacatcaaaagaagtgaagccagagaagtggtaacttagaaaacaaaactgagcaaagatttatactgcaaaagtaaaattcaatgagtctgccccactcttttttttttaacctttaacctttgtgtttgttaaagtatgaggtatgtttgctgacaaacctcctttgtttgtgaaaacagatgctttctctatttgcctgacacagcagaggacactaaaaccagaaaacatattgatttttactttactctgttgacagcttcttctgtttttaaatttctctctgattcttgtatactggaaggctatgggttattaaaccccctcacattcagttcggtttaacaaatctttattaaaggactactttatgcaaacactatggtatgcacttatagccaaactcatcacaaatggagatatttcaactcaaattcaactagaaattctgtaattaatgctggaaaatttttattttaaatagaaaacagcaaccattttgtgagcattctgagttat

SEQ ID NO: 54109 - DNA, 1111 bp, Homo sapiens
tatacacatatatatgacagatataaaaatctgtatatttatgtgggtataaaaccaatatttatatatagaaatcttatgaatgtgtaaatacacacataagtatatgcacacatacatataatctcatttaatccttaaaatcactccgaggcaaatggcatcctcattttgcaggtaagaaaaataggagtttagaaggttaagtaactttgatacggtcacagtcacagcaattgcacctagatctgtcccatctgtttcagaacctgggctcttacacatcaccaaagaaggttctaatgacaactgaagaccaacaaaggaaaatgagagagaatctaccaccatgtatcttgtaacagttctgacaacaaggtcagccacctatctctttagctaggaagagaattgcatcaggtattctctggcccctgaccacactgtgttgtgtaagtccaggacccaggacaaaggccacctcctgcagggttgtgtcccttcttctaggcaaaatgaagcaacttctgaaactacctggaattagctttgtaaccaaggatactagagtactgtagaatacaaggtaacccaaacaccacaggttttccagataattgagtaatcagagtctatgcgccctccttttgtgagggaagggtggtaacgaggtaaatctccacctgctgcttgttctctaacattctcatccatttgccaacacctaaaaaattcacaattccttgcctgtgaaatgacagaattcactgtttcaaatgtgctctgcagtgttgtcaaggtctcttcagttgttatgggaggggaggtaggagatgggttgggggaagaagggagagagagaggagaggggtgatgggagggacccttccaccccagcagctacacaatcatctgttttgtacactgagtttttgcataagaatgtatttgaagaacagttttcatttctaaaactatgactctatgcctttgccaaaataaatagaaaacactgtactgcaaagatgcttaggttgcttgattttttaaaaaccaaatacacataaattgtgagtgcctatcagttagaaaaagatcctttttgtattta

SEQ ID NO: 54110 - DNA, 890 bp, Homo sapiens
aagtcacctcctgaccataaaaagctttgtctcctctgaaactcagaatactggatctgattaaaccatcagcaaacatttcccaagcaagtgcccaccctggatatggctgattgtcccaagcatgtgcccggcaggatggaaaaatttcttcttaggaatgttcccttaaatgtttctgggggcaccgttcatgtgggaagctaaagaccaacgttcaagtggaatatacagaaacactgcctttcttgtaccacacaggtactttaatccaggcctactttctagtgctttttccctctctgcttccttgatttattactaacccaaatgccccacaatcataacacagaggcaagtgtggggacagggaagaagtcaggtccaaaccagtgttgacccttacaggtcatgtgagtctgaacttccttatctgtcaaatgaagaggacacttgctcccctgccagcaggacagctttaaaggttgacagtaataaccagggatagagaggctagcgtgcatgaggcactattctaagtgccctgcaaatgtccattaattcgatccttctcagaactcttttaggtaaatacctttatccccattgcacatttgagaaaactgagatacaaagaggttaagtaattggtcaaaagctcatgcaagctaataactgaacctagtctagccccagaatccatgtttttaatcacttctttatcctgcctccccaatatctcctaaaggtcaaacaagaatacatctgaaaatgcttttcaaaccattaaaagatacattaataataatcattataataattagtgtacctcccagcacccccaatcctcttggtaactgccctgattcacccttggagggaaccattcc

SEQ ID NO: 54111 - DNA, 2292 bp, Homo sapiens
tcaggtacgttcttgtcaggcaagctcaggccactcaaatactcagctacatcactgacatttctttaaacccatactaattggtaacacattcagtatctataaaacttttcatttaaatggatggctgcactattactaaagaaaaatgagctcgccaatttagtttgtctctaaaaaaatgtttactgtgaaatatactatatttaaaagtgcgtttaactgtggtagccagcctccaagatggcccgtggtgatatccgcctcccagtattcatgcgcttgtatagtcccgtcccacttggaacagggctggcatgtgggaaccactacaatattgctgaaatgctggcgtgagactgcaaaagtccaaagactccaccttccatctctgttttcggagggaagctggctgttctgatatgaggacacgctcaagaagctctgcagagatacacgtgggaaagaactgaggcctcttgccaagaaccagcaaggaactgaggcctcctggcaacagctatgtgagtgagccatcttggaaccagatccttcagcctcagtcaagccttcaaatagatggcagcagcttcagttgacatcttgactgcaacctcatgagagactgcgagtcagaaccaccctgcttagctgctcccaaattcctggcctactcatggaatctaagtgagatgacaaatgtgtattatcgttttaaggtgctaagtcttgaggtttgttatgcagtgataagtaacctatcaacatatataggtgtaaagaataataaaataaatctcatgtacctaataccagtgtttaaatttttttttctttttttggaagccgtgtgtgtgtgtctttcctgattgcatgtctcccaatcatccttcaccaccacttccaccaccaagattcaccactagcctgaattttgagtcaatcattccttggctcctctttatggttttgccacatatgtgctatcaatatgttgttgtgatttgctgattctaagcctactatgaatgaaacaatacggtatgtgctcttctagacttgcctcttaagattttgagattcatccctgttgactcatgtggctttagttcattcattttgtcaccacgatacagttctcattgtgtgaacatacccacaatttactgttctgttctactgttggggaccctctggggattttgcaattttctgctactttgaataatgctgccatttacattctactgtgtgtcctctggtacacacaggcaagaatttctccagggtatatacctaggagaggagagctggactacggattgcacgtgttcaactcctctaatgccaaattgttttccaaagtggttgtgtacaattgactctttagccgcctttccagtttctctccaaataagaggcatgcttgttttgccaattaccaggaaagctttcaaccaacaaaagggaaagcttttcctatttgcagcatcactactacaaataaatagtactccaaagcagtgacctagacagctggaacatattagtcacacgacatcagtacagacttcagaataatgatgcaaacccagccaacaccacacactgcccatgggtataagtcaaatttgatttctagacatacagtaaattcagaggctgttttcttcctggtagattcacatactatgggcccacctgactggtatcttcttgaaggagaaaaagagtaattcacatgcaacccagccaaattcaagattaaaacaggagaatcaaataatttctgtgaaataatggaatatctatgtgtgtttttttaaacaggcagttggttaggttttttaatatttttacctataaaattgttatttattacacttgattttatttatagtaattctacaaaaaattctcaattattttctctataaaaagctgtcctttataggtttagttaatccagtttcttagatgaaaatagtaatttttacaatttaatctgcatttctaggaaaaatgtgatagcaaatgtttttatcagcatgaaatacaaataatgagaaattatctcaatttgagtaggaaggaaagaagaaatgttatcataaatttaaaagagactcatatgtcatgggaagaaacaatggcagtagataatcaaaataagttcatttcaactcaacctcctgacagttctcgtctttttaaaatcatttatcccgacaaggtagaaactgtttattcccatcttgtagatggaagaaactgaggtacaggaaggaattc

SEQ ID NO: 54112 - DNA, 1714 bp, Homo sapiens
acatgagcctgcacgtaacaggctgctcaccaccagggctgaaccgtcggtgaaatttacatgtgcaacccaagcagaggttccagggacggtgtctaaagaagaactattaggaagataagagaaccagaactgtagagagccaccaaaaatgcacaacatataacagactccaacagcaaacaggcaattatttgcctagacgtctgatacagtgccaggttagctcactgcacttgaaattttaacggcacaaaagaaccgcaattatcttttttcccagagacacatttctttgattacatcttgcatgctgaaataaaaaatttattcaaacagtttcaaggttattctttggaatggagtatttgactgattgccaaatgtataaattatatgactaagtattaaacatgtgtgtttactttgttccagaggtcacctatttaaatcaaggacttaaaaagtcctcgattgatcaactccacaaaaaagaagaaagattatttatccctataaatctacacatacacccatcagtaaaaagaccaagacagactccaaaaaaatgactaaaaagatcatacaagaaatataaatataacacaatacacaatgctgtcagtaaactcaccgataagcctccatcttcagatagatcatgtgcctttagaaaatgtgagcaatgtaaacaaacagatttgactggcattgtttaaaaccaccagttagtcacatttgatttttatcaggcctataacggtacaaaacatttcacttctgttactacaaagctggaagctaatttcaatttcctacatctccacaaaaaagcacctacagacatgtcactgcaagatgcccaggcaccacaaaaccccggaccactgcatggagtcagtggggagcatactgctctatattctccattgggcctcccctaccacccagatttgggaaaaaatacaaattaaaatcaagggagcttgctgtgcaaacacagcctgtagctcagaacctcagccccacttccaaacagaatgtcatccataaacagaaattccagagctgccacagtgagacaggctcacagagaagcataccactgaaataaatcatatctgcatatccagtgagcatttaaccagctcagagtgaactaaggaaccaaacactactgccagattttccctcctaaggtactgacaagtaagagctatcagagcaaaagatatgaaaacaccggctgttttccaacaaccctgacaggacttgctcaaggttgctgccaagtttgctggtgagactgctctgaagtattgtgaaaccacactcttgacctcaggcagtactaataccttcaactaaacactgttcaaagtggtgggtgtgtttataactgtaaaggcagaatttccttgaccacacagtgataaggcaccctctaataaaactgatcacaagaaggcacatatttttattttcctttttatttatacaaatgtatggggtacatctgcaattttgttacatgcatagattgcatagtggtcaggtcagggcttttagggtatccatccctcaaataatatacatcatactcattaaccaatttctcctcatcctccccacttcaaccccttcacccttctgagtctccattatctattgttccactctctacattcatgacaaggaacatattttaagagac

SEQ ID NO: 54113 - DNA, 510 bp, Homo sapiens
tgtattttactataatcaaaaaagatgtttgtacttgtttaaagtatagatttggaatagtagaaatattttaaaactataaaaatacaacatatatttctatgcatatttaagaatctaccaaagttgtcttcagcttccacacttggcgaaaatctgaccttcagtctcagtctggaaagctaaagagcaggatgcattcttcaaatgtcacttctggcatccttgaactgatgtatgatcaatgattgcatcaccgtgtaagtaaacatcacaacagcatgacgtcagtgatatgaacaaggcattatatttgaatatctgctgttagtatccaaagactcattttcaaatgtcggtgaacattccagatgtatcctagaatctcctgcatccatcagcaaactatatgacactcaagattttgtcacgtacttaccaaagatgttcaaagatggaatgtctggttattatataacaaagctcagctctagcattgtactttttttt

SEQ ID NO: 54114 - DNA, 4575 bp, Homo sapiens
ggaaggaaaggccacttcactgtttttacatatcactgtcactttctgcagagtaactacttaaaactgcatggcggcagcagccaccccactgctacccagcaggtcacagagatgcagagactcaaaaacatgctatatattgctgtatattttaagaggcgcagtaaggaaactcgaaataccagggcctccagagctaaacaggaagcaagataagacaagtgagctgccacaggcagaaggcagcacctggaggttcccccaaagctggcgcctccgacagcaggcacaggctgctgcttgcttgcttgcttgcttctttgcttggccacggcatgtcttcagagctggaaggctgccacctgctgaatcaccaaacatccctgggcttcccttggagcactgaccagacaggcacccatcccccgcagccttcgcccgtggacgtttcacaccccgaccaatgaaacgccccgccctctccccttctgcacaggccaaaacagccgccaacccctttccatctgggcagctctaggcaacacccatcgcgttcctacgtcaccagtcccactcctctccttcggcccactcagtcccccctgaatgtttcaacccccagtgccaggaagcgtggggagttcacagcacagcacatcagacattcgccacttccacatccagggagccaactagaaacatccccaaacctaaaagcaaaataacctgtccaaacagctttaaaggtccaggaagataaatgtcaagggagctaaaatagtcgacaggccccagaacatagaaaataaacttccctttcagaaagcagccttcacttggtttcgtaagcgtgtaccgctgaagtctgtactgtttgaaggtgaaaagaaacatctgagaagcacctgcctggattctcttcgctccctccggccatgacaacccttatcccgatttctacttcgcggcaccaaagaggaaagcagcattcaccagaacgctccaggctgaatccgttagctggactagggcactctatccggcccacgggaggacgccacaagcccgagttcgggttaagacggtgggagaggcagccgctgctgctgctgttttgcccttgacacgtcgctgggggatagcgcagaccccctctgtcacggaaaagcggcgtcctggagagactgtccagttctgggctgcgccgattcccctccaggccttgcccctaaacgtccccgccccgcgggggcagccctgcggggtctcagagccgcccgcgagcctggcgggctgttacgcggcctggagagaaggggagcgctcctcggggagggggggtcccacctgttttgtcgtcagggggcatcgaggggctacggtggggggatcccgaaatagtgggcgcctggccggctgcgatctggaccgaaggtaccaactgtcacaccgccacctaggctgtgggggtggagccgtgattggagtcggcccctgggtgggggtctccggaccccgggcgggctactgcccaaaggctccccgcctcccgatcgccccaatccgacaccaggcagccttccagcccgcacgcagtagctctgaaaaggtgcccactgacgcctcctccttcctccccgccccaacttagccggggagccccgccggcggcccgccccctccgagcccggatcccggccgccggacctccccgctgtgaccacccacgggagcagcagctctggaggactgcccgccaggtacgcgcgcggcaccgcgcgggctgcgctcacgccccctcgccccagagcagcccgcccgctgctccccggcataaggccgggcccgcgagacaggtgtccgatcggcccccgcaaccgtgaggccggctgtctgtccctgccccacgactcacttgcactggagtcacggcagccgccggaattccgctcgcggagcccccgccgcggaatgaaatccggggcagggcagcgtcggggctccgcaccccaatcgcgctctccgaccggctccctaggcgcgaggggagagcagtcagcccaggccggtccttctcactcccgacctgcccgccgcctgccgcccgcagccgctgccccgctggtgcgaacgctttcgacttgccaccgcgagcctcccgggctgccgagcatgcccagtccgctgcccgagccggcccggcttcccgcgcgacgcgactccgctcctccgggtgttcactgcggccgggggggcgggccggccgggcggggtccgcggggggctcctcccgggaccgagcgggaccccgaaccaagggacagtcgcagtttgggccccttgaattttactttcaagtaatgggaaactgaggaggcgggcgctttccccagcgtttttaggggcccactaagtaaggcctagcgggagccagattttacaatctgggacggtaaatcccttggggcagggccggagacgggagccgctagagctggtcacaaagcagggaacgcaaactcagcctgctggaagccaggcacgagtttgcgaactactactggattctttttcccaccaagcccaagggctgcgacacttgggattaatgcccaatggatcattcctaggaaacggccgacctgactattcggcccattttcaaacctctaaccatagactctcatctttctcccacaacagaaaaaaaaagcctctggcgacgcctgggagcgcgacggaggcgcaagagctctaaccgcgcgaggtgaaaactccgactgcgtcagagccgccccgccccgcctggggcccaccttccgccgcccctccgagctgcggcgaaaacccggagagcggctaggccggggtcggagcccgcgcatgcccagtagccccacgtggtgcaagtcgcctgaaggaaggttttcctctgctccccgagcgaagccccagcgcccaagttaggatggacagcggggagagctggccttcccgccccgatgcccgccgtccctggccggcccgcgccgcacctcggtggcctacaggcagcccgaggccgtgcctcccgcggggtcggggacttggcgagcgggggaaggggcgcggctacgggcccggcgtaccacgtgactgtccgcggcgctccgggcagccatcttccgcccggccatcgggccgcgggcgctcggaaccgacctgggagctggcgggaccgtcctcccccgccacgccctcccatcgggctttgggcgccggactctggccaccgctcggcacctgcctccgcctcgccttggggtataggagtcctgtaccgacccctggcttgcccagaggacaggttctcgcccgggccagaagcaaactgcggcgaaatcgagacaacagaactcaggtggcggagggtccccgcttttccccagaggcggaagttggcgagggagtcctcttccgttatccagcgagagcgctgctctggctgcctcccggttctaacctagtccctgcagaggagtgatgtaccggcagggacattggacagaggccgtgctcttccctgcagcgcataccccgcggcccctgctggtgggccgcttcgatggtgctgaggttcatagtgaatatttattgagcgcctgcctcgagtcccttgggtttcctgttgtctcgggacctgccgcgtcactatcaccctagaatttgttagaaatgcacgttttcggccccacctagacctacagaaccagaaactgcgggtggagtcctgcaatatgattaacaaagccctccgggtagttgtcatggacgcctctatatttcagctaagcagtccattttaataagctaggcagtgaaaatttccatagttttccccaaagcacagtgaggagtcagggattcaaaatgaggcaatctgccccaatgcaggcgttttattgcaccctccactcctggctcctctggttttttcgcccgtaagacacagtactgctcttctcaggaagattaggaaagtacatttgtcacatacgcttttcaagcacggctttaaaataacaactgaaattcagttcaactgcatgttttgagtatctactgggagcaaggctctgtgaagtatagtagccctactggttatgtttatcagtttgcacctaaaaggtgaaaggaaggcttgctttcttgtgatgtaaattttttcaaactaagggagtgccagaaaactgctggctgctttctctcccgtgttggtttctctccagtgctatccagaatatgctgtaagctctggacttcctgaaacaaaggtccaagtaagcatctggtctttgatgtactttaaaatgcaccccacccccacatgaaagataactaaatttttcaaaatattaatacttcttgaatgtaaatcgtgtgtctaaggtactggcataattttttttttcaaattttctatatgtttgaaatgtttcataataaaatccttttaaatttttttccatgtgtaattttaggatgatatatatatagcacatggaaaaaagcagggcatagaagtatttccac

SEQ ID NO: 54115 - DNA, 1308 bp, Homo sapiens
cgtgcctggctaattttcttcctttcttttttttcctgcgagacggtgggcgggggtatctccctaagttgcccaggctggtcttgaactcctgggctcaagcgatcctcccgcctcagcctcccaaagggctgggattacaggcatgagccaccgcttcctgccaaaagagggctttagggcacccccagaacctgagatctccctcatctgtcatctttaaagagaaggaagtcgactcccagtcgagccatagtccatttgtcccgggcacggtgactccggggtggccaggaccaaatgtgtctccttctggcttttgcaccgcaccaactaatccgcggcaggccgcacagctgccctggccttcgcggaggactaaggcgagggcggtgtacgctgctccggagtcccaccgcgggagttgaggcagcggattccgagggcagggtggggcggaatcgggagggatgcggacccggtggaacgcactgcgcagacggcgccggcgcccgcacacagctgttgactagtcttccagctctcccctggaagtcgtccaggcgccggtctcttttttctgcctttttgtttccctccccgcgagtcggcgcgacggtgaatttccgtttccggcggtgtggaagcggacctgaggagtcgcaattgtgaacaggttcggtgctgcggctggggtaggcggcagtggggtccctggctctggggcactgggaagatcgcgagtcgtgcgcgtgggaaggtccttccctggtcctccgggttatctttgctccccaggagcagcatatttcacctttaacggaggcgtgcccgggagtcgttgggagagggaacggggtgaatccctgcagagagcctgacggggagggaaggtgtccgggagacgtcgtttcctggcgacgtggtcccagcaggcgactcggacctgagccgaatctgttgaccccaaattgtgcttttcccaccaagagcaaaagaaagagaaacattagtacagcttcggaactaaaatatagtagagaagcaacataacctcggaaatcccacagctattcagtttcaaagcgttcctagtgcccagctctcctaactcccagccggtgttccttgacgttatggtgatatataaagactttctgtttccgctcgtgttgtgtgtctgtgggaagcctctgactcacttctgtgctccagtagcaccctgtgcagccttgcagtgtatcccttattgcacggaaggtactagtttggatttcctctgcaagtcagatcatagctatatccatt

SEQ ID NO: 54116 - DNA, 2157 bp, Homo sapiens
agtaatgctgattaatgcactagtgaagtttggtccattttccaaggataggagacatgtgttaacagttactttcatggttttggaaacagtatttctaaactaagtgagtaatgtaactgtgtgagtgtgtgcacacatgcatgcatgtgtttgtggcacagattttacctttagggattttgaattttctttttcaacttggtcaatttgttaagtgccagggtgtttgggtttcaaactgattcttcccttggagcctattattctttgcttgactccacagcaaagttataagagaggctctcagattcttaggcattcccaagacaacactcatgccctaaatatttttaacttctcacagaagccagtggaagtgagaataagataaaacattcttgggtaaaagcaaatcctttccaatgtgaaagcaaactttaaaattctgacagtggctcattagtttaatagtacatttgttaggtgtctttggggtgcagctttctgtaagacaggggctcaactttctctaggaactgagaagccctggcaggcatcctgagtaaatggacatgtaaacaccctgttatgtggaaagcaagcactggctgctggccccacactgcccaggaaggaccttgccctctgcaatgtcagctgttaccttggtaacctccgagggactcaccacagagcatctccatgttcttacagagaaacaaagccagaattgaggtcactttcagatgtgaaacatcattaatgttagccccactggccagaatggaggatatattcaaaacttttgagaaaaaaaaccccaaaaccaaaaaacactactgagaaggagccccaggtgcagtgggtgtgaggaatataaaatttttcacacctacgcatggccaatatatgaattaattaatcaataagaatatcatgtttctaggtctacttagagctctaatttggacttatgtggcacacgctgacacaatgagaagtaaaaaatgacagatttctttaataaaaataatcttttactaaaaaaaaaaaggataaaaaattttcagctgagaaaaaatttcctaaacaactttcttgcctggtccccttcaatctctaaaggattcagttttaattattaccatttgttgtgggtacataacaaatggggacaaatcttttaaaatgtgacctctgaaggcattgttgatccacggataggctttgctttaagcaatcagcatatgccccagaccaaaattatagaacaaataaattgagttgagtcctgattattcacatattgaaaggatctctgtctgtctctcactctcacaaaatttttgactttaaaaaatcttttttgaaatcaaattaataaaagtagattgaagactggagagggagaaaagattgctgaaaagctaattgccagtggccaaattacttaatctttctgtatatgggctcttcatttgtataccagactttctgatggaacctaactcttggtggtatcatgagtattactaagatattataacgcttcctgaccatttaagtgagtgcctagcacacagtaagatctccaataaacatcatatatctataggtagtttcaaactctcgtactaaaagtaaaaaccaaaacaaaccagactcagagagactgactcattcaagatcacacagcagtttaaagctgagccgagaccagaacccactctgctgcccagcttgattttcttgcctcgtgttttaatgagtcactcatttgggaaactctttttggtcccaaggttgtgcaagtcagattgctgtaagtagggtacacaaacatttctgtgattcaatggtaccaaaaaagggtttcccaaatactctctgcagggcgccatttctggcacaattttcccatacctgggaaagcagtagcagcagcagcagcagtagccatggtgccatcgcctccatcagtggggatgcccagggtctgcagggtgtattcggctgcatacgtctttgcttcatccacaaaggcactcagctttggaggtgtgaaagggtggctggaaagcaagtcagtcagggtaggcatttttaaactggtacaactgagtcaggtgaaaacttaaggcactatcagctttg

SEQ ID NO: 54117 - DNA, 1384 bp, Homo sapiens
ttacctaatgactttatgcattgattcactttgttacttaaataagcttatatcaaaaagaaaatatattgttcttataagtggaatatcagtatcatttcccataaatggtcggtgattataaaaacaattgcaaacaagggaaatcatggtcaacttctacatagacactgtctactaaaagctctgcactctagttctgctctcgggacttaaaaaggttagcagggcctgaagaggtgtttaaatcatacctccaacaactaactttcctcacctggaagcctgagagagaactgaaagtggaataattctctctatatgggattggatgttatttaatgatgtggacaatgtgccatttaacatcatcttggttccctgctcagcacttctttaacaatgttacaaaggatcacagctgctgaaatcctatacaaattcatgattgcaaggaactgtgatctcaataatttcttctttgcctagcttgtttgaaagctgtcttttgcatctcataatgctaagctttcaggttctgaagatgaagagtcacttaattttagttgccaatcagtactcacaaatgaatagcactttaagaaaaagtgtgaatttgtcagcgtgcgcagtccaaagtccacaagacctgctcatgcttctgcatatttgggtcatgaggtcacaccaatttttaagctgataaaatagaaaaagtctgtgcttctagcttaagggaaagcactaccttgtgtcgtttatgaagattttgaatcttatatcaaacacttcatatatagtcaacaccctatgaggctattcgaggagaaattcattgctatttggaaataatagcttctggaacatatctgtgttccttgggataatgaagttcccacaaatgttgggcacacaccccctccacaaagggattcacagaactgctccttcatttggagtctttcacaccacgctatggcatctctggctagtagaagtaagactgcttctgagctttaaaataaagttggcctgtgggtggctggggtgataagcttagggaagcatgagcctgtgataatctactggtcccatcctgttctaatgcttattgctacctatttaaagaattggtatccgtgcacttggtgaatgacctaagtccttggatagcagggatgtgagcaggtggtgaaaacaggcaatagaggaaaaagtaggacccaggagctatattttgccatgaagtcaaattcctatttctgtccctaggattttttgtgcagtggttgaaaaagaatgtcaatgccacagtgtttttccatctgctcctctcggagccagtctagatgaagccaattagtaaacctgagaccctcaggtt

SEQ ID NO: 54118 - DNA, 1866 bp, Homo sapiens
ctagataaacaaagctaatacacaccacattttaaattttatatatattagatataatgagtctatttttaaaaaattaagactacctgagggtgatttttattaaatatatatttaggtttagttgcaatagaattaaacttgatgtcaacagacaccacgttgggtggaagtgtatatttttctgaatatgctcacatatgagaatatatttttctagttctaaggagaaaatttcaggtgagaggagcatcacatatcatagtttatgacccacatcattaatgcattcttgaggaaagactcatcataatgtaattttttttgtctttagctatcaaagaagtatatgctagctttcgaaatcaggaagtacagttaagaataaaaaagtagagaaaagaatccccacacataattccattacacagagacaaagactgttcacatgttaatactgcagcacacttccttacaaaatatttttataaggcataatacaattatgaagcttaaagtttaacttagtaatattatacaattttcaacaagagtatgtattaaatacatactatatgtggggtactacattatatctcttttttctctacagtactttgataaaaacttcagtcatcaatatccaaagatgtttgattattttaaaaagatcacaaagcatatttccaaacccttagaagcaggcattattgcatcagttgctacataaaagcctgggtcacgttattaagtaactcacaaaattctatttttgatagctgtatttgtcctgctagtgataagagagcacaaattcatcaccctctgttttttgaattcttgttctgtaaatattcaacattcaatatcagagactgcaaagatacagcaaaagtaaatccttcaaaccctaatctataaaattctaaactatcattttatgggtatgctgcttggattgtattaggatgtttctttatcttaatttttgtacaaaaacttttttaaaaagtaaacttgatgttcttaatgttgcctttctttctttctttttggataatcatattgatcttttgtataatccagagtaggaaggctgaagtattagtaagactaaaggattttccctaagttacaaagagtttgaagttgtgtttctacatatttaggctaccctttcgaccaaatagtccagtgtgctaaccagtgactagattcagaagatactagaatcacaaaaatcatggacaaatagttgggtattgcgtacctgatcttccaggagattatggcctggagatgttaagggactttttaaagatcatacaactcatatgtcatagggactagattagattacaggccttctgatttaaagtcttggataattttccacactctgtagccaaaatcaggagggattctttaattcattcaaaatgattgagttatataggtatttacattttgattagaggccttaggtatagataactagcttttggaacattaagcttctacattattgaagcacttctgattcaacagtcacgctgctagtcaatattacttaaagtgaatcatgttacaaagtttaggttccaaaaaaatgtttgtcacatgctctaggatgctgatctctaaaattgcaatcttaaaagtcacattataacaactctcagttttctgagtctaaccaaaaattttggccaataacaacagaatcttaatctcacaagttatctaaactgtctgtgccttgttttcttcatcaggaaattggggataaacatagtagctatcacacagtgtatagtaaggactagatgagttaatatacacaaagcagatagaatattttttgtt

SEQ ID NO: 54119 - DNA, 4472 bp, Homo sapiens
cttattagtatttctctcttaatattaccagggaccaattcctattgaataaacaaacttggaaaatgttctccatgtgattgttaatacatatatgcataaaactccacatataaatctatataggataaaaatcttagcttacatatgtttaaaagaaatcaaattagagctctcaagataccagcatatcttatacaggacgatgattttttacaaaagggcatgttttaatttttggattgcatcaatcaaaaatattcaatacaaaattttagtttattaaattaaaaattctaagtggtcattaaaactgataacctagaccgggcatgttggctcatgcctgtaatcccagcactttgggaggctgaggcaggcagatcatgagttcaggagttcgagaccagcctagccaacataatgaaaccccgtctctactaaaaatacaaaagttagcctggcatggtggcgtgtgcctgtaatcccagctactcgggaggctgaggcacaagaatcacttgaatccaggaggtggaggttgtgatgagctgagattgcaccaccactccagcctaggcaacagaacgatactccatctcatacaaacaaaccatcatcaacaacaaaaaactgataacctagttggagtagatttgatgaaatgaaatgatgaactagctttcctggttgaatcagcagcaaacatttgttaataactctccagattttacaggatcaggccaaggagcagatgggatacagatttctaatacagaatgtcaccgcaagagtgctgctccttttccagatgcttttcctgggggcagttggattgtgagagctgcactttgcaggagcctggttactgtttctgtgaataagataaaatggtgtttatcctctgtcgatcaatactgtcttgtttgaacttattgagtcattttagagacacataaggtaatgaaaaccattgtgcaatagtacccacagtactactcagctttctaagggatgacaatttttaaaagacagttactgaaacagatttttaacatcaactgcctccatgatgaaatgagcatgcactgtgtcagggtgtcccatgggtttgggtgaaaaggtgttggggttttataactaagagttttcttcagcaataatctctaaaataaaaatatactctgtgtgtgtgctttaatactaaaaaaatttacagactgtctttctctgaataaatggaatagtgctactatttgtgattaatcaaaattttttatgtacagtttgtgatttcaactttattagtattgttttgaaaaacaaggcctaataggtatacttgggcaattttagaaaatttttctggaggttgttacaaataggaaaatgaaaagggaagtggggtttttgctgaattcttaagtaccggggaccacatttctctcctttgctttatcatctaatttaaacttcacaaaatactatgggtcagatcttacccccatttcacatttgaggaatctgagattcagtggagtcaaacaatatgcccaaggtcacaaacctagggagttttacaataggcgtttccacttagctgtgtcgaggcacaaagcctagtgttctttccgtaattaattttaaaagtttctcagataggcatagtcctatttggtggaagactagactctaaagtcctttagatttttcaactgtgattatttcaatggattctgattgttctgaatgctggacatgggctataaaagcgatttggtctttcttgttctgtattctgagaaatgccaattttgagagatattgatagatgttcctgaaagaagatgttctgttgtaaattaagcccaggaaacaaaacgttgcctactctcttagatagttgtgataaatgacaatatttgcatgtgtcatgagtccccagtgctcgagcgtatgatataatggttacgtgcttgggctctggatcagactaccagacaaaggagcctggctctgccacttgctaactgagtagctgagcctgttaggtaatttgtctgtgcctccattttcccatttataaactgttataatagtatcacaccatagagttgttccaagaataacatgagataatgcatggagagaacttagaagtagacccgataatatagtgcttcacagatgcttgttatcattattactcaaaacactcatgtggtaacaaaacctgctataacttttctaacactgtttcctcaacttacttgacaatggagttgcttttcttttgagccacatttattaacatccactgaatatagtgtaggaaatgttgatatttgaaatgacataaaaccaccttggcattagtgcagtagaaaataagaacaaagtatttatagtgttttaatatccattatgtcattttataatgtttgcccacaacaatatttcttttccttgccagctgtcttcttttttcccttgaaatcgataaatagtaaaatagaacagtaaaatgttaagagttgtctgaaatgggcagagtcaatgttattccagaaagtatgaaccttataagtcatttgtctctttctctgtatttagcagggcaaaaccttactgctttgacaaataagtgatatcactgtcatttccagacctgtgctcccattgcatgctccatagcacacgttataaagaaaatttcagagcagaccaacacattttttgatgctcctaaactataactagagctgaatttgccaaaatacgatctataaaacactaatcctgcacaatgtgcaaataatgctgtgttcttcatcttcttggagatatacaatacatatctgaaaagtcctatagtaaataaaattgtttagtttggaatcctttcttcttggaatttacataggtaatcatgacaaaaagtcagagagtttagggggtttctggtaaaaatgggatatttttggtaaatgtccagattgatttctttctttagctaaaataccattataatgtttttggagtacacaaaaaaaatatgtgaaaatatatccacctcagcacagttgcccaaattgtggaaacaatataataattagccattccaaggttcagatttaacacactgaaaaccagtcattttccataatatttttttggtcagaatcaaaagtgaatagtttaaacattcctttggttagcaagataatggcaggcggaatcgcaagagttgtaccaagactttcttttttatggtggtagtagctctggagataattgaatatatgaagtctaaagtatgataggaattatgacccacacacagaactcaaaatctgctggtgatgttaatactatttcttttgttaattatatttttgtttctcagggtcctaggattgggacaggcactcaaccacaactctccctgctgtctggttagagctaaataaacttctcacaacattggctccactcttgaaccctccgtggtaagtctacagaaatttattaaatcctggcagctatctcatttagagattatataataattccaatatattcttttgttttctggttgtttcattagtctaaaaacaagctagataattctttgaattaggctcgataacagaagagggtaaaagctgttttcactgcattcccactgataccacaatacacagtttcacagagttgaaatagaaaaaagcaaaacacatggatcatacctgagtaatttcagagatccccacccggaaaaggtttccttgattatggcgaattcaacgtgtcactcgggttatgctctaatcgtcatatcaaactccaaaggttcagtggctttaggtttggtttacaattcctgggagttaaactttaactcaccctgtctcttgcatccatgcagccctttgaccagataattgggtcactacagcccagatataatctactaaaactatctttgttatttgtttataaaattaaaataaatgttgtaaaaatgttggggtaaatattattttgaagatattttattggcttatacgatatatttaaaaagtaaaaactcactgcaattggatacctaagctttcctttatgttacttcctttgttttttactatgtcaaagtgatattatagctaaggtaatttaggagaatatttctttgttttacactttttatatcactatattacatggagtaaagtgtggagttttaggtcaagtacgtagataaatgctggcttacaaacagaaaatacacaaagcatttatataacaaagtagatagatttaggccagatcaggttggggaaagcatacttctttgtatacaagctgctcatttagattttaagaggaggccactgtgtgagaagcacaataatcagctacatactggggttatatgatagctgatgctattgttcattgcctgaaatctc

SEQ ID NO: 54120 - DNA, 414 bp, Homo sapiens
gactgtcttctgatcctgttttacagatgatgagaatcacttggagaggtgaaatgatagagctgggcatactgctctctaaagcctcactaagagcactttgttagtgatttttggcactagaaaagtgggaaacgggcccaggtaggttatgactgcagcatgaggaaccccagcacacagaggacgaactacgcaaacttcagtagtcctcacacagcctgcctctctctctctctctcacactctctctctctccctgtctccctccctccctccctccctccctctccctctctctctctccacacacacacacacacacacacacacacacacacttgctggaagcagactactataaaacctacatttgaaatttgacagtaatcaaacaggggtgataaattaaga

SEQ ID NO: 54121 - DNA, 1481 bp, Homo sapiens
ggtcctgggcagagcccagggccagggccagggccagggccagagacagacacagactgagatttgcctgggatcagtggtgtgacatgtatcttccgatgcagaattttcagagcaatctctggatccatgattctcatcactacttgtgcctgcaacagtgcataagccagttgtggattttgaagtaacatgtttcgagcttcctggtggctgttttggacacagagcttcatctgcttcatcagctcaaacatctgctccggggggagactggctactgctctggtaatcgattcaggggcatcttctggatcgatgggatccccatagggtgagtcaataatgggcgctgcaggcccaaggctctttaactcctccttattcttttcactggcagcattgtccacccgaagcgctctcccactgaactcccgcccattgaggttccgcatggcactaagcgcggtctcctggtcttggtattcgcagaagccatagcccttgggttttcccgtctctctatcgtataccagccggaaactgacaacagaaccaacctccgagaaaatgtcctttaactgctcctcagttgcctcatatggaatgttccccacgaacacggaacgcagtgatcgatccattgccgggtctctcaccgccaaactcgacatgattccggttgtgcagacagccgatagcggattcttcgaggcgtctgtcctcttgcgaccgacacttccgctgagcaacggaagcggctttcaagatccgggcagaaactttactaattcgcttgaatcgttccgcttgcctgtggaacctgcatcccactaacaacttatctaatgctttcagtccctgatccttcatggttctgtcagcttcttattacagagtcgcatgattcctttcccatttcacgttccgctgactttctgtggggccccaacagccccactacgacacgcttggtacgagatgaccacagtaaagatggccgcatagacttcaccgtagtaactgggaggggactcttcccttgacgtcaaaggcggttttgcttccgttccgctggcgggaaaccgccaaccgaaagcggatttaaggcggcgtgtttttcgttctgacaaagtattttcatgtggccttttattatagtatagttaagctagatttaaaatcacattccagactgagggaaaagcgtagtcgtttcagcacatttgagatttgccccttaaactaaaacagtattatatctcctttttagaacaacgtttttggaaattaactgacaagaaatataaactgaagcgtgtgccggctgggccctgcccccattctgttgcttcctataaccgctgttaatggatgggtggcagacccttctaggtttttcctgagcacacgggcagccgtcgtgctattcctaatattacggttttcttccttaataacaaccgatttcaatattaatt

SEQ ID NO: 54122 - DNA, 1204 bp, Homo sapiens
tcatccatatggctgttggggggagaggggtggtgtaggggagagagagagagagagattaaaaaaaaagagaaatactagttacaaggcagaattatctttctgattgcatgaaacccatagatcattttctctccaacagaaatcttttcagtaacctcaatccacgttttggcttcattttttattatgctttaactggattatggaataaaaccaagtttcgatttggtttctgttagatattgtttttcgcaaagggattgtagctttttcctattaaaaagtcaaatttaccttcagtgaaaacactaaaagaaaattgaacaggaatttcaacatagagtgattttgtcataacaagttagatatacatgggaaagttcagcaactctcaaagtgctttatatcagtggtcctgataaccactgcgtacatgaatgtttacacactaagaaattgacttttgcacttaaagcaaataaactttcaagtagttatatattaattcggctctgaatataagtcagtcactatgttatgacacaaagaaatagaagtttagtcctggccttaaaacttaaaagtataataaaaaaaataaaaataaaaataaaactcttacaaaacaggaaaaaatgaaaaaaagaagttcagttgacttttgatagctttacaaactgagttggcaacaaatgtgttcaaatgtgaagaaaatcaggaaacatctcacctgaatctgtttggtaaaaaatttgttatgggtttatttaagactcgtcatggaaacgtcataccttatttatgacactatgtcctaacatgcagactcaatgcaaatcttagcttctttttagtgaagctcaaggaaaaagtcttggtgaccaacataaggaagagtccattttaacatagcagcaatgcattcatgaaatcctagctggaaccagttcagacagggacataggatgtgctttgttgctcattagggaaaaaagagccatttatctcactggacttgtggggattgggagcaggaagctgggttcaactaagtagcttagtagagccatccggcttccaggaatgggatagtcactacagagatggagcaggactctgactcagcagtgggagagactggaagagaggcagtggctactgtgaaagaacacaccaaccacagagcagagacaaatccttt

SEQ ID NO: 54123 - DNA, 1118 bp, Homo sapiens
attacagattaattaaactagataattaatgtaggatgcaaaagatagggcctcatagtatatattaaaaatattatataattagcatgactactactgctgctgctaactactactactactattattgctttgttggtgctgttagtgatcatttttagtgattgcccacaaaaggaacaatactggatatgaggaaattgatataatttatcttttcaagcatactgtgggcctgtgggttgcagtaaaaagacaaggagggcctgagtgatatgacccttcagatagggaactcacagacggccagatgggaggtggagcaggggacgtcattccactggccatttttcagtagcaatacacaatcttcatcagaaccagcattgttgggttcaccctcgttccagtttgtgtaggtcagtctatttcctgtcagatccacaaactgcccttctgtcttctcatcagtgatgcccaggaaggcttcctccttgatgagattctgaatggctccattctctgcagcattcctgggggtggccacagaggcctggaacttgacacacaaggccttcactttttcaaaggtcattatttcaccattggtcaggaagaacttgttcccaacttgtttgcccagagagaaggtgagccctaaaatgtgaaaaagtgggtgaaactgactcatccttaagcccaactcaaggtatttctcaagaaaaagtcttctagagtacagttgccggataaaatatagtatgtccagttaaatttgaatttcagacaaacaatgaatattttagtatatctcccatataatttttcagacacacttatactaaaaatgtttttcagctgaaatccaatttaactggtgctttgtctttttatttgttaaatatggcaacccaaatgtgaacagacagactggtacaaaggcctctctgtgctttcagatcagaattctaaaagacatataatttggacttctgaattctaaattgttaacttgagaccaaacaaaaaatgtctgaaaatatttgccccaggcaggttagaccccacggccaggtctcaataccagtgcaacaaagggatataagtcccattttcag

SEQ ID NO: 54124 - DNA, 2529 bp, Homo sapiens
tggccctttggtcctggtgacccagaaggccctggatttcctggaggccccaactttccaggggggccctgtaagcctctgagcccttggcctgttggaagacaaaggaaatgtgacttaatatctatgttcttgctctctctcttcaagagtttgatgcccaatcccttctcaggagaaaggagaccttgacccaggactgacctttctgagcactgctctcaataactgtatggtgggcacctgagagcaataacttaagaaataaagttgccacgtggaggttgctgcagggagggtgcaaagtgaaaattaactgcatttgtttttaccagtagttgttgttctcctgtccagcccactgctgctggatctccctgtaaacagattcccccagtaaaacctatgtttgtttgctgactccatctcttctttggcctcttgaacctggtgccatccctactgaagtgaataggggtctgacatgacaatgacccagagaagaaaaattcatcctgtgtcccacgggatggcctgacctgtgggccactttcctgggctggcaagacaactattagtcacaaactgctgtgtggaattctgagatgccagagaatgagagctgaatctctgttttgagttacagtatagttgagaaaaatatactcaaataggacatcagtctcctcatatccccaggcagtttcctctggaaggtaaagaattgcagagacagaacagcccaacacgtacctggttcccccttttctcccttggtgccatcacgcccatctttgcctgggaagccgttgatgcctggagagctacaggcaatcactgcagggcaggtcttttgggcatcctcacaggtcacagtttctgagtaagacgctgccaccatactcaggagaaggagagggagtgatggaaacagggacatggtcctcaccttggtgtgagaaaactcagggaaggttaatctcagttaatgaacacatatttaccgagcatgccctctgtcctacaatctgggtgcaggctatatagaaatagatgacccatccctggcctctagctggggatttggaaaagtaaacattccttgtgacactgcgtgactagtactttaacaaaggtaggcactatgatgagcagtggggatcctaaggaggggttcatctgtgcctagacacctggcgttgctgctggaagactataaacatgctttcggtggcagtgagaacaaatgggaccgtgcattgccagctggcttatgcctgttagcttagggaatgagaatgagtggaaacccaggtgtctgtaggagcttcctctttctctccatgtcctcttcgggtccatctgccacctgaatcccatctttgtatctgggcagctgattcccctccaggacctgttaactatcatttactcattggcaggccctgagctgaaagctggtgatccaaagaggaaggtctcaacctcagatcaacctcaaccttagtcaccaacccagcccagaattaactggagtttgcttccccttggtgttttagacaggcttgcctgggtaagcattttctctggaaatttcttactacgttggccctggcagagtgctaaatacctctctactttctggcaggaattccccatgttctgtgagtcaaaaaccactggcaattagaaaacttgccttgaatcctcctcccatttctcagtattaacctttcatttgttcttcagagctttcttccagctattgccccctaagaaacctcagcagcctagccccataggtctaagcctccaagtttccctttgaaaacaaagacagtctccactgcagatgaacagataatggaggaaagtcacagatgctccagcacaagcagaaaaagagacatcctcaacctgatttctgctttccatcccactccccccacccctagaaagcctcctccatgcctccagggtcatgtcagctccccaaacccttgatccggaaacccagatttattcaccagaaatgacttactggtgtttctgcagagcagggactcagtgacaaggacgctggccctctagcctggggctctggcagatgcctcagagtgagggaggaggctgggctcagcaatgtagggcccaatcaaccttgtgaacaaggatatcctgggcctggccttcaactccagattaataaacagctcttctcagaactatgagaaatttaggagcctccaatacagtgctcggcagctgtctgctttaatacagcacaattcctctttcaattgccatccattttggcaaatctcattgctgaactaccacagctaggttcacctagttagtcctgttgacatccttgtttccaacagaaaaacaaagatactcacaaatgcatacacatgctcatgcacaccaactatacacacagacacgtgcatgcacgcacacacccatccatgaaaccacatagacctcttgctgccattaatgcattaaggccattcctgcctc

SEQ ID NO: 54125 - DNA, 1735 bp, Homo sapiens
atcatgggtatcgtgtgtgttaatggcttgaaccatcttgctgtggttaatggggacaatctagaagggatggaagaatacttttacgaacatagttcatttgattctcaactacattactgatatggctttcagaaaaatgccatgtagcttggggtgttggggagcccatcctgagaagttcagaggctgcggggccatgtggtgggggtactatggaggcctccaaacaccaaaagaaatgtgagtaagatgcatttccaggtcccttccaattgaagtcttcttggcttgtggagggactggcttccttacttcctgctgacctgtctgctgtgcctggaaaaatgtccaggatggtacagagccacatgcctaaagccatcagtggatatcaggagatccagggcctaaagaagacagggcctgagaagacttgtttcccttcttattctttagcagccagagcttccccctgctcctgctccagtggcagaaggtgaggtgaggtagttgactccaggtcactggcggtgctggctttaatcacagtgcttgctttcattgtttacctagtccagaggtcaggaaactgctctccagaccctgaaatttcctagaactgggttcagagggtgtgggtatctgggggaaagtcaatctagcaattgatccggagattggagtgtcacccagttacatcctgctctccagaaggcctttcccaaaaggagaggccactctccacatgccgcagcctgaatgtctctctccacacgaatgcccactctgcactccaccccatagataaggccactgtgtgcatttgttctggactttaaaacccttcccagccaggcgtggtggctcactcctgtaatcccagcaccttgggaggccgaggcgggcggatcatgaggtcaggagattgagaccatcctggctaacacagtgaaaccccatctctactaaaaaatacaaaaaaaaaaaaaacaacaaactagccgggcgtggtggcgggtgcctgtaatcccagctacccaggaggctgaggcaggagaatggagtgagcccgggaggcggagcttgcagtgagctgagattgcaccactgcgctccagcctgggcgacagagcctctccgtctaaaaaaaaaaaaaactttccactttcctaacactgcttccattctggcagcgccacaacaaatccacctcaccccaagaggctgcagagaaaactgcctctctgacctgcaggaggactgcctggtgccctacatccccttttttgtagactagggtgaaatcccagctctcccacttcccaacagtgtgaccttattcaagttccactgccttcatgtcctcagtttcctcgtctgggaaagagggcaccgctgccttggctgtggagtggtgtgtccttaactggtccacattcagagtgcatggcacgtggctcaccatgacagcctgcttaagaaaggccttcattccctccagggtgactgttcaagagtcttctcagcttgggaagcagtgttcttgggtggctccatgtgagaggcatggtttgagattggaaaccagaaggcttggttttgtctcatgaatatgagcttagatagaccccatattctggccgaacctcagttttacatctttcaaatcagattttgaacctcattcccttttccacagagctgctgtgagtaggacaatagcaatgagaat

SEQ ID NO: 54126 - DNA, 763 bp, Homo sapiens
tatttggtaacagtctgcacaggtttgtagcctaggagcaataggcgataccatatagcgtaggttatgtagtagggtccttcatctttgtttgtgtaagtacactctgtaatgtttgcacaaggataaaatcgcctacggacgaattcctggggatgcgtcatcaagcgaggcatagctgtggtttcttacctgctttctctgtggcttccaccttccatccgtaaggctactttccacagagtacacagagtcatctttttaatatgccgaattacataattctatgctaaaccctccgaagatttcccattcctcttagtacgtcagtgacggtagatattgagaccacccgatggaagaagagcgcgtaggatgtgttctgtgacctacatgcctatgtccaagataacaaaggtcagtacaaatgggagtagaaggttgtcatttcacctgttatcccctagatggtagtgtggaaccgcgcaaacttctacctccgttgtgatttctatggggcattgatggtgcagttattttaagttgaatcttcaggcagcctgaactaaaatcgacaggagttcctactttttttctttctttccttttcccgctccctttctcctttttcaagagtgctaattgtagcttcgaaaacgtgcgcgcgcgcacatacacacgcatcccaaatggcaaaattctcaaggtgctagattctctcagaaaagcacgtctgctgttcctgaatgtagactaaacaggg

SEQ ID NO: 54127 - DNA, 1164 bp, Homo sapiens
atctggtaaaaagcaacactggagaagaaaggatgataagtcctgttcatctactgctctttggtaaaggatatggattcctcttgtcaaagtgaaataattgaaaggatcagaatcaaatataaaagaatttattaaattgcaaagttaggatagccatatgggaaacacagactccaaaggaatggagtcagtgcttcaaacctgaaaagttaagcttttgcttacataggcagaaaacaaaaaaaaaatttaataagattataacattttccatagaaggctggtttatgagttacagcaatttggctggttaaagctgggtttttttttttaaacatctttttttggttcaatttaaagagtctatttaacattccatcttagacaatatgatagttgtgaggtttttgtgtaagagaaggggaaagttaatctataatgaagatcaacgcttaagagggaaagggccttccctggtgccctttagtcttataacattttacaaaacagtgtagataaacaaaaggctgatctataatcagaggaacaaaggttacagctgcctatcacatgactcaggacccatatttacattcccttaaggctcaaaataatttgaagttccaacagctttaatttttaattacttattttcacactcttcagtcatttgaaggacatgttttccttttctgtctaagattgttatcattgaaaaacaatacatccagacagaagaaatatgttttatacaaaatatttggaaaccactatcttatagagcatactactctgtatgttttgtagacacaaatgaagaggaaactagtccctgactttgtgatatacagaaattaccatatagaaaacaaacttttaaaaagctttgccttttatgtaggtcatgaaatttaaaacctaggtccttggcagggtggattatttccctagaatatcagaggaagtgagaccatttttttctggccactgacaacaagttgtaatttacagagctagagatgagagagctagcctttgtagccatttacatttaatgctcagttatatgaagttacgtgcttcaaacttgcatacataatatgctattatagactatttatagttcagatgttgtttacatgagtgaaataaagaaaaatc

SEQ ID NO: 54128 - DNA, 554 bp, Homo sapiens
taagaaggatctattcaaatattttgctgattttttctatcaaattgttatttttttcttatagagttatttgagcttcttgtatattctggttattaatcctttgtcagatgcgtagtttgcaaatattttctctcattctgtgggttgtctctttactttgttgattgtattctttgctgtgcagaagcctttttacctgatgtgatcccatttgtacattttttgttttgattgcctgtgctgtggggtgttgctcaataaattcttgcccagaccaaagtcctggagttttcccaggacagtctgttttcttgtagtagtttctactttgaggtgttagattgaactctttagtccattttgatttgattttttaatatggtgagagagaggcatctagtctcattattctgcatttggatatccatttgctccagcaccatttgacataaatggtttcttaacagtcttgtgcaaattcagccatttaatatttttgttgaaaatcacaacactggccattgcaattggatgatatataaatattagtt

SEQ ID NO: 54129 - DNA, 503 bp, Homo sapiens
agggccaacgcttgtgcctgcacatggggagtcagagcacgaacttgcccctccacctgacctggtagcataacacaatggacagggacatttgggagctccatggctctgcccgttggctgagacactacagtaccacccctgggtaacataaggcaagcacaaattccactgctaccactacagctggtgctgttttgcaagtgctatctcctggctggaggccaactggcacagcccattacatctacaggcacagtaacacagtgctcaggaaatagaaaatgtttgtgtgacctcagatatcaccactgcctgcttcaccctggctaaccagaaggtcctgagtctatccacatgaccagctcattaccactacagctggcatttgggaaagccgacacacacaggctatttataacaaaggaaatccgagtctacatcactctcctttcaccccatcagagctggtactgcctctatgagactagaggacaggtcac

SEQ ID NO: 54130 - DNA, 763 bp, Homo sapiens
cattgacttaaataaaatgttcttgtagtaattcctatcatgacttcatgtttttggggcaggagctgctagtcgtttcctgcccacatgtatgcctcttttttttttttttttttttttttttggcacctttgggctcagccgcatcttacactcatatcttagctctgaaccagaatattgagcccaaaaagagcccattcctcaaaagaggttgtttcagtatcaactggtcttgttctattcaaatgttacttaatctcaaagtgaatatgttcagagctcactgccttctgggtctggaagccacactgtttactttttcctatgatgtttgttctctgctgagtgtcgaaatccctccaactgccttttctaagatgcaggctgttccctttcacttatttttattgcccattttgggctctttatcaacgccctatattataaaacatcagcaaggactgtgtctgtgcttacgtttttgaaggatttatgaatctgtttttgacatgttggcatgattatgcaattttttcaggtccaaatgatactatactagctcatgatcctggattctgaaaccaagaaccaaagtaaacacatatgctagttcatactgactttcattctccctaccaccctgtctttcagatccaacctaaggtatttgattactggcacctctcagctactaccacctgtaatatagtatttcgtcttcctaaaacatgcattcttgctataaatgacaagaacacta

SEQ ID NO: 54131 - DNA, 866 bp, Homo sapiens
gatgagaagtgactgggaatgtgtcgtgttgggacaagaagacagaagtgaaaccgtctcctagagcacatcctgtggattatgtggatgtggggagcggcgaacggtcccccaaaggctgtactcctggagcaggcaacagacacctcaggaacctaagacgggactgcggtgaggatcacttcacggcagggtcgaacctcaacagctgtacagggtcgagggcaccaatcattacacataggggcccacaaggtcctcccaggcccggccccagctgccacttagccgcaaacacttactctagggctgcagcttccgcctctgtctccgctgcctccatctttccaggcgccgagttcagctgccttcccacaatccctaagattactttgaagtcacagtcgacttcgcgccggggcaggcgattggctgcagaggttagtgggcgggcatcaaggaccattgtgcgctctaattggcaggcgcggattcgctcgttggcgggcctcgctgcttggcgcaagcgcggttatggctaggcgcgcacgggctctgcgcctgcgcgctagtccttacgcggtgccagagactataagtgggcttgagctcgaccgcgcgcctgtggaagttctttctctactcgaaaaagggaaagcatttccttgagtttgcgttttaagggaaacttacagcattgacactttatttaaaatattcactactgctgtagaaaaaaaaaaacaaaaccccgaaaaacagtggggctgtttctaagacgctgggaatcagtaaagaatagtgatccgggagatacaggaagcaaatgatctgcgctcaaaaagcgagctgctttcaaagatatt

SEQ ID NO: 54132 - DNA, 1491 bp, Homo sapiens
ttggctgggcaatttagaattttatttttggtttataatgggtttgcactgcccctcatctattgaacaacagaatcgctagaaactattgttaaaagtctcagtatcagtgcaaatgaggagactcagagagaaggaaagctgagagatgaaaggagcaccctccattaggaaggagagcaaagttgggctgaagacagattctcatcaggaaaagataaccctactccttagggactgtagtacagaatctccatactctagtaaactctgacatttgttttcctttcttttgctggacttgggcttgttcagagcaccatgctgtggcagacagattgacactcccctcattctggtgataattaaccttggctccctctattaacagcaacaaacacggttcaaagactgatccagagcaatgaatcagcaattatttacttacttcttcccagcacagtagaaatgttttgctgttactagagaactcaaaattcaaactgtataatacaaaattgttacatttaggccataacgttttggttctgttaaataatacagaagtgagactttaaacaagaaactataaaacttctggacactttcagtgatggctaatacatgcaagttgccacttaggcctctcaaccagggcatacatcatgatggatcttctcactctgtctcttaaacctgaactaggcttttactccctaatagttatttttttgtatgaaaaatttgccattgctgctctcgaccatgcaaatgtaacccaaatacacaccaggcatgatatagttaaaagcaaaattatatgttctaaaatatttagacagtggtcaagttatcacatagtataaaaaataatatagaataagtcactctttcatcaaaccagcaggctttttcttaccatatctaaggaagttcaaagacatttactaatgcttactcactgaatcaagtgaaaaggaaaagctaacccaagaacttgccacaaagattttgcaaaacatgagtatcccatttattcagggacattaaatgattaaaactaatatcctgagttaaaattaccaggggacatatttaatggaggaaaacaaaggcttcaagagaaatcaattgtaaaataatcaatactaaaatatgtactctgagcaagtcttcatgcaaagagtaagacttggtaataagggcccaaagcaaatacggacatatcagcagacattaacctgctaggagaccaagaaagagacctcaagtaaacgagcattgaaataattttttaagctaaactacttgagaaaaataaagcctagtgaagacaaaaaccagcactgatttcagaacaattttataacttttatacttcattgtatatgaagactgcagaatgtgcatagctattcagagattaatttcagtaattttataatgttttgcttcataatatcacacatttcagaagtcttctaagatttc

SEQ ID NO: 54133 - DNA, 3954 bp, Homo sapiens
cttcatatcacatatattatgttcttatatatgcaataagcacataatagatatatagatatagatagatagatcacaaccacagcattttgccctgctcccacactgttcttgttctttccattttaaatacctgtctctcttctctcatttcccatcctccacccattcatttccacatgtccaaatcatactcaattttcacagtccaatggaatttcccctaaaagccctcagcattccagtcagaaatatacttttctatctatgaagtcacacacagttatttctttccttgttacagcactttttatcttgcttacctaatctggataaagagataatatttgctaattttttggaattttattttgcccagtggagtgtgcagacagggcacaaaagcagattctccttgattagaaaggaaatttataggcactgtagaagagaatattgaaagtgaagacctggcacttacgtagctaaaaagaaaaacttcagaaagaagataaatggcttactagaggctttttcatgtgccatgtgaatgtcttctccatctcctcaaggaaactttaaaaaatgacactaattaccaataactttggaaatgttttgtggtgagaagcaagatgaatgccacaaaaagcagatcagactttaagatggacaagaagtaaaagataaagctaccagcagtgctgagatgacaggtattattcttgtctgtttcctttttaaaccctaaactactagagataggagagtttctgcaggaactttggatccctcacatttcctaggcatgatcttttgcacataatacaatagcacacatttgttgagtgctttcacgtgctagatactataaatgtaatttgtttctgtgacacatgagatgtttctaaagaaccaaggcaatttaagtgaatcacccaagttttataaatgctaagtggcagaaagaggatttcaacctacgcaatttgacaccaaagcttatgatttaaccatccagccacatttaggccctagtatgtaagcagttgctgaatgaatgaaataagtaatattcagtgcttactaaatacctgttgatgggttaatagttaggattcattcctggcctcttgatgtaaaatcatagagaaagactagatattcccttccagaatactttcatggcagagatagtgtgttagtcagaaatccccagagatcctattcaggtcctagtatttgtcttccctgctggtatttctattttcagcctcaacaaatagaccatttgtgcactcaggttgccacaaacaagaggacataataagcagttaaaatgtataatgatctcacgcccagcataagccaaaattctgaagaaaattcagattcatggatactagcagaaccagccaagtgaataatttgtctatttgatgcaaaggcagaatagtagggggtgagctctactgaggtaccagtgattggcataagttatcctcctcctttattttttcagttttcaaccatttgactattactaaaaaataaacagttagggtataatatacacagagacaaaataagtcaattcaagagtgtaatgactcaaatagtaaagaaagcaaaaaaagaaagaaagaaagggaaattttggatttgttctgcaagacaaacataaattaaatgggaaaaaaatagtagctaaaagttaggtctgttgtttttcctgattggactatttagtcagtatggatattataaaaataaaatggaaagatacatattgtctctggacctcatttggtaaggtatacataaaagtgaaaaatacagcctgctaacaaattactgagtacataaagagaaaagttttggaagtttggaaaagtttggaattgtaaattagtaaaaattgccctcaaagaaaatttagcacttattcaattcaatgtctaggttttatagctctcagtcctctgttatatttttctacacttgtacaaaaattaatgatggccagggacggtggctcacacctgtaatcccagcactttgggaggccgaggtgggtggatcacttgaggccaggagtttgagaccagcctggccaacatggtaaaaccccatctctactaaaaatacaaaaattagctaggcatggtggcgggtgcctgtaatcccagctactcaggaggctgaggcagggagaatagcttgaacccaggaggcagaggttgcagcaaactgagatcgtgccacttttactccactccagcctaccagcctaggtgacagagcgagactccatctcaaaaaaaaaaaaaaaaaaaaagaaaagaaaagaaatgattatcttttaaatgaatagtttttattctactgctttatgtccaagctagtaacaatttccatatcatgttttctataaatattagggccgtattttcagagataaggcttttttttttaattctaaaaagaaccaaataagaaaagctgggaaattgtattaaataatggctgacaaggtatttttgttttcacttatggaaaatgaagtcataaattcctgttaagaattaactttttcaaaataatgctatggggcaacagtaaaaactagtaatgttagaagaatgtaataaatgtttgactttaaccatgagaacattccagaggaactagacttccagggcaattctctttacacagaaaattctgccttgctctgtagagaaacaggaacttattagccctagtcattcaaacctaaagaactgcttaaatccagaagagatgcgagcagtcattccctgggatgagaggcaagaatatcttgctggttgtggcactgcgtgaaatcattgcctgatcctggtccttatagtctgatacaatcagctgagactaaacctgcattttatctgtgtattgatactgtagcctcccacatggattgaacattcagacattaacagtcaatctgctacaaaaaccacatctctattcataccccttgcccagtgtagatccaaaccaaacccaagattaccagatagacagcaattttttcatattcaatgacgtggtttaaatactggcctctataagcgtgaggctactcacaaggagacccattgatccaatgaaacagttactacttcagttgcactgacaagataactactctggatatcattaaataagaaacagcaacaattcagaccaggtcgacggacaagcaggacttttgagttgccacaataagtgtaagacacctcgtgcttactaaaatgcagcttcctcggccccagttcaagactactacactataatttctaaatagcttgttgaaattcatttataaatgtttcatattcatatcctaattttagaaaggatagagattttaacttgagggagagaaataaagtcctatgaattaaactaattaagtaaatatcctgagtaaagttaaaggatatctcctagcctataagttcagctgtatcgtagtcatagatattaattcatctaaaaaaaggtataccctggccaggtgtggtggctcatgcctgtaatcccagcacttttggaggccaagacaggtggatgacttgaggttaggagttcaagaccagcctagccaaaatagtgaaatcccatgtctactaaaaatataaacattagccggacatggttgtgcgtgcctgttctctactaaaattacaaacattagccgggcatgattgtgcatgcctgtagtcccagctacttgggaggctgaggcagaagaatcccttgaacctgggaagcagaggttgcaccgagctgagatcatgccactacactccagcctgggtgacagagaaagactctgtctcaaaaaaaaaaaaaaaaaaaaaaaaaaagtatgccctaaagaaagtgacatgtttaaaaagggaa

SEQ ID NO: 54134 - DNA, 879 bp, Homo sapiens
acagtttactttaacaaagatagaatttcaatatgtaaaggacataaggagatttttgctccaatatatattgcatacttgcctatgtttaaagtgaataatcagattaacaataaatctcaaagacatactctgctcacattactgaaaaggctatgctgattaagtttgatgctaaacaacctgatttcatcatcatttatcactggtgagactaaaaatttcagaaccattgttgaaacagtcattcagtaattcagtcttcctaagtctgaggccaaaactgaagtcaaatttcagaatttggctaactatcaaggccaaacatagctgcgtctttaatattttattcagcatcagttctaataatgttttagtggaaaacattcatattctttgccctagtggaatttacagtgcagtagagtaaacaaattacaaatcaataaataaacaaatacagtctgtcctagttactcacagatgctgtattttttaattcatctacttgctaacatgtacttgttgaccaaagtcagtactcacaatgctttcacaacaggctcacagcagataaaaatatgagtcatccaaggcacatgttcccagatgaggttgagcaagctgactctctgccttcttttttcaactcccattctgtaaacaagtgtccttttcatagtccatttattgctatatgttttatatttttgtgctttttcctggtgattttcttatttaaaatggcccccaagcatagtgctgaagtattgtctagtgtccctaaaagcaagaaggctgtgatgttccttagggcgaatatgcatgtattagaacagcttcatttaggcatgaggtatagtgcttttggccatgagt

SEQ ID NO: 54135 - DNA, 607 bp, Homo sapiens
atgtcctggagacattttccctaatttctttgtgcttagcatttggctacacattacccatgcaaatttctgcaacaggcttgaatttctcccataagatgtctttttgttttttatagcatcatcgtgccgcaaatttttcaaacttttatgttctgcttcctcttgaatgccttgccacttagaaattaattctgccaggtactttaaatgacatctttcaagttcaaagttccacagatctctagggcaggggcaaaatgccaccagtctctttgtatagcaagagtgacctttgctctaattttcaacaagttgctcatctccatctgaaaccaccacgtcagcctggaccttatcgtgcatttcactattggcatttcggtcaaagccaagtctctaggaagttccaaactttcccatatcttcctgtcttctgagccttccaagtctctaggaagttccaaactttcccatatcttcatgtcttctgagtcctccaagtctctaggaagttctaaactttcacacattttcctatcatcttctgagccctccaaactgttccaacctctgcctattacctagttccaaagttgcttctaca

SEQ ID NO: 54136 - DNA, 1528 bp, Homo sapiens
aggtcatgcactgaggatgaaaagatttgaggttgattggaagggacaggactggagcagccactcaggtaatgcattagagagtgaacgtgaaataaataagagaatcagtaagccaaggagagaaaagcagtgttgttacttggtctgacactgtagtctgagactgaaatgcataaagaggaattgttgggacccaggattgggggattctcaaggtagtcacagaggagggaaagcaagcctgagatttgagaatattgagaaagaagcacccctgaaatgtctcgccagagcatttaaacagggtggaagcagcagcctggctgtcgctgctacatgttcccatagcatcctgtaattccaccatcacaaggggatttaattgtgtatttggtaagcttccctcaactcagctgtaagcaaccccagtgcagggttgtgactcccttattcattccccaatgtgcagcaaacacagcacctgccccatatgtagaaaagagccaataaatagtcatttacatggactttgaccaactgtgttgtaaccttctggcatttatactattctagatcccattgcattttctctcctgcgttttctccctgctggaggctctgatcttcatgactcatatatgtcctgatgctgacctgcctacctggctttgtctagtatacttgtccccacctttcaggcagattatctattccagaatcattcttctcccttgggtactagtttccagctatccctttcccagcttattgcttaaattcactctatgtgctgactctttttatgcctaacacctgactctggtgcactaatatcaatagagcaagacaggaaaacctcatgctgaaacacagacagcatcaggagacagaactaatcaggtcagagttagaaccaggggagagaagttctaacacctggcatcagtaaagagaatgtaaatgcaggtgagaaatatgtgaaaggctgagaaccagaaagtcaagaagggaacaaaaaaagtagtgttgagggtgccaaaacagtgataagttataaggattaagcttgaatttgtgggttaaaagagataaggctggtgactcatatagcacaaatacctcaactctgacacctatggccttttagggacaaagaaagaaactgacacttaaaaagaaatcatatgtatttgattatatttgtgcccataagcacggtacattgtaattattaccaggggatctatgggttcagagcagttatatcatttgggatcagggatatcagtccatgaattcagcagacatttgttgtacacccactgtgtgcaacttaggaatactcagagcaataacaaaggcatggtcactgttttcaacaggtttacaatcttgggaagaagagagacatgagaatatactttgagcagtggtatcttcaaatggtaagatagaagatgggagaaactctcctcccctggaggcgtcaagtggggcttctagagcaggtgacaatggagtgaat

SEQ ID NO: 54137 - DNA, 579 bp, Homo sapiens
ccaggcagcctggatctaaatttcatgtttcagatataacttagagggcccagaacaatcattttatacaacaaaaagagaaaaggacagaacatgatatactgatgccaaaataaagaggtctggggaaactaaaaacatcatcagaaagaacttgtctaagaactattttatctaaaccaggactggttccaaccttgattgagattcataggaatttttgtcaagcctgaatctctgtagtattccttgtcaggttgtctaaccttggccaggttgctcaatcccagcccttgtttattcacatctgagataaggacactgtgcttcataatcactaaactctctttcatttctaaacttctgatattcactagaaagaaacttgctgaaaatccttatgtgagcaataatttgcaagttcagagaaggagcctcatagtgcagtacagatttataacgagcaagaaggcaaaagggttactgccctaaaggtggaatgttcttataccaatatttagattgaaggaaacataaaacaaaacttttcctctttatcatctgatgtaagataattac

SEQ ID NO: 54138 - DNA, 752 bp, Homo sapiens
aagagttcccatcaaacattaataaaacattgtttctatgagataaatgtactccctcaatcccaccccaactgactaagtctctcaattttatctaattttgagatccaaacatatgccattcctgtgagcacatccacaagaatttgaagaattcaattcctattcaccttccaaggaactttcttgttaacattaaagcagtttctgcatcttgagtcaaatttggagagttccagcacctaaaaaaacacattcttacctctgataaactagtaaattttgaaaaggctaagatattaccttctctcaatatcaacaagctgactatacacttgcctgtcccagtatcccagaccagcctctaacctacctccattctgcccactctggtccaggtctctgcaggcattcttactccgactaagcaggtggctggccctccagctcgttttgttctgattacccaatatcaaccctccccctctgacttaacccaactcagacgaagcagctggctctaattcaacttcttgctgaatcactcacacacctgatttgattctttcattagtcttagagcgcctacattgtgctcagctgtgtactcctatttcaaaacagcctgtgatctgttcttgtcctggtgacactgagatctttctgcctattaacatgaagaaagataatgtcgccatctccagatgacttttctaatgactgatctaacacatcctacattatttaaaaag

SEQ ID NO: 54139 - DNA, 1116 bp, Homo sapiens
tatcaatacacattacattggcctattagcttcaaaacacctcacaaggttaactgtgtaatgattcaataacatttatctaaggatcaaaatattattatattataatacagaaaataatagggatgttatgcacttgttatagctattcaacaaaaatagaaaaatagaaaatgtacagctgtgttactctgcttccccttgtatgaaatacttatcccagacaattgctattctcagattaatgacatccgattttacttaaagtgttgacagtggtttccctccttcctcattagggtcctgactggtcacaccatatgccagagggcctcatatatgaagtcattggaagccatttacaggtttcaggaagctgagtttcttccaagatgagaagaaaaaaatctgttttaccttgttatttcaaaaaacatggcctggagctcaaaggagtagatagcttaaatgcattgcataatgtgttccttgttaagaaattataaaccctgtgccgaacataccagcccagccactgataccccagagaaaacaggagttgttttcaggaagaagttgaactgatcattatttttctgtcttcttgcctctgatctcttcactttacacaaacattccctgttaagtaatttatctgaaaagaaaatataaacacaccaaataattgtctttttacttcagtgtaaaaacaagcaggcatgttgctgtctaggtttcagagccacatccttctccatctccagtgacaatgaggcccctttgagttgagtattgttttttcaatttcttcaggttttcacagatgaaaacgtgagtcatgtagaggaagtcagtcatttcaagagcctctgtaaatgattcatcccacaaatctttctggaaccagttaactctttctgagggaatggacaaacattccttgccaacctgggcagaaacaaagttctcaattatcattgttaccaactgaaaaagcaagaatggcttacatattgagactctcaataaatagttgtaggtgtattggctgaagaatgtttatttattcagtacctactatatttccaggaccagggtaaataattataaaagata

SEQ ID NO: 54140 - DNA, 859 bp, Homo sapiens
taaactgcaaaaaaattttcatagactgtgaaacatttgatagaccaaatgggtcctgaaagatttcaaccagattcacaacttgtttaaaaataagagtataaactcattgggatgaaatttgcattgctgaagttttaaacttccatttctatcttaacatacatcaaagagtagctgaatcaattcctaggtcacatctactgcacaataaccatgtactcaataaccaagtaagttgagtcagaactcaataaggccaaattttcagattttactaactaaaatatgcaattaattaaatggccatacttatggctatgatttattagagaggacacaaagcaaaatcagaaaagagaaaatgtccaaagggcaaagtccagaggaaaccaggtgcaagcttccaagggtcctctcctagtggaatgccaaattccccagcaattactgtgacaatatgtgtgaaatgttgtctaccaagaaagctcatcagagacttggtgcccaaggtatttattgcagctggtcatccaagtacccactgcttagcatgtactgaaatttccagactcccagaggaaagcagatgtttagcacaaaccacatggtttgcatggtttagacagtgagtcactctggtcagttagtgtgatgggaaccctcccaaaatctaagttcccagatgccagccaaggatcatccttgtaagcaggcctttcaaaggataatagccagggctgctatattaacagaacaataataacaatattctacacaacattgtagaatttctataaatgtctatgattttccaccttcacatgctgaacaacgtatgtttgaatttcccattgtt

SEQ ID NO: 54141 - DNA, 748 bp, Homo sapiens
atacgtaatacctgctgatgatgccttaatatgttactgttttcatggggtgtttgtattttagtgaaagactataagaaatacagtgtctttgtccaaatggtagaatttcaagcccagtcgtacatcaacaggaaaaaaaaattgagtgttggagggattgcttttcaactgcacagccttgatagttgcgcactgcacatgccttaagaattacagttggttagttttctcagaatttacaaaaagactgttctaaactcctgggacattccttttatcagccacaattgctgtataacaatcaaacacaagtaccaataacatacaataaaaaacatgtatttttcacactttgaaatattctgctgatctacgctaaatgtggatgatctcagctggacttcgcacttatctccagtttggctaactcattcgtgtgtgtttaggttggctatgcacaatgcaatttcatcattcctagaaccagtgaataaacttgatgtgaccttctcatagtgatggcagagatgaaggagcgcaagtacatagacaaaaatctctaaaaggccaagctcagaagtgacacacaggcatttcaaccacatgtattggccaaagaaagtcacgtgaccaagcccagagtcagaataggagttggatagtggaaggagtaaagaactggaatcctgtctcagtctgttcaggctgcaataacaaaatacctcgttagcttataaacaacaga

SEQ ID NO: 54142 - DNA, 2519 bp, Homo sapiens
  modified_base (2219)..(2219): a, c, t, g, unknown or other
gaatctaaacttttccattaattaggcaatttgggtgacaaattaacttttcagccactatttgcaatcactctgaatgggatcactattacatactgtaataagcagtggttacactcttaagtgacaattatttagattgtttttatgttgagatttttaaaatctattctcctttgcatataagtcaatctctagggacctttagggaaacatttactttttcaggcatctagaatattattaggaatagtaaaatcacaatgtattaatataaatcaataggcattcctctattaacagaaaccccatgagtactctcaaattctcattacaagacactggcacacaggaggaaatgtctatgctgagcaacttgaggacgttgtttctttacctcggtatactaaaacaactgtcaattttcactattcaatatttcctgagtgttactgattcccagtccgtgcacaaggctatgagagaatacagattctctctctaacatctaggaattcacaattcagtggggagaaaggcacacaaacaaagtaggtaaaaataaaagtagtggaaaatgtcgctttgagaaatagcatatactcaaattaatacttatccattttctaaaagccttgagttgtttcagcaaacacaatacatggtgaaaaaatacagtactcaaaggaagaactcttggtttcacaattcttaacatattgtaacgtgacttcaggcacgtcattcttaaccagggttggccttagtcacctcgtctaaaaatgtcagtattagcaacctaaacccgaatcgttttaccggcataaactaaattgtctctagtggctcttccgggtcaaagatccacaatactcacatactcatccatcagattaccccagtaatcatggcccagggaaccactacgggtaaactagatgaattagagttcctaaactgagataggctttaaacttgtgaactcagaaaatgtattacagtggccatgatacagccttataaaatgaacaagaatagctgaacattttgtgtatcattctggtacaatatgcgtgtgaatttcccaccaggaatccgagtttctgcactactggaaccacgcctcccagagaaatcaaggagacaccagaaaaacctcctcaagggacagggaaaaatcacggacaagctttcttcccttctcacctccccctaaaaaagcccagtgtttttcttcccctccagctatgcagctgcacccagcagagaagtactagattagcatcatctgcatttcattccttttcttttgcaatagctactcgcctataataaacagaccttgtgctcaagggagaatttacttccccgtccagtaaaaatgaagttccttattttcactaacaacgccgtctccaatcaacacccaacctccctggggggtgggtgagaccagacacgcctctccctgccacccgtgctgcaagcctgacgacccacaccctaggaattgtcccactttccgagccccttctgctcgagtggcgaggcttcgggggacagcggaagaggccagggatttggcgtgcacaccaggggggcgtccaggcaggcccgagagcgctaggctgcctccgctgacagggggctcgcacaggcggaaggggagcggcgagacctatgccacccccacttacccactttgtccttcccgtacatgtgcccggccacctgatgcgagaggggcacgcagccgttgaggaagcggagtctgccgcccgccggctgcggggtgccctcaggggtggactcgatcgccggtgaggtccgcatttctggggggcccggcgcctcgacccggaggggggatggtggctctgttgccataacggagagcagaagcggtaacggcagcgagagtaggaaaaaaaatagggcgagggagggggcgccggagaacccgagggtcgctcaggctcgggcgcgaggaggcccgggggttcccgcggctggtgccctctgaagcgcggggagggggcccatgacgccgccggggcgcgggcgctcctctgcccaactctcggcggaacgcggctcccggctcctgttcctctgccgccgcagccgccggccccggcgctgcccggtagacagaaccgagccgaagaacagcagcagcggcgccccgcgctccctggggccctgacggcgacggcggncccacctcctgcgcccccgccccctcccgccgtcctccagtcccctcagctgccgcgcgcgcgtcaccgccgcccgcaccgccgctgccgccgctactgagcatgcccagaggccgtccaacgggattccggccccccaagtcagcggggcgggcgcgccgtgctgccaggacctggcgacggcgacagggatagggcgagcgcacccctgtttcttctcacccccaccccgcgggcatttcgaagtcacgcgtgctgctgtggcctcattcattcaacacgcttctcagcgcgtcagct

SEQ ID NO: 54143 - DNA, 1802 bp, Homo sapiens
taaaaataaaataaaattggaaccgacacgaatttcagactgtagaagacagagaaaacttctaatttttttaagtgaacatgttttttaaagaaaggagcaagttttttctctcccactcgacctttaagatagtgcaggttccaaggtcctgagtagataattatatcaaaagcagaaagggatggacaccggtagctacgcgaggttctggaatgggactcagtcattgattcctgtatgtccgccgctggcatgttatataaaagctggacctggccttgaaggtaaatcgtcacaagccccgagcaagaaaaactggggtcaaatcttaggtatctgattaaagtaagtgtcctattaacacctgtttctgcccccagaagcccacacacctggaagagacgtaaaatctggcctggattccctaatcccagggccctgcccctcggcttcagggccccgcccctcggcttcagggccccgcccctcggcgttgcgcaaactctgttgctacctaagtcttttcctcctcccacctcccgtagctgtcaaaatccggagtccagacttccttatggccaggacagctccacgcatgctcagcacctaccagggtcgagctcacacacgtgcctacgacccgccgcggcgcctgcgcggtagcatcgcggagtcggtgctttagtacgccgctggcacctttactctcgccggccgcgcgaacccgtttgagctcggtatcctagtgcacacgccttgcaagcgacggcgccatgagtctgacttccagttccagcgtacgaggtgaagtggggcctgggagcgggtgaggctggtgaggctcagcggttgccgcgcccgcagttcgactgggttgttttaccactgccctacgcgcccgccggtcctataaccttgagatgcagaagggcaagcgctcggcccggctgcgggctccgggccggacagcgaaagggggcgaggtcagggatggattgatggtttggggccatgccggaccagagtccacgtttaccccagctagccaaaccctaacacctaatgaccgcgccgctagcttttcttgttcacccctaagacgctttcatgtccttaagtcacatagcctggaaaagaaggaaaggtgggagaaaacaacagcaaacctgtttgcccttctcatgtttcagtcagcgtcgggccacaacgtcgatttcctgcaatcctgaagcattgcgtgactaatcacatcttagttttgcagatttttttttaagggatgaaacgcaatccgaggttttcagttttcccggttttttattattcctctggcatctgacactcggtggcagtagtccaggataaaggattgaaaactgcgttcgttgaaccttcagctttctgagtcttctttcccctgtgctagtacctagcgtttggaaacagtatttcgcagaaagtcccgttataataaaattaagagactttataagcagtcatttaatgtggagtttcactttataaccattcttggtgatgttataattgttaatataatactgtgtaccagacacacaatatatgtgatctttgcccctctataaaacgccacttcgcaaggttttgagtaaaggcaaagagactgtctagaggttaattaaaaatacgttcagtaaatattgaacatctgtagtgccaggtaataaaaagtccctactaacttgagccctaattttttaataggtagtttccaaaaattggagagttccacttctgttgacaaaatttacctggctaag

SEQ ID NO: 54144 - DNA, 1196 bp, Homo sapiens
gagccatttaaggagatggaatgggccagagaggttagaataaaactaaaaatatcatagcttcaaagtagaagagggaaaagtttcaatgatctggtactgaacattggcctgtgcaaagacagctacatgaatagacaagactattagattaagcaattgccattttggtgtcatttcaacggagtaattagaatagaagctatgtccatgtgagttaaagtgcaaattaactaataaagaaacgacagaagtctatgtcatattttccgtagatgcaacagtgaatggaaagaaaagtaacataattgcttgagtgaacactacagcttggctttgagatcaagtaaagggtgtttgctttgattgggttttcccagagggcaaagaatccaataaactaaatatgggctttcatgaactaagatctcaaatatttcaggaagaatcaccagtggacacaaactagtggtgtaaatgtttattagactttataattcaaaacattccaggattattctttcattttacaatttagagtttccagatggttaggccagggactgccatttcctgtaggtggactgagagaggactaagagagggaatgagaccagtcattttatttccagttttctcatgcctttttttccccctctggcttatcttttatgctgtttagtgatcctctttgtgtcttgaatttgtcagttctgaattttcattgcatcttgggcacttattcctgcattaatcaattaacagtttgctttgaatattacccaagttaacaaatgttgttattcttcagagacttttggaaactccccacattcctgtggttctaaggttatcacacaggtgccaagtcacacacttaaacgccagttcacaaagactaattaatacctttgattaagtggctacattgagtttatagtcagtaatttttccctcatacaaaccagttgtatttataacaaaatttaaacatcattttaccaatggaaaaaatgttatatgcgatacaaatttcaaatctaattcattcttaaggtgcagtcactagtaacctgttgtgtgtctgtaacatcttgagcaggtttcccaaccctaatgaatcagatttcttagtaatgtgcagaaattacattttttaaaaacatatccctcccttttgtccagtgcttctcttg

SEQ ID NO: 54145 - DNA, 873 bp, Homo sapiens
acttttaaagaagttgccaaagtgtttttccaaagttgttgtacttacattttgtattcccaccagcagtggataagggttccagtttttccacatcctctccaacatttgtctgtctttttaatgacattttttttttaattgtagcaaaacagcacataacaaaatgtaccaccttgaccatttctaagtgtacagctcagtcgtggtaagtatagtcacattgttatgcaaccagtatccagaactttttcatcttgcaaaactgaaactctataccgattaaacaactccccatgccctgccgtgacccttagaccctggaaaccaccattgtacttcctgtttctgtgaatttgactactccagaaacctcatataagtggaataatacagactaagtcattctgtggccagtttatttcatttagcataatgtcctcaaaattcatccatggtgcatcctatgtcagaatttccttcctgtttaaggctaaagacacagatttttaaaggataaggaatgctgtatttatcatccttggggtttagtaaagtctctcactcctggctgcaggggaatgggaaagtaatgggaaaggaaggagaaggatttgggagaaagtttccaaaaagtagaaaggcatacaggaaggaattaggaacacatattgtatccctagggtgagcccaaccaccgaacttcctgtgtcagtaaagtgtaaatatctttctgccttttcacaagattatattatacagtatatataaaggtcttcctaagccagctggctttggagtccccatcactcttaattgattataaagttggctttgcatttagtgcctgtaattagattctgtgaggcattg

SEQ ID NO: 54146 - DNA, 1310 bp, Homo sapiens
gactgtagaggctaattccagcccccggcagctctcaccttaagctgcctggctgaggtcagcagtaagttacctggcagcgtccgggggcctgcagccgaggacagggctggaactacacttcccagtgtgccaggcggggcggggcgcggcggggagggcgcaggctccttcccagaagcaaaagcggaaacaaaagagtctcgccggcgtccccgcccgcacactcgcgcacactcgcgctcgggcgcacacggagcagggaccggcgcccggagcgagccagggagcggctaaccggggacccaccgcgcggagccagcctagctgccagcgagcccaacccgcgacgacccacgcccctgagccccgcagccgacccctgccggccggtgtccccaccgccatccctgacccatggcgctgaagaggattcagaaagtgagtgccggggccgggcctggggctgcggggcagcggccccctgcccacgctgactcggccagtggtcccgagagacatgcggggagagcaagggatggaagggtgggccggggtgcgggcagggagctgaaggctcgggccgggccagcgggcatcggacaggtgaggtgggagcagggtcaggtcccaggcggccggaggagcttgaaggctgggggcccgcgcgcgttcgcgccggagccgctcccggagccccagggtagagagcctcttgcgcgtccagaccgtcccgaaatctgtgcttcacggtcacggccgggttttgccctccatggggctagttttgacccctgtcatgctgtgttttctccaggctgtttcttaagcctgtcctcttttatgttcttgcttacccggcctccccgggagggcaaggaaggtggggtgggcctgcagcctttctccgcggagctgtcgggttggttctttctctcctctgcggttggctcttgctcagttgcccgaatgggctggaaagcccatttgcggccaagaagtcaggagaaggctcctgccccttctattttggtgcctctgctgctgccacttcaggtcacatagctgtagcgaaaacatagttgctgatacacaacaagatgacctcctggctgtgattcacggtgagtcaagccaaacaggtttttttccccctcatgataaacttagatgtaaagttcgagacacaacataaactgtcgcaaataaattgttttgatgctttgacacatgggtatagaatgaggaagaaatatatatcttcatccaacaactgtttacccatctcaaccctgtgtatggaatcgtct

SEQ ID NO: 54147 - DNA, 1781 bp, Homo sapiens
ggtggttagctctgaaacaactggtatttaagggctggaaggacccttaggtatctttaggtcttcctaatctttttcatgccattgcctatacagaaaatggtatttctataacacaaataaaaaaattatacagcaatttttgacacatcaatgtctcaaggcatacttgtcacacgttctcagggctttggctgggaaaactgatttagtctaacatcctcgtttgcagagggggaaactgaatcttaacgagggaatgcaatattcccaagtcaagacgttaatgttaatactggaactagaagaattgagactagcgactgtggacaactagccagtttcctctgctcaaattaagcaagctggaggccagactgaaagactgcagtagatggtagaataaacagtctaaagctatattgctttaaatgtggtctcaagaccaccgacattagaacttgttaaattctggggaactcgctaaaatgaagattaatgggccccacatagacacacggaattaagctctgcggtaaggccttggaatctgcatttttaggtttgcgaatccccgcctctcccgttactatttctgaactccgagctccagccctggcttgaactgagacgctccgctgggcgcgcagcagccgccgatcggacctcggggtcctggatgcaggactgtctgttacgtacagcccttgtgaccgtcacgggcggacaccggccaacgccgggttggggtgaggccgccgccgcggtccctccatcaccctcctggcccggcagaggaacccactgctccgggcggccggggacagaggtggctcaacagcgccgcctcgaagccagagccctccgcaggctagaggattgcggtttcccttcatctccgcggctcttattcctcccccgcaaggccgcccaccggggtacgctctcccgcgcctgcgccaattccgccccgccccgcccccatctaccgaccggatgttagcagatttcccatagtgcctcgctagtggcgggcatgataacacacgccggagggtcgcacgcgggttccagttgtgattgctggagttgtgtattgccaggaggctctccgagattggggtcgggtcactgcctcatccaccggagcgatggcgtttctccgaagcatgtggggcgtgctgagtgccctgggaaggtctggagcagagctgtgcaccggctgtggaagtcgactgcgctcccccttcaggtaggcccgcttgcctgtgccctaggggcagcagggcccaggacgtcccggggttggaatgtagaccctatccttcactttctgcccctcctaggagttcagagtcaccctggttctttgattcagaccgcgaccttgccaaggggacggtggccttgagaccaggcctttatttactctcttaatacgccgtaccttcttgctaccctccactcgcttctcccatccctcctcactgtccagctttggatcctttccgcctcctctgcgaattcgcgccgagtctccggccatcatctaggcattgaggaggcggggcccaggagctggagtatagacgctttccttcactccctgcccttcctaggaggtaagggctttgagacttcagtcctgcagacgctcccctccgtttaggacagggttttaataagtctctagcattcttgttgaaggcgttggatacatagtatcttgatgacatttcttatttgggatctgtgttcatatacatgtgaatattgacagt

SEQ ID NO: 54148 - DNA, 2263 bp, Homo sapiens
ctgttttccattaagattgtgtttttgtggtttttcttgtggaaataagagctcagagggatgatgatataacattggagaaaggatgttggaacctcacccacctgtgtttgccttcccatgcaactggagcagtggaagttagaaagtagggtatgaaaaacgactggaagcagagatcctctcccacagaggggtagaattggaagacgcactcagaaagccttacggccaacctcctcagttttcatacaggcaaactaaatattacagatgggaaaatggtaagtatttaaatatttattgagcatctagtatatgccaaacactgtgttaagcattgaaggtacaagagaaaacaacatagatgagtctctgccttctgcaatgtagaggtcctgagaggtgaaatgacaaaacaaactcacaacaagaatctagatctcttaggtctgaattggtgatctttcttaaattttccatctagaatacttcaagcacctaggaatttctatatgactttgggcaactcactaaacatctgtaggcttcagttttatgaacataaaaaaagaaatttgtacatttactcactcattcatttactaaaaatttactgataaccatctgtattccaggcataaagctcaccaatctcataaaacaggagcttttttgctgagagtaaacatccatctgtcaataattctctccaaacagtaaccaataggtagctggaaattccagagttagctgtagtttatttttttgccattcagagttggcttactccctcaagtgccttgaatccgcacttggagttctcccttcctccctcacttgcctgcattcttcctttccctccctccctccctcccttccctccctccctccttccctccctcccttccttccttcctaacttccttccttccttctttccttccttttttccctctctctgtcttctttctttctatccacccatcttcttttcatttgaagtgtaaaccctaacactagggaatttatttacaagaagagatttaaaagtcataaagctatacacttggattggtacggttagtatactcttgctttgtagctgctccacattgaaacttttatttattattcctaaatgtgtacttttcctaagtctcaaacttttatttaacataggaaatgtcaatactggattacattcactgctgtatcaggaaaacatgttactggcatgaatcccaaagggggcaagggtgagaggaagaaaaaggaaaaatgcaaaatgacatgactgattcttgacatgtccagataaaaaggaagaaaaaagtactagtccttatcagagcaaatagtgttatctcccaaagtacacaagaatttccaatattaaccaacctgtaccctttagaagacattttctcatagctgaagaatcacattcatgttggcagttgatttacaagggcaggaatgtggtttcttggaccattgcctcattagaatggagaaagtgtagaaataaatggtgctcatctgtttgttttttcagttcacttgcatataattttttttttttttttttttttttagtagagacgaggtttcaccacgttggtcaggatggtctcaatctcttgacctcatgatccacccgcctcggcctcccaaagtgctgggattacaggcatgagccaccacgcccggcccacttgtatataatttttttcctatcaaatttgaggagattaatggcagtagtttcttgaaattagcaaaagtttatgggcatactgtgagacactgcatagcagtgctttcaaggttctgtttcaataagtgaacaaggggaatgtgcatgttctttttgaagactattgttgtatcagctcaaagactgaccatctcattgatacagccctcctgttaagctgggagctctctgccatagacactgtgcatccattcctggctagttgtgtgtgtgtgtgtgtgtgtgtgtgtgcgtgcaaatacagatggtgaatctatgggctaatttatgaaaaaggcaggtccaggctggagaacaaagctcacttttggtattggcaggttcttgattctgccataacttggtttttctcatgctggaagcactccctgggaaactaaatatgtattgtttcagctattttcctatgggtggggaaaaatgacaattcttttaaatccattcttctccagagcaggaggagcacaaccaggctgtaggctg

SEQ ID NO: 54149 - DNA, 777 bp, Homo sapiens
acttatcttacacgtgtaatagaggaaggtaagcactgcacctagcacagaattggagttcagtaaatgttcttttcctcctttctttgaatcagtgtttgctgttagtagaagtcttcacagctagaaatctgtacacatggaggctgagcagaggtttccttgataccatgttatatacactggaacattttgggcatgcaggtgaggggtttaatcaccaacgtaagagacatacagaaaacaaattagtacaaagttattaccttagagctaatcattgatttttttatgaagtaaataagagtgtagtatttaaaagttaagttactctaaaatatgaagtatatttagctaggttgaattgattttgatggtttatgctgctgatggtagctgccatatttcacaaaagagaatgctttttcactgagatgggcagaagcaaacactgccctgattttggccaagtaaccagaaatagttttgggattcatggagctgtctccaaaattccagagatattgcatcatcttggtgggtctggtttgttttcagttcttttagaaactgagccctgctgatgggacaaatgcttgataaatcacattcacaccaagactgtggacaccaaagacagtcacagaaatttaaagcccatttcataagcatcaaactgtgcaccccacttctgaagagtggctttatttcagtgaaaatgtggttcagcatttcttcaaaatatgtgaagtttggactcaaaatagttcaacatgg

SEQ ID NO: 54150 - DNA, 881 bp, Homo sapiens
tattgagtagcacctgcctctggtgtacttgaagaaaacttaagtggctatagaattagtagtccctccaggccaaaatacaaatgacacatatcttggacatcttctactagaagaatataaaaatcccaatggcctttaaaaaattagaataatgttaaaaaacacaatttataatttcgtttctaaaattatctgaaggaattggaaggatattccatttttaaatgcccaaatgaaataatccttttaaacaagggttttccacccatgatgaaggaggttaaattaaaaacttaactaaaatgagaacaattgtgttgttctttagttcttgcattaggaatgtgaaaccagaagtcagctaagtctccatagcaagcatctgtatttacaagatgagtaacacaagtctgaatgttgcgaaagctctcgaaaggtgaaaaaagttcagaatatcagacgttttgactagaaactctgtcactgattatctcgtattacaatgagaagggcatgacatgacccctgattacttttacacctttcttgcttctgaatccttgtttttgaaacataggaaagaactattttgttgacaacattgcagtttcatatagttcatcctaataaatgtataacaaaactatcatgagataatataggagattttgtaacaatctggtaagaaaggaaaagtattgcgagttctgaacattcagttacatgtggaaaacttgtataaagtgaatttattgcatttgttgtcatcacttttctgaaaaagagaactcttgcaactaaaataaaattcttttttatccagtgtctagaatagtacctgccacactgtaggcactcaataatgttttgttgaataa

SEQ ID NO: 54151 - DNA, 1877 bp, Homo sapiens
tagagttgttttgggcttggtgactgtttcatttaaatcaagtataaatgcacagaggtaaacagacactcctatttagtcttaagaacttggtttgatttggaattttaactgccagggcccactgtttagtgtctagcctgctttctatttcctgcgctattgttttgcttttggtcaccttaggggaaaggctacagcttccatggtcccaaagtcagtggcgctgtcagattataaactgagaagagctgattccttggtggacaaccagagttcttcatgtgattttagtttacatttagttggatttcacattacagtacatttggtgaattatttcctgaatgagactgagaaatcactgggctctggcaactctgtactgcttcctctgctttagggattttctgtctgaaatcttcagaaaaagttgcaatagagttcatgaaaaccctcagttctaaatggacacatgaagaaacaccttaggtttgaaagggtgttttaaaattacattcctgtcttgtatttttttttctcctttttattttttttttctttttggcctaagtttcaatgacattctggaagatgaatttcagttgggttttgggaaactatttccagcagcggttgagtctggatttgattccacagagttacagccgaggcttctctgcattggccacacctgctttcttgagcaacctgagagacactgcctgtggacattttccactacttagtgattagtcacctcacagttctgctgtttttgccgtgagataatttcactttctccttctgctcctgcgtgttctatgtctgttttcacccatctttgcttttcccattttcctctggatttatttattctgtcccttacatttctttatacatttgcctcttcttatcctgggaacctcacacctctgcttgttccattttcacttgtttctggatgtgttgtatctattcctttgaaaaacgttgctcttttgtaacatgacctgtcccagcatcatcaagatagagacttttaaaaaatactccctttcgtatcttagaaggcaatagatcttctttcccagccaaccagctggaaaggcttttttttgcttttccgttttttgcatttccacgtagactgcgttgctccttgctagagaaaccacaagcattcctgtgtgaaatgaaactcgctgttttgtgattttgtgtgtgggggtggagaggggcatggtaatatttagagtccctggcctttgcctcccaaaggtttgtcattaacattttgttgatttttaagcttgctcttatatttaggaccagtttactgagtttacctcccattccctttctagcaggacacccaagagtcctgtttgctcatttcctcttgtcctggtcccaccctaagggttttccatgggctcgcacttctcaaggagttcttgggatccaggaccctttagcaactactagccttttttttttttttttttttttttttttttttgccagagtcttctccttagcaactgtaatggcatattaagttaccagttaattcctttgtgaggaagcgtagcagtttaatatcgaacaaaggcatgtttgagcaaatattgacaattgaacactttagcaacattaagatgccttttataatggatctgtcttacaaagaaaagcgataactttctagtctcttatgctgtccaaaactcagggacttcgtagatttagataacatgatttccttggtagttggatttcagcaatatcatagactttgatagtgaagcatgcttgtatgctattttcaaataattttcattggtgctaacatttttaaaaattcaattattgtc

SEQ ID NO: 54152 - DNA, 1195 bp, Homo sapiens
tttaatactctaggtaatagtagggtgtctataatatagtgattaaataaatacaaagatgaataaatgcaagttcagtgcaaattttaaattatttttgtttttattgtggagaatttaaagagataaattactccaggtatgtaatttgttagagagattgtatccttgtttgtttaggggagggtaacacaggggaaatgacagctccccttccaacctcaggctctattagcattttgagaagccagctttgccacatcaccatttctcttacttgtgtaatacaaggcagagaatctttgctctaccaggtggaagatttgctttttggtctccaaaattggaaggagtctcagcatccactcttccaaattttatagaagggattatttatcccggaggctctcagaactctccctcagaatctactccccataatgaaagaaaaagacttcactgtgcaaattaccaagtgtccttggtgctgcagggcaaaggctgtaggcaggttccacagccttcccgagagtcaacactcatgagtaactgcggtggttggcaagagaagtaaacggcagtggtgtaatgtggattcttttctcctcccaccctgaaaaacccacctgattaaatatttccttatctggctttgtctgtttacagggctcatccatgtccctttcacggtccaacagtcgtgagcacttgggaggtggaagcgaatctgataactggagagaccgaaatggaattggacctggaagtcatagtgaatttgcagcttctattggcagccctaagcgtaaacaaaacaaatcaagtgagcgttgtgttttatgcacacttttaggtatccccagattagaatgtgtttatttgggttggagtatcactgactgtggcctctctgacttcaagtgcttggtgtaattcacatgccatctcctctgtgaagcctccttgtttctcccagtgaagcaggccacctggttctctttcctctcactccattttgtgcgtgctttcactctagcacttgccataccaaagggcaattatttatctacctatctgtatctccttgtgaaatttgtgctccacaaaccaaagactgtatttgttcattttataaacatttatgaagtgtccatgtgtcaagtattctgttatgctctgccttattggatatttc

SEQ ID NO: 54153 - DNA, 1032 bp, Homo sapiens
tgaatttctgcctcccaagtgtaaccttttaaatgtcaagagcctccctgaaagcaataaccagcatttccttaatggaaagccaatatttcagtaaaggattgctgtatttctacagctactgccctattcagctgaacaatggaagttgaaatatttaggtgattaaaacttttaattaaaccatgttctctctgggcatttacacttcaagcctgtctctcctttgcctttcagcggaacactatctcagcagtagcaattacatggactgcatttcctcgctgacaggaagcaatggctgtaacttaaatagctctttcaaaggttctgacctccctgagctcttcagcaaactgggcctgggcaaatacacagatgttttccagcaacaagaggtcagtcattatttattttcccaagtatctttgttttgattgtgtgtatgatgacttctagaatgaaatcacttattgacctatgagtatgctttcactgagcatttattcaagtctcatagcttgtccttgctactaagaaaaatgtcatctcatttcttatttagtgcagctagtaaacacgggatagcagaaatagagaaaatcatacttgcagaaaaatgtacaatagctgtctaacagttttagcaataaaacccaatcgatatatagattcctaggaatttttgtagtcacagctcccttaaggtcagcaacaagtctgtatttaacatgatttcattttgaatctgttgttatctttatttgtggcacttaaaagtaaataacagcatctgaaatatctctggctgtttttgactcatcctggtcatgctgaagtctgttcttacagaatatatgtttttttcaacatgttaatttattcattaacttattgtttgggttttacctgaactgagacagaactgagatgtctactgaacaatcatgaccatggattttggtcaaactgattagccatatcctattatgtactggcataaagaaaagaggccccaggcatgattcttcc

SEQ ID NO: 54154 - DNA, 1143 bp, Homo sapiens
gcaaatacatagtaatgaacctcaaaaaagcgtttagaaaaatatgcggaaattttaaggagggaatgggattagtttttgaagacttgccaataaagttcttgaatgtcaagtttatatgtgtcccagtctcagaaagacagacacaccaggggcagaagccaagtgtcatgtgctgcggaaaaatgaatgctttttcagaacactgaatttgcaggctatgcctcagtgaagccagcagttacatccaactggtgaaagtccattccagacaacattcactaatcagatcagcagataaaatttaaaacctcagtggttttccattttattttagcggcatgttgaatgccccacccatcttcccataggaaatctttatctgaagcagatacaggcaaagcagctttgaaataggagtggaaatccagccattgagcttcctggtggcagcctgttaggttcttctgtggatagagttctacactcatcagttttcccagaacttcttctaaaatttcttctcggatatactgtgtgtacccaagaggctctattaatggaactccacagggaaaatgcataattcctgctcataagatcatcttggtatagtggaaagaacactggattcaattaggagatctgggctttacttatgctaagtcatgagtccttgagtgagtttccaaacctctcttggctttggtttgttaatcatgaaggtagattggaatttgtgattgtacaaaggtcaccttccatttctaagatctgtcctttcatgtgatatcatcaggcttagtgaaaatggacaaaacgatagttttattacttgttcttttttaccatctatgataatagagtaatttttaaaatttgttttctgtaaagctcatcctcagggggctatccctagactcaagctaactttaaaagttttcatattattttattaatttgcaaatgaaatttatttgcagtttgaaacgtgattaacttatgcattcaccatacctgtactgttgaaatatgcctgcaggccagcaattttctatcagtgaagtgtgtagtccagagctccataatctttcactagagattcatggaatagcagtgaggatatagtgaaaactaagttca

SEQ ID NO: 54155 - DNA, 772 bp, Homo sapiens
attcatttattcttaacgcttctataagtttgcctttaaatatattcaattctgtcttgatttctgaattttgaagtgctgtgtttgtttttaacaagatacatgtattcagcttttaataactgtgtttctggaggaacttgaaacaacagccatctgtatgcatgcctgcatgtgtcttttgcttgtaaagataccttccttgcttcttcagagtgaagctgggtttttctatttaaaaattaaatttggcatgttaaaatagcaaataaagctctgttatctggcatacttggaactatcgatttctcagatttgtattcctgatgccttggttggtcttctctgtccagtgggtcactgaaggccagtgctcagggcattgacctttccatcaagcatgtgaggtttcacctctgtcacttagtacctgtgtgggcaagtgacttagtctattttttcaatcagttttttcacctataaaatggagaatggtaatattatctatcccttaaagaagacttgaatagggcaaaataaatgtaaagtgcttgtcatacaataaggctaatgaatcattgttatttttcttctctcctaagacctatatatgaacaaaagagagatgtctccagtgttgctttgaccatataggggcaggcgtttacattttggaaggcagtggggtaaaatgtgaagggtattggtcatcctccagaacttggccataggagtgtgtctggtcatatggtcatccttaacaccatgcagt

SEQ ID NO: 54156 - DNA, 2268 bp, Homo sapiens
caggattctgtgtttgcagttctctaattagactgagacctttttgttgttgttgttgagacagagtggtctcactctgtcacccaggctggagtgcggtggtgtaatcatggctcactgcaacctcccatctcagcctcctccgtgggctcaagccatcctcccatctcagcctcctaagtagctgggactacatcatacccggctaatttttgtattttttgtagagacaggatttcgccatgttgcccagggtgttcttgaactagtgagttcaagcaatcttctcaccagcctcagcctcccaaagtgctggaaacacggtcaggagccaccacacctgaccctcgactgaggcctctcttaaaggcaggggctcagcttggcttataatggtcatttttaaatggggctgactgcactttaaatgctcatacgctaaattgcttaatcttcaggattcccaaggaacaccaggccctgcccacagacagatacatactcccaagaagctaattatatacaggggttgaaaaacttaatgtgaaacaattagtcaaaactcttctttggaaccagttccaggtactgctttgtaactgagaattttaaaactggtgaaatgctgctgggcgcagtggctcatgcctgtaatcccagcgctttgggaagctgaggcgggcggatcatgaggtcaggagtttgagaccagactggccaacatggcgaaaccctgtctctactaaaaatacaaaaaattagctgggcttggtggcaggtgcctgtaatcccagctacttgggaggctgaggcaggagaatggcgtgaacctgggaggcagaggttgcagtgagccgagacagtgccattgcactccagcctgggcgacagagtgagactccgtctcaaaaaataaaaataaaaataaaaataaaaatgatgaaatgcatcatcattcatatctgatccctctatcccagattgatagcagtttattctgtgaccagttcagaggttcagcaactcaaggtgatagagttaaattctaaacaagccatcaaactctgcctcttctctggctgtgagacagcaacttgtgaaaataatttcatctgatttaagcagaccagggctgcaaataaagcagctgttctaaggaagtgggtgctgcagttataacagtaagcgctgaagtgggtgtccaaatgctgacagtcagaacatgtgtgcatgactgggcagctctgttagctgtgaatggtatagcatggcatgaatggaatgtgctggaatgcagaggactccctggggttcttgttgaccattacatgggtggagggtgaccaactggtttttagcactgaaagttctaaatagaactttctgggaatgaggggacagatatgaatgatgatgcatttcattatttttatttttattttttgagacagagtctcactctgtcggccaggctggagtgcaatggcactgtcttggctcactacaacctctgcctcccggcttcacgtcattctcctgcctccgcctcctgagtagctgggattacaggtgcctgtcctgggaagccccctcagtccttggcgaaccaagatggttgctcactcaccctgtgtggctttcagatgtttcagctcactctgttcccacggcagcccgtccttcagaggtggctgagttcttcatgagacacattgcaagcagccctggaaagtaagggtgccccattaacctttcagatctgaactattttctgcctatgaagtgcatgttcggtttttatagattttatatgttttcccatctttcagatctagcgctggcaagcaggtggtatgggagtcctaaagtggggcagctgctgatgttggaggtagatcctgcctcagcactgaggccaggcttctgcagaatcctttgaggcttctgtcctgaacttccaaagttccagcaggaggtgttgggctaaggtcaggtgtcacagtgggagtacgttgcagaagcataatattccagaggtttcaggggctttcccattcagttagtcagtttgtcacatccctcatccctaagactggccaggcacatttccctttagatgcttattgatgccattttggattttgtggcattccctagaatgtctagaatgtttaaagttctgaaaagcacttagttctcaaatatttgaaaacagaggcaaaagaatgtgttgagagtgtgatttctggaatcagacttcctgtattt

SEQ ID NO: 54157 - DNA, 577 bp, Homo sapiens
agacagtgagacatgtagtcaaaggatggtggctgtttcctgtgttttctcctcatcaaaagtgctctcactcccaggaacccagctttgctgatagtccgggaatgtctggagggctggaaggcttatccccaaagcactaaagaggagagacttctccatccagaagagggagctgggttcacaagttcaagccaagaaaaatatgtcagagtcagagggcaaaggtaattttgagtacagcacagtgtctgtctctcaatatgtcctctggaacatccttttcagagtcatagattgtttccggaaagaggcaacttcagttaagaggaagttaaaaaagaaaaaaaaagcttaacaactttataataaagtctcagtaaaactaggagagcagaggtaaggctatgtagcagaatatagcacacatggagatgaaaggaaacttcttgacttgaggaggcctttggatcacagaacagacaggcttaatttgggctggagatgagaagctagggagctgagaatcagagcagcccatgcacaagaagctttggcagaaaacaaacaaaaaaac

SEQ ID NO: 54158 - DNA, 724 bp, Homo sapiens
ttctttccttgcagttgacctgccaccatgtcccagagctaagcctacctcctctccctgacgatgcctttcagcagaagttcccagtattcagactcacctgctcacagccctatgatgtcatttcctcctccaggctatggcccaccccatttttctctcttcagatgattgacagaaaaggtacagattttctaggtgggaaagtcccacttttgtttacaggatgtgacctctggaccccaaggcatgggataaggcaaatgaaatatttgaccagagttacttcaatcagaattatgcccctttttccaggaagggagaaaggaagaagatcagcagagagtgggctttggcaaatcctatcttgtctgttttatgacgcagcctctagcacaaggtgaagacatgccagatttgctacctcatcttttctgccatcaaccagtgtcagcttccaattttttgtgtgttgttcttggacataatatgtgtgtgcatacacccacatccacacatgcacacacatccctcataagaacactacaatatttttttgtaaacagagatgtctagtgaaaaaaaatctcaatctgtaaagatacaatcacatacctagtttgtattactaaactgaacctttaatatctagttggaagcaaggttctccaagagaaatgggtgtgtacttgtgttttatctgtgtaactaaaagtacctgccc

SEQ ID NO: 54159 - DNA, 1464 bp, Homo sapiens
gaggcaggagaattgcttgaatctgggaagcagagattgcagtgaggcaaggcatgggtgcagggaacaactgagggaagagtatgggatgagggtggagagattctaggaagtagggagaggaaagacagctttgctactttcccagatatgtgagcctgctgcccagtgatgacaaatgtactctcatattgatccagagtcctagctatcccaactcctatgtgtcccagtttctgcaacctggcttctggttttgttcttcctactgactctcctttcatgccaagtctcctgagtactagggtacaatctaccagtgtcagggataaaactgacctgttatcagatggagtattaagatgacaacatccaggctcccatattggaacaaagccatctgcacttcatcctgaaggcactgcaggacaatcagacatgctggggagacctgaataataactgttagaacacaaaacaaggtagcatataattatgatattatattgttggtataaacgtccaagtaggtggagcaaaatcacagaggaaaacaataaaattttctgaagtaggggaagacattaaatgggtattgttttttattatggccatctaggaaagaacagagcagaaaaaattttgaactataaagaaatgtagtaacacagttagaaaaaccttgggaaaatactcagaggggaaaatattgactgttcatgttactcaagctatattgataggaaaccaaaccaaccaaccaatgcggttagacaaccagatgatacaatggtagaagaatgcttcaagcttgttgcttaatcacaattttgttttttgacaaagtttgacaaagtgggaaagaatctcttgtcttcagaaaattggggaaggttcaatagtcattcacagggattagtttcaaacaaataatttgaaagtcccaaaagtaagactagaagtagggccaaagatcttgagtgctctctgtgatttttctcttgattaattggcctctgccagacttttgttgcatttttgtctagagttattttggatgacattcctcttgtcacatgttgagacttgctagggggctgctgctgggttcttacaagtacctcctcaaatgccttctatttgacatcattttatcctcctccctgagatgaaaacaagccaactgaaaatgtaaagagtgttgggttgggtataattgatattatactttctttgactagttggcagtagattttggaacaaagtagtgtatttactgcctgtaaacattttgttgacctgagaaaaatacgttcatgaaatctatttgcattttctgatagagaaacactgtggtaaagggttttgttgggtcattttgaaaattttggctctcattcactggtcaaacatttattgaaagcctactacatttcaggtattatatgctttggaggaatgttt

SEQ ID NO: 54160 - DNA, 786 bp, Homo sapiens
gttagtagtgtcttctgactggagggtatgcacagatttatatttttgtgctttcctctttttaaaaaaaatcttaaaacaaaaataattttaagaataaagatctagcacctcgggttgtctaatgataaagcctgaatgcataaatgccataataactctgtcaatggctctggactcacacacctcagggaactgcaattaaactctgctgagtcacagatgccctgcctggagagtcgtgtgccttctcagcatccctgtaacctcctctgtccccaggttcacagctcccctactcagaggctctcggctcctccctctgcggctgcaggctgctctctctgtccctgcccgctggcctagtgggtggtgacacagcacggtgcattcctgcaggcaggctcaggcccctgtgtagttggcttgacccaggcaagctcctgcacttgtcgctgaagagcaagggctcaggtgggcgttccggtgcgggaaccttgcaggaaggcaatcagtcggtttgtattcaagctgaaaagccccctctgaagcctgcgatccagacacaaagcgggatgaatgtgcttcgctgcagagcgtacagctgggttattgactgggactgagagaggcgttgaaatgaaatagggagactgaagagatctgctcttttgattcggtctcttccaggattttgcaagctccagatagctttggtccaaagtgaaaaatctccctaagatcctatctaaaatttgggggaatcagctgcgtaaatcatttttc

SEQ ID NO: 54161 - DNA, 2232 bp, Homo sapiens
atctcaacgtaaaattttgttgttctctttaaatggctctaaatagtgctggaagtgtttaacttgtttcaaagattctaatttgagcctcagacagctgcagtggttattaatatgagcacaatggttgacattttgacaacagcccctagttttcgtttacgctttcatactaaatgtcccttttgtgcacagggcgtaaaaaccatggtcagatgactgacttgggagacacgcctgcacactgatcagcatctgagagcctttttttttttcttttaagagagtgatactcttttaatagaaaaattggtagattgcttattagattataaatatttaacacgctattagtctttctccagtgtagtgaaaatttaaggagaagaaacttattaataaaattagtgaggagtggtgtgttcttaatgcatatttacactaagtaaattggcatctaaaagtgtcatgggagattggcctacaattagaacaaataagcagttctttgtcattcaactgaaacattatttagaggtgaacattttcagtcaaagttatttttgcctgcttattctttgtaattttccagaaactaatgttctctaaatgaaaaacaacagaaaaaaaaatccgatggcatattcttttcttagctgtttttttgagtctgtgctggattcatgtgtatttatatttggtctgtgcatttttcttgcagagcaccattttgcttggttgaactttgttttataagtgtacaaaggcttaaatcatcctgtgggcatctctgcatgtgtcacattcaccaggcaacttgtctaactctgtgaatatgtttcttttgaaggacttggctgattcattgtttgaagaaaagcaaataaacaacttaaatactgaaaaatgtatgagttaatatctctgacctgggctgagccaaaggcagaattataaagtataagcatttccctatagagtgtgctttcacaattcaaactgaccattttacaaattaatgataatgagattgatgaattaggaaacacaccttgcatcaaccagcctatcttccctcccagaagataagctcctgacggtcacagactatctctgattttttttcattttgaattttctgtgtctggtccagtgtctgtcacatgaatgaatgaatgaattcttataggacttaaatacttatatacagcttaaatatgagttgtttaatttaatcctcactactaatatgtaatgtggatattcttattatcgtcattttacaaataaagaaatttaagttcaggttgcaatgattacgcaatgttatccagctagggaagagcaaaggagaatcattaacctttatcttttcactccaaagtccagacttctaaatctgatttctgtcacacagctcctggattctgccattgtagcttgaaaatagccacagagtgcatataaacaaatgggcacgtatgtattccagtgaaacttgatttataccacaggtgggcctgatttggcacactggctgtagttttcagtccttaatataagttctagtccaggctatattattaaaaatggcaataataagataataaaaataccaatagctaacacttattaagcgattcaggaaatatatttgcttcctccaacttatctcatttaataaaccgaatcacagaatagttatgtcactcaaggtcattgagctattgcttgtaaagttagatttaagcccaggtctgctgacttaggcattccctcgaggccttagaattatgacaggaaactcctgctgtcaccaaaatcggacaacagagctgcaggatctaaaataagtgactttgggtgggtggacccttgttatagttagtcattccgtcatctttgatgacatgaaatccagaaaaatggggaaacatgacccttgtgttcccacaggttggagcgtggggatgttagctgcctagtacaagcccatcactgcatgatgtaccctcaatgacacaggactctggagacaggaggctctggggggaagtctgttgcccctcttggcatttatacctgctctctctaggccattattgctttctaatatgcaatgtaaatattttcctgcttttgaatctctaataaagaatgtatttaaatagaattatgcaaaaatcacacaagccagagttacaaacattatatcagacagaataagatacc

SEQ ID NO: 54162 - DNA, 2725 bp, Homo sapiens
gctgaggcaggagaatcacttgaacccgggaggcggaggttgcatgcaatgagccgagattgcaccactgtactccagcctggcgacagaacgagactccgtctcaaaaaaaaaaaaaaaaaaaaaaaaaaaaaaaaaaaaagaaaagaaaaaagcatatctgccagccaagaatcagttttcagcttaaaacacaataatacagaccaaatttagctcctgttccctgaaccagtggcaaaagcagctagtgcacgtgcccaggaagccacatgcagcatgtttatcccactatccagctctgtggtgctttactggttctacacgttaggattacagatccttgtaggaatagcttctgcgctttaatgatttcttaagaaaaaataaaacaagatctagatcatagactcccatcagagagcttactgggagaaagagctgtatcgtgaattatgaagattaaaggggcatccaacaaggggaaaaattaaactattatctcgttactttggtaaattaaaattgccaggcctaggcaaagatctgactggccagagtgaattttggagtgaaattttatggttatgtcttttaaaagccatgtaaatcagcaagcgtaaagctgacaggaccttgcaggcttcagcaagaacacactgtccctctcatttatttaaaagaatgctgcccctgctcaaaggcctgcagtgagccatgccaatgtggtttggctggactgtgagtgcttgatgcagtctgataggaggatgggggtggcgcagagaacattgaaatcagaaaggattctgctctgtagagacaaaggaaacacagagacatagacatggatctgggaaatacaccttttgctactcgttcagttttagcaaggaggtttcttgcatggctaagcaaaacttaaacttcctctgagaattacaggaattacaggacctgacaaagctatgaagattaaagtaagttaaattgactactttgaccagtctatgattaaatgccctatataggatgtagagacaggtgtctggttcagaagaggaagggaagattggaaactggttggagtaagaactgagcctgtggactatgagaatgtcagagcagaaagggctttagagtgaatctggataccctcatttatatagatgtggcaatggaaggagaccccaggtgattttcttagggtcacacggtgataccttgttgtgatgaatatatacagctagtagaacttttgattaatgtgagtgcggcagatttattgcaacaggggctccaattcttttcttctctctatccaagcaccatgggatgtaactttgtagctcctcccatcaagaagtctactcaagaggtctcattgaggtctacttcctgtacctccaaacctgggttggctttgagacttgctttggttagtagaatgcagcagatgtgatgctatgcagtcccaggcctacgcctcaaaagctgtgcttgcttctgctccttctcttgacctttgcctctattagccctgactagcctgctgaagggacagagaccacaggcacagagctgaggtgtgccagctgaggccatctgaaacatgggagagagagatggctatggtcaaagaaatgctcagccaggcctgaccaagatcaacagaacccaccagctaactgtgaatgtgagaacagtaagaatggctgctgttttaagcctcttaagttttggaggtggttgtttgcaacattcttgtggcaacacttggctagtcagtggtgctataatgagaggttggtcactgagaggagaaagagggagcaggataatccctggcatggtaggtcttgcagtttccatcatggagtatggtggccaatttaagaaagaaactgtcctggaaacagatcccagaaaaatctcctcactgtgattgtggcattgtgctgtctaaatgccagacaatcctgaagggtttgtatcatcacttcctaaattagaaatgatcctagggctcttccaattctgattttatagaaaaggaagcagaggctgcgcagtgttaaggcaagactagctgcttaagttaatgggcccaacacaaaacaaaactgtggagtcccttgttaaaaaattactaagatggtgacagcagggccttaaactaagcacaaagcccttttaagtatgggactctgtgagaccgcacagatcttatgcccatgaagctgacccagatttaggcaatttgtccaaggacatcacttcggaagattcatccatcaggctattctttacccaaaaatgtaacttggtatatttgttaactgctagttcaagaagcagggcaggaacctaaggcctctagttcccactccagtgattcttctttttttttgtttttgacagacctataggaagaaaatctgaaccagaaacagtatggcagaattgggatctgactcacagagggaagaacttataattcttcacaggtcacatagaagcatgagaatttgggttcaagcaagtaaattctaaatcagaatccatacataaagtgtttgcaatgtccagttatatctccatgatattttctttgtggaagttgattgttcttccttacaataaattgcttgaattgtctgtctattcatttagctatttcttttcttgtctttgcgatatttttttttgtaagtaaaaaattttc

SEQ ID NO: 54163 - DNA, 3128 bp, Homo sapiens
ttacactgagaataaagtgatcattgaaacacactaatactgttcagatataagaaatataattgtctctatcctttcataatactttctttttacataatttttcagctaaatgtaccatttttgacccatatctgtaatgacatacggattaccaaatgttagacacttgtctacaaattagtactgaaattttccaactataaatgcttgtgatttggaggggaaattcaatttttaaatttctctctcttttttttttattatttactgttttgcacacaaaagatcagaggaaattctatggttcacagttataattttgagactgtttcttcatctccactctgtctcatctgtgaagctggagggaggaaggatttaggagagagattaggagctcgtcagagcatgacagtcatgagtggtacccagagtgtgggaatgacctctaaacacagttgccagctctactgtcaaaaatatcacctcaaaaaattatctttgcataaatttctactttttgaacaaatttcccttttggtataaatgtttcctgctatctttgtatcctgattgaaagtgaaatgctatgcctctgaggagattcatcattaccctttggaagataggccctaaatcacacttcccacttttctctttttggcatatgccttcaacctggagtgtatgtcttgagtcactttcgttttcagcatctggaagctgtgttaagtcaccatcttcaagtctcctgactcataaatcacgtgtcaactcccttggctgctggtcagttcaatttctgttaaaatttgagcttgagttagttatttgaaggacatggaaacagagcaaaaaaaagaggcagaatgcagggctgtgacctaacatctggagaccttggccttctgggttaaaacaaacactggagctacaaaagaatcattctgtcacctgaccccaattccttgaccttgttacagaaaaggtttatgtaattattgcaagacatctacatatccctacatagatggaaaacaataatacatcttatacatacatatactattcatttttcacatgtaagtaggtgttgtaatcaatatgacacaaatggttttaataacattaaatttatttgacagtatgtattttcttattcaatatgtaaatataggcaagagattttactactatcatgagacatttatgaattcttagaaaggaattctcactttttaaaaacaattgggaattgctaatgtaaataatgatggttccttgtggtcagcaaaatggaaagaaacatggaaggggtcggaaatatgaaggcacttacacacacacacacacacgcacacaaaagctatcaatttctgtcagaaaattggctgacgcatccttgctttaccttggagctatgggaggtagctcttgatttagctgcttaatttagcatgggtgttaaagaaccctgtgtcagcaaactcacaggaagaacttgtcatttctattggtattctgtctaagcttcaaaatggcatgacactcaggtgccctagtgtatcatagtctttgatattttcctgaggagaaatcatagatgattatgagtcaatgtgtaaagagataaataaagggctatcttcaattgtgcaacttctgcttctagttaataattaaaatggagtatccaaaaagcccagtgggtaagttgtttagttggttttcaacagtcccaagtccatctctccttcttctggtaacaggacctcaattttcctttagagaattgtccatacccatactaggcacatggcccagagctagtccccaaattgctgcttgaattattgggaaggaagtgaactcctccagatgaggttttgaaactggttaaaagtaagtttggcttgtgatcactttcgccatcactggggagagcctgcctaagaataagtcagcacaggggacagctgcccagcaaatagagagagtccaaagaaaccattgaacatctgatctaaatattcctgagtctaacttttgagttatgtgagtcaatcaaatttcgtttgttgcttacaggtttgagttggggtgttgttactggcaccattaaaaaagcctaactggccatgcgcggtggctcacacttttaatcccagcactttgggaggcggaggcaggtggatcctgtggtcaggagttcgagaccagcctaggcaacatggcgaaacccgtctctactaaaaatacaaaaattagccaggtgtggtggcatgtgcctatggtctcagttacttgggaggccgaggcaggagaattgcttgagcctgagaggcagaggttgcagtgagctgagattgcgccactgcactccagcctgggtgacagagtgagaccgtgtctcaaaaaacaaaaacaaacaaaaacctaattaatacaaagttgttcttttgtccctcagccttcagtggaatttaccaacatctttgcattgtttctttccacattccgccctctcacagcagaactgccccagccttactttcttatggaccctcccagtgtgtagcaggacattttctggacattttctcttgcaaaccagctgacttttaggcacaaggcagtctcagctgccgagcatgtccaagaaaaggtggggatcagaagagaccctgtgattctcctggggaacttggctcccaggcagcactgaaaagtcatctcagaccagagtgttctaaaatgcaaacaagctttcttttcaactggcaataaacagtgcttgatgcactgcagtatacaggggttgccaattttttgatagagcagcccagtagcccagctgaggattctgagaagagggaggattgtaatagtgttgttttgtggagatggggtcttttgatgatgaccctgtgatttcgcttcaattcccttttttctgtgctttttgtcattcttgttttcccggctgtgttcctttccattatcactcttttctttgtctgaaattggacccatagaaattagcctgtaatcaggggacatgagaatccctaaattgctctcattttgattttctactttgttaatatttcagtatatgaaacacc

SEQ ID NO: 54164 - DNA, 1396 bp, Homo sapiens
aaagtggcccagcattattttcagtaaattattagctacttaaaggcagcacctgtcattatttctttgtgtctttgcccaccttcctcctagtacagttatttgtgcataacaagtcactagtaaatgtttaatgaatgaaaaattcagctcgtagactaatgaagtttcttttctttttaaaaggaaactgttgaaacatcattttcaacagtctttttacacttaccagtgtttgttagtgggactgatcctgacagttataagcatgaacaactaaaagaagtagaatcaaagaatgcctgaactggaggaggttttagaggtcattcggtccagctgcctacctgatgtgtgtagcagtacaactgctgtggggattgctttctattttggtttcatgtttgacctttgcctgacttctctgagctctgtcctcatttcttccagccctgggtagtacacatttgcatgattgtgctaaatccatttcaaaatgcaaaataggacacctctgtggtatgatccagtgagtgtcattcttcctggctcagatcaatttctttatcattccttaaaggaggtaaaggagggccttctgggccagtatatgctataagttctacatgtaagaattaaaaaaactagcatgtttggggcattttagtgggattttgtagagtgtgctgctttcctgtctcaaagatttaataagcaaagcaaaggtagctagggtggacgttaggattgtgtagagtcactgttgaatcattttatcactaatgtcacattcctgggcctctacactagaattttttatacctgttatgtatttacaaaatgctttcatagttggtctttatttttgtcagcattcaattttccattaaattcttcaaaatatcactcatgaacacctactttgtgcgaagtactgtgctttgtgtggtgggccatacaaagaagtagaggatttgcccctttaacagttagcatgcttaggttgccagcagcagaaagtcgggctaactgattgcaaggctttcaggtagttcaaagaaaggctggaatagcagtcttgggccagggaagcatctagtagatctagaacccaaggtaaaggaagataggcagcttccttaggtcactaccactgaaatcagtcaactgttttccctatgtttatgatactttgttgaagtttcaaagtcctggagagaaactcctactggcctaatttagttatttatttaaccttaggaaaagaagggcagagaggcttgactgattgtccagtcaagactttacacaatagaagagagaatacttttctttgttttttttttagtgtttcatttcttgtatttgtttactgacttttttgattttgttgatg

SEQ ID NO: 54165 - DNA, 549 bp, Homo sapiens
taaatccatggactttacccaatgtgaattttacttagaagctttaacatgtaaagcagaaaaaagcagcgctgttttaattactgctcagcagttctcctatgggacttcaaaaaccataggcctggatggttgataacatcccttctggcactagcatcttattcgaggcacagaaaacttacacgaatttgtattggccctatttgggaggacagaaggcccatggtgtacacacacacacacacacacacacacacacacacacacacacactgacgactgtgaattaggtgagtaagcaggcacagctggccctttacctgtttgctctattatctttctctctgcccttcttctgccctgctctcttttccagatgcctttgccaactggcttctagccatatttggccaaaagcatacagtggcaggagattgaaggataggagaaaatgtaaactagagtatttcaacttctctttctctgcattggttgatgtcatgtgcttttacccatttcctgctacgggttttctcagggaaaatt

SEQ ID NO: 54166 - DNA, 578 bp, Homo sapiens
ccacaagttagcctgccacagtttcatggttgctgggaaaagccataagcctcttgggtcattgacaaaggacttaattgctgacagcaacaagagtagccagaggatcagcattttattgtgctggttacctgagccccaattcccacagggtgatgcaaaaagggccaggtggtacttacacacatagtgagctgcattgtgagagaggaaccctgaacttggggaacctgaattatttattaacctggtcagtaaacatgacggccttttgatctggagagagaggccctctctgtcttcaaagttgttcactgtacaaatatccttgaaaaggaattctaggaccaaagcaaaatcaatgtcttttatcataagacatgcagaaatgcaagagactcatggaaaattgccttgtgacaacaagtatgctgtaatttttcccagcattaatgaaaacctctttcctgaccctcaaatttatctcctcttgttctctcttgaatacactacaattaagttttcatccttaggctgctttgtcaagatcaccactaatctttgtgttgctaaatcca

SEQ ID NO: 54167 - DNA, 1611 bp, Homo sapiens
tggctcccacaccccaataccgtacagagagtccgaagagtccgggcccttatttttccaattcttggtaaacaacaaacatgctcgccctcgcctccccgtgcagacgcctcagggccaactcgggcttcgccaggcaccgagagcagacagaagacgccaaatggctatcaccaggagagagggcgaggcagccgcgcggcgtatagcgctcgcccttcccgcgcgctcggtcgcccgacgcctcacgcgcgaggttgccttggcagtggctggagggcaggtgggggcgcgtgcgcgcagaagggcgggggagggaccaccgcgcgccagcaggtgggcgcgttctcccgcgcgcgtgcgcgcgtcgaagccctatacatcacgttccccgagagcagcgtcccctccccgccgggagcgcgcgcctcccatcctcgcgccgggtcctgctcggtctctcagagccgcacactccgcggagctcctgccacagccgtcgccttcgcggcggctctccagccccgcgcctcagcctcggcgccgcatcaccgcgtcccaggcctccttccctccctctgccactccccctccctttcccgctcttcttgcccacccggccggcagagagagcctggatacgaagcaggcgggcttcagagtgggttggaaaaatggaggtgccgcgcctggatcatgccctcaacagccccaccagcccctgtgaggaggtgatcaaaaacctcagcctggaggccattcagctgtgcgaccgggacggtaagagcggccgggaccgcgaggaaagggacagagttcgcgccgaggcgccggggccactctggctccgccgacgccgctcgccagggcggcagggtcttttgttgtcccctctgtgcaaataaatgcagatgtgggttaccctccgcccaccgccctcccctcaccccagaaacaaaaggaccccggggctcgcgccttggcgcggaaagtagccgtccacaaccgtggcgcccttcgccgccttcgcccgcctggcccggacgagggcgacgttcccgctcgcggctcctgccccgacgaggcgtttccgatctttgccgcagtccggatttcctgggtctctgggcactgaaggggaaatgccctcgggatgtttctagcaacccccttcccccaacacacacacactagttggcattctcttccagaaacttatcattttcttttttaaacctcccatcctcagactccccaaattaacaagtctttttagcctcttggattgggattaggatgacagtttttcagtgagggcgcagaaaaacagtgcatttcagcaccaaggacagacacaatcttcatggttcctgggctctgagtcagactgtcgaaaatattggcctaatatatgtgctgtgattcagactttgtggcgagtacgtaccattgcgtgttgatattatatcgtttattctgttgttgaagttggcaggctcctgtggaaggaaattgattgaatacaggtctgagcgttgaagacataagctagtgctgtgtgcggtgtggttagttacagtgcttctgggttagctggactagttagagtct

SEQ ID NO: 54168 - DNA, 462 bp, Homo sapiens
tcccctaggggccatgtagaaaatctgggggctatttgtgattattacagaagctggagttgtctactggcattctgtgggctagagccaaaggtgtcagagtccctgacatgaatgaggcatcccacacaacaaagaatttttccatcccccacatgacttccaaatgtcctctgggaatgctagagccagaagcactttgcccttagcacaatgtgaactagaacaccatgaaggctagtggatgaaacagaaatatctagtaaatacacaaggaaggggaagagattaaactggattgtctccaacattccacccagagccaccatcctatgattccaacacatacagaaatccagccacatgacttttatctagttctctcaaagttactagttgtgtattatattcctatcttcttccatgatcggacaactgaaaattgtatatctctttttttct

SEQ ID NO: 54169 - DNA, 539 bp, Homo sapiens
tacaactgctgagacttagcctggcttattctttcactctgaaccagacctaggtctggagtgtcccattacagtatcatgtctctatcaagattctatttggcatgatatgtccaaacctggccagacgcctgcttaaaacagaagaggaaggttatcaggaatgtgagctacctgattcaaagttgtttttagcctcggatctcatttcactagttcatcaaatttcacaatccctgtaatattttgagatggatttttttaaagttccattagaatgtcccttggtgatgtcaccatggttgtgataaataactgtagtttaaaggttacttaactaagagtactagacataactgccctcacagcactcctgatatgtgacttatcaccagatcctgcgattgctgacagcggtgcacagaacagtctggaatgttgctaggtcagaaagctcaattctgtgaaagtgggacatgaaagatgggagatggggaggcgaaaaagacaacaaggtatttaggatcctatgaaggttt

SEQ ID NO: 54170 - DNA, 942 bp, Homo sapiens
tgcttttatattattttgaaatatgcatgggaataatagttgactttcttctttctgagagagacagtcatcaggctggtgggccactgactaaattgattccagtagccaaaaaatagctttcttacaataatacctcaaagaggagggagaatgtcctgattactggagaaattacaaggctgaatccaacaggtattacctgaggtcaggtaagagtaaacacataaaagaagtcagcttgtgaagagggttataaaaggtgcccatgaatctgcctggatagggaagcaccttacctttgaggtcccctccaaccttttgaggttctattattctaaatttagtacattggatatttaaaagtacaactgcatagcacagccaatcttctctgtagttgttgatttagactgtgctgccttagaaaaacaattctaaaggtcaggctcagaagcacagccctccctttccactgagtgagggctatgattacactgtacacaagatcctacaaagacagctgacacaactagcggttgaattctttcttctgtttatttccagaagagactttccatagacagctgcaatgccaggctcccatcagaatgtcatgccaacctttctgcaggctgctttccacccacatccttgccctggatccagggctgtctccagcaggtctagcaggctagagaggccatcctggggctatgtcagggctaaggtcactggaagacactcgggtcagcacagaatctgcacctgccatgctgcaatcagacatttgtgggttcaaattctggctcagtccttttcacttgtgcaacatcaggcaagtgccttaatatgtttcagactatgagtacacagctttacgagaaagtagagaaggctaaatgagagactacgtaaaaatcagttgctatggtgcctaca

SEQ ID NO: 54171 - DNA, 1176 bp, Homo sapiens
caagattagggtgtgtacttctgactggtatcaccccagttgtgcccatgtcctagctgaaagggaggctggaaaaacaaatagtggccttttcagcttttatagtgaacaaagcattctgcttttctccctccaatgggaaattctccaagtgcaagaacagagttcagatgcttggcagccaaaatagaatgacaaatatcttctatagggagatttcaaagaaactccctcttatggtaaaagttcagtctcctcagctgttagaacttagaaatagaaaaacgtttgcaaagcaccagaataagaaaactcattaggatggaatccaaggcccttacaatccagcctctacaaacttcctgtctatcttccatcaccccatcctttccacatcctacagttcacggatgacaaattaggtggcagctcttgagttccactatcactcatgtcttcactcacagtgtgttccctcagcttagaaaacctccctcctcctggaattttctctacttaaataactcccattttactacttgagccaaaaatcatctcttgtgtgaacttttccatatagccctcttttttgtgatcttttagcactttatttgtaattctatcattgaagaaagaggtctctacccaatatctgaacaaaaaactgaattcactgcttgctaaattagcaaggaagaactgtattttcagaggcattctccctgagcaaagcagagagagctgatcttctatagggcttggagacccttagagtgcaggcactggcagacttccagaagctggaatgtttaggcattagttgacctttagctgcagaagtaaagctggagtgagaatgttgctgactggctgacttgcctgggcatgtgcactagagtttagctgttgccaattgtctggctttacaactgtgtgtggtgttggctagctttcagaagcaactgactggctagcttacaaaagcacaaatgattgccagagcaagttgttattgacccagttaaacaggtacaaaacaatacattctgatggttactggtcacttgtcactgtggccacagaacaatcagtcttttccagacaggataggaactttccattttcttttttttctttttctttttttttttttttttttttttttttttgagatag

SEQ ID NO: 54172 - DNA, 1666 bp, Homo sapiens
attagcaaaatacactacctgttaatttttaacaaatatagtataatattaggaaaacattaaggaagggatgtcaaaaattaaaactatagcatataaatatctttaaaaaaatactgtgcttgctggtacgctccttcattcacactccttcattccatgtttgaagggtgttagttgccctaatcaacagctttaaccataggactaggtgactcattcgtcccatagtcacatctctgtagtcagaagacaaacatgacaaagggcatgcacaaaaagtttactctgatatgccttaaaaatctgtagacaagagagggccaagataagtttagcctgtttaccacatgctggaattcagctcatttcacatctatcttctattgctgtaaatgtatatagtgtgcactccatgaaaactgacaccaatgttggcaaaatacaacaaagcttcctaacacatcaaatggatttttaaaaatctgagctccaagaacacatatcttggagcactgagctcctgcaagcaatcagctggttttaatttctctcccgcagctgctaaaatgctggtttcaacctgtaaagatttctgggccccaccagtcagcacgtctcacggtcttcacagccccagattccgggagacaatgcatctaaaacgaacagcggctgggaacggtggaggataccttcacgatagttgcttccagagaaaggcatgcaagtctaattttaatggtaagaatcacttactctgttacagtggtgctgctgaaggaattatcctgaaggctgaaacagaaacaagaaaacatcagccaagtctggccggggagccgtctccctgattgctctccgggagtgagcacatacacaaacatggcattgcaaggcaagtctccgggctcgcccggcacgctcgctctaccttgggctgctgtctgcacatgctcgtaacgacacccccagcaggggcccagcggcacgggcgaaccacaaagcccggcagcccgcgaggctgcggggacagagctgggcggggcgcggcggcggggctgggaccccgggatccagcgaggagcacctggagagttaccacacgaccccgacctcgccagcccaggcgccgcgtttaatcttgggctctttgtgccagccaccccccgaggctggcaatgagaatgccccagtgtttctgccgaagtgctgaaatacccgggagacttgctttcttccacatgtctcctaccaattttacagagctcaccccaaccccccacactcccaccccacccccagggatggaggctcgcagagattcatccatcgttcagaaaaagtcaggagagaacaagaagggggagggggatattgctgctgtttggtgttttattttgtgtgtgtgttttttgttgcctaggaaaaagaataggctctaaagcagggctggctgcatcacacctgatctgtctagagcgctcttatttcagtcccagagaggaagcgcccagccccggactacagagctgtgaatgaacccacgcagggcgagtggagaatttattccaggggttagctggtgattaggacaccgtgcaaggggtggggcttgctatgcctagagcagcccgcttgagctcagctccctagctagcacctt

SEQ ID NO: 54173 - DNA, 415 bp, Homo sapiens
gcctttggaatgtaagtagatttggataaagtcatgacagtggggcacccatgatgggtttagtgtccttataagacgagaaagagaccccagcttgctcaagagctctcactctctctctctctctctctctctctctctctctccccctgccatctgaggacacagcaagaaggcagccatctgcaggccaggaagagagcttgcccatgctggcaccctgatctgggacttttcctgtcactggaactgaaaaataaatacatgttgcataagccacccagcctgtgtgtttggttgtgggagcccaagctgactaagagcaagactatgctggaccatataaatgggcaagattttagagctatcttcataaagggaattggactactgagtcacctcttagggtttaaag

SEQ ID NO: 54174 - DNA, 3235 bp, Homo sapiens
aataaggagccaattattaaaagcactgctaatgttatccatcccttgtaacctctgtgcttacacattttacaaaattggttcacattacacgcacactgtatcctcactccacttactagattttaactatctctatgattaaatgttcctccaataatttttgatgttgtaaacaacctatctcactgatgtgccaaaaccatctctctactgcctgacattccttccagttgtttccaatgcttctgccctttgaagaatcgttacaatgaacatgcttgaacagtctgaggctgtgctagctggatgtttcttccagcagattccccaaccttgggtatcagtattcagttaagatacggagacttaagcaaacagctgcctacatttgcagctacaaagctgtgtctgtttcctgtgctgttgcaggtaagaaaatggtagccaatttacatcctgttccttgtctccttgctcgtgcgaaggtgtccaggggttgggcttctgaactgactttctatggaagccaattcctccgaagaagtaaaagacacactgctttaactataaggctggctttgtgagttggaggttattgatgtatgaacattttctagttttcagtgagtaaagagggacggaaggtttaacctctagcaaggggttaactttcagcatcaagtttctattctagttggacacaaggatttcatggtcaaactacatctcaccaccttgatacctggggctgcatccagtcaaagaggataactttccagatgggggggtgggggaaggtaacaacattagaaagtgcataagcagtaactcttccctgctagaacttctaagaaatattgctaagctgtcattaggaattaaggtgaaaatctagcacaggtcctcgatcctttaaacacaattccaaaacccagaagactgaaaaccgaaagctacatttggcaagcaaccaaacaactgcgttcacttggtggcaagcctgatctgaattgacatgaggctctttgcagctttatcatcaaacttagcatgcctgttcacatgttttgctgaggtggtttgatgtgtctgctgtttcaatcctctggcggtgctacagtatacgtggtaggtgctcagtacctttccatagctccactcccttttatgggatggactgtgtccttgaaaaagatatgttcaattcctaaccccacatacttgtgaatgtgaccttatttggaaataggttctttgcagatgtaatcaagctaagatgagatcactggagtgggccccaatccaatacgactgctgtccttataagaagggaaaatacagacagaaacatacaaggagaagatgaccacatgacttcagaggcaggaactgaagtgctgcagctgcaagccaaggaacgcctggagatactagaaactagaagaatcacagaaggatcttccccggccagaggtttccaagggagaacaacccttaccaacaccttgattttggacttctggcccctccagaactgtgagaaaattaatttctattgttttatgccactcagtctgtgaaacattgttacaacagccttgggaaacaaacagacccaactcccaccaccaaaaaaacctaaattctaaaacatatctggcctcatgggataagagactgtggagctatattttaatatttagtattttaatatgccactttattctgaatatttcaaagtaaatgcaggtttttcaatcttggtttctgacaatggtatttacctaaatttgtgatgattttgtaatagactgctaatttttaaaaaaaaagaaggacagagaacacatatgtagcttttaaaattatcaaaacagaatagttaaaacaatccaagtacatcttaaatcttctatatgagaatgaatgttccccattcctatgatgttgaggcagtagcacatttagacacaatacagctgtcaaaatcccaaatgctgcaaaatcaaccatggtcagtgaagatctatgacatctaatactgaaagaaaacgaagtgaaagaatggtgaagcatgtccgaagcgtagacattcatttccttacacatttacctagcaaacacacacacacacacacacacacacgcacacacccctacatagattccatatgccagaaggcacagggaatataataaaactataatgagacaggaccttacactctaacaggaatgtaacaaaggcacaaattgatcttctcccagttctaaaatgttttctttggcactaaacttgccttttgttctcctatccaaccaagactagagtttctgtaattttatcatttttatcaaacatattaaaattatcacattgaaatcctccgtttacagaaaggtggttcatggattaaccaaagatatacagagatcaatatacaaagatattcacagaaatgccatccataccaatgcaaacaaccaattcactaacaatactcctattctgccagtgaaggcagaatgctccctcctgcaaactttgcctcaagctgtctacatttgaatccccagaacctatgaaaatgttacttacatgcaaaggggaattaagggaacagatagaattaaggttgcccatcaactgactttaaaataaggaaattatcttgggttctctgaatgggacccgtataatcacagaggtcctttaaaatggaaaatggaggcagagaagagatcagagtgatgcctaatgatgacttgacttgccattgctgggtttgaggatgaggaaggggccatgagatgcaggtagcctctagaagttggagaggcaagaaaatggactctcctctgggacttccagaaaaactgcagccctgtcacactctgattttagcccagtgagacccatattggacttctaacctatacaactatgagatgataaatctatgttacttcaggccactacatttgtaataatttgttacagcagcaacaggaaaccaatataggcactaataaatgacggtgtatcctgacaatgaaataatatgttgccatgattaagaacaagtgaaaattgtcatgatacgtgttcagttgggaaaaaacatggtgggaaccacaacatgacccaaattttgctttaaaggttcacaccaaccctcagatatgttagaaatgactagaagcacataaaccagaatagaggtggttgtga

SEQ ID NO: 54175 - DNA, 3816 bp, Homo sapiens
tcttcatttcaaagttcagcctaatccgctattttgcagcagctatggccatttatcccccttgatttcttgacatcatcttctctgcttctggctggggaacttttgatttgaatacagttgtctgtgtggggatccttcatgttaatgatgtggtgagctggcagggatgataggtgagagtacacagtgtactttttctagttacgtttcgcctcatcactgctataggggcctttctaaacgcctgccacaccaggagagagacctacagacccaagcttacccgtttctgggcagcctccaggggacaggtagaaacagaacagatggcctgttctccagtatctagactcagaagcaagatacttctaaccactccacgaatgaagcaaacacacgtacctctggctcagccagggagtcacagtcactacccttcccctggtttcggccccagccctgtccaggcgtggatgctgcactctcctcgctgtaaaccgtccaccctcccaacccaaagcaaagagcttccaacagaggtgggagcattagcgccgtacccgcccttccctctcgatcccggccagaaaactccacttcccggattcccggccactctctcccgccccctccccgggcgatccagctagcgcagtccagatgccagcttagtgcccagtccagctgcgaacccccacactccgagccaggacccagtaagagatcccagcttcctccctcttccaggactggggttccccagattctggacgcacccctcaaacatgctagggctgaaaaaagtcctaccccgccccccagccacgccgccagcctccagcccagccccggaggggcctcctctccagaggctaaaagggaccatgaatggttgccacagtagccttcccccgcaccgcgcaagggtcctcagacccccgaggaggacagacccgcgtggccccgaagggatacctccctctcctcccggaagccagcaggtccccgcagggagtgtgctctcagagggtccccgggaatctggggaagacttggggggtggctggattcgggtgcagcccctcccggggcgggcggaggtcggcgctgcggcgcgtccccggggggcactcacgatggtcacgctggctttgcgcaggtcgcggttctcctcctgcagtgccttgcacttcagtttgtaggtctccagctctatcttcagcaccttgttctcttgctgcagcgaggccaggcggttggtgagctcctccaggcggaacggcgagatgacaatgccccccgacttcccaccgccgccgcctcccccgccgccaccgccgccgcccgaggtcgacgagcaggacgactgcatggcggccgagctgctgctgttgccccccgccccgtccgtgtcgctctcgctggcgctgtccgccatggccgcggcgggctggggaaaggaggaggagcagcagggaggcggcggcgacgaaggccgggctgcgaatgagtgggcgccgggcgagcacaggggagcgccgagctgagcgcctggcaccagggcgcagactcggagcggcggcgagagaaagagagggcgcttcccgctgccaagggacctcctctgccagagaacagagaccccgcccgggcttgggcagtattgcactggggctcgctccagccgggctgggcgcgctccctaggccgcccagcaaagctggctgaaagctccgggacccgcccgccgccgtctggtgaccacgggcgggctgggaacgcgcaggcactgcgggtgcgggaaagccaaggactgcccccgcaccaccagctcgccagccacacgtgttccaagggagggcctccgagccccctgatctaagcccacggccgcccagcctcttccgggctcgcgcccgccccgagaaaaaggaaacctgatgccccaccagcctcgcaggtgccggggacacgtggaaaggtcagccgggctccggcacccatcctctaccgtgttgtggccccatcttccgccgactgtgtgtgcgcgtgtctccctctatctgtttcacacatacacgcagttttatattctcaaaagcaaggtgtttttgactaggaaggcttggataaacctaagagaacaaagttcctctacaagaggccgaggaggatgaaacaacagcagccacaggttaaccttgttaagtaagaatttgcaggagagacacacatctcctttaataacctcataaaccacactgcgctcaattgtttaaacaaggtgcaactgtttttttctttttctctttgcattttgcaaacatttccagcacatgtctcgtagtaggattaagacagtaacatttacctaatgaagaaaaaaaaaaaggaaggcgaaacacttttagtagaagattgaaacacctctttaagtgccaattttccaaagtaactgcggacataacattatgctatacaaatagtaatgattgagtgggagtgcaacatcacccgtctttgctatcctcttgctcactcctagaaaactttagcatgtaaaaataaaacagtaattactgtaatgcggtctaattcatggttctagctttgcagtttaagaaattaaaaatcaaaaacttttattcccccttcctcttcccaaagaaaggcttgcaggaaattggcccagcaggtgagatgattctaaacactttgccctgttgacacaaaacagctttcacttatgtataaaaattggaaagtgaaactgaccagactagttttattacccacgcttagttaacattacaacaaacacatggtaatagaaaatagaaaaaaaagtgtaatttttttttctgttgggttgaactttctgaaagatttctaaagtgttaggaagaaagaagaatgattcttattcccactccctcattatctttaaacctaaatttgatctcatgattaaacggtgattcaatggctcttggaaactggcacctcagaataaactcgaaaacaccaagtgttccaaatgacatcatctttcaccaagatggctgcttttagcaaacagcttaaatgccaacagcaactaaaccccagtttctcccaggtattttttagcttagtgctggagggcttctgaactctgtcactgtttgtatagcaggagggaggaaatgcttggctttgctcttgagaaacatataggcaatctaaatcattctgttacaagtgatccagtttaatttgcactgaaacttagttctctcacttttttgggatctagtacatgagacaatgagttaaattggaaacggattctggaaagctcacttgagggttgaaatggaagagtaaagctagcagggagaagcaccacagggggaaacagatttaacaacattctttcccctttattcagcactgtgatcgaatcttaagagtaggtctggctgccatacctcacaagtttctattgctccctattccatattatcttaaagcttccacttttagagcttattgcaacaggaacattccttccaggcagagcagggggcaaattaactctctcttagcgtcaccacaaaactaaccgccttggaaaggcggactcacactgcttcaagtcagcagaggggtggagtttgaagcgcctggttttcttaaagggcccaagtcatggttaagcttaagaatgtagtggccttcagtggaatttggaggaaatttgcattttgacatgggacttgtaggtagtaatcgtggttagaagactttagggagaaagccatcttctaaagc

SEQ ID NO: 54176 - DNA, 520 bp, Homo sapiens
ctcaatcttcacagggctgattttcctgtcatagtttagtcttaggtatgatagcacctttttattttctgcataacacttattattagctagtatctttctgtttattaacttgtttactgatttactttttgtattctctcactagaatttataaaacatgagaacagggatcttattggattcaatgaaataccagtgtctagaatcatgtttggctcaaggtgctcactcagttaagtatttgctgaatcaataaatgaataaacaggagagaaattggcaagactgataaggaccaaactgataaaggtggctatctcagggatgggggtggtgagattggaggggaagagaggaaaacgcttacacatgttttactttatattcttttctaccataaaaggagagaaatgattatatgtgattttaaatttcctttttgggttataacttatttttcaaattttctaaaataaacactttttgcttggaaattaggaaagtgaaatacagtata

SEQ ID NO: 54177 - DNA, 852 bp, Homo sapiens
agttgctgggattataggcatgtgcccccacacctggctaatttttgtatttttagtagagatggggtttcaccatgttggtcaggctggtcttgaactcctgacctcaaattatccacctgcctcagcctcccaaagtgctgggattacaggcatgagccactgcacctggcctacttcttttaatagatttttctcctaaccctttgctggatagcagggtgtggctcatggtggtggaagaaaccatgttacattttggttttaaaatcctttcaaggaaatatttaatcagtctaaagtccatctttataatgagactgttgcccccacactatgtaattttcttttaaagatttctttgtatagggtaaaagcttatgaggtttcctggtgacagaggaaatttacctgttatctttcttaatctgtctggccatggaatggatgattagtcactgcactggcatctattgcaggaaaactggttcctttgggtcttttggtaaacaatggtatccgttgctgccttgacatgcctgacttgacattgcctccagtcactgaaggtcctgagcttgcaggccttcttttcccaactctaggcctctgcaattccaacagtcttcccagactctccctatttcctcactggcacacacaggaactttctagattcactgcataccatgtacagaccatagggaacaaagagcactacctgcctgtcctatttctcttcaacccatccactctaaccctctgccagaggctggcagagtgccttgcatggaggtctcattccagtgtttcaaagtgggagtagatcaaaactccctctgttttggcttt

SEQ ID NO: 54178 - DNA, 936 bp, Homo sapiens
cagttttgttccctgttgtagctacagtacacagaacagtacccaacctatagtaaaaactcaataaatttttgttgaatcgatgaataaattaatgaatgaattcacatgttacttggctttctaaaacctgaagttgtcagtgtgataaaaactgtttattgtttagaacaaaggcagaggacctggttacaaggttaacctaatgactgtctctgaaatattacagtgttaaaactttgctaatggattatttcctgatgttatctgatcatttcttgttccattatgataatataatgaaacatatccaaaagtgccatgaagaaaaataaagcagggagagagggcttagagaatgataggactgcttttttagttagtgtaatcagggaaggccatttatcagaggctggaatgaagggagggacaaccctctaaagggctgcgggcagaacattccaggcagagtgaacaatgagtgcaaagtccaagcagctggaacaaacttgatgtttttgagtagctgtaagaaagacaatgtggtcagaccagagtaaacatgctggagagtggcagcagaagggtttcaaaatgcagccagaggtcaggtggtgtaggggctttgataaggagttagattttaagtgtgataggaagtcataagagtattttgagcaggataataatatggtcatatttatgatttttttattttttgagacggggtctcactctgtcacttaggcttgagttcagtggtgggatctcagctcattgcaacctctacctcccaggctcaagtgatcctcccacctcagcctcctgagtagctgggacaacaggggtgtgacatcactcccagatattttttgtattttttgtagagatggggtttcgctgtgttgcccaagctggtctcgaactcctgggctg

SEQ ID NO: 54179 - DNA, 989 bp, Homo sapiens
tataagtatttgtagaaaatatttttacagagtgggaacaaacattttcaagaactgacattttgccacctgtggataaattcccagttttcaagaacaagaatgggaatttacaataatttgcccccaagctgccaaaagtagaaatgagttaggaaaaagaaaaaaaagtgaggcctcataagaaagtgaataagaacttaagtatgcctgaaagttccagaacttcatttaaaaacctctttcaaatattttaaagttatccaaatgtttagcatcatcatcaccaatttctttgtgcccactgatggctctcatgcgtggaactcaacctgtccacaaatggatacatcttcttccctgctgtctacctccaaaagtactttcctccatagtcctaactctaggaagggtttacaatctgctcattccttcactctaatagttatgactcaacttccttaacaaatggtcaaagtccaagtccagttgattctcttttggacgtggctcaccctcctgtcacccgggtgttcaggccctgttttagtttgcctaattgctaagaccacctcccaaccaactcacctctctcactccagtccatccaggttgtgtgtgtgtgtgtgtgtgtgtgtgtgtgtgtgtgtgtgtgtgtgtgtatgtatgtgtgtttcaaagccaaattttatgcataattctggtgggcttcattggaataaatgattaaaaatttttatggcataataagtgtttgagattagcaagagtattttggaaaagtaggtttgtgacggagaatttatcttatatgatattaagatttactcagaagtacaataattaaacagttaaacacacacatatagaaatataagaattatacataggaatagacaaataggttgggggacaataatagagaatcaagaaatagattcaagtttaaatatgtatactgaatatatataaatccacatatactttta

SEQ ID NO: 54180 - DNA, 1056 bp, Homo sapiens
acacatttgaaaaagtaatgtcttggtagactctcatcctgtactttgtcttaaaaattcagaacccaaattgttaaaaacatgacaacaggaccctataaaaaataagaatggtttaatatgagaagaaaagcttattggcaaaaataaatattcattacttttatatggttttgttttttaaaaggatattctaaataactccacagctacagaattgagggagaaaaatggcataagttgctgtaaagtaaacaatagaacataaacataagagcttcttacctttcagggtgattcataatgccatagactatgaaaagaccctgaaattcctctctcctctctctttttaaaatctgttactaaattctcacatacaaaaagaggattagagggaaaagagaagtgagttctgaaataggcagttttggccaggaggaagattgaactttacacttactgaaggtctattttgtgtcaggtcaattatcatttggcccacacagcattttggtaaaataggtgtctgaagttcagagaggtgaagtgacttgtccagatggatttagctcgtcagttttagagcttagaacctaggtctaggaaaggggtgttggaaagagatgaagtcacacagacatggacttcaaccactctttaacagtgtctttgcagactacctcacacgagtggtggttgataaacggatgagtaatgaatagatttgcaaatgccgtggtcgaaaaggtgacctgacttctcattgacccatctaagcagcaggcctgattacagagccactaatgttctatagccttcttgcctcatagataaatgataaatttcttaagcaccttgtaactcagtttatttgtaaaaggtgggacagcattctctgtgactgaggctttgttacaaacaacaagaatcataaaatgctttgcaaatataaatggttatggagaccataatacaacgaagcataaataacatgactgaaatcatgttctgactaaatgggttactcttaacgctttcaaatgaccatcttga

SEQ ID NO: 54181 - DNA, 1064 bp, Homo sapiens
cggccttgtaaagtactggctccccctttgccttcccctatgattgtaagtttcctggggcctcctcagaagcagaagctgctatgcttcctgtacagcctgcagaaccatgagccaattaaacctcttttccttataaattacccagtttcaggtatttctttatagcagtgtgagaatggactaatacaactttctggctttccttctgaaaatgggtggtaattatggattaagttgagaaaatagttaaataagcattgggtaaactaggtaaattaagaaggccaaagaagcgtgttctcattttaagggatgcatgtgcctcctgtgggatggccatcagcagcattctgccttcctttccctagttctaggtgctcatgagagcctggcattgtaggtggccaaaaaagaatcaggtttgaatgacaaagtttgcacacctctgaaagaacagcaaactgccattattcattccacagaacaaatgaccctgcttaagctgttttttttttagtacaaaccagtttgattctttttctacctcttcatagaaaaacctgaattctctttcctttctgagatgggtttgtttattaacccaaacaagatcacataggacatttttcattgctccacctggaaaagttccaacactgagtcatgcatgcttactttagaaactatatctagcctggattaagaagcagtaaagtgccatacaggttttaaaaagaagcacttttagccacaaagaacagaataaagagaattcaggtttttcctatgaagaggcagaaaaagacaatgttgggacagactctaaaattccttcatattctttcttattagtactccttaactcagatacagaaattcctttagtcctctaagtaagatcaaacaccatactgacttggtcaaaggagcactgaagtctaaagacagaatgcaggtagaaagaagtaaaagattacttatactgttctcattatctaaaatctaagccacttgtgaagaagactagacaatgaactaattgctagccacaaactagccct

SEQ ID NO: 54182 - DNA, 843 bp, Homo sapiens
tgcaaattacaaaatttttctcccgtaatcagcaggcttgttttttagtttctaaagactaagaattatacattgagtaacactgccagataactcaaactgcaggtagttacagagaccttcaacccatgtttttcacaaaaagcagtgggtatacaaactaatttgcagatgctaaccattttctccttcatgttggaaggtggtcgaagagaaaaggggacagagctgataattcaaaatgttccagagtcctatatttactttgttaagagtcaacctcaggtctatgtgttgagtcatggagtcaggaataactcaaataagcctctgatatcatgtaatatttgcttttaattccaaagttaccaaatgttaatgctgttcaaaggtaccagatggggttggaaagaaatgacttatcctagaggctgcagcttgtaaaaatgtagttgatgcaatagggcctcctggtaaagatccactttaaattttaacaaaacagcctattgtgtttcttatgaaaactccaataggacagaagatgagtgacagtagcaggcaaaaccagttctgatcccatctggaattttttaaaacaatgtaaacatttttttacaggaatgataatgtatccatgtaccatttgtgcattaaaacatttttaaggaaccaacttagagttttcaattttctttacgctgccaaggaaggatgttaaaaaatttctgccttcaccatcatttcattaagaacttgttatatcaaagcaaacaaataaataaatacatttagctgtatatggaagtaaaaactctatagctacagatgcatcttttaaat

SEQ ID NO: 54183 - DNA, 919 bp, Homo sapiens
tgtctgactgaattatctgaattatttatttaccattatctttctgtcttttttttttttttttttaaagagacagggtctcactctgtcacccaggctggagtataaagaagcaatcagagctcactgcagcctccatcttctgggctcgagcagtctacccgccttgtcttcccaaagtgctaggattaaatgcctgagccagagcaactggcgcattgaccatttttcttattgtttaaacagattgtttccaaatttttgctctgttaagtaacactttggtaaacaacttggtgcaatattacactttacacatcctatttgactcagatcttctgtgaattcttagtgacctttctgaggggtgaggttttggtgtgctgcatgctttgtcaagaaagaagtgggttaccttattgctcaggttcacattcgcatttctaccgaggagcagcgacaccatgtccacgtgcccttcctgagctgcgagatggacggaagcaattccttgccgggtaactgcgttggcatcagcaccatattccagcagagttgtcgctatgtccatctggttctttttggcagcgatgtgcagtggcgtataaccattctgtcaacacaaatcacttggtcacatgcccaggaacaagataaaaatgtgcacagtgcattttcaaatagtttatgtctctttctagtggttttctatgattgcttaagaaatcatgattaagtaagcaaatactggtaaaccaagtggtacatgaatatagtgccctcatgtatcctgcattcctaagtagggaaaacataatttaatatggacattttatttattttattttattttattttattttattttattttttgagacagagtctcactcttcgcccaggctggagtgcagtggctg

SEQ ID NO: 54184 - DNA, 752 bp, Homo sapiens
gccttcattatatctatttcattcaatgaccctgatatcaaacaattctctgagatagctaattgaccacctcagaattttaggaagtacacgcagaaacagaaattaattttcttcactttccttggccctgttacgtatcaacatgcttaccacaccaaaaccataacaaccacccacttcaaataaaaagggggaaaatgtagagaaaaagcaagaagaggcgaatgaagactgccctgaagaaaacttacatcttaggaagagacattacaaagcccacagaaaaagaaccaataagttcctccttttactcttagccaccggcaaacaaaacagccaccacttcctcaaatatttgttgaatgtctactatgtgttagtcattgtgtcaatatctggatacacattggtggaacaaaataaatgtggcacaaataatgacttatttgctttcatttcacagcttcttactctctctcctctaaaataaccttgcataagtggcagggcaaatattggattcttaaccattttcccaccaattttgcccatagagaatatattgctgtttatatccttcgtgtaaaaaacacactattttgtcctagactcagtatcagtgggttgtatctcactgccgtcatttcatggaataactaggagttactcaacacagtctatagctggtttttttaaccttttgataaccttgtatcaaaataatgcctcttttgatgctatatctaaga

SEQ ID NO: 54185 - DNA, 1330 bp, Homo sapiens
agaaaatagcttattacttagaagattttctgaaacaagcccactttgatgtgtagctgtgaaaatattaatgccatatactacataccttgtatggcacagtagttaagagcacaagctagagagttagactgtccaaattggaatcttagctctaccactgtctgactagggtgaaaatttgggcaactagcttcaaggctcagcctcagtctccttgtctgtaagatggggataataaaaaaatactttctcttctcaaagggttattaggaagactaaattagtctccacctataaagcaatgtaataccctacctagtgtagaataagtggtcaataaatggcctgggagaaaagacatgaatccaggacatttaattcttcctcttccccttcaagccaggaacttggcagttatcctagaatccgatctctctctcacatcctgcctacaatccattgccaagttctactgagtcttcccctaaatatctttggtatgcaacaccccctctccactggcatagtctccaccttggttcacactcagcatttcgtgcctggatccccatcagagcttcctgactgctctccctgctgctgctgctacaacacggatgcttgagtgatggctctaccccataaagctattcacagtcctctcttctaccaccaccattaaggtctctccccgctttgagcagggtgatttccaaactatgcaagatggcatatgaagatcttcatgctctggcacctgcttacttttcgtgccacacactcaggtcccctttgctccaggaattcaaaaatactgtttcccacacagcctaatagtctctcctacttctgttactttgggcatgagactcctgttcttctgcttgactatcttgctgactcctcctccaaagctcagcttcattgagattctcctctgagtgcatctgagccaggtgagggtctttctgtgggctcctggggctccctcttcattctctatggagggtgattagtggctcttatctttctccttccctgcctcttctgggtgttactgtagtgttgccactatgctttgattggctttgtctccaacatttgatgcaatgcctgatccacagaagtcacttaataaatgtttactgaatgaatacatgaatacaagaatgaagcaatgaatatttgttcctgctctgtcactgattaactgtatgtttgacatcaataatcagaaaagatgttaatcatggaattaattgtcattttatcccagtatctagcactgtgtcaggcgcatgtatagagagagatctacctacctact

SEQ ID NO: 54186 - DNA, 575 bp, Homo sapiens
tagataagaaaaaggaaagtaaatattatgaacaactttatgctaataaattgaaaatttagataaaatgaatatatttctcaaaaaatacaacttatcaaaactgacacaagatgaaaaggaaaatctaaggagcctatgtagaaattgaaattactacaaaaacaatcattacaaaaacaattacacaaagaaaattccacacctatatggttttgctggtggtttctattgaacattttgggggaaaaatcaatatcacaccaactgtttcagaaaacaaagcaaatgaggacacttcaatttgttttatgaggccagcataacctttgcaccaaacctagtaagcaaattacagatatgcacacatacacaccccagactgatctctctcatcaagagaaatgtaaaaatgctttacaaaatattagcaaaatcaaatttaataaagtgaggcttatccccgaatacaagcttcatttacacataatggtgaaatattgaatgcttttcctctaagactgacaaaagtattggccctttttaatttttatttatttattcatttaatattg

SEQ ID NO: 54187 - DNA, 755 bp, Homo sapiens
gctgtaatggcatttgcacagctgttacaagggaagttttaaaaatgcaaataagaattaggtagactgcacaagctaataaagagagctttgccaaatattaaaaaacgttctcagtcaaaataatcatactaatgaaatagaaagctcatgtgggagtgattttcagtagttttaaaacgtgaaaattttgctttgacttttatacatacggagaaaacagagtacatgttaccaaatcggaatacatgctttccacggcatttcacaatgaggcactattgacatttggtgaaggacaattctttactgtacaggatagttctgtgtactgaagggcaaagtgctgttactacccctgacctccacccactgatcccagtggtgtcccttcagtcaccatgacaatcaaaacacctccagataattttaaaagacccataaggaagtagtttttgtctacgtgaaaaccaatctagtgaaattctcccatgaatatgtcctaaatatacttttagggcaagaggagcaccaaagaagacaatcacttccaaaaaacttgcttgtggtctatttccacattaggtatctgcacatcaccttcctttattgacaatcattgatttttaaataaaagaaataaaaagaaaacaatatccatagctgcctctgagtcaaaaagtcttaatacaaggtggaggtagggcagtctggaatatctattctgcaacaatgattctccatctttttttttt

SEQ ID NO: 54188 - DNA, 2150 bp, Homo sapiens
atacgtagtgattctgtttccctttccacttctattgtcaagttctatgtgtttaaacaatagatttcttgctgcagttatggccattagtaagtagaaaaggttttgcctttcatttcacctctgcaagccaagctgattcaacaatgcatccttcatcacatgccattaatcttggctaaagcccttccttaagtaaacaaccaaccctgatgatacagccataatctgtgaattcaagattttgttcccaaggcaggcagtttccttgcctaaaaaatacatagcaaatagatcatgaaagattaaggaagctaagatgggctcctctggcatgacagggaacggctgaggtaagtcagcaaaagctacataaaggactgggtcttgggcttaaagttcaaataggcttagagataaccaaggggtaagaagaggaagtagaatgagtgtcagttaccagaggattaaatgatattagtattgtttagtctttgccaattaccacgggaccttgagaaagccctttaggttctctaggtctcagttttctcatctgttaaaatgggtataatatgaatcatcctatttatatctcaggtttggaaagaagaagaaaaaagagtacttgactaagaacaaaccttggagattatctggggaagcaaaaatatttgaaaaagcttgaagtggtatacaaatgtttaccagtttttaactacctttcttcctcttcagttgatttgtattttcagctttccagcccaccacattgtctaatccctcttgatctccccttgattcctgcttccagtttggccaataaaacttctgttgtatggttgatgccttttcatcataagctgattgctcctctctcctttctccttgttttagcataaatctatattccatctcacctgctcccaaagctgccatgtccctaaatttagtcacaacctcaagttgcgatactactgtcttctataatttaataacctatacaaagcctcctgtgtttctttctcatctcataattgcatatctcattatgataactaatacaaagccaggactttgtcttacaatttctttaatcccaataatttagattgaactcatgggcaggagacgcaatgagtcatttggcaaatctttgctcaaagttttgttgaatcatccagatgatgaaatctgttgctttagttccacagggatgttgaagataaatgtgctaatatgtaagaagtgcttttagctcttataaaaaagaaactctatcaatccaagagattattatttcagctgaaaggccgtcaagcatcttcccacaattacttatttatagctttagaagcttttagcaaagcaaaaatcagcatcttcaattaggtcacccaagttccaaaattatgaagtatagaagccaatatgtaacgaacagctaatgggaatagatcctatgaaaaactgtaggcattgtataggcatcttaaggaagaggctgaaatttaagcaaaatcacacctgatttccagtgagactcaatggcagtgaacttggagcctcaggttctcttctgtaaaactgagaggacccaatctgatgcttcgaattcctttcctgctctgacaattctatgccaccaggctggcaaaattgcaagtgataaagaaggtgttatcacatggaaaacaactgagcatttgctgaagttcatgaagagaataattcacagagtcagagcaatatttatacccaacattccaatttaggtaattaattcaacaaaatgctacatgtaaatcaaataagcagtcagagaatatcaaaatggataggagtaaacatttctttctggttcagattaactagtgaaaggtactgagagaaagagaaagggagagataaagagagatagactaactgacatatcctgactctgacctgtatatgtgtgggcatctgatgtgaaagcccagggatgttcacagtcaaaatagagtaaacagtaaagtaagctttcctgacattcttggtgaggaaccacagagataagagaaaaccagaaagtggttcttttaaaagcacttttgcctaaataggtctcatgacagaatataaggtttcgggccctaaaaaaaaaaacc

SEQ ID NO: 54189 - DNA, 1401 bp, Homo sapiens
atttacatggaaaacaaaattaattttttggattataatagacaaactgggtatatggctgtatgactgcagggtcgaatgcaaacctgagatctgtcagccataaagtgatcaataattaaaatggagttcacctccatgctgtaattttaaagtataactataggtttctctaagtttccctaaaatatatgttaaagctaaacatctataccataataatattcattagtaattataccctgttgattaacgagcattctgtgaaatttaaaggagaaaaaaacacacccacccacataattaggacgtgtttacttaataatcctgaatatcactatgaaaaacacaccacgtcagtgaaatctaaatgactgtatttaactgtttaaatattttagcagtgtatccgagttgtgatgattttcctccaagacagaacacacccattaatagactggaaaaacaaaagcattcagattctagcagcttcttaaaaatctaaagccaatctcttaaaaattcagcctaaagatcacttcctccccagagccagagaacaatgaagagaacatgttgcttattcatttcttaccttttttcctttccttttcctatgagcaggttttgcatttttctcctttggttcttcactcatctttcctttaaatcaggtgagtttataaaagacagatcaccgccggtattccaacatccaaaaccacggcaaagagtcaaagcattgagaccaaagtccatttacgggtgctccccaggcaaagcagccgctgcttaaacccagcccctgctgctgtcagagagacgcgggctgctaatgtagccctgttcagctttcctcaggaagaaactgggtgttctctatatcaaacagtcaattattcttctaaagaaaatcaatattttagcctttcatttttaactaatcgttaccctgagataaggtcctgacaagactttgttgcttgttcctccacagtgatttgagcctggaaatggtgagagagagagaaagagagagagagacacacacacacaccctcacacacacagaaataagctacagactgctgacaagtctccgaagccttcccaggggctgatttgctgcttctagcaggctgggaagctgaatgtaaattgctctccgtgctgctagcctcccatactaacacatgtgttgaatgcatcagggcataccggaggaggcagtcgggagagtgataaaagatcaggttacttggtctgtaaaaaaaaaattcaatgattcaaacaataaaagagacctaccactactggagaagtcacatcacaggctagattttctccatgattactcttttttttttaatgtgacatgcaaaaaagatgccaatcttcacc

SEQ ID NO: 54190 - DNA, 1195 bp, Homo sapiens
aatctgaaaaacatgaaagaagctaattagctatgatatcgtttatctgacttatttgacatgaattaatcttttatgtggtcaagagtctgccctctgatcagctatgatcagttggatgactctgaaccccaaacttcctacttttttctctttaattaacatacacctgaatagtactttttgtatatcagacccaattccaagccctttacaaatttaaatacatttaatcctcaaaataacgccataacatcactagtgttgttatcttcattatacgaataaggaaactgagccctggagaggttaattaacttgtttgagatcacagagctagtaaatgatcaaaccagaattcatgcccagggagtctaactccaaagttcatgctttcaagcaggacactctgttgcctactgctcaaagatatcctgtgacagagaaaacgaacgcacacaataatatttgtaatgtattctcaacaataaacccttaatttgctaaatgccaaggatttcattttatacttttcctaaattcaatactcttatcctcaattgataatatccattaagttactaattcccttatctgtaaaactatcaggactatgtcagatgccatttataggtgaacgtcattgttccagaaccccatagcttggaattcagggtaatttgctctcattttacctgaagctactctttgctaaaggttttatgacctgacaacatcatggattagaatatctgcttttgatttctatcaaacccaacatacctcctctatgcaagctgcacctgataaagcattgtttacttttatctttttctctcaaatcccccatgatcatccaggagcaattcatgtgttctctgattctctgaagtgctgaattatgaccctatgattctgtgcttagcctctgctgcagaaaggaatagctttacatgtcccacgggaaaccccagcttcaggaaagattgttggagagctcccagacaaaatggtttcaagaaaataaaacaatggagtcccaacatcatgtattgccacaatttcagaggaagaattggcaagttaaataaataaataaataaaccagatcacaacattaaaattgtaaaacttgaagttcactcatgtttaaaaaaaatcgttaatatacatggatctaatttgctgacttgtt

SEQ ID NO: 54191 - DNA, 739 bp, Homo sapiens
taaaataatttaatattaaattcaaaaatgaggtagaaacaaagcacagcgatataaataataaattttcctttacatttttgaggcggtcttttgagttttccatttccttcttaaggtcactgaaatgtgctccttggagccagcccgcaaatcacgcatttagaaaaacataactatacactcctaaccctaagtattagaagtgaaagtaatggaatctcgatgtaaacacaatatcacttttttgatgagctattttgagtataataaatttgaactgtgccaatgctgggagaaaaaatttaaaagaagaacggagcgaacagtagcttcctgctccgctgactagaaacagtaggacgacactctcccgactggaggagagcgcttgcgctcgcactcagttggcgcccgccctcctgctttttctctagccgccctttcctctttctttcgcgctctagccacccgggaaggcctgcccagcgtagctgggctctgattggctgctttgaaagtctacgggctacccgattggtgaatccggggccctttagcgcggtgagtttgaaactgctcgcacttggcttcaaagctggctcttggaaattgagcggagagcgacgcggttgttgtagctgccgctgcggccgccgcggaataataagccgggtacagtggctggggtcagggtcgtgtctaggggacggccgagggcctcggagggcgagtattg

SEQ ID NO: 54192 - DNA, 362 bp, Homo sapiens
agatttagaagacttggcacttttcaggcagtgttatgtaatggaactgggctctggctgggacttggaagcctgggttcagttcagactgtgtcacttattaactatgagagtagtcaagttacgttgtttctctgggtgccagtgttttccatccacatgaggttgggctaagggtccttaataaggacattcctggctccatgattcaactctctatgactcaactgtttaagattgtgacaacttccatcaaaatacatttaaaatgacctaagcagttagccaatttatccaggcaaaaatgttgtgtagttcaaatttaaatacaaaatttacaaagtagaaacaaacccagaaga

SEQ ID NO: 54193 - DNA, 2397 bp, Homo sapiens
aagtcagggcgactcttctggtcttaacttcctagattttcctagatctgggtgcctctgtgtatatattaaccttcatgcatttttgcccccagcaattgtgtacagtcagctccaaaggcacagcttgtgtgctaacgtgcaaagcgaagtcaaaaccctgtgcttggcgctcccttctaactttctggcttgtccaagtctaaatattgacatcgctcctcagttgagatgtttgatactgctggggatggaaacggtgcagctaacagtaggatctaatgatatatttctacatagttgccttccacttcttttcggggggcagagggctggattctcctgtctgcacatcaccccttggttgttttccccaaagctgagcacacacagacaaggtaaggtgctctgcaagcccctcatggcagctcctcctgttgtcacagcaactcacaacagactccatagacacggggttgcgggggaggggaggggagcgactgtgggctggccagtcaactctcaagagggtgcaagcgccaaaggggctagcgtattcccctgtccgggtcctccggtccccgcccggcctccccatactggccttcgaaggggaagcgccttctcgtcggcgcggcaccaccccctccctggcgcagccagcctgctaagggtgcctgttgtacattttctcagctccaagttaggggtgcggctgtgcgggcgctcctagaaatctcttgtgcttgcctctgatgggagggtccccggcctctcagagaggcgagggaggcccccctagcggctcggtcccacaactctctctcggggcgctgctggcctcgtggcacggcccagggcccccacttgccacccgctggggccggggcggtgggggctccgcagcggctgctcggagaagtttcatagcatagagcactcacgacacagaacctaccctgaagccgagcgagacgcgagctctctccgccttcaagggccggggggagcgggggggcccccgccactcagcagcagccacggctgcgcgcggtcgcgggtgtgcggggcccctgcgcgcggcgcgccgcccgccgcccaactttgcacaaaggcagcatggcactgcctcgccctgccgcctcgcccggcgccgtggccgctcttcccagtcccgggcgagaggggctcgcccctttccacccgcagccctccccttcgcctgcccccaccccgctcccaggcggggcagccaggcggaacggagcacccggcacctcgctccgccgccgtggcggccgccgctcgcactgtgacgttagcagccttcgcggctatttatatccacacgattggatttcattcatgaaaccggggcctggtgtgtctgtgctctgggacacgggtggcaaaggttcctcggctctacgcagacccgacgggcccgggcacggaggcggatcgcccgggacaaaccgacacagagcatgggagaccccggccctttccccgcgctgccgggaggggagagtctgggccatctgtgtccccgtacccctgccccaacatcccacccactcccgtgcctttgctggccctttgtcccaggctctggaaaagtaagttgggccactaaccggctgggcagcatggctttcttccccctaggagctgaccggccgcggactccgagggaggacattggcttttgtttcaaaaccgagcccagctgctgactaagggctgcattagcccagcctcctcctccctgggcggctgcacgtgctggctggctcctccactctgggttaccttcctccgcgacttggcgggaggggtccccccagggggcgtagggacgcaccgctgaccccgacccgggtacagaggtgatttataacctcctgcaaatggctgagtgaggaggtgaaattgactgtggcctccatgggctgtcttggtcttccaagacagcccatgcctcctcacagaaacttctctctcttccaggctgaccgtgagttctgaggacagaaccaggggtagttttcatgcattcacataaatgcttatagagtgacaagatgccaggtgcctggccaagctctacggaggtgacagtgaaagcaaacaaccgggtgcctgccatcagggagctttcagtcagcctgctaaaattagtatgccttatgaaacccatcactcctagcctgtaaagagatcactggggaataaagacacaactgtgttcagctaccgagaggaatgaatatattcatttaataaacctttattgagtaggctgtgtgcagagagctagggatacaaagatggaaacaatgtcattcttggcctcaccggttctcaggtaatgtgttcctaagatactgaaggact

SEQ ID NO: 54194 - DNA, 722 bp, Homo sapiens
tataacaacttttaattattaattttctcactcaacacattgaactactatcatgtggtattctgcaaaaatatcacagtgggcctcatttgttaatagtctggtaatacagtcatgcatcccttaacaacagggatagattctgagaaacatgtccttaggcaatttcatcgttgtgcaaacatcatacagtgtgcttacacaaacctagatggcatagcctactacacacctaggctatatggtatagcccgttgtttctaggctgcaaacctgtacagcatgttactggattgaatcctgtaggcaattgtaacacaatgatcagtatttgtgtatctaaacacagaaaaggtacagtaaaaatatgaataaaagactaaaaaaatggtatgcctgtatagggcatttactaggaatggaacatgcaggactggaagttgttctgggtgagtcagtgagtaaatagtgggtgaatgtgaaggcctaggacattactacacattcctgtagactttataaacactgtactctcaggctacactatattcataagataatatttttctttcttcattaataaattaatcttaggttactataacttttttattttgtaagcttaatttttaaaaaccttttggctattttataataacatttggcttaaaatacaaacacatttagctgtacaaaaatatcttctttatatccttattgta

SEQ ID NO: 54195 - DNA, 2636 bp, Homo sapiens
tttgatgtcatcaatctttttctttgcatacttgaggtttgtatcttgctcccaatttcagacgatgaaagtgaatttaatcagcaaatattctgactacaataaaagagatcctgaaagataaattctcaggtattagaagaggcttttagggcaaccctgcaaaaaggctcctttgaaagttgcaccctttgcataaaaatgtttctcagaagaataaaatatttagacagcaacattacaacagaaagcctctgccttagaaaaatgcatattcaggctctccctttgtctatctaggaagcttcctgtggttagtcatcacctttaaaacatgaggtcatgtgttccattggaacaggaaaaatatttcagatctgtggtcctccaaaagatatccaaagcatttgtaaaaggagtaatggtttttgtgttatgttgctactaaaattcacaagttggataccttcctgtgtcatccttccttatacctgtatcaagtaatttagtatcactttccaaattacaagttccctgaaatattttctttgttccacacattaccaacgatagcatctaataatggttcttagactattaggtaactcctcagtgaataaatgattgggtgagtagtcattcagtaatacttaaggattgtttcaaaatgaatttccaactgaagggaaaaaaccttgatttgtttgccttgacacatcttgtcacctttccccactgtctcacaacattctctacccccaaattcatgaaaaatgcacaaaaaagacctaccaaccttggtgcatgtgttaaggcaggcaatacatgcaaacataaaatataatcttagcaaaatgagatttttcttttccatctttgtaaaaatataacgcatgcaacgttattttctaatatgtagtggttttgctcgttaggtacttaggaataaacatgttactgccaatttgctcacagaagacagatttgtgaggtgaattagcaaagaggctggagagaaggttggcgccagagaggatacaactgattataaacgctctcctgggttttgggccaccactgccctctaggggacacatggaaaataagcaaagtctctcaagccaaaaatttgagaccttgggaaatcatctcatccaatcaacttgtattaaggaagacaattttaaaattacaattacttcaaggattgctgtataacccttaaaaactttacattgcatgcttttctaaggccacctgctttggagtcactcttgccagataaaaatttctttattatgtctatcctaattttcctgcagcattttaaacacgtcatttcttgttctattagaaaacagctgcttactatgactaatgtgttagtcattgtttagactttcagcttttcattttcaatgccccagaaaccagaaactccagctcttttagtctttcttaatgaagttagtttgtatagagaaaaatatgcgaaaatttccaaactgttacttatttctgggaagagaagcttcaataatttcaagtggagagcaaagatcaacttgtgatttttacagggtggattaaacttcaaccttctttataaaaattagggataatatctaatgtaatcctaccttataggcagaaattaatctgctctttcattcctaaagtcttaaggaagaatttaaattagtaatactaaaacaaagtctctggaaataaaccctctgcctttgggagagaatttcacaactttagggtgataggaagagtgagttacttataaggcatctatttgttcaaccatttaacattcgttgagtatgccattacttatcagatagtatgttaggggttgtacatatacaaagaaacttaccattcagtagagaagacaaatattatagcagcatattttgccatgtattaaatttaattgtattcaataagtattgttgaaatgcttaggttttatatatattatatactaaactcctagtaccttgagaatagagcatttattttgctcatctctgtatcactagactcttggatgacttagttttttaaagtctcataatagtcctttaagtggactattattaagtcctcagtttatagatgaaaaaaatgctttggcaatttataagctagcatgtagtagatttaaactcaagtgtgtttgtattgttggtatcatgattcttccctatttgtgtgcctagcatggtgcctggcatgtagtaggtgttcaatacatatttgtaagagaattaattggtgtgccttttgtgagtaatgtgctctttgattctaaggtagtatttcaagtgcctccatgtttgacacaaaataggtcttcaaaaattaataactgaatgaatgaatgaatgaatgaatacaggtttcttggcaattcttcaggatttttccattaccttaattctcatggtctatccgtagttggggaataaagtcataagactaaatgagacaagtgtttttatgatggtaacctctaaccatccatcctagaattcattttctgctaacctcaggacatctgataggacattgtcttgccttgttggcaatttcattgttcgaaaatttgaggaaataaaggg

SEQ ID NO: 54196 - DNA, 1308 bp, Homo sapiens
taacaaaccaagaaaaatcaatcccgcatcaccttagggccgggcatgaggagctgcagatgctgcgcctactttcagaagaccccagtgtggcacgtccagcccagattcttatcttttctgactgacagtgactttatctctctaatccctctggccacccccgcctccgccagtgtgtgtgtgtgtgtgagtgcgcgcgcgcgcacgcgtgtgtgtgtgtgtgtgtgctgggggacgcttaggtaggaggctgctcaagacacccaaagtattctggaagcaagcaccctctggggccctgtgctttgtcagagcagctgggctagctgtgaggaggtcagcgaaaggtaaccaggtcaccctcctttcaagggtgcaaagggatgctccaagctctcgcgtccccatgagcctgcggatgtggggactgcgggtgggcagagagaccccccataatcccgcccaccctggcgcggctcctcccgggcgcgctcccgccccgccacgccccgcgacgcccgcgctacctggggacgctggaagctcccgcggcggctctgggtcccgccgggcggccgaggctggcgcgggctttgtaaagccgccgggacagcgccgaccccgccccgccccgccgaccccgccctctcccacctcggccgcctcccccgcctgcatcccgggccacagtccccgttccgccacctcgctcccggcccggcagccgccgccctgcggggcggggaccacgggtccctccacatcctcgcggcctgccggacagtcctgcgggcggggccccaacgcctaggcggtcccgggagccctgggccgcctccccccgccccccagggctgtcacccgctggcgcgtggggctcctactgggaccccggtctttggacctggcccctgtggccccagtgcctgcggcctcgccattctccgctcagggcccgaggggccgcccttcctggaggcctccccaggacccacccacctctgggacttgcgggggcatctcctgcaaatggacgccaagtctggggaaagtttctggcgatgtcaagggtcagccttttcttatagggacgttctctagccaactgatggaaactcaaggattccatcagggggttctgctgacatcacaaatcacacatggcttagtcgtttactaatggtcctgtcgttacttagtcgttacacatggtcctgtcgtgtcgtttacatagagactctccatccttactgcaaccttctgcacgttcgcctttggaggccccaagctagtgacatgtcagcg

SEQ ID NO: 54197 - DNA, 699 bp, Homo sapiens
catattataaacatgcaataggcagcaactatttttattttttttctgtgctcatacctataacctcagcatggtagaacacacacataaatcttattttcttactaatgtgccctattaatcaaaacttcaaaaaagtcttctgttcaaagggaaatggaagctgctaaaccgtattacttttcaattaaaaaatgttcatctgcccttcttgcgccggcgatttcggttccaagaagattccacatggaccttctgatctgtgtgaaagaacaaataagaaaagctcctggagatgggctaaggaatgacactgcagtttcaccccccacttccccaggatttggtggcaatgacaaatggcaactcaaagcagttttccaaaggcttctttaaaacaagccaaacagttcttgtttgaattggctgtttactgtcattcttacatgaaaagaaagaaatgtttggcaagagcaaatttcagcaagctgccaaaagggagcttccaagagtcagtgtgtcactgggcagtcgttcaatccaccaggggaacatcatttaaactcagcttgaataggcccatttctccgcaaaccgcatgtctgatgacagctattaagattcacacatgggtttcagatgtattcacacctttatcattgttttaactttttatttcaaaataatctgagacttaaa

SEQ ID NO: 54198 - DNA, 3439 bp, Homo sapiens
cccatggagttggctatcctaaaagaagaaggcccccatccacccaggaagggcttcttgccaaccaagatggcaggtccccaccagagtagaacaggcatgcaatacaggccacagctgcctaattcactggtatcagtatttccacggatgccagtcttcatgacttccacacaaaaatcaggttcccttacaaatctgagtcaataggctttaaactgagcactcatgaaagaataaactccactcccctactcacagccagccctctggccttgtctaggccacggccaggagcactagggagggaaaaggaaggtagcttcaacttttcctggcaaagtggccttccttttcagaacctgtagctcagctaagtggagacacctggtgtttgttgttgcaacttcaagaacaatacattaagactcggggcagaaaatcaggcttttcataaaaattgtgtcatcaaaaagacggttcaggaagaaaaaatgcaaatggcagcccaactcacccctacaagactttttccccctcaatatttctaccatctgaatagcttttctccgtattcctgtatgtaaaacatgggggaaaaaaaacacaatagcaaggcacctaaaatttgtgagaatccagaaaagagaagaaatcatctttcctggttgctccattttgtcaggtgttaaatcagagtgctaacttttgtataataactgtttgctaatacttaataagtagccggtgtaacacagttccaaaaaatttttttgttgttgttaagcctatgcaaggccaaaggagtattaaagtttcactacggaagaaatatggccactgccaagaactgattagtcataaaatccgagggcattatcatcatccatcattgcctttcttttaatgactgaactaaaaagagagacatcaaagttttcaaaataaggttataaaaatgctgtacgcagatgaggcctccaaatattttgatagaacctgaacaaaaaaaatatagaaaaatcattgaaacaaatcacaaaacatatgttgttatgttttgctctaaaaagcatgaagtttatccagaaccctattatggtaactgcttagcttttcatgcattcctaaattaccatgtaatctaaaacgttgttttcagctgccctgtattggaaagtcccttaaaataatcaggatgattacaggctagtattcagaaagaaacttgcttgtattattgtaaatgaaagtattatttatcgggcagcctcctttaaagaaaaaaaaaaaaccctatctcagaagcacagaaatacaatgtattcaggaaatacctaaaccaaggattgcattttgggctctctacattttcaaacacatggatagttggtgtaaaaatatgttctttttctgcagggacttgactgtaattagtgtgtgccaaaactctctcacagagatttcattgtcttatctacttacatcatcttaatgcgattttattttactttgtcaaagtcatattaatgtaaatgtgttcttgatagcaaacagagttcttttttatgcaaaacaggattcagctgactctaataaaacagcttgcagtctattagactataacagtaatgtgcttattttgtttctcaaatcaagactgtgtcagaaagctatagatggagatttgtcttgtttttcacaataattgctagggtggggttacattatgatctttaaatgaatagtatcgcttagaacaaacacttcatatatcttttatcttccccggcatacagttctgagttttctttgaaaatgctgcgctacttttccacataagtcatcagaatgtttccaaagaattttaactgccagattaattatatcttgcaaacaaagatagattgcttacattctttattcagaattcctgccagtgtggagcaactggcaacaaattaatttcttttgcaaccatgcaaaatgttttgctatgaaaagctctggaaggtaaatggatccttttaaaaaaaaaaaaaatcaggttgctcattctgaaaggctaatctgtaagcaaagaacacaggattaaatgaatttgactactcccccccaccccgccctctttttttagcatctatgttataaccctcccataatgtattcagttaattaagtattgctgtgacctggtggcaatttttgaaatccagggaatttttccccctttaaattctgcctcccccacagagcagaatataatctgtttccagtcagtctgtttatttcagctgtgcttctactacaagcctctaaaatgttttaataaatttatcaaccaaaaaatattacaaacatttcatttcctttgattcagacacacatacacaccaaaaaaaaaaaaaaaaaaaacctctgccttcattgcaaattcttggtggtatgaatcactctaagtaatatttgctttaactttcgtgtggttctacaaacaacctttatatggctggacttcaaagcgaggagaaataaaggttagaaatgtgataggagtaatctattattaggcatgaaacattaaaccacttttagctataagtcttaaaacctgaataatctgggttttttaagtagtgcatatttattgtgctttcagctacacacacatttatcacagagaagtgtttggaagagaaatattttccattgcactgtgtgccacaatttagtttaatttttcctaatatttaatttagaaaaacggtaatattataacaggattctcatgtgtcctggccaaaacacttggtgttcctcacagagtgaaattaatctgttaccagcctgctgacctgaaagtaaggtttagtaggcacagagcgggtagggcagagaaaggggtgggttagggtgggtagggagataagatctctttcttttactagaaaggagaaaaaaaaaggcttagaggaatgtctcaacccaccaatgccatcaaatgacagaaaataagctgaacgtgtatttgagccgaagagtgtttgaaaacatttattagctccatccataacgacattcacggcaggaatgttaattgttaaaatctgtactgcagctagttctttaagtaagggggctgcattgagtggaaattcagctcctcgtttctttttttctccacatatatttgtacttaaaaaaaaaactaatgttatgaaataagtcagatgtcagatggaaagctttctagcacaagggaatacagaacagtgttaaggatatatgcatatgcaagaacaaaaaacaacattggtaacaatttgttcttgattaaatttgtgctcctaatacagtagattaaaaataagtccaactgttaaacacattagggttcagcccctgctgatgtgccagaaaagcagctatcactccagac

SEQ ID NO: 54199 - DNA, 1268 bp, Homo sapiens
gagataggaagtctccatctgtatcgagggcaggggaacttggggcttccagtgcccacaaagggcatcacatgacccttcccaggggatcacttgctccgagttccctgtgtctctcttggctccggctccaagttcatgagaaatctgtccccatacccatccttctgaagcttccagcctttaccacctggacctgggctggagtcccacccccaccacagctcttgagacaggcgacgaatagacccaaatttgagatgtagctcaacctttgaccactagaggtctcctggaaagcaatgacccgtataacccggttgatcctccttcaaaccaatagacttgttgcactaaggcttggcgagcctgctctgctcaaggcctccttattaataacgccacccgcccccgccgctcacgatggcgccaggcatagagggggatgggaccaggcggtggctgaccctcagacagtgctggttctttacgaatcagtctgcagactccagggctaccccttcgaaccccacttactgaccaagcaagagcaggagagcgtgcctaactcgaggtccccaggtgggcagcgtggagccccacagacttccaaccagcgatggactgggcaagggacccacgttcagaatcacctagcatcaggtccgccaacaggccagaatccactcgcccctcgcttcgtccccctaattcctcgtccccattaccccccttcaccgcctccgttttgcctccggatcgcaaaagtgacccgagctttaaccagtggagagagatcagggaacaattcactgtccctattctcatccatgtggtattttctgggaaaattagtggcttctagctggaagaggaaagaaaaggggtgggggggtggatggctgagggggagcaagaaaggaaacagccaggttgaattcccagtctttatcaagcaattcgctcaccaatgagagaaagctgcagtggcagattcgagccacatgcggtagtgtgtagcaattagtagataaaatgctgactaaagtgctaaaacatgaagtattattgtagccaaggtcaaaaatgcttcagttgtcttttgcaatttgggggaggggaggcccaggggtacgcagagaggtttgcattttcgaaatggtcgccttctttcttcaaactgtacttttccttttttttctttttttatgatcctgtttattatagtccaagctgcctaattatgtcactgctggtttttgcaacta

SEQ ID NO: 54200 - DNA, 5917 bp, Homo sapiens
aatgggcgattctaatcaaacgtctgcagtatgcattataaagttaaaaagagagagagaaagcgcaggagagctataatttctctttgtaacccatgtttataaaatagaaagatcagatgaaatttcaagagataattaaagagtgatgtgcaagtcataatttggctaatgttaaagatgggagactgcgaattgtagtcctccatggtgcagagttgtgatattactttaaattattaaaatagttttcgacagctttcagaataccggctctttggcatgggcttttattatttattgtaattagaggatctgccattttctttcgtttatctctgtgtgtatagaaacgagatagattttgccttttattacttccccatattctgaatcaaaaatgtggtttagataatgttaagtgccctaattcttactgcagcggacgcagacgttatgaaaaggcataaaaatacacacagagggtctttccacctcaagtcactgaatatgaggcatttgtgctctgccgggtgtattaacttcagccatgtgaatataattttcattaaagtaatcctgtttcaactagatgctgtgactagaggtgaaacgttgcgaaagcgttaaaaatagcttactagtaatttcaacatcctgtaattttatcacagatcaagtttcaactgtcatactatacagaccttattccccatatagtacatgtttacttttttagcatgccagacccactttggaaagattggtgccaatataataaaagctggagggggggtgtgctggaaggagtgggaggagagcggggaagggggtgggggaacgtgggggaagcgagtacaccattttaaatcaacactgcgaaaatgcaatctagcctggcggaggaccggcagctgggtcggagcttgcgagggctttgcagtctctgcctgttccttgttctgtcgctcttaagtttctctgtgtttgcataatagccgtgcatgcaaacctcgcaatgctccagggctccagaacaataaatatacacatttaaagcctttattgtcttacggttcatgcccccggttttcaacagcttaatttctggttgtatttaactagtttgcaaatggattttttcagtttcaaactattattgaggaagctcccctcccttttttggcgggggaggggatgggggtggggtaggagtcggtatattattcctgtagcgctgggttatataaacacattatcatttgagagcgcccttggcgtccatcagcattgtaaacacgtactagtgtatatacttcaaaattaaagaatgcacacgcagaaccgggagcctgaattcatattctgagcagactcgcttctcgcatttattgatttatcatgcatcgtttattgttccagtccctaaatgcagtcgctgtccgttcaatattgtttgcgaaatcctaagatgtgtgtgcactgctcacttgtctcttttttttttgctgagtatttttttgcgaagcgaacaaatgcattaatatttatatgtttatataatcgataacccacttttcccttccatgtaaataggcatcaaaagataatttaacagattagttctcgaaaacatggcagtgaggaagcgtaatttaactatcaaacaaatctacatgtctaataacagcaaatctgctaagaagcattagaaagaggagcagcgccccggaatctctgcaggaaatgttctttatattagacatatacaagcaggtcctgtcagatgcacagtggagctcgctacccctcctctcctccaaaaatctcatcagacgatatcccagacaggagcggttagagagagaggaatcacatctccacacagttttagggtgctttttatttttacaaatcttcttgtgtgttttttgccttgatccatcctcttcccgccgagatcgtatggcgcctttctctcgattatgaatttgatcaatccatctttggaagaaaacccacatagttttttcaggagctgaaaattgagtcgttatagaaatattaggacatattttcaatcatttcggtgcccgaagggaggcaagagctcagttttatattgagacattacgccggctgaaggcagagaatgcgtttccctgccaggacctgatgcaatccattcaagccaacaagtttggagagaatgttgagttcaatcaattcagaacgtcgagatggagcccaactcactccaggtatttcgctctcctccgctcctccgatcccggcaccccccggcaccccccaaccccccagctcacccacacctctgcacccacccacaccccccacaaacttttcaccaaacttttaccctctgcatcccccaaaatcatttttattgtttaaaaaaatccctgcactgatcatacatacataatgtaattttaccgcctcaaatggggaggtgggtagaagtggcggtggggggccctgagtttttttttttttttttttagggaagcagaaaatttgtgggtgctattatttttccacccagcgttatatctgttgggtcgtctgtattaagagagtggatgtctgtgtgtaaatgtgtctgggaatagatgtttgtgctctgatggctacattatttatttggtgtttttttccccccctgcagtgggtcggctcaccgtgtggcttgcacggaccttacattttctacaaggcttttcaattccaccttgaaggcaaaccaagaattttgtcccttggcgactttttctttgtaagatgtacgccaaaggatccgatttgcatagcggagctccagctgttgtgggaagagaggaccagccggcaacttttatccagctctaaactttatttcctcccagaagacactccccagggcagaaatagcgaccatggcgaggtggtaaacctgtctgtccccctcttctttctttattatttttccccctagtaatgcttattacagggcaagcttgaaaatactgtattcacttctgcaggcaagcaggatcgactccttttttaaaggggtagcgccactagctggggctcgagtattttgccattgtcagagtttggctgtcagctttacaaagaggatccaactgctgattttagtcaagatcaaataacttgttcgagaagggttttgttcaaggatgtgtgtgtgtgtgtgtgtgtgtgtgtgtatgtgtgtgtgtgtgttcatttgctctcctgctattgcctcttgaacatcacatgctttttatattttttgccttttgaaaatttaccttcgtgtctggctcggtcgtgtctgggtggatttctttcggtgggtttcgatattgttcttttttcaaagtaagtatttgatatgtttaagagggcggaaattacgaaatggaggcagaatgagatcaaaagctattgagttggcaaagacgtgttgaataaagtgataaatgacaggtactggaataatacattcaaataacttgcagatctgcccgggcggatttcaaagcggtggtgtaacaggcacaaacacgttaagcattaacaactatctctcgcccactccccctccccccggacaagccatttgatgttctagtttgcaattactccacgcaaagtggacgtcctcctgcgcgatctttgggggtgtgtgggacgggggcgggggaggggagggcagaggggtgtgtgctcgcccactggccctgcgggtccagcgttctccgtgcccagacggcgctcccggggagggcggggaggggacagagcctccccggcacgtttctgggcggccgcgggggcgctcgccgcgctcccgggaggacgccggaggtgagcccgctgtcactgggcgccggggcggccgcctcccttcggctctgtcatttcatgtgtgaccgcagttctgcgggctcccctcctcagctgaccgacctcagcgccgtggtacctaccgaggggaactattttggggagtctgtgcccacggcgcagcggggagggagggcgcactgccgcctggcgaggctttgtgttgccaaagcgagagcagggtaatcaaacagacttttgagggcagctagtgctgtgccaggctctcgagctttcgaggtaggtgtaaggatctaaggatctttttgttaaatgaatggtttcccgtttaactcatcccggggctcggagctgccagtccttccagaattcctcggtttgatcgagttgatagtacttttggcattgctagttcactccctctccccaggatcgaattactcgtcagtggtctatgccggttaattactggagttcgtcgaaacgttcgccctcgaatctgccttttcggaaataagcccctcccacctccccgctcacctcccccctccaccctccccggccagctttggtttttaaatgttcatatttcccgacgtccgcctgcaattttaaaaaggtgttgtttggaaatactgtgaaaaatcctgcaacctaccaacaggttgagctctttccccctcccaaggtctggctcggccccctcccccgacccaactttcctgcgcagctgtcttcctccccctccctctccccctcctgatttcttattatttgcttttcaaatttattacttcaacatggcctgtgatctggaaaagggaaggattaaatatccagaaaagaactggtgcttaacagacttctgactaagtccaggaggaaattattcagtgttttatgggatattttgtggtcactcttttttggggggcggggaattgaaattgggatgttttttaaagaccctgagttgaccccacttggtacagttttaatttttgttggtgtaattaaatggtgaattctgatttaagaataaaggctatatttgccaaacgttgcatctgctagaagtgttgacagtgaatagatatatttttaaatacacgatttctttttaattgttcattatggggaattgaaagggaaccattgtaatgatctgtgcatttcgtcactgctatatgagccatacctgagaaaattaatcttgccatttaaaagtaaactctagggggtttgcggagggagatggctctatttataatcctcagctgcatatacatcgtctaatattatgcatgatttgttttttaatgctaacacggctggtaattagctgtatgattatacttgtatatttcattaggactttggctgatgtcattgtgaattattcagccatattaaaacaattttcaattgagataatgacacgcctcaaaattatgcaaatgcagactgcattgtgcaaaataattatgacaaatgtaaagcaggtagaaagtttcccaatgcagatcggttttccaccctggtgatgtcatttcccccctggcctaagttagtcattcattagcagaatagcagcagcagtcttctctggaggagagccttacagaaaccagcatttactgctggcacctagagggggcaacagggccctctcattaagaaatttgctttgttttcacttattccattaacttgtttatatacatttaaatgatttttattattgattttaaatagttttgaatgatgcatttgccatttgcaatgtgtaactgaaagagaaaggtttcttggtgatatgcactgttacttggagaaaatgttcagcacatttaatcagccagtacagtttattttaagtaaccaaatggagattaataatttcttgattgagctgacatcagcatccatttcgaaaggacagccaggactcagtatgctttttttggtttaagagaatcattctgcctttttatgatttcttgaaatgtaaagacgtcagttctaaaagcagaaaaat

SEQ ID NO: 54201 - DNA, 1445 bp, Homo sapiens
ttgcagtgagccgaaatcatcacacctttgcactccagcctgggcgacaacagcgaggctctgtctcaaaaacaaaacaaaacaaaacaaaaaaggcttttaggttgagtctgattttgtttgtttgttttggtctcattttggagacagctttatgattagtgctgaagaagggaaaatgatcaacaggagagttgattgggaggctctctcctggggcacaagaaacaccatgtacttaaaaaatttttaatgtaaaatacccctttaaggatagaatttagggccttgaaattctactcagttgctatgaactgtggggaatttgagacaaatagcttttgtaattggaatgcacactgtgttgtaataatgtggaaagagaaacaaaaactttccttaatgtaatgagtttccattatctgcctaatctaaggtttgtaagtctacattgtcaggatttatattgaggagatagggggtgtcattttctgtacacattcctgtccccacaactttctcttcagcctcttctataacatcaaaatatttgttgtctgtacttttctttctccgcagtggttttcttatctccttttctgttggtcacactgaaaccacctccaataccacattgttaatggaaattcacacacttattaggtttttccttctgtagaacccttccaactcctcattgttcttaccaaagaaagaagatgaactgtgagattatttgaggccccccccctttttttctggtggaagtaagcaaagaacggaaagatctcacctttctatggataaagtaaaactccaacatgttatcgttttttaactgagttatttcataatgttgaaacatgaataataacaaaataattagattggttcttagagaagggattttaaaatataaaagctcattaaagcacttttcttgcttagtgtttaggtagaataagttcgctttaattccagtttgtgtcacttcctgtctctctctgaatagtaaaaaaaaaaaacaagaatgttctcacaaatgtgtgtctgccaacaaattaatactccacaaagagaaactctgccccacatggcagcttccaataaatgctctgattcaaatcacaactctttcattttttttttatccccttcccccttgagggagcacatttagacaatatttgaggatgtcatctttctgctttttaaaactctctagagttttcatttaagactcttaatggttgatgactaaaactacagatctggatagtggaaaaactaataatcttaaaaaacacttctgaaatgtggtaaagtgcattcattctcttccctcctctttgtccttttcaaagaaagaaagttcaatatgaaaccaatgcaaattatgactttactcagtgagatattttaccttctttcagactgtttcatac

SEQ ID NO: 54202 - DNA, 1392 bp, Homo sapiens
caactgtagggaataggcaggcatcagtctaaatggacacaaacctcagggccacgatagcagccagggacctcttgtgtgtgtcaggagttaacccttcagtgtctggactatagggtgtccaggaactcccaagggaagaccagagatagggaggaagagtcagggagcactagggagaggagatggggcagcagctatttattaacctgcagggacgtctctcagtattttaaactgatgaggccattctagtgcgttctagcccttgctgcagtcctggtgtcagtgtgttaacccaggggcaggaatctgtctagtttctgtttgtagcttactgaaatcccaccctataatgcttaactgaatagtgctcttcaaaatgcaccaactaaaaatagtttcatctgcagtgtgaacatagtttcatatttatactagcatctggcctaaggaattgaatactccattctttaaatagcttcactccagctctggaatactctgagaagaaaatctcccccaatcaaacaccttgtttacataggcatgcttaaatgcaaacaagctccctttttaaaatgcagaagaatattaatttgtgaggcaatggtgctttggggtagttttttggtgagtgaaagtaaaggggttaagtagagaatgaattttttaaatgtctacttagtaaaagatttctgagatgcctattatgttttaaatttttcattttcctaaatttgattcaagaacacattaattgtacgtgtgaattcggaattccttctttaccatcacatgtgaagccagttagaatgaagttcttgggaagaaaaatttatgctgccgctaatgcccaacaataatagaaatataagcctagatatactttaactttttctaccagcaaatgctttggggccggaaatcatttgccagcatgcaatgaatgtacttttgttagtcttagggggatactaatggttagtccccatgaagaaaaatgtgaaaataacacacaaaaaggtaaacattgcgaatggatggctaatgattagctgttacagtccaaaggggcagggtattttttttatagttttatgacccttggcccagcctttattgaaagaacattgtatgttcagagttatatatttcaaacgtacatctcctttgaatatccctctttaaagataataggaaatttttccatgttcatttttatttgtagagagaggaggattttaaatgtatactagttttaactctgtattaaagaggaggaacggttatttttaaacatcccattcatgaacccacagagtaagatataataatatacctttaccctccacccaccccagccatcctgaaaatgagtgaatgtagggc

SEQ ID NO: 54203 - DNA, 810 bp, Homo sapiens
tattatcagggacagaggccccactatgtagattatctaagtccctgacttcctgggcagacctcctctcccttcgtttgagtttattccagctcattagcacctccatccgaaggttggcagagaaaaggagaggaagaaaaaatgaaatcacttctgctgctcttaatggcccttggaaagaatggatcatgaatgaaacagaaaccagtgggaaagataagccattggattttctgtgttttcttttatccttgccttccttcgtcaccacagataatcaatagttggcttaaagacttttaaatgaactgcacattggaaggctttgtagttgtaataccaatatcattattatctttacgtttccaaagactgggtgggtgccagagaggtaaatattgcccggtctccatgttggcatgagacgcgttcctgacctttttttttttttttcaaacctgcccctcccccgcccccaccactgtcgtcttttatgcacagaaggtaattttttgtgggtgttcagatacaaacatctgcttgaccaccctgtcttgtgattatgtcttatgatcctgacctggtgatattttgcattaatgaaagttggctggtttggtcttccccatcatatttacttcttaatgtgttgctatatttacagttcaccaagaacaatctgtgacaaagatctgcttttatcaggacagctgccagattcataccacatctccaggttctgttagacatcacagtaaagtaattctttactgcttgctttacttgagccatctttctaatgtgtat

SEQ ID NO: 54204 - DNA, 1596 bp, Homo sapiens
ctggccctttctggggtgtaatgtggtcgtgtgacaataacttggttttttctacaacaatgtttatgtctaaataaagaagttaatttatttcagcgtttcaaggcatgagttggagctgtgcaaacccaattgcttagagtacaaccactgtggtgttaatagctccctggtttggttcaacagttagtccatatattttatagccgggtctttaagaaaccagtgccatcaccacaatcatagcaactgggagatgacacaacatggaaaggagtcagagaggagaatttgttaatgatttatcaattttctccttttgggaaaagtaaatgtaataccgaatatcacataactgtttttacttcttctaaatttcacattttgtaaccattttagtagctttaagccctggcactgtccccctgtcccatgttctcttctttactgaactacaattcatataagtggagctcatacaatgaagtttgcccatatagtccagtgggctggactggataaactctaacgtcctccaaacaccactttctggagattgcaaaacccatgtgagcaatgaggttctctagatggtgtgcggatttccagttaaggggcactcttactgtaaccactgtggccatgccatcctttggaaaaccttacccatttacttgtgtctcacagctgccctcctttttgatcctgatagaagcaggaggaagataagggggaaggtccctggagaatctcccactgacctgtgcactgggaggatggggtggagccttgggaatttcacacctttcgcaggaaagaggagctggccctctcctgttcctgggtggtaacctgggattcagtcggtgaggtagagagcttgttaacaagactccatctcactttgctgtgttgcttttcctttttcctttttgcacaacaaattccactcacccttctatgtgtccacaagcctagtccttcctggtcatgtgacaggaacccagtttttttctacaacaatccctcatttgtgacactggctgtggatttcctatcattagagggagatcatcaaaggaatattaaaattaatgtgctttccttgagatattccctgggtcttgtcttgtaaaaaactgaaatgacagaaaagaactggaagcaaaatgtaaattgaaaacaaaccaaaaaaaatctcctcattgtgaacgattcacagagctctcctttaactggagtacaaggttaaatttgctcattgatcagggcagcagaacccgtggtgcccgtgttaacgaacttcccatctgttttcttacgagttttgataaggtctttagtcaatgctggaaacaagtcaaagaaacatatctctgtgtttgtctctttgccctgcttggactttccacacactggagcaagtctccagcccctttcccaatacctagtggatgtggcagatgatcagtcattcagagaagactgtttcacaccccttactatgaacaattcttatctgttcattaaagtaacacttctctgtggacgtgcttggttagcaaatagctgaatgtctgaaagtaacaaaatgct

SEQ ID NO: 54205 - DNA, 1865 bp, Homo sapiens
tttcctcaccatttagagatgtttcagttttcccatctgcgaaatcggcataagatgccttgctccacagaaatacttgtcaacagctttgccgtacacaaagattggcattgtattggggcaaaatatcatttttcattccataataggaattaaacaaaagccctttgagaacgcaccttgtgtaaacgccctgtgcttaaaagcctgtgaatttcagaggtcagcaaaaaccgccccccttctttattatttttcttaaagctaaacaagggtaactagggaattcattttggaatataaagacatgaaagaaagggtatttcagcttgcacaatagtacaaagaagaacaagagttgtcatgttttgctaaagaactcccagctgtttaattttatagtaaaattactttaagaactttgctaattcaaagacaaaatcaaacaactgttgttgcaaaactgaacttccacatttgagtggaaaagccaatttgagattaatctgcccctaaaatcatattataaaaatacagagcatttctgtaatgctggttggaggagtggcttttatctgaagagaagacacataaaagagaaaaatggtacatttactggtagtaagatttaaaaaagtagtttatgttctcatgtactttgccctgacttctcccccagctttctcttaagctcttcagtctgttttaataccaggtttgtttgctttctggggatgggcctgttaggcaggaaattgttgaaaggcatacagcagaaattttaaatggtgtttttaaaagataaatacccaattgggtaactgactattaaatttggagttcagaattttttaaaattttatttttagacaatatagaaagataaattctgtacctatacttggttctataagtcccacatgttgcctattgtcagaaacaaactgttccttatttaaaaaaaaaaaaagaaaagaaaaaaagccagtttttcttccatattagggaattattcagacttctttccttggttcctataattccaaaccagttggaacatcagtctatttttggtttaaaggagcttttaaaatgtgagcatgatttttttaagtttctaaatctcataaaaatcaatttgccacatatatagcagctatggttgtaaatatagtgaagtcattgtattgcagaaagacaaagttctaatttccatattacaaaccccacctaccccaccttgtccaatctccacataagagggctgaaaatgtaaattctaaaacatataaaacaacataaggttgtcatttgtggctgtttctatccaagatgaatgttgtcacctgtattggagtaaactcttttgttagtttctgcgggtttttttggtcgtcccaccgcatcccatcgactcaccacgagagggcaatggagcgtttgctttcagctaacaaagctagaaatggttttaatatcagctaagtgtttgaacttgttaaggatttatttctccaccttccgattgccatacatgcagcctccgagtttccactaacagcgaataatgatccaaataaagttattctgagggaaaatatagacagactggtgcagacaagagcttttgcccaaataaggatcccttttgtgcagaccccatgtgttagataaccatcaactgacagttgctcatgagttaataatgttggatgctgaaatatgcataccatgtgctataaaagagtttggaggacaaagacaaatacttctatagttagatatcagaaacataccagaggtgtgcagattgcttcgtggtacataggttgaaaccgcccaatcatttcatcaaaattagtaca

SEQ ID NO: 54206 - DNA, 1531 bp, Homo sapiens
gtcttttactcatacgttaataactttaaaaacattcgttctatttttgttgtaatgaaagaggaagtttccaaatagttaaaagggaaacattgaaaatagaacacagtaaatgataactaaattagggtaggttactcctcccccccgaaagagcaatgctccatgctgaaacttgccagggtattttttttttttttttttagacgaagtcttgctctgttgcctgcccaggctggagtgcagtggtgcgatcttggctcaccacaaccaccgcctcccgggttcaagagattctcctgcctcagcctcccgagtagctgggactacaggtgcacaccaccatgcctggctaatttttgtatttttggtagagacagggtttcactatgttaaccaggctggtctcgaactcctgaccacgtgatccacccgcctcagcctcccaaagtgcccagccagtattttaagattattgtctgaaaagaaaatgtgccagagaattgatatcctcagaggaaaagcattacagaaatgcagggtattatcagtaacgcatactatacatagaacaatgtttgtcttccctaatactgtgatcagtggagttttgttttctggctcgtgtttaaaagacacacgcaacttgcaaatcgaatgagttaacgctccgccgacttctctagacattgacctcgggggtcaaactcttaggaaaattgtgctggttttccattcccctgattccagtccctaccaacaagtaaatcctatctctgagtggaagctcacaaagaatttctcgagagaatatgtagctgtgttggcaacaagtctctctgcaaaatgggaaggaagagttgttaactgatgagtcaatccagcttttatagcagtttatctatcttcgtggtatttccaagagcataaatgctattaaaaaaaagagacggtcatgacaggaagaacacagtagaaaaaaacaggaacatttaagccaaaagcaatttactttgccagtaactggttacatttccctttgttttattattattattgcaagagttggggttgacataaaagtttcccacacctgcactgccctgccatgtaacttgtgtgaacccgtagtgaaataaatatataaacaaattgtctgcaactcagcttctagaccctttaagaaaaacaaacttgttttgctatattgttgagaaaatagactataattcattaatatttgaaggagtttaaaaagaaaaaacaaacatgggttagctgtcagagtagcctggagctctggaggtagcttgattctctgaggattaacacctatagaaatagcagtgacttcacaaaggtgaatagttgttaatttcttggcactgagtaagaggaacagatgggcagtcagaggggaaagattttttttttaaaccacagagatctttcactgattaggcagaagagtcagtggcccactggttaaggagggtaatatgtagggctctctgactaagttttattggcc

SEQ ID NO: 54207 - DNA, 3321 bp, Homo sapiens
caagtataccacgtgtgaggttggcgggaccagtctatgaggacaggaaagaacagtatgtgggcatctttatttccattagtcactttttcattcaacaaatacatgttatgcaatgcagccttttgggtgttgtgctgggcagataaaagacacatcccacagggtcttgcccttaaggattctccagtctggtataataatatgccaaaaaccacagctaaagtacaaggagtacagtgatatgttccataagagaaggagggaaaaaaagttcagaggggagagtaggagaggaatttgattttgagtcctgaatgactggtaggatttgcctaaccatacctgaaatacgcaagtacttgccttactaagaacaaagggctttttctcttgatcaaatcccatttagagtttacgtttgtgtgaccagaatattaggtgctagtctgttctaaatttgtaattctcagaatctgctgggggagtacatgtgcttctctgggttctgaaaacagctcaaagaatggagaaaataaacccagtttggggatgacttcttgtcagttcccggaacctttgcctttatttaaaaacagcatgttcgatgcaagttctgtcgaaaaggcctttgggatttgaaagcttttctagaaataaatgccttttaggtctaagtgcttttcaccaaaatgctaggaagggaagatcatagtaacaagtcttagaacagaggggatattgttttgtttgttttaatgaaatgcctgcgacctgctaccccaagttttgtttgtcagctttctgctcagctgttattttgataagggacttgaaagtacatccttccctcgcggtcattaaagtcttagcacttgggtcagttgtggaaacacttctgtgctacacaaagtcttctaaacaaaacaaatagtccatgccctggctccaggctgcggaccgtgtcaaattcatggaacgtggcatcgtgctctgacaaggagagcaagaggtcaggatccacaaaacaggccggatgaaatcaccatctccgtgcggggaggtggagagagcagagccctccctgccagtctggcaactccagcaaagtcctcaggctcatcccacacactcggtgctagtcactgctgtgtgtttacatgagtaatggagctgccgggggaggggagttgtaagcagagcgctgagcctcgcagctcgcattcggagggaagctgacatccacaccaagtcgagacttccagggatgtggccggggagcagtcacatgctgtagctttcatgagcacaggcatcagtcaggcagatgtttgtcgactggaatgggtaatcgctactttctctttgcttgatttttgtttgtgagcttgtttacctttggtaattccaggctggctttctgggatggactttcagaccagcgtttaggggaatgagaggagagagcgggtgtgggaaggggatcctaagccctaaagcctctttttaaacttttgcctctctgattttaaaggcagttctgctttactgagcttccaccaacagtaaaactgttatccggaggagaaaatcaaattagtaggattaattgtgtttgtaaaatgagtacagtgtaaaaatgtcctaaaaccactggttaactgcctaagtaagattaacaacaatcaagaaggttcatgttgtttagatttgacattgtcataatcactccttaagtaataaaaagtgtgggtgccttgaaaggtctgaaggaaattgtttagggtataattcattagcttggagtcattctaggggtggttggttagttggttgtttttaattttgcttgacttgggtgactgatgaagttaaatgtgaaagctgatgccggatagtcatagctctcaataaacagcagccttttccccctactttctgtgtagatcttaaaaggaacaagctcagcatcaaggatgaaatagaactttgatttgtatcttgtcttttcaaaagtgtaacccccatggaatcaggctaaccccagtgtaatctttggatgttatattaaataagccttaagatcttcataaaaatatattgaaaaggaaaagacagcatgctgatttaaatgtatctgtcagatttgttgagatttgaaacttgctggttgcagtattgttagtaaatatatgtaataatgttttccagcttgctgttgtgaatgcccctctctctatagctatctctctacttatctgtatggtaatttgagagaatgcccttgtctctgaatattttgtaaaagagatgttttcaaacatttcattactatgataccataagggcaggcatgtcacttaggtttcggaaagcaagatacaaaacaaaaaccaaagattgagctcaaagcctggctcagtttttcagcaccaaatgcttcttgtctaacaacgtggaaggacatttttcttatcatgatcctttagagctaagagcttcgtgttacttctattaattagacatgttaaagctaaatagattagctttgggaaacgtgtacagaaatgtatactctaccaatatgcaagccttcagagagagaagcatgtaataatgagggctgcctgccacagatctgtacatttctctgaacaattagaagggatcactgtagtgagattctgggtctttaataaagaaacccatgcaagtgaaaatgtatatcaattgttttccatttgttttcagcgccaaatcttaaaggcagaccacgcaaaaagaaaccatgcccacaaagaagagattcattcagtggtgttaaggattccaacaacaattccgatggcaaagccgttgccaaggtacggtcattcactccacggtattcatttcgttgcatctttttatttttgctttttctctttatctctctgtgcctgtgtcttggaggcagttttcaattcagcatctgactttggtattcagagcttttgaagctctatgctgtgcctgttcctgccacctcccttcccctggttgccgtgggctgggggaggtaggcattttgattagtcaacagaaagacttcctacctcccagtttggcctgttatgagtaaaggacagatgattaagcacccacgtcattgaggctgagatttcatagtgggtgacacaatgacatagtttactctgcttgtgtcaaaaatagaccagctgaaccgtcctctttctgaatgtgttcatctaaatgtgttttggagattaacagaggatgaaattagaaatagctagaattaatctttttagttatgtattt

SEQ ID NO: 54208 - DNA, 949 bp, Homo sapiens
ggcacacacctgtaatcctgactactcagatgtctgaggcacgagaatcacgggatgaatcacgggatggctgaatatgggaagtggagggttgcagtgagccgagatcacgccaccgcactccggtctgggctacagagcgagactctgtctcaaaaaaaaaaaaaaaaactacatctataaaaactagttttatgtaattaaaaaaaataagttcaacagggatcaaagaaggaagagagaaatttcaactgaaatgagcaaagtcccctctggaaaatgtgtataaaaaggtaggggctgtcaggaaagtcctaaggctgaatttccaagtcacataccccaaaggcaggtagtgtagtttatcctctcatgtctatgaactattatcctaaggtgcggtgggtagactctgcccatcctcatccatggtaaggttacccagtcaatggacttgcatttcctttcccaacactgtctttctcatggcagtcctgacctgtggcccctattgggcttacctctgcaacacggccaccctgccactctcatctccctaaacccacagagggcatcctagccctatcaacaaccagaagcccaggaaactgaaaacaagttgcccagagttaggctgactgaggttgtacagcttctcttccatctacactccaccaagcttgttcttacagggctctgagtcagttcaatgcaaacaccctacacccagagtagcttcatcttgtcatctgtaaagaatttctctccaaaggacagtcaggtaatttcatacacaagagccgcatagtctgtatcactcagcatgcctaaaatgctctgataactttccaatgcctggatatttcaagaaacttttagaaaggaaaacaaaactctagccagaccctggagtagaaaaactggtttctattttaaaaaaataaacaac

SEQ ID NO: 54209 - DNA, 2023 bp, Homo sapiens
ctattatttttctaaccaaatgattaatgtggttaagtggtaacaggatgaaaaccacccctaggaatcaactgcatgcaaagcattgtcatacttcatctctatgtgcagtttaaggcactttgacaagcaacatcttttttaaggttcaaaaaaactgctcgaggtaggcagggcagatattttgttccacattttcagatgaagaaactgatgttcagagaatgtaactgacttgcctgtagcttgcaagaggtatactggaaagagagccccagtgtatcgtattggctttataactcactgagccccagtgtattatattggctttataactcattaataaatagtttaagatactttttcctttaaaacaaataatgactacattttactaaactggaagaattttgagtgcagggacctattaacctttgaatttaccaaatgacataattgctgaataatcatttctacaatgatttaattaattatatataatagttgagtaacttcttagttatgtttacaaactgtatcatctgtcacatcaccaaatctttaacagtctcgttcctcaaaacataaataatccatgtattctgaacaagtgtttggatgcatgttttataactttaatcatatttaaaatgtagtattataaaatgtagtattagtggcttatttttaagaaacaatacatcttttgtcaagtaaataatcatgctgaattttaccagttttcacacgatgattgcttaaaatgatgtatatttaaagaataatgtactaaatagttatcaaggaacataaaatagttaattcagctattagatgcactgggaaaatctggctaaaggaattttagtaagctaaattccacaataaaatgaatagatgaatcttatcagggagcttactaaaaattaccaaaaatgttcactgtcttctttcagatcaaacaatactttatgatatttcaagttgcttcatttttaaaacatgactaactacaatgccagtgcttccaaaaccaacagtgacctcacttttaaaacattcttgtcaggataacattttctttctaaaacatcacactcattccttttagccaaccctaattttgagttcccaaaagtttaatcagctacatttttttttctatcaaatagggcaattgttacaacatttttttggaggaaggggaatgttattaaaaaaaaatggcttaaatggtagtctaaaaaatgcactcttgtcaggaagaacggctatatttggtcacatatcatattactagggaaaattttatcattttatatgtgtccattttggttaaagactaaaagctgtattagaaatcttcgcattgacctagatcacttaaatatacaaaattgatccccttatgcatcctgatttttaaactcctaccatggtgctgaagtggtcagttaaggaagcatcaggtaagagtagtcccgggctatgagttaacctagtagactctgggttcacactacagtgtcaacagaatgctggtattacaaggacatgatttgtgaaatgttgtaaaaggttttattgtatcttttgacccactttaatggtatcaaataaacaaatggcacgcaagattcaagggggaaatgtttataaagaaaattcgtgtttgaactcagaataaaccaaatagaatgaaaaattctgaacaggaaaacagacactccaagatctatatggctgtctattaaaaagaacttaatgcacaataatttattctcaaaaattcctctaggcttcaaaaagaaatatagattaaatataatttctttctttctttttttttttttttttgagacagggtctcactctgtcatccaggctggagtgcagtggcatgatcacagctcactttagcctcaacctcccaggctcaggtgatcctcctacttcagcctcctgggtagttgggactacagctggggctgggtttttgtatttttagtagagaaggggtttc

SEQ ID NO: 54210 - DNA, 1986 bp, Homo sapiens
tcatgtgcttcagaagtaatttgagccaatactttgttaattcaaccctgaattcaatcttccatagcaggaagcaaccttaggaatgacagcaggtcagggctgctcctatagtttgagggacttctgtttttctgtcttggagtctgatttccaggaagaatttcactgaaatgggtaccttagtatttacaaacctagcacagatggattgaccattgacatttcctgggttctttttctaagccccttacttaaacaattaataccttgaaatcttttaaaagaccactgccttttaagaccattgtgagtatattaatacctccatattttcagtttagcctgatgttgggtaaaatgtaaatgcacaacaaatgatagcaactattaccattattataatgacagaagacgggcaattttgcaagagccaattaggataagtatcaggccctaaaagatttccaaatatatcagtaagattgatgaaaatcaggaagaagaccacttctttatctcaaataatatgaaaaagtttcagtccccagaatattctcttgaaagccctaaaatgtacatggagatctttcccagtaaacccaaattaggcattaactcctctcacttttcatttatcatgagatttaacaaacttaaggatttgtccacagcaaaaccactccacactttgggttttccctaaaaactcagattatcagggaaatcaaaccaaaaggaacttcaaattcatcctagatcatggactgttccttgtagaacctactgcttgatatgaagtttgatttggatttgtttgaacaggaataaaaactgaggtaaaggaaaggctacaataactccaatagaagtaatgagttactaaacagtttaatgagttttggaggcccctgaaatttgggttcctgaaatgaattctctcagacagtagacaaatgactcaccaactttggccatcgaggcgggctgagtcatctaaagtcagctgaatcacctgctttcagctctgttttataagaattggggctggctggatatttctgtccctctgattgcaagtattaagcatttaaaaaaacagagaatatgatgtccttcttaggaaaaccacacaaattgctcatgcacagatggactgcattagtgaaaacagattagtaattgcttttagttcctgatgatgaaaaagtggctctgaacacctacctcgctggattctttactcaccagataaaccaagtgatacttgatgacgatccagatttggatttaagaagcagaaggtcaactccacagagctccaagtcaggttgagagcatcctgagatggcatcggtagagcttgcctttaaatcctggaccccaatccaggccaaacacacattatgattggagttaaaaaaaatgttttcacaacaaggaaatattgaaataagtcagctaacattttcatttggaaatacagaggaagttaaggcgttttgggggtgcttagtttccttgtgtgtatttttatagttttttagtgggatggagatttagtggaggcaggctggtacaagggaaagaatccaggtccaggaactgaagattcttagtgagctgtgtgacccagatgtactttcagggctttctcagacttagtttcttctgctagtaaatgaaaatgtgtgtgttagtgtttcctaaacctgcttgaacataaggatcacctggggcacgtgttaaaaaaatctgaatgcacttggcctcacccaaacctgtcggaatccgaatcagcagggtgaggcctgagaattgatattttaaccagcaccttgggtgatttttttgttcagacaagtttgggaaacattgaattagataatcagtaagatatgcttcgggtctaagattgctcagtggtgcttcaacacagcaaaccttattttttttttctccctgtaaattggagaaacaacaatc

SEQ ID NO: 54211 - DNA, 658 bp, Homo sapiens
cccataaaatgcctcaggtgatatacgggcaggaggaaaaagaccctaacacatctttcagacattaaagagcagagattcttacctcaggtccatgagcactggttttaggggtgagagtactacctagggttatatgcaaaagtctccatgtttgtacatgattttcagggagaggattcacaactttacaagtgcctcaaagagatcatgattaaaagggctgaaaagccagtgttccagagagagacagaggaaaggaaagagatgcaatctctgatgaaagatttctgtgtctgacggggagccaaggaatgagggtgattctggttgagctggacttgcatcatctcactttccctgaaaccattcccagctaggattgagattctagaaagtatactaatggatgatgtttttttctcttcttcttctttcttgttccttcaatggtgaaaagaagccttttgcatgttgattgtatgcaattagtccctgcctgtctctcagccccatcccctccccaagagaatattgagcaatgtcctgagcaggcgggatgtggatctgggctgtgtctggccttctcgggaagcaggtgaaccttggcttcatgttcccctgtttttctgttctcccttctgagcctccatcctct

SEQ ID NO: 54212 - DNA, 2952 bp, Homo sapiens
tgacttcacattagaaccactgggagctttatcaatactactgatgaccttgtctgagccatactctacagaaatgaaatctattgagaagttggaggtgagatggggccccagtgtctgtacttttcaaaaactgcctgggtgattctagtgcagccagagtggagaaccactagcctagagcaaaacaagatccggagtcagagagaagagaaaaagatggcagcagaggcctcaggccaaggggtgcccagatcaccagcagagaggaggcagtggtgcttatctccttattatgcgcacacacacacacacacacacacacacacacacactcctttcatctgtctcctctatggctacaaggggagaaatcccttggtgggaataagaccagcattaagaagagatggataaaaagatcattggccagcccagccttgggcctagctaaatcttaccagcatagatttgtaaaaaattctgtcagcatggccctgtgactttttctgaaatgctcccatactctgtgcttggaagcagaaagagtaggcctgtgggttatttagagctttgggcaggcaggatggatacaagccttcttgctagcagcagaattgacaggtgagagaagctggttgatagattccatgcagattgtccttgtttcacaatttcagtgaaccagtgatgactataaggagtagactccactgtgagggggcacaccttattctacctggagtgaattccctgcccaggatagtggtgcttcactctgcccatatctatgcttcttagattcctttcaaatctcccttaacatcatttggaaataatttgtattttcattttggctaaattttagacatacaaccatccctccaattatttctgtaataatgtccttcctgtgcctagcggaactgccaaatccggccacagcacagctgattatgaacttgtgactcagtggccgacatttgaagacaacctttaactccaataagaagccagcagccagcatcttctagcaattactgtaatttatgtattcaaaaaacgaaacggcaatgttcaggtttctctaagagattcttgccttaaccacatgaggactgagtctcgtttgtagaaaaatgagactagcttcttgtccttcacctctgaccacggggagtctcagaatgaagtgctatctgagattaaattgtggctttcttttgtttaatttttaaaattttactatcccccgctccagctggaaaccgagagttagtatgcacagtctgctttccaactgaactgcctaatcctctatgactcagctgtccagagccacagctggcttggcattgattttaaaagcctctcttttctgtctctgtctctctctctctctctctctctctctctctctctctctctctctctctctctcgttgttctctctcctttctgctttccactctaaagtcccctccccctctccctaccccaagccagttccacagtgaattgattgccagatctttccaattggccataagcagtgccagagggaaactcctagttctctggctacaggcttgggctggggaagcagctcataaggtcagtgtcccaaactcaagcagacagcagtacaaataaacagccatggggagacagacacggagtcaggaaaatcccctacatgactagactatcagtttcagcaatgccgtgactgggaacatcaggttcaagcccatgacactgaggccaaagggtttgccttggaataagcattgttctcaagcccatttctctctagccagaggccatattttgttaaagaaaaaaaattcacctgaaggatgactgggagtcaaaattaaataattataaaaaatgatacattttcaggatttgagttaattgaggtagaaggacaatctaaattagttaagaacctgaattatggaagttcttgaaagacaagtgccagtggggaagggtcctcttggtagtgttctagaagaaaatttggtatttgaaaccacacatgtccatttaaatggacaagaaccatgaggttcttaccagaggcagatttatcatgaaactagtgaggtttatatttcaagactcccctcttagatagacacagctaaggggcactaacattgtgtttacatggttatatgttgtaaaatttgcaaaagtaaaatgttttaatattcttttacttaaaaagggatccccaacttatacaagcttcagaccccttgaatcctgaacccatatcaattgggaaaggcatttggggatagatggggtgagtgaaggggattgcctttggggtccacttttgttcttgtttattcggatgaaaggaggaggtaccctagtgtggggtccagcttttaattctcattggtgacttagggctccccttcgtccaggcagcctccctcttgcccctcagaacaatctaatgtgaccctacagacacctcctgtgatcatggttcttattttagaagtaaatgtgagcatacatgtgcccagcataaagaaagcattctataaaatgctagctatggtggacaattttccgtgctcataatggtactccctttcttttgggcatttctagtgcaactcacatccttggccatgacaatcatctatggttgaatgtgtgactcaaatcaggccttttagagtctttccccaggttattcaactgcagcatgggaaagagggtctcttttctctgttcccaaggctgtaaaggctatgaacctatggctggtagctgacagggatccagccttgtgggaaagctggtgtgcgaatgaattctagagaaagtcagtagccctccagtgcctgatttcagcaccccatcccattttcctgtgggtttataagcccacacaattcccctttcttctcaagaaggttg

SEQ ID NO: 54213 - DNA, 2376 bp, Homo sapiens
agtcatagtatctaatgtcttgcttttctagtcatttacttatgccaaaagttagttcacgccaaggagaaggatgcctctgtgtagtgaaacaatttcacaattactgactgaactgactgttgcacaccactatttctcctaggatgcctcagaaccatctagtaactccatctctgggtgacgacagggaatctgcatttataaaagcccgctcccccttctcaggcaaaccaagatttgataaccactagtatgttcagaatccacgaccactgtaaatggcctctcaagtctctccagcaaaaagctatactgctctgtaaccagaagagcagcgtcatcaggtcctgatgcaaacaacagctgggcccagctgggcccagctgggccgagtaaccttgatgatcacagaggacggcctggaccccctcccctcctaggaaacacaaaattataaaagcgccctcctgcaattcccgtgggagacagtgctgcctaggccgctacgaggagctaaggctgactcaacagcctccttcccaggggcaaggccaaaggaaggcgaccctgcatggctaaccaggccccagcgcggcgccagaaggttaacgaccctccctgcccctttccttatgaaggccaagagcctccactactccgggggccagctgacggaagtgcgtcactccaccctgcggggagtgccgggagttgtagtcaagtggctactaatcttccaccccgattcatcttttctaaaacaagaaaaacacctctgcatcctgaaaaagatcgctttatgcccaacatgtgtaatagttcctctattttccaatcaacaaactgaactatctcagagctcaagcggaaggccggactacaagtcccggcatgctccgcagggtccccgggcgcccggccaccgtcgtaggtgcgggccgcatgaatggagcgccgggcgtaaggcaaagcctggcaccgtctgcgcggccgctatctgctcccggagcgtgagtgcggggtgtggggcgtgcgcgtgcgcgctcagagggggctcaaggcgagcgcgccgggcagttgcgggcgcgtggctgctgaggttggcggcggtgccgcgcgcccgacgggccggtggttgcggggcctcccgcctcgacccgggctgggggcagccgtggcggccgccggggaccgcaaggggcggaggaaaggagggggccggtcccggcacgcagaggagcagccgaccatgccccgagacaacatggcctccttgatccaacggatcgcccgccaggcttgcctcaccttccggggcagcgggggcggccgcggcgcttccgatcgcgacgcggcttctggcccggaggcgccgatgcagccgggcttccccgagaacctgagcaagctgaagagcctcctgacccagctccgcgccgaggacttgaacatcgccccgcgcaaggccacactgcagccgctgccgcccaacctgccgccagtcacctacatgcacatctacgagacggacggcttcagcctgggcgtgttcctgctcaagagcggcacgtccatcccgctgcacgaccacccgggcatgcacggcatgctcaaggtgctgtacggcaccgtgcgcatcagctgcatggacaagctagacgcgggcggcgggcaacggccgcgggccttgccgcccgagcagcagttcgagccgccgctgcagccccgggagcgagaagccgtgcggccgggcgtgctgcgttcgcgggccgagtacaccgaggccagcggcccctgcatcctcacaccgcaccgggacaacctgcaccagatcgacgccgtggaagggcctgccgccttcctggacatcctggccccgccctacgacccggacgatggccgggactgccactattaccgggtgctggagccggtcaggcccaaggaggcctccagctcggcctgtgacctgcctcgagaggtgtggctcctggagaccccacaggccgatgacttctggtgcgagggagaaccctatccaggtcccaaggtcttcccttgaagccactggcgcccaggagcggtgggccgaagacgtgccctaccctaccacaagggctgtgtctctaccccctagcctgggcgttggatctactggaatgagcagcagccgcttcctcggcagccttgggaagcacgggcgactggacagcagccgccgggcacggttatgggggcggggtgggcggggaggctagattgtttcctggtactgtcactgccactggggctttgatttggaggaatggggcaggggactatctgaagcgcttccatcctaaagccataatgaaaatatcttcctctcttccc

SEQ ID NO: 54214 - DNA, 1553 bp, Homo sapiens
aacccctactcactttcttggcagctcaaaaccgcaagcaaaaggaggcagcgaagaaaaaaaaagctacatgcattcacggaagctgactgcttttttctgaattacttggtggaaagaagtggctggtgataagagtgaatgcgtattgcttttttggaaagtctgttctatttatacaggagcgaaaacggaacaggtttgggttgtttgtttgtttaagtattttgggcaccttgggactgggagggtaaaccctaggaggagcagaattactgtggggagcttcgagagaaatcctcagccggagacaccctccttcctctgcccgcgcgctccccgccccccttcagctgctgcgcggagcgggcgcccttcccggcgcgtctgggcggtcggctgcgtgggggcgtccagatggaagcttggacactcaccctgcccctccagacacacatacacacacactcacactcgctccacttccgctacacactcccgcccccgctgccctcttcacacacccgctcacacaccttacactacacacctccctgttgactgcgtccgcgcgccgtcgttgccagcagtgtcccggcggcagagcgggctccgggctcgctggacaggaggttctatgaagacactggcctaaccttcactaccggtccctgcagccacagaatccccctgacccccatagcccaggatccaggaccgcgccctgcccgcacccgagccagaatacacgtactagaataaatattttctctccctccccaaaaaacacctcggtgagcccagcgcggtcctcagtgacggccgaaagcatctctaatcactttcaagacgccatccccatcccccaacccactcgttttactttgcgagaccccggtagaaacccttctgtttcgttcccaaagcaatttttaaaaacttttccaaagtccaaatagcagcaggttctggcttgctgggcgcaaagcttctacctcccagtgcgccccagcccgcaatggatagccgggcctgtccggggccccacaggaggctggtcccgggtgcccaagtccagcgcaccgccgcctgcatgactcattcatggtcgtttgtgcaggttgcgaactgccccagagccctttcccgctccaaagccgcggaggccagggataacgcgcagggtcagcctcgcaggcctgtcctgtccctttttcaccccgggcccggagcggccctagcttagtgtgggccggggcgggcgggagccacggcgccacgccgtggaggaagcgcggcgctgcaggcgggtcttcagccgctcacctgcctcgaccgctgcagccgtgcgccagctctcgccgggcccagcgcaccgcggtcagggccctgaggctgccgggagcggtctctccctctgctcttccactgaagcgctgcttctccccctccctccaaaacagccggtatccagcggccggccatctctctgacttaagtcacccagagcacatttgggaaagtttctcgctcgcgctgtgcgcttttttcca

SEQ ID NO: 54215 - DNA, 1526 bp, Homo sapiens
caattggtccatttctctaattactttgctcccttccccaaaaccctgaactggaaaaaaatgaaaaaaaaaagcctgtgatatatatggcaatcatgctgggaaagtcagagccctgcagattttagaaatgacaagggagaactcagtgtagaataacctgtgtctagccaaagctgaagcctggccaggctccatgtatgttgtgaaaattctttggccacagtcctgatgtcctaacatctgaggttgcatcattcttcccgtagttgcttctggactgagtgtcaacagcgtatgatgaaaacatgtcagggtagaggtaaaaggtatttgtcatattttctttttcttccttccttccttccacagaagagtggagaaaatattttaaaagaccaccacagaaataaagaatacagtgaaaatgaaaggtagaaaattcaattcatggtaaaattcttatttttcctgtgctgtttggcttgacccttccctttcctgaagccctcatatggcttcccaagatgtcaaacacatatcttctgtgctagtatcatttaggagggacagcagcaggcagcatggaacacaggagaaacaaaatagattaacagtggattgaagaatcttggcaactgtggaaaatacttttaaaaggaggctggaggcaaatttctcttagaaaatttaatagcagaggcctggcacggtagctcacacctgtaatcccagcactttggaaggtcgaggaaggcagatcacttgaggtcaggagtttgagaccagcctggccaacatggtgaaactccacctcttctaaaaatccaaaaattagatgggcatggtggcaggcacctgtaatcccagctactcagggggctgaggcaggagaatcgcttgaacctgggaggcagaagttgcagtgggccgagatcacaccattgcactccggccagggggacagagagaggctctgtctcaaaaaaataaaaagaaaaggaaagaaaacttaagagcagttgctgaatttatgccttatgatttagatcatttctaagtgtcctctcactgacctttacttaaggccatgatactctaccatcttctaatatctcatgattcccttgatcccttcccagtatgtgaccactctatttgaaataaagtccagattgactagcattttccgtcaaagggtcagaggaagaggtggaactggaagtttgaggtctgtataattgggggtagtgaatacagtggatggaaaggatttgattaggatgtcttagtgtcctgaagtgcctggaaagaaaatgtaggtaaaagggatttcccttgtgtccaacccagcatagatcaacaggtaagttatatatatatatatatatatatataaattcgccaggctggagtgtggtggcactatcttggctcactgcaatctctgccacccgggttcaagcgattctcctgcctcagcctcctgagaagctgggactacaggcacgtgccatcacgcccag

SEQ ID NO: 54216 - DNA, 1192 bp, Homo sapiens
caggtgtgagccacagcacccagctgaagttatattttatagatagaaaaaaggcagcactactggtgcaccagaagctgagtggtccaaggacattaggattctggagggttcgcttcagcttccttttttgagaaacactaacttagtacaaagtcgattgaatcattgcctttctgcatttatttgactgccgtttcccaaatgtcagcttactgaataaaaaactaccctgaaattctgctttccttggactctcctctattgaacttggttgaatagaatgcctgactcctgcctaacttggctttgttcaccctggctcaggctgaagcaactggacaagttggctcagagtccgaggagttagagcctgctgacctcacagctaccctcccccttctcacatggccagttcctgcccagtctagtttgtgaatagttcttggaaaataccctggaggagaatagagtcactaacaatagcgactctctttttagcctgaacctcttagtactcaggactgtgaacctaggaaaaccaaaaataacaaatgtaattgcagtgggttaccctctatttctattattaccaacatccagtcattctggtagatatttagctgcttgtcgtggaaaaataactgggtttataaccagacagagctagattcaagacctagctcagccatttattaattttatgacattggacaagtccctaatttgagcccgttagaattgaaagagggaatgtacatgtaagtgcttggaaacgtgcaaagtattatacagtacaaagtcaaaccattaatattgggaaatagggataatttgaaagtttcaggaaacagaataatttaattgttcaaaaaacacttgaatcagcccgaagcaaaatggggcttactagtcaacaccagtcttaaaaataaacaactaaactatactgtagttagtttctgtttaaagttaaaggcagtcttcccttttgttcatgatgaagttggaaatggggaaggacttatcagatcctttcatatcagggaatgacgcagaaggatgatgggccctcacacctattaagtacaggaaagatggccattgcttacatgctggctctgctggcaaactgttttttttttttttttctctgaagttaagcccttgtttttgccacttagtattttta

SEQ ID NO: 54217 - DNA, 2436 bp, Homo sapiens
cacccaactccaccttggttactctatcacagctccctatgtgttccctttccagcataaatcacaactatttgtcagtgaattccatgacagaacgaacctagcttttgtttggcacataattgttaaatgaatgcagtattatatttggctagaccaaaattgtttccctatcagtttgtgagcaacttgagggcagagccctaaatcattcgagtgtgctgacctctaggggggttagtccagtgcatggtctagaattgctcaaatcggccttttgaaaaaatgaatcatgtacaatgataaaggtgtggacaggaccacaagtaacggtgtaacgattagcagatttaaggaaaagtcagtctaaaaggaaacgtgagaagctaattgcagaagacagccatttcaagtcttcaacagcaaggctgtacctcctcacgtgacttcagtgtagactttaagaacctaaactaacgcttctcgcgagaggaaagattgaccgctcgcaagcgtacatcagctggtgccccgccttccctgggccccacccactgcctgtcctcattcccaccttgaaccagccttttgcgcgtgtgacgtcatggcgccgtgcgtggcctcggcggtggcgcagggggcgggcccgcggcgcggcgccggaggaggaagtggtgaggttgttgctccttcagcgcctatcgctggctcttggggcgcagagaggggccgcagtctccgcggctgcgtcgagctcccttgcagtcccctccatgttccccggcgccactactccccttcctaaggccgccgcttaccccggggtctatggaagtaatggaaggacccctcaacctggtgagtgtcccacagaatatagcgttcgtcttgggtgcctttgcctcaggagcccggccccgtccccggcgcgtcggctaaccctttaggctgggaggttggtttggcaggagtggtcgcagaggctgtgaggggctgctaggcaggccctggcccaactgcggctccaggctagccacttcagactttgccctcctgggggatccccgggaagtcctggcgccccctgtcgcggggccccgggcgaggggatgccaccacctggggctgccacctcctctctggctgggggaagtcctcttagcgccacgtagccacctccctacagcctggagaggcactgaagccggccaaggcagaaatggtgtgatactggttttaagttctagcagcagggtctgagtctgagtcgccccgctttggagaggtggaggagtgaatagcctcctcaccctccacttccccctcctcacccttcacttccccctcctcaccctccacttccccctcctcaccctccacttccccctcatttctcacatacattcacatgcataaactgagtctaccgtcttccaaatatattagagacagctgggaaaaagacagccgttcctgtatttagctcagattcatcaatttaggcatcatgaaagtgtaataggtgtttgctgttctcaggaaaatggctgatagcctgtttacttgtgttttaaggcgtttcaggtgttgcaattaaaaaacaacacaacagaaccccactaacaacgggaagcatgagttcttttcagactggccattgcatcttttagttttccagagaggttacccattttggatgtaaaagtcagattacttaaggttgcacacaggaagaacttttgagtcacaggtttgcaattcatttgcgatggtggaattgaaagaaagctctatagaggattcttttctcacattagaactctgagtcctagaagagcagtagagtcaggtggtttaagactctaggttttgaagctatgctgcttggatttgaattctaacctcgtcacttgatatctgtgttaccttgggcaaactacttggcttcactcggcttcaggttttttgggaggattaaaggagtaaataggtgtaaagcacttagaactgtactaagtacatagtacagtgtaagagttagcgattataaccagaccataagcccttaatttaaaatctatttgtagaataaaggtttggacttgagctttaaaagcctaagattctcggaccaaatcactggtgccaggttaactgttgtgaggcgcccctcccttttaagttgggtcttgccccaggtggtaggtatttacacttaagacgaattggactacatttgcgagttttttttaaccagggaactggccaggcgccggggctcacgcctgtaatcccagcactttgggaggccgaggcgggcgaatcacttgagcttagaagttcgagaccagcctgggcaacatggcgaaacccggtctctacaaaaaatacaaaaatagcctggcgtggtggcgcccgcctgtggtcccagctact

SEQ ID NO: 54218 - DNA, 597 bp, Homo sapiens
caagcaatcttcctgtctcagcctcccaaagtgttgggattacaggcatgtgccactgtgcccagcctgtcagttttaaatatggaaaaattataacttataaaattagtgtatatttagatatttctttccgtacacattttgtcagtgtgactactggtaacaaatgtcaaaactcttgtgagataatttctagttctttggtttgtttgctgctgatttggaaagtgatgtcagatcttaatttatatgtggctgttgctcatgttttgcttacctctgctgcaaagggcagggtccatgtgactgcctggccacaatcgttttctatgtgtttagcccttaagagtgctgagaatgtttgttgagtaacagcttccctccagagtggtcagttctcacatcacatgaggtagttaatgaagcctcttactttccagcttctgtaagaaaagtagtcagatatcatggtccaaggaatggccttatgcatacctggagtccttatacctatcccattttaattatattggctttaaaatcttcaaggtaaaaagaggcaatttgaaccccttctttgttgccctgaaaaattcc

SEQ ID NO: 54219 - DNA, 590 bp, Homo sapiens
acccaactgaaacctatctttcataacaatattcccttgaataaacttgatccagacctgtaatattcctgcattttaactacaatttgctaagtgtcattggtataaggtccgctcctctcagaataaccagagtaaaaaaatcagataaattaagaaaacattataaaaccacttgaagaaaaatgtgttttcttctaaagccacatgttaatattctttgtgatacttttaataatagttttgaactttttatggcagttcaaaagtctggaaggcagtttttctttcaagctatttattggcatgacttttacacagttgagtcatcatgagtttaacctactgagtcacctgcttacagcatctgccaaccacaatttactaactgcagcttcctcaaacttaaactgaaacaaactcaggaaggcctgggaactgtttaatattttccaaagtagtaactgaaaatattcctccagcacaacccaagctttaagaagtaaaaaattcctgggaagctggggagggaggtcaacaacaaaaaagaagtaaaattatatacttgtataaagtattctactgaaaat

SEQ ID NO: 54220 - DNA, 4270 bp, Homo sapiens
ggaaaaacttcaagatgtttggtttggagtggcttttaaggagttaatttctatatttaagaaattcctaagaggaatttcaggttgactcactgcaatctgtaacaatgtttcaaagttaaaaatttaatattaaatttaagcaagtcttatttctatgctatctacatcatgaagttacaaataatattttcttaattaaaaaacaggaaaaactctcttatattctcacttattttcgatatttaagatcagaaaatctagtcacagtaatatcctctctcccatatcctaggctaaccttttaagcactctattatttatcaaaattactattatttgggtgagaaatcacattttcaaaatagaaaatcctcacattatttagctatttccttctactgttatcatttaacacttttcaattacataaaatcctataggatttcataaaatcctatttattattttacttaagtgacaaaaagtttgtaagaaattcaagagcatttattgtatttaggctttaaaagtgtccaccactacgtgaccaattgacatgaaatatgtaacataaacagggatattcggctgatccctactgtaaaaaatgttttttcatattatatctctgtcagtttagtttttaagtaaactagaaaacactggcatcttctcaagaggacttttaatccttgaacattatcaaatgatctatttcttttcaaacagtaccatatcaggtcaactcatgaaggttaacaaaaaggtccacaaaaggtattatctaagtggctaaagatacaattcaattaagtaggatttgaaaaagaagtaaagttctccttctggagtgcctctttcttacgcaaataatacaggtggcttgcatttcctatgagacctagtcattttataatatgaaaaacattcttctgaagagagctctccttttcaaggtaggccagagttctaagggtaaatttcaacaagccgaccaatgatttaaattattctaagttaatttgaaaaaaggatttctaagctaaaaaaattctcacgttttaagatgtctcattgaaagccaagtaaaatttggctaccagaaatctaagaaaactagctgacaatgatcaaatttgaatactcttacaaggacatgagtacttataatcatttacaagtggaagtccaaagtatatcatgcttcttaaatagcaaataaaaagtgctgataaatacttttatagtatttgttaaaagaaatgtttcaatatttattaaatgagaaacagtgaatatgtgtgactgctctactttaaggaaaaatgaaaggcaaacaacatatgaagtgatattaaaatacaccccggtttttttaactggcaaaacaaccatgttaagtattgctaatttttgtattagtctagtacatttcaaaggaacattataagtttaaaaataataaaaaacatatttaaataaaaacaaatgggtcctacagctggtatgatgaaatttgtagtaaatagttcatgggtctaggtgcactggaatgtaaagaaactagaactcatgcataactaattcaacactctaaagatatatcattctatgagtaacttccacagcctaaagggaagcaatgagctaacatctgatgaaagtcacagtagaatatggccctaatcacaaaagactatcattcaaatgctctaaaaagcctttgaaaaccaaaatgaaaattactaacactaaatgttcagttgaaacaaaatgctttttcaattttattagagtgagagttttttttaaggtcatttatcagtgttaaacatactttttaaaaatagtctacggccaaaataaatatagttgagagcctgcatttctagtagggcctaccaaactataggaagaatgcttagaacaactgtatcctgtttggggctccatgctgcaccacattccattcacatgaggaagacgcgaacagatgagccctccccgaaaaacatttttaaaataaatcagctacagctcttaaacacaactcagctgctcaaacaaacgatgttaaagctcaccatttcacatttaacaggaaattcaaggagcttatgtctgcagtcttagtttctaacaatctccggttaacagttaacaattccaagttaaaaaaaaaaacaggcttattaactgcaaaaatactaatataaatctcaccaaaggtaaatactaaagcagaaaacaacctaagcaacattttagaagttaagatttagtctaccaaaaaaaaaaaaaaaaaggactggagtgacttgaaagaacaaagtccaaattcccacccaagcaggtctattgaaaaacacgatactgttagaaaacaagttgggggtggggaagggaataaccaaaaaaaaaccttacaaaacaaatacccccactttccttgaaacactagtctgaaaatcctaatttgaagcacttctgccataatactttaaacaattaaactcgttttttaacatttacagttattaaattactacaaacacaataaacctttttaaacaaatgaaagttaaaaattcttaaaactaaaaacattgaggccagatcttttataaaaggcagtgaccttaatttctcaggctgagaagaaaaaccaaatgtaaattaagacaaaagaaaaaggaagcagaaaaatacaaaccgtactttgttcttgagaattttaaagtatctttaaatctcagaaatccacaacaaggctttaaaggtcagtaagtatttgctgaaatttctattttgttctggaagagtatctagtgtaaatacttctttagtcttcaaaaatcacaggcaaatggctctcaaaccaagcatttctgagctcacttgcagcggcgtcattgtataggaagaaaagccaagaccacagaacgaagcaggagctgtaacctaacaagtctccaacgagcaaatgacgattttctgtctgctctggctcagccctggcagtgatgaggattacaactcgctctttgtcatcagcactgtggtgttaacgactaagaaatcctgcagctgaagcactactgcatcctccgatctgggtcaggataatttctctcgaggtcgcttacataaccagtaagatactccaaataaagagaacagccatccatcagctggagaaagcctttcccactgtactctgtctgcgtggaaacacagtgcagtagcttccaacagtgcagacacccaaatgagaacgagtacttggcttagggcacactgagagaagggaagaggcggtgctctgtaaactgtaactaatcccccgtcacaggtgctgatggagtcacttccagcacgagtcacattactagtgattactcatttggctgcggccatagagactggctcataattttaacaacagacaaagacagactagtggcgagactgaaagctcaagtttactgtctccttcataaagcaaatgcaaatactaagtttttgctttccagatttaccaaggtgagaaagtgcagaaaagaaataacatgtgactatctctcaagttggtaaaaataaagcatcaaatatactttgtatgtttttgggcacgatttatttattagtataaccattttgccttaaaaatattaaaaacttcaaaataaatcaatttaaaatatttttagacaatgatctcaacaatctcataggcattttactaaaaaaaaactggtaatatttattttggtagatttgaaaatattcctcaaccattttcactcattacaaaaaacaacttaacctagatagttctaagatacaatttgaaagcataaaatgcatttctcagatgtgttatataatatagtctcttaacatctatctaaattctagagttctgctgtctgatgttgtccaatatggtagttactaatcatatgtagcaactgagcacctgaaatgtagttaatctgaattgagatgtgtgatgtacaaaatacacattgaatataaaaaaaattaagaggtatctcatgaataattttattttgatatgctaatattttgacatattgggttaaataaaatactgtaaaattaatacacctatgttaaaattttgatgtaaagacaatttaaaatcacacatgtagctcacattttatttctactggacaagaatgctctaatagtaagttctctctctattttttggaggacgtagtcttgctctgttacccag

SEQ ID NO: 54221 - DNA, 524 bp, Homo sapiens
aacatataagaatatctttgtgacattgagttgggcaatggtttcttagatgtgacaccaaaagcacaagtaacaaaagaaaacataaattgggcttcatcaaaatcaagagtgaaaagacaagctaaagaatagaagaaaatatttgcaaatcattatctgataaggaagttgtcttaacaacatgctacaacatgaataaatcttgagagcattaagtgaaagaaagctagatgcaaaagggcacagattatatgatttcatttatatggaatgttcacaacagacatttccatagagacaagagagtagataagcggttgccaaagggctggaagtggcaggaagaggaacacaagtgactgctaacggatagtgagtttcttttgggggtatactaaaattagataggggtcatggttgcacaactctgtggtatactacaaatcaatgaattttataaggtttaattttatgctatgtaaattatatctcaataaaactatctaatttatttattttag

SEQ ID NO: 54222 - DNA, 2537 bp, Homo sapiens
aataggtaggtaaaaaatattaggtagatacctgtacaaatattacaatgaatttggaattgtaagctttcatgcacacaaagggaaaaaaatttcctaaatttgaagttttcattgaaaaagtaaatggctcagggcattacaaataaatttcacagattacgtattcataaatcaacctttggaagtctagtccatgtcttgtctctactccgccccttaccttcaagctgtccctcagtgagaatgtacttggaacacaacagagcatattacagctcaatatcatgcacatacctacgctactcaaagaaagcactggcagcgtcacatgtaagaaaccaaaaaaaaaaaaagataatcaattctgcatggcatttaacattttaattgacaacatttttcgtcttatttaaaatcgtataaaacccagaaacagcttgactccaaagaactatacctttctaacaagaaaagcacattggggacagaaagagagattaccctccataccaaaatttttcacttttatcctttacggttagaaagccaagcatctattaaggagaggatgaatccgggcacagccaccaccacggcctctgcctctaaaacacataggaatccccggactgtgtgggaaggtctcttttcttttctccctccccttcagcaaccttacaggataagttttaagtctcgagctacagcactatgaagacttttccaagaaaagagataccagggaagctggccgcctgtcgccatgagtggtccgccccctacccccacctgcccgcgcggcgccggactcgcggctccgcctttcggggaggtctccgtggccgcccaggcgccacagcggggagccgcggtcgacccctccgggatgggggccagggcagcctccgcggctatcccgggagtcctgctccgacaccacctccacaggggaagccgctcggagagacgcagggacccaggcaagggatgcgggcaaacgcgccaagggttcagcagaggggcgtgaccgccagttggccgggctgagcgaggcgccagagggaagcctgcaaggtacgtctgcgagagccgggtgcgggcgcggcaggggaaaaggggggcgctgactctcttaccgccaggtccggattgcggctgtccctgtgtgacacggctcggatgacccccgctcgccagcttcgccagccgcgtccgctctcccagcgctccgaacgtgcctcgtcgccgaccgccacacacaggaaccgcttacccaccagctctgcccgcgtctctaccgccatagctgtcgctgccgaagcggccgctgcctcctccagtgcgagggaaccgatgaaacctcactcctaccggccgctcatgctgaggagagcggaccgggacacagcagcggacccgaaagagcgcagactcgggacgaaccggccgctctgccccggacacagcgacctcgggccctccccgcaaacactcctttggactcccagattcgcagccttgtgctgcagcgccacacaagaaaactgaaacaaaacccaacgcggccgtcgaagaccccgaggcagcccagccgccgccaccgcgccgcggccagtactgctccgtctccctccccgggcagcggcggcgcgcagcgcgtctccttccgccggcgcgggcggggcagcagccgcgggagggtcggcggaaccaccgcagacggaaagtagtgcccggccctgcggaggcggcagcggccactgggtccgtccagatccagaggcggcggcggcggcggcagcgggagacgaaaaaatgaagagggccgcgggaaagtaggcgacagctattcaaagcttttgggggtctacctttgtattcgttgctccctcagaggtggaggtgaggggaaagtgaagtgtagtggttccactctgatcacaaaataaactcctgggttgacgcctcacccgcggtttgatgttcagagcacacagcgcccgccgcctgagttagcctgaattagcagtcccgcagtaacagcagcagagcaggacaacacttctactgaaaactaagccccaaagtcacagcagaaccaaccgttcatgacttcaagggaaaacgagggggaaaatgtgatcctttcattcttctcatttgtggtgatactaattacatgtttaagctattcacagatttaaattcgtcactgctttattataagaacagcaaatgctccgtggcgggcccttgtcaacgtcctgaaatttcacaaaccgtgtctgcgacagtcttagtacttttagtactggtacacagctcaaacacactggtcagataataaaagcagagaaaatccccagattcagttattagaaaataccatggaaagaaaaggattttagccaatcacaattcaagaaaaaaaatatttatttcccatccaattacaatcggactccctaacccacacaaagatctctaacttggaacaatcactcttctttgatcaacttatttgttataaatca

SEQ ID NO: 54223 - DNA, 2055 bp, Homo sapiens
cttaagacaggtcaggaatcctagacccagcctttactttgaacatctggcaggcctcagggaaataatggagattcgtgtctgtaaacagtctttgcagatgctctgatgaaaaggtgccctaagaggcccagaacagtggtatcactgcacccactactgcaaacatgaaatcctcctctgtccctccctgcattgcaccacgagactcgtggcacacacggaggcctgtgcaagaacctctcgacgattcctttaaaatgtggtaatataaggacgcctttggtgctgggcctccgtaaacactgaggataccggatgtggccaggcacacctcaaagtcttggctctccaaaaccagggcctggtcgagagttttattggacaccgagttcctgcgaatatctcacttttcacacaggcactgccaatccctaccctccagtacccttcctcagcctcctgccccactctcgccgcgagtgtgggcgtcccaaagagctaaggagggtaaggttggttagagcgcaggggccaaggccgcggcagcgaggccgtccagcgcgggctaggatcccgccagcccagccctggagcccggccgcctggccccagccctggcccgggccaacgcgccgccgccaccgcctatcagcggagcgcaggggcggggtgctgtccggactaggctgccgggccggcgggcgggggcgggcggggacgggcgggggaccgacctctgcgcagcccaggccgccgcgcgcacacaccgggcccggctcctgagggcgccagcgcggccccggggagcgcgaggagccggcgaagcgcgcggcctgccgttggcggcctggtccgcagcgccctgcgcccacccgccccggacgtggggcccaagcccccgtgaagatggtgtcctggatgatctccagagccgtggtgtaagtgcctctcactgcgccctgcagccggcgcgaggcccaggggagctgtgggaaggggaaggagccgagaggaaagggaaggcctgggcctgggcggggacggggtagcccggcctcgggcctgccgagggtctgggggagccctcggcttcctcaccttggtccacgtcgctgcggagctccctgcgacggccgagggcctagctgcggcgactgcggctgcgacggcggcggcggctgtggcgctgctcggctgcgtgcggtgcggcgcggcgcccctgctccggcggcgctgggtgggcaggcgctcagggcaggcggcgcgcgctccccgctcctgctccccgcgcagcgcggcaccgccctgcgggcccgggagcggcgcgcctcgcagctgctccctgcgcaggctccgcagacgccgagcgcgggaggctccgcgatcctcccgaggatgcgacggcagtgccgagcctttgtatcccgcggctgatgcgttgcggtgtctctcttggcggctgattgccattcggtcacgtgtggtaggaggagagatttgtctaaaaaccggagaccgctcccagcccaggatccctgggaagggtcctagttttcccaagatttgcagcttaccgagaaaggtgacaccggctgctcgcccagatccccgaattcggccctgtctcggcggaaatatttgctaagtgattgaaaggctgcaggtgcctgttgcctttgttcaaattatgggttcatttcattgttctcctaccaacaagtgctacaggtctgtaagaaaaagaaattccttgagttggtggtgttaatcgtgtaaatgtatttgaatacagtttaaactgattttctctcatctccattttacccctctccccgattaaaaaaaaagtcaccaagtaaacaatgacgtagttacagctagggcctatgaattcattattcacctctgtagtagtgttatctcagaaggtttcataaaggtatatgaaaaaatgtttatgtgagggggcaggcttctctgataagctttagaatttaggaaaaataacattaccagactttttgttaaaaggagctagattttctgagtttg

SEQ ID NO: 54224 - DNA, 3494 bp, Homo sapiens
ataatatttaacattaaacaatatgcaaaagtacttggggtgtttacaatagcttaaattctaaaattaaaaaggacattgaagactgagaaggggaaaaacaccttaattttgtaatcttaatagaaagaaaaatgtgtcctaaaagcaggagtaaataaatgtcattaaaaaggtgtatcttccaaagtgcaaagacacgttacaagaaatcaggttgctctttgacccaccagtctcaaagcacattagactgcagcaagtaataattgcttcctcatttagattagacaatgagtgctctctgcaagctgctctcctctaaatagattgtagagagtaattgaaacaagttatatggggaagtggagtgaccgattcctcaaagtgtgggagcagagctatggtaacctcttgagcctggccttcatcctgttcctatttagggaatccgcggggcagccagtgttgagtgcagtctgcagttcgccggctttattgttcagacttgaagagaaggtcacatgccctctttgacagagaggtttatgggctctctctaattagcagcaccctccaccagacagactgttggccactttccaagaacgggacttggtagcggccactgatgaaggagaaaacaaggttatttaccctgcgactgtaattcttggcacaaattctccctttacactcagacacgttttttcttttgttccaacttgcctttggaatcctgattagggcgttaagagagggaaatgcagctatatatttagtggtgtaagcaacccatatgttggccttagatacttttgactattctaagacctcataccaaaagagagaaagaaaaaggaaaacgaaaagggcagcgtagtcgagcgttgcttgcaaatgtaactgcttaagcacatgcccacacacaactccagaaaaggaagtttaatttgcaacatctataaaataacgacagttgtatggtaggacacagaaatcccagcggtaaagtgtgattgggcttagctattattggagtgttaaaagagtaccgggaatatatttggcttgtcctgttctgtcagttctgtaggccggtggattaagctgatagaaatgctttttggttgatttaaaccagatgctccgactatttttgtcccgtttgcaggcgcagaagctctgcataaggcaatactgcccccctcggccgaccgccaactgcaaggcgtaggagactgctctccactagccacctcggccataaaaccctttcaagtccctattattattccaggcacattccaaggggattgagtcacagagttcacttggcttttctcctgccctgaactgcctgtaccaggtggaatacgactctcaacttcaaatatggaatccaaaagcagtcaaagagcgctttagagcaagccccagatgcgaactctactgccacttctccccctcccccaactggggtttgctggctgcgcagctgtagtcccacgccagcactaaggtcgcctggtcgacaaatgagggttttctttggggcatcctgtagagctgtcctattttctctaccactttgagaagccccaagggctgcttggcggcgaggcacagactgggctgaaaacttttccgttgggcagtgcgtcccggagacccaggaggcccaggccgggagcccagggggctggaggttctgctggcttttaagtctgctaggagggaaaactcccagcccctcccacgcgtcctcccagactcgccggccgcctgccccgggcggggaacgcgcacatctggcggcccaggagccacatctgatgcactaacccccgcacccagatgtccaagaggccgggggagtcaaagaacgccaggggcggggcgaccgcggctgcggctcctccctcgggcagagggagtccagatgcgagggacgccctccagagccgagctgggccggccgggcagctagggtgctgggaggttgcggtgcagggtgggtgggtgcagtgaggctggagccacgctgggggggctgggctggcggggggaggctggagccgcgccggggagagggaggcggcggttgggtgctggagggcgctggtgccgtgccagtgggcggtggcgccttacgccacccgccccacccccgtcaccgtgcccgccccactgcgtgggattttacaacctaggtccccgggaggtggtggtggagggaggggcggcggggacgtttccggggcgggggaggggcgcactgctccagaactggaccgagggcggggctcccctctgcttctcccctctgttccagcgctgagacgcaggcctttcctggcgcgaagcgactcgccccggagctcccctgcaccgtcctgggtgtcaggacgcgtcaacccagatgacccgacccggagatcctggatcctctgccctcttccccctaccaagtccttaaccggagagggaggagctaccaatgtcctccagacgttctccaaagcccgagctgccgggagaagcttgctcaaggcgggtgcgcccctcagacgtttgtttgcacgcaggggttttgacgtttcgctaagcaacagcgtttgccagggaatcagggctgtttcgaagagcttgcgtctatttgatgctcccatcttgaacaaatcgtttccattcgatttgtttaaccaaggcgagggcggactatgttgttacttaaaagttattcttcatccaagctgtcctcagattttcatctaagggtgtcataacaccccaggtcgttgcgcaaatgttttgtgacaatttagaaaaccagaggggggaaatatccttagagaaaaaatcataaccaacaagaaaattatgttaaatgatgttggtcctttttcatcggatggtcccagttgacacatagtcttttacaaaaccagtgactattcacagtcttcaatttatggcacatctcccggtgggggcgaagtgcatgaatgggtcccaccttattcaccagctgaaactctgaacaagccttggggtttcctctcccaaagactgccaggcttcactaagaatcaaaacaaaacaggatactaaatgcctgcggtaagttttcaaatatgagctcttccattgcttatttctgtgaattgtggcaaattgcataatgtcttttgcccctggtgctgcttagagacagggtctcactgtgttgcgcaggctaaagtacaatggcacgatcctagctcgttgcagcctcaaacccctgggctcagactatcctctggcctcagcctcccaaccagcaagggttacagtcgcatgccaccacacctggttaattttttatttttgttttttagagataggggactcactatgttgcccaggctcgcctgaaattcctagcctcaagcattcctcccagctcagcctcccaaagtgttgagattacaggcgtgagccaccatgcctgg

SEQ ID NO: 54225 - DNA, 1932 bp, Homo sapiens
gtagaaggagaacttggagaggaggagttagcactgcctctatgtgttggtgaagctccagctttataaagcacaattttagtacagtgagctcctcctcttcctcacttccttgttcatcatgacccagcttgaccatctcagaattgttaggttgtaggagatgacccccaatatgtttctatatctgaaattatatggtatggcttaccacataatttacaaaaaacaacattaatttggggggagatggataactgttttgatagcataggagaccactatcttggatctcaccaagactcgatatgagtatattattttacaaattctagatagtcccatttataaagaactctgaatagggtgagcaatggggcagggcatagagccaaaagcagtgaactgcttgtcaaaaggctcagtttttccaactctaaaaccatccagctgggtaatgttgaacaaatcaaaatctttcttatctttttttcccctctctggtgaaaagaggaaataaactagataatttttaagatctgcttcctgcttgaagaatcaaagttgtgtctatgaaatcagattaaaaccattaacaattattttttatgtctgcagtcttagaaaatttaaataaatatttgtccctaggtaacagacaagaaaactgagatacagagagatttatatgccacctaacatcaaaacctagagcccttctgagagatcatattcccttgtacgatacttggtcagtgagtcactaacctccatcacacaggccaggctggctcttgcagtcccgggagtaacacagtaatgtcagtgggtatgaatagtttgagtctcagatcactcagctgggagatgatatttagaacgatggctcaaaaacaattctgaccaagcaaagcattagtcagcttgggaaaaactttatgggttgggaagaacttctcagggagggagaagtaacagtatattctattcatcccaggaggaccattgccataaatccgtgaggaaaggatttgttttggacctacacagagaaaagggaggcagtaaggaaaagcaagctggattgggagttagaagactatttctagtttaactctgccaaatacttagcacagggcaaactagataccctttctggccttcatttctttatctctaagatggaaagataagactagatgatctccaaacttctttaagctctgacatctactggatttcttccaaaagcacaaactgtttcctgtgccacagaggtcattcagaggcttctccttatttttcaaaatgaatcctaaacaattagagtgatttctcttctcatggttcccgtcacccctcctctgtgttctcttgagcttatgaatacctccctataagtagcctcatcacagcctactttgtattataaagaatattatgttttcctgttgtgggcttttggcaaacagtaaccaagtaattaattttaggctcttctaaagcatgtagtgaatgctgccttcccctttgtttattagaattgcatattcaggaaattacaagtctatgattgctcaatatttcaagtattactgtttctcagattttcagtgcaaatgattgaataattattccctgtgtaactttcatgatactatgcaaatacagaactcctttgcttatgtgtacaattattggttcataatttttttattaagagagtagcaatttatatatgtatatgattatgtgtttgtatatataaatatagatatagatatagatatagatatagatatagatatcttttttctcctgtaccagtatatatttccttggcttcaataattggcatttttttttttttgagatggagtctcgcactgtcacccaggctggagtgcagtggcacaatcttggctcaatgca

SEQ ID NO: 54226 - DNA, 1292 bp, Homo sapiens
tgcctcctgggttcaagcaattctcctgcctcagcctcccaaggtagctgagattacaggtgcccaccaccacacctggctaatttttgtatttttagtagagacaaggtttccccatgttggccaggctggtcttgaactcctgacatcaagtgttccacctgccttggcctcccaaagtgctgggattacaggtatgagccaccgcacctcgccggcaatttttatataatgtttttcatttttatgctggagcccacctcactttttccaagtccttcttacatgttgctcattataaggcccttatgaagaatttgaaagtggaaagtgttcttccaggtcatctctgatctaaccccttattttatgttgagaaaacaaaggcccagagagtttaaaatgtcactgccggtcatagccaagggtgagctagaactgatgcgtctcaatttccagcccaatgactgtttctctgctatagcacagtaatatttatggacatatcacataaaacatatctatttatataagtataagcataagaatatttatgtttggtttacattctcttacagaaaggtagagaaattcaggtatatattttttctcttgaatgtcttagagatttgcatctttatgaatattattcattggttgaagaaaacattgctaagtaagtagaagatatgtatcctgtttctttagaagcctatttcatgctgtgccaaggggatagagtacaagtgctggttaataatttatagtatatattcatctccattcctctttgactaaaatattaattccccattgatcatcattatttgctttttgcccaggcaatatgcaatgtgcagagagtttgatgaaagggttatttcctaatctcatcatgccccctgtgctctgccagtaatttactgactttatttacttgtggtaatgagcacaccacgtagagtgtgccagctgctgggattgtcctgggtgccttctttctaaggcaggatgatgtaaaaagcacagatgtttttctaatttagcatctgcagcatgtgcttgcatttatattacatttttcatggaacaatgcaggtgaatatataatataaaaaaccacactgggtgcagtggtgtgcgcctgtagtcccagctactcaggagggtgaagcccaaggatcctttgagcccagatgcttgagaccagtgtctacaacatagcaaaaccccatctctaaaaaaataaaaataaaaaatctcagcttgatttaataaaatgagtttattta

SEQ ID NO: 54227 - DNA, 2000 bp, Homo sapiens
tcaattatctaaaaattgcttacatgtagagactacaaagattatggatatgctaatgtttagatgtggttagctcagataagtgcaacacactgttggcaaggctgggcttgagttcttgtggcaaaacaaccagttaatttcagacacagaaatcctctgtgtaccagcagagagtaatggctcaagcagagccacttgagtttcataagacctactccaatttgctgttgatttgatcttgaggggagctaataaaggtagtaaatgagtcattttccagcatgatataactagaattggttcttggcccagaaagatgtgagtcagtttagtcctgactcagttcccagtatgatgcacagtgactcatttccctatgtgatgtcatgtttgttccttataagatttgacctcctcattgttttgttgtatttttttaaaagaagaaaaggagagtgttgtagaataagatgaaatactccaaggaatatagaatcagactaataaataaagccttgatattctcacaatgagcctgaaggaataattaaactttaaacacctatattgttgttcccatctatttagattattaatttccaaacagcctagctattaggcaacatttgattgaaaacattgcacgtgtaaaaggaaaaagaattgctatcacaacaattcaattatttggtagatacatttataaaagacagctgcatttgaaaaagttgacaatagatggtcagattaaagaggacacatgaatggatctttctagaaagatacattcatttatacacagaaggtaaccaacaatggaatgtttcttatgaaaaccgcattttcaaaatatgtagaattttaaaatatactgtgtaaaaatggctttgtcaactgtgaatgcagttcagtgttcatggcttgtgttggcgattaagtttggaggctgaggagaaaagcaactaaagcatctccgacattgtttggtgaaatgtattaactttggtgacctcctcaaggcagaccaatctcatcctcagtaggtaactataccgataaagtcaaagctatgtaagttaaggtttgttttaatggcaagcaatagaaaccccttttaactaacataagccaaaaagggaatattggatggttgaataaaaggaggtgcataataactaagcctcagagcactttgggggcccctcattaggtacttctagaccttctatggttctgttgactgctaaccctgctccaacaaccttctgtatctgtttctcataatttacgtttcaaattcccagaggatgatccactaattggcctcactcagtaggtgcatctccctttgggacaatcatccctgactgaggggctagctgcacgattccctctggagaaccgttatgagcagcacatcccaacttgtgtctgtacagagactgttttgttctccaacttccttctcttccagccccagtcataacactgttttcatctatcctgtagatgagtgcattcaaagttctatgtttacagaggtcaccgggggatctcgttaaagtgcagattctcatccagtagacttggggcactacctgagattctgtatttatagtaaattaccaggtgatgccaacaatgctggttctggaactgcgttttcaggagcaagcctgtattaggtgttcttgatgccaaactagtatctattctctcctccccctttcctggtagcagagaagtctttatctaaggatccacttccatccctatacagtccatgtgctttgggggaaattaaacacactcctagcgctcgtgatgggtaccaattgctttaagctaatcagtcattcaaggtgatttcaatgtcccagaacctgaaacagtggctaatatgtagtaggtattccataaatatttgttcaatgaatatatgagttgatgtgagcataaatgtgtgaattaagggccaggcgtggtggcttacacct

SEQ ID NO: 54228 - DNA, 3877 bp, Homo sapiens
caacaagagcgaaactccatctcaaaaaaaaaaaaaaaaaaaagaaaaagaaaaatgctgacactagtgaaggtaggacagagagagagaaatgggccattgatagcatcattaaaacactggattaactactctatgcccaccctaacaattatgtgaaacaataaattcccttcaattttaaagccagttttagttggattttctgttacaacacaaagagtcttaatcaacaatggggaaatgacttattccattcctaggccatcccactttggtacaatgtgggttccttcatagtcaccctggtcagaaaacaccaggatcagaaggcgttccaaaataccccttggtatgaatttagaaacaggctttattgtagaaacatacaaagcaagtgtcagcaggcaaaagagtcatctacaatctcccagcctttcatgaatccaagaaaatgaatcttttagaatatggcaagttatgttttaggggaaggactctacctccttattgctttccatgtggagagaggatcagaacaacttatcagtggggatggaaataggtactggggcaccaggcagtctgagttatgtgttagatgttctgagaagttgtctgggaaagccagctttccagttctggagatttgaggactgtggagagtggtagctcatatgagtagggtgggaaagaaactgccagttctgtgggaagctaaatttagggcagcccaccccactgggagaaggggggaagcccctgttccacttggcttgtccaagccaccccaagtgacctcccagagtcccttttagacaactttgcttgtcatacaccaaactaaacccttgacccagccagttgcttaaaatccttcatctgcttcaccactgccttcagggtaaagtccaaggagttggttgtccgagagtcaccatctggcccaacccaactatttggtctttccgtgtcaccctccaccttatactgtaaactccaactgtcctggatgacctgctgtgctccaagcatttcatgtaacaaaagctttcagtgtctggaagacttttgcaccatgcgtcttcctggaatgtatcttgctgagcactctgtcccccaaattttgtcatgatcaaagcctgctcatcatctgtttcagctccactgtttctctctctggaaaacattcccagatctttaatccccataccctgcataattaatcattgcttcctcagagttcccatggcacttggttcacactgctagcatgcacttatcaccttgttaagcaacacatccacggcctcccctagattaccagtttcctgagcacagagaccttgtcttacttgtctttacagcttaagccgtactgggctgctctccatgggactgagcctgctggccgcactgtggcatcctgccctttattctgtattagggagcataccttacggccaaggcttactgagcagttgtacaggcctttccctggtgataagagaatctgaagaggactaggtacaccttgtcaaaatgctggaatttgtatccaggttggagagtgcctaacacatttgggaagaaacaaaattggggtaagaagcagcccgattttttaaaataagttcttaaagggtcagtgggaccgaatgccttgaggaatagctactgatacagaagatgacctagtttgtaaaaagaacagcataatattttaaataaaggttttcctccttttgacctttttccagtatgactgtattgctgttaactttattactgaagcttaatgcccacgataccaggaagcacttctagaaacagctgtgaatgtggccattcatgggttttgcccccaccatcagggcatgtggggagggatttctgtttccgctgccatggtgcctgtgtttttcctgtgagtactaatgaaaggcccttaaattagaccacacagagttaagggaaattgtttattccttcattttcatcataccaaggaacttcagagatttggatctatacactttgacctctaaggagttttagaacaaaggtgtgatgtccagaaagataagaatcagcaggtcacatggcttttctgaaggtttattcagtcatcccaggacatctaaaggcaggcagatgccaaagtacacacggggcattgggtgtgagcctgatgagagcagagaccgggaggcctaatggaggggctggcacagtgacagtcttcaggactagtctggcctgtgcagcagctgcacatgttcctgggatcagagccagctggtggctcatggcagtggtttctgggtcctggctccaccccaagacaggctcgagctccttagccctgacctggcaatagctttgttctggcttcacactgaagtttggctgctgagccagaaggtgaaggcagaaccttgcactgtcacccatgccctccttccagcctgatacacgggctgccccaggcagggccagggaccagtgggaaaaaccagtcctccggggtgaaacttccatcatcctcaaaacttttgtagtggtcttgccctctttgggtcttctgggggcacttcagtgttgctatctgtgcataaggcctcaggttaaagtagatgtcatatgggatggagcagaaatctggcaggagatgccctggctgtaacaatccagaaacattcagagatgactctgagactggatttcaaaactggctttggttttgcaagaaatgccaccccagatctggttctccaaaatacagtatcaggaaacccacaaaataagatggattttaatctctattagaacatttcccaaacattccaaataaaacatcactagtgacactattggatattgatgctttcagtctttcctcaagtgtggataaagcatcttcagaacattttagtagctttattgattggaacaggcaatctaagtaaaagcaaagtgcttgctatgcaaataaagcttctagacaagactccagtctccctctggcagcagcttgccatcccaaacccctcccatctgggactctgaaatctgcttttaaaatacagtctgtatttgcatgtcccaacacccccctccttgttttagtctaattctcccaggttgagagaaacacaataaaggaaattttgttgttgttgttttcagtgcttccttttcacagactctttttttggaaaccgcaacctcggatcccagcagagcttcctggggacttgaagaacatcaatcagtttcgcagctggaggccgaggctttcctcagggaagactttttacataaaacagattgtactttgtccttgccagggcagacaaagatttaaattaaatatgcagaaagctccagttggctgcctgccacagcctgggagagggggaagggagattgtgtccccactctccttcctttctctctagttgtttctttttcccatttctgttattacagtgataggagccagcagttaagagacttgggctttaagctgggattttctgtaaattcactgtgtgatgtgatacaagtcactcagcctctgggacctcagtttcctcttctacaatgaagagtttgaatgagatgatctttgaaagtcttttccgtatttaaccttccaagttatctccaaactcagatgcatgcttttccagcaaataccctaagcctcatctatgagtaatgcatcctcactgttcctggggtgactggaaggacctggcctgttttcccatacacctcacgggccaagcagtcacgttataagggagggaggcccagtaaaacatggtaagtggcaactgactttgtatctcagttttagggagtataagag

SEQ ID NO: 54229 - DNA, 2121 bp, Homo sapiens
cattttctagggggggtccctgccgtaccctcctttgtttctgatggtccagcctcttctggtctgtggcttctgagagctttgcttgtgccgcgttctgcatgttggcgatattcgaatgcttcttcgccagctgcactgtgagaaactctggtctatgctcatcttgcatttctggcaccattctctgccaccacaccactctgtggctttggaactttgtgaagctcttagcggaccatctgcctagacatgtcatacagattttccttccacttctgcacaagccagatgtggggaactagagagtcctatagctcccagattccacccaaaggggagcaggatactcagctctagaatccccaaacgtgtttggacattttattattcctccctgtgaccccaaatatagggctcagcttaagataaaagtaggttagacccagggtcccttttcagaagcccactggtgtcttcacttttctttcaaatctctccattctgctctatcagataaatcttctgagtcttgggagcagaggaagctctgtcctaacagggcaggtttccttctacaccttttatctcatttctggggcctaagctttaggaagattctgttttctggattatgttgtatcctcccttctctgaggcaattaaggcagaacctcatgaagtgataaacagaatgcagtaaatggacagaagtgtctgttaatactttagaatttcacctgccatttaactagcagccaatattgtcaaatacttgtcttttaggagtttcttcagtcaataaatcagcctggtttgtcatggtgcagtggacaggtcactggcttgtgatttggaaggtttgtgttctactcctagtttactcgtcgtttttggaagcagaccctctatgtcaatagcaaagggcaattccaagtggtagtgttcgtctgtttttatctgtggactttgattctgctgattgtgtgacattgggaaattgacctagatttcatgcttcagtttttactgtatatttccatagcatgctctatctcagactcagggaacttatgtgaagtgataataatggttaatatttaaatagaatctctaaagaaaaagtattgtttctagtactttatgtgtatgaattcatttgtgactcattcataaggtagatcatgaggtataatctaaagtagggctaggatttaagcttacacagtctggttctaggtctgtgctattaattattaagccagacaacctcttataatagggaataatttgaaggagagaaatgaaaaatgccctgcaattattcgagtactttcctagtcttatttataaataccaatctttcaaaagtaaactgggcctcaattctgctgaaaccatctcaaatttcagatgaggaatagctgaatggatgctaatactgcagtgattacaattattaaactattcatttttataaaatgaataatgaatacactttaacccacctcctttcaaaaatggtttcaggtcacagatcagtataagcaactcaattttaattccagcttagaaataataattcaaaaatagtatttactaagtaattaagtaagggttcttttaattttttcgccttatgctcattaaattattttaaccctggccagactaattgaaatttaactgcatgataaaactttaccgccatctagtgtcagtcaggagcattgcaggagtgttgctttttgaatctgttttggtagctacctgccgtatctatggcaatattaagcggcactcccaggtggcactctttgactcctataccagcgacctttgattttatagattattccaataatttgagttcagaggaactaatttcatggcatttcttatttctaaatcctggtttattttatgagtgtgctctcaggggaatataagaatctttcatccaagtcagggatagtttctaaattctctgaatgtcctcacccctaagagctcttgttactttagcttcaagatggtaaacgtgggggaaaactttgtgctatatatttaaattattatgagttttttttgtatatcaagtatttatgtgtacactataat

SEQ ID NO: 54230 - DNA, 1170 bp, Homo sapiens
agatgtgataccagtcataatcctaaaaggcacacaatcctaaatgtcataatcctgactgttgaaatctcaaaaggtcaaaatccctaaagtgtaaaatttgtaacatccccaaattccaaaattcacaatcttgaaatataaaatcctgaatgttgaaatcctgaaagctgaattctggggaagggattagtgcatttttggttgcaagcaaggtagttgtaacatgttagttgtatcatgttagaggaaatattaccttgtcattgtctttatttggaaattaagtataatttaaggagatgcttataggtgccaagttgacaaggggtggacttgtggacttaattttagatgtcatcttgactagattgaagaatacctagaaacctggtaacacattattttgggtatgtctgtaagggtgttttcagaggagatgtatgtgtgagtcagagtggactagctgaggaagatcgctcctgaatgttggcaggcaccatccaactggccaggggccctgagagaacaagtgcagaaggcaaattggtctctccctgagggctggaatagacttttcttctggggccttagacagctgaactctaggccctttgatctttggactgcaggatttacaccagtggccccccagagtgtgaggccttggactcagagttacacaattggctttcctggtgctgaggcctttggacctgaactgagtcatgctatcggcatcctatggtctgcagcttgcagatggcctatcatggacttctcagccaccataatcatgtaagctagttcccaaagcccttaataaataccctcatatatcacatatatatatatatatgatataccagtatattctattagttctgtctctctggagaaccttgactaatgcagatttgttattggggaagctgaatatcattccctcttattgtattcttgacaatgcagtgaaagagatctgtgaaattgttccctcataaataggctgtgataagttaagtgtgtaaagctaatcaatagtgaaagataaaagtttaaaaactaatcattattggtgctgagaaagcagaaacatcacttaattgcaaggattaaataataatcagactttcaaatggacaatatatactttcaaaatttgtagaa

SEQ ID NO: 54231 - DNA, 507 bp, Homo sapiens
aaggagatgctcatagcaaccatggaacactgaaaataaataaatagataaaaagctaccagcaccaaaacaaagaaggcttcatggttttatcctatggagctgtgacaagttgctattctatctgaaaaactgatggaaactgaaatcagcaaaagtgagctggttataaaacaccagcagacatttattgatgggtgttactgggacacactcagtcatgaagagaatagaaatgcatcaaagtcctactccaggaatttttcctgacctttgctatttaggaattgcccaacctctgttgtaggtgttcatttatctttcccattctcaagttagttttatagcactcttttttggggtatataatgtagtaccctttatgtgtataagggagacttctgacagcttcatatatacaagagatccttccatggagaaatgatttattgtaatggtctttatgttgttagagctagaactgagactatgtttttgatctacttt

SEQ ID NO: 54232 - DNA, 616 bp, Homo sapiens
tggtttagtttgcttgaaatatatcaataactggagatttccaggtggaaatcccatagaatttcaggccaaaaactattttttgggaggtcaggtgcttgagaaaattctgtttcttaatatctctgctcaaatgtcacatctttaggcagccctccctgaccttacaattaaggacactttccccattacacacactcacagagccctgtagctttacttcaaagtccttatcagagtttggaaatagttattgatctgtgtggttatctggttaatgtctgttttccccgctacactgcaagatccccaaggccaggaatgactttgctcaacagtgtctggtacacagtagtaactcatgaaagttttcttcaatagcgaatcaatgaagagaaatgctctgttggtgaggaaatagaaaagaacctgattcttttcaaaccaggaaaggcctgatggttttactctgtgcttccttggaaggcctgtcttctcatttttaatcaggaagacaggctggcaaataactatcgaatgcagctggtctgaaactcacggaaacaacgtcttgctgacacatgtctgtaggctcttggtaatgcctaagtccatg

SEQ ID NO: 54233 - DNA, 1366 bp, Homo sapiens
atcatcattctttttaattttagcaattacagattcaatttgttaaacttttcaatgatttgatacatgtgagtttaatatttttatgaggtataaggtctttggaagggatatgtgttatatgatattaaggatttgtctgcaattaaaattatattacctttcttctctacttaaaatcctttaatgtttgccatttgttttcaatctaagatcaaacttcccatgatggatacatttctttttattttagtccctgagtccttctaccccatccctgctgcccagcttcaaccccatgaggccttctggacatggcagtgtctatcttgttaattactaagccttagtgcttagcactctcattaagtatttattgactggctgactaacttagtaagatgagataggttcacacaagttcacacagttaaaaagtatgggaacttagacatttaattcaagtctctctaatgccaaaatctagctagttaacttttaacagagtgaatggtcatttaaggtttatttaacagacctttgaacttcagtcatcatcaagattgctaggaagtcctcagacacttcagaataatagcaagactctgaaccaatacttgttttattcaggtgggaaggaaggtatttctgcagtttgtttacagctttattattcagtgtggttaaaatatattttatttcattatcttctgaagaatgtcaaaagtagtattttattcacttctaaaccttacgtaatggggctgtaattttgtaatgtttatagtctgtgaaagaaaaaaatgttacattaaaatgcttcctccttgtttttaaagattgcaaccctgtctgagctttcttatgtgttcctcttgggcatattttaaactacatgatgtatattatatttataatattatttagccttttcaggaaataaagaaataaagctattttcagagggaattcaacaaacacagcacattctactgagaccaattattccagctttgtagagtaataatataatctaataagacatagttacccacatttgaaatagctccagaattttctgttgaatagctgtctgcttttttatttgcttttccctatctctgatcacatgcaaaattacagaataatcaattgtttggaagaaaaaggagggatgagaatattgactggagataaattatttttctgtgtttgtaattactttctcttgctaagtctagtttacatgttcatgatggaaaaaccaagagtctttattttgaatctgtgttattttaaatgttgtatagttaccactggctttctatatccaattaaaactacaactaagtaaaacaagagctca

SEQ ID NO: 54234 - DNA, 1486 bp, Homo sapiens
ttttcaaatcattgaggtcaagctaaatgccatttcttctataaagctttctctacttccttgaacatcattgacattttcttctgtgttctcatatttcattgctcatatatttaccattttccaaaccttgtccttttatactcttatctgtgataatgaatatcttagctttttaaagacaaggatcatgttttttccttcatgcctttgtagacaataagcaataaatgttgtagaaacaaatgaactcagcacacttcaaacaatgcatgtcatgtttgtgaaaatattaaactactttctaattttaatactgaaactacagtcaacatgttaaaatattacctaaattaccttctaaaaaataaacaatcaaattaaaatgatggagtcagctgatccaaacaatattttatttttcctcttcttttattgtattttatccactttaatcctttaatcctaaaatctgaagcactttagaaagttgattttttttttcccctgacacaagatttacatggaaccactggttatttagaaagaccaagcattgctttttggccacctagccaatcaatttgtttgtaaataattacttacacaacctttattcttgaagttcatagaccacacattgaaagcaaactttgttttaactgaatagccacaaagaatcaaaaattatcaggcaccaacaaaaccttcgtttttttatttctctgaatttatattgcactttcagaaaccacacatggttacctaacatttcctaactaatccctaattatagaattataagaacattaaaagcccctggagaacactcttcctttataacaataggaatcaaattgtatttccttgtactgcctctataaactcagtgaaagctgttgtgctgactcctacctttaaacacgtgccttattgtcacaggtcttttcactgtatgtttgcacctctgattttagaagttggcttcatgttttggcctttcgttgtaatgaaattctgaatatgttcactccagattaatccttttttttcattctcaggaaaaaatgcaaatgtcagcctgttctctgtgtgatgtttgaaaaactggctgctttgcacttcactagttccaagttttatgctaatatttgttttgtgaattccactccttagactgtgaactcttggattagtttcagtttctagcatttttctcctccttctccgtaatgtagatggtgccaacaaaaccctatatgctttcttacaaaatccacctttcctgatatcatttttttataatagggtatattttgtactgtattaaacaaatattttccattagctattaactgtcatgctctttcttcctgatactgacaactgttccttatttaatcctgacaagacaagttttgtataacctacagaacagttcagaccaatggatacatgatgaatccttaaatatgtttatagtact

SEQ ID NO: 54235 - DNA, 274 bp, Homo sapiens
ctccactaaatcattatgttgaactattagtccagtaggggagtgtaatgaagcgaaaaccagaagctgaaaaggctgaaaccgttgtactctagataactgggcagtctggattctttcctctgtgaattccagttctagtgaagcctctggggtcaaagtcctgggactgcggagattggaatctccccacagtgtagaaaataagttagacagtgctaggtcggaatgcctaaagtaggtcttaaacccaaaagtttttggaagtcattaa

SEQ ID NO: 54236 - DNA, 627 bp, Homo sapiens
ttttcagagtaaagcataaatatatgtgtatacatgtatttgtgtatacccctacatatatgtacacacatacacaggtatttgtgcttatagtgttaataaatccactgaaaagatttttttttaaagaaagagatgattccagtgagcagtttgcaaaacagagatgcagccttcagtacaaaataaaggtgcactgacattaagaatgatcacaggttgcagtctattggttaggtctaggtggtgaaatgggactttccagcagcctttgatctagactatgtaaacaagagcagacagctatgaaagttcctatgctacttaagcatggtttttttccaggaacgcagagtacatgggtgacgtctagtcagcaaatggccactcaaccccattttgaatataggcccatttagccactcaagatccatctggaaggatcggctctttcaaggttcacaggagatatgtgtgttatttaggaacttggtaaatttgggtctacttgatctattgagaaaagtaaattaaaatcttgtagtcctatttaggttttgtcagtttcctagttaatatgttatattttaaagaatatcatgttgttagttgcctaataaataatga

SEQ ID NO: 54237 - DNA, 809 bp, Homo sapiens
tgagtttccttaaaacggctattttacattctctgtctgaaaggtcacatacctctgcctctttatgattggtcactggtgccttatttagtttacgtggtgatgtcatgttttcctaaatgatcttgatggttgtggatattagtcagcgtctgggcatttattgaagtctttgaagtctgggcttatttgtacccatcctttttgataaggctttccaggtagtagtcaaagggactcagattttatgatctaagtatttgttcactgtagttgtatctgcattagggggtcatccaaaatccagtaatgctttggttcttacagacttgtagaggcacaaccttggtggtcttgtataaaatctggaagaattctccagatcattagacgtactcttgttctcttccttatttctcccaaacaaatggattctgctgaggtaacgagctggggaaggggtgacacaagcacccctgtggccgctacaactgggactgcactaggtcagtcctgaagccagcacagcactggatctcactcagagcttgtggtaactactgcctggctactgcctatgttttctcaaggccctagggctctacagtcaacagctggcaaagccagcttggcttgtgccctttctttcagggcagtgatttctccctgatcccaagtgagtccacagctgccatctgtgagcccgggcctggagtcaggtaccttaggagagtctacctggtgctctattccactgcagctgagctgacatccaaatcacaaggcaaagtcctcccactcttcctccc

SEQ ID NO: 54238 - DNA, 646 bp, Homo sapiens
acactcacagtagcaggaaaatgggcaaccaggtaaagggatggccactggcatcagagtgggtggagactggaaatgttgttaaacactctacaatgttcaaggaagccccccacaacaaagaattatccagcccccaaagtcaatagtgctgcagatgagaaactgtggaacagatgaaagcatgaaaaaaatcaatgtttaataattattactaggagttattgatttgctattaataacattcagacattagtaatcaaaagggaaaatatggaatttcattgattttgctagggaacacacacacacacacacacaaacaacctcacagtttttatcctgtgactttagtattctttcatattatgcaacaacaagcataaattcagcatgagtcagactgaaatgactacttttgcaaatatcatccatacagtcttgtgcctttttccacatctgctttcagttctgccttatacatgcctttatagattttgacgccagcactttactatcctagaatctacagctacttgatttttttttttgtcttctctccccttttcttctgtgtttttccctggctttcagctcaactcgtgaacatcaggatgtctgcatccagctctgtttttttccttca

SEQ ID NO: 54239 - DNA, 577 bp, Homo sapiens
ttttaatgctttcaagaaaatacaaaatgagtataaataagtaatcagtttatggtaatttaggaagaatagcaaattgacaagcctgtctttactccataatctacctaggttttcagaaaatgaggtttagacattaatatacaatcatgctatagaattattgatcaaagagagggataccttaaacacatccattctaatcaatggaaatgccaggtaggataagctgttctgaactttggagtgtagatttatcaaacaaaggcggccttttggtcaacaccccggcgacttcaaagtatcttgtctattttacacagccaaattcagaaccagttctgaactcttttgcagcctatactttctctgcctactttattcagaatagacagaataatagctaccattctcactcatcttggcactgtgctaagcattttagatgcatgtctcataatcctcacggaagccctgtaaggcaggaactattactatcctgatttacctatgaggaaactgaggtcacatagttaataagagattggctggtaattgagaatatagagccagctct

SEQ ID NO: 54240 - DNA, 1935 bp, Homo sapiens
gaataggtaaaaaataaaatatagatttgaaaaaaaatagttataacatgttagaagagctttctgcaaaacataattttggaaaagtcatgtttccattgggatcaagattgtccattctattaagttaccgaaagaaacataaaaactaaaggtaaatttataccttagggggctgctgatatttaaaggttggaggtagaagagggttggacttggtggaaatcctaagaagtaacttaactgtgcaattaaagtgaactatagataaaattagaaagtgaaactaataaaaaactcttagcctgttttagaatcattcaagttattctcaacaattccacttattatttcctttaaatgtattcttttactaaatataattagttgcatacatttttgaaaacctgcaatgaatacttttttatggtaactacttaaatgccaagatttaaatttcaaaatactgattgtttccataaacaaagatataacatatttttatactctccgagtgtattttctattgccaaaatactgtgtttacaataaactttaaaaaattctcgctattttaacctttgtccactgctacgaaaaagctccaaataatactctttatgctgaagccaaggaaatgtgcgtatgctatatgagtgtcctagtgaccaggctgtgatgtgtggccttgcactctcatctacaattaaatagttcaggagtagacacatgagtcagatggattatatccaagttggcatttaaaggtcttcatttgggaatgtgcatggcaccctggaacactgaaagtgagactaggtagactagtgggtgaaaatgacagtggctgaggtgaagctctgctggtagatagggcccagaacacactcagaacaggcctcacagaggatttcgaatctttttctaagttctgtggaaaaccattgaagagctctaagtagaggaatcacacacttatatctgtttttaaaatatcaccctactgcttctggctttgagaataactggtagcagatcagcctgccagccataaactattggaaaactcgaaaaatatgtgcaacagctcttttcaggcactggaaaacagacactaaggaactgtgtttgcaatgaggagtggaacaaatgaggaatgtcctacagtcgcccaggatttctgcctggaggcacttcctagatttagacatgagcagaggaaacccaagcagggcatgccaatcatacttagctgaagagacagaaatcaaagttcagttggaggaggtgaggcagctggaatttgtagggcattgtaccagagaggagggcactatgcagtaaaagagttccagaaatctctatacagatttcctggaatctttggctgagctgtaaatgcagagaagagactacacaaagccttgcaaaacaaacaagtgccaggaaaagaacaaatcctggttggcgggagggagttggcaggagtatctccattctggacatttgggaagaacaagaatcctgctgaatatatgttgccagctgcacttaagtgtcaaccttaggaaaagagacttttgacaaaatatggtgacttactggagaccaaaacattggtatttagtgtcccttttcactagatacaccgctccccagggcattgtgagggagcagagagctgcttttcaacctccactctctcaaggacctagaaccaatctggtataagccctcaaaagtctctagttagtcacctttcctagaaatccaagaactcccatactcctgcttgaactgtgcatcataaatcccataaatgagcccagacctgaacaaacaaaagtcaggacttatttggcttatgggtatctggtaacttctgctttaaacctgcagcacaaaagcctctgaggtaaaagaccacattacggg

SEQ ID NO: 54241 - DNA, 674 bp, Homo sapiens
ataaacaatgaatttgtactgcatattatctgtgcattttttctcttcaaataagattgcaaccttaacagaaaatgtggaacaaaccagcttccgcaacatagttctttctttaacaataacaacaataaaactatgctaaaactacactgaagctacactacaataaactgcaaaaaatcaaaagatccaagcactaacactgagtcacattgtactctggcacctgtaataagattacctccttgtgacctgctcaaattctggacccaaagaaagttttcagaaagtttttccaaaatcctctgtctgtcacccataaagcttcattcaggtactaaatgataggtaagtttagtagtgtagtcctagctacatgaaaggccagggcaggaggattgcatgaacccaggagttcaaggttatagtgagctatgattgcaccactgcactccatcctggcaagagagcgagatcctgtctctaaataaataaataacagataaatgatttacaaattttttatcaagcactctttagaaaaacttcagcattcacacataatatatgtatttatacattatatacaagttctaatctcagcctttatgttaaataattactaaactttgttttttacttagataaaaagtaattatccgtagaatttctaa

SEQ ID NO: 54242 - DNA, 1816 bp, Homo sapiens
gcagaacttggttctcagaccacgtccgcggccacccctctcctgagagagcagagagcacacttgcagcctgacatctcccagttgagctcggcaatgaagggatcactggggatttaaaaaatgggagacggctgcttgggcagaagcccgagggggcgggcggggggggggaagggacgagcccacaggcagcatcccgacacctcacacttcctgcctcaatgcacagaagaaagtgttctgaaggcgacgcccccagtcttggcgggaaacgccgcggaagacgcttctctcgcagaaatgccaaattttcgggagcgcgggctcgcagcacgtaacagaacagatctttttgtttcacggccctctcgtagacctaataagcgcgagggcgaaaaccaggtcagcgaccagaagccaggcaaggttgcgattttcggagcacagcgaaggggagagtttctaagttctgaatgtacctctatttagggtggtttctattatttcttcgcgtctaccctgtagttgccgcaccctgagccctcagccccgccgcttcgcacggagcggagctcagagggtgcgcgctccgccctttcgcgggcctggcatgagcgcagtggttgttacactaaagtgtctccgcctgtcgaatattctcgtggcagcgatggccgagtggttaaggcgttggacttgaaatccaatggggtctccccgcgcaggttcgaaccctgctcgctgcggaagcgggtgctcttattttttctatttttttaaataaacaccttcaaatgaaaacttttactcttctctgtattttcaatgcctgtcagctaaatggcgcgcctacggagtggttttatacgctgtagaaaagcgaataaatgtcagtgctgcaaacatgtactgtttacaccaagaggaaaatccttccactgtcctaaaaggcaaggtaactcttcgtgctccatgagaagagcaaggtggcaaaatagaaataaaatgaatataaatattgacgcaagttttcgggctatcacagcctgagcaagctatcagctcactaaaactaagaaaaagctatgccaccttcccttccatcccagaatcacttccgacggtttccagaccacatccaaaagtggtatgaaatgggaaataataaaagcaattttaaagttctacttataaagcatcttagatacatccacataatggaacactatgcatgtaagcattaaaatgatgttaatggccgggcgcggtggctcacgcttgtaatcccagcactttgggaggccgaggcgggcggatcacgaggtcatgagatcgagaccatcctggctaacacggtgaaaccccgtctctactaaaaatacaaaaaaattagccgggcgtgatggcgggcgcctgtagtcccagctactcaggaggctgaggcaggagaatggcgtgaacccgggaggcggagcttgcagtgagccgagattgcgccactgcacttccacctgggccacagagcgagactccgtctcaaaaaaaaaaaaaaaaaaaaaatgatgttaatgatgtgtgagggccttcccaatgcattgccaaatgcaaaaaggacagatcaaaaaacagcacatcatactatgatcatatttttgttaagcaactcatgtatatacccatctatgtgggaagaatgggagagaaagagagagatggagaatgaatggaggctggaaagaaatacaccaaagtgttagcagggattattatccctgggtggtgtgatttgggaagatttttattttcttaaata

SEQ ID NO: 54243 - DNA, 742 bp, Homo sapiens
aaaaaaaaaaaaaaaaaaaaaaattgaaacaaagtggctaatttgggaggtaatcccaggtggcaccttagcagaatgagaaccaaagctataaaaggtacattatcaaacaagttactgccatgggtaactgcaaatgatcccactggggaaccctgggagataatataaaacttcttagagttatctcacatgaggggtgaaggacctggagaatttagcttcccacttccactcattattgtcatccaaagggcatttactccctgacacttactgcctgctgatttgctgccaagtaggctccattgccagagcaagccctctggcagagtcacaatgtttgtggctggagccacaaggttggcaatgcctaggaaggtagtgcccagggacacggcagcacaccaaaatcattgcgtacatttaaatttttcttggtgggacgcggcggctcatgcctgtaatcccagtgctttggtgggccgaggtgggcagatcacgaggtcaggagttcgagaccagcctggccaacatggtgaaactccgtctctactaaaaacacaaaaaattagccgggcatgatggcaggtgccgtaatcccagctacttggcaggctgaggcaggagaatagcttgacccgggaggcagaggttgcagtgagccgaggtggtgccactgcactccagcctgggcaacaaagcaagattctgtctaaaaaaaaaaaaaatttctttctct

SEQ ID NO: 54244 - DNA, 737 bp, Homo sapiens
ctgagcccacattcttaaccactgcgtaacacagagaaatgtgtacagtataaccccattctttacttttaaagctctcataagtgcacatatacacacctgtgttagcatagagaatagtggaaggaaacacacctgagtgtcagccttggttacttcaagaaacagaagcagagaaggttggcaacctggctatatatgattctttgaattttttaacagcaagtctatactacttttgtttttattcagtatctaaattactatttttttaaaaagaaggaaaatttcgtagaatcctatgagaggggctcaagaggcctcagcatcatgcctgagtctctgaagtgtctcccacccacactacacctaattttggtgtgcacagacttggtctgaatctgacagaaacagaaagacttggggaacccccaggggttcaagaaacacagaactgaacattcatcgtgtttacatgtaggggagtgattgtactcctgtgtttgcttaaaacactgtttttctacacttcaggcttctcctttgatcagtttgttaaattataaccatttccagttactgggtgatgcaatcaatgtgcagactccacagccatctcttgggtaaccaacagagacatctgaatcaaactctatggatcttcattcccagcaagaagagaagatgtaaaagttctccccaaagagagatttgaagtgactatttctcaaaagact

SEQ ID NO: 54245 - DNA, 1151 bp, Homo sapiens
aagaaagaaagaaagaaaggaaggaaggaaggaaggaagcaaggaaggaaggaaggaaggaaggaaggaaggaaggaaggaaggaaggaaggaaggaaggggaaggaaggaaggaaggaaggaaggaaggaaggaaggaatgtttatgcattcacttattcaagaaattgtgcagaataggtgtcctcttcagtaagtgccatgctaggggcatacgactgtgaacaagacaagcagggcgtctgccttactgagcttccagaatgactaataagcaaacatgcaataaggagacagtgtgacacacagtctactgcctgacgtacagggtgctcttgttagatgggacacatgggacttcccaactgatggtcagctgagacctgacacagaagcacaaactggccaagtagtcagggatgtgtgtgaaccatggagtgtttcaggcagaaagcatcaagcatagagggctggagtgtagaaagagcagagcacatgaatgaactaatgtaattctgagtggctgaaacatgaaattctaggcatggtgaaggagagcaaaaggggatggagaattaaggtacacagcatgaaggaatttgtgcctaaaggctcaacaatgacaaaggatgaactactgcacagtataacacagacataatgcaaagcgaaagaagctacacacaaaagagtacatactgtgtgattctatttatatgaaatccaaaactgcaaaactagtcaatggtgatagagatcaaaaaatgagagagggtgctgactttgaacaggaagggaaaagggatttctggggtgctgaagatgctccacatctctctgggcagtggttgacctggatatacatatgcacaaatttatcaagctcacacttattatttgctcatagtaccttaaacaagttaataaaaagggaaaaaaaatcaaatgagcagaagcaatagttaaatatctaacaaaagatgacctcacatatagaaaaaatgatctgtttttgcaaatcaaaggaatcaatgatttctagagaaaattaataaagaaccttaagacaagggacaaggaaaacattttcttttttcctttttttttttttttttttttttgagatggagtttcactcttgttgcccaggc

SEQ ID NO: 54246 - DNA, 755 bp, Homo sapiens
acccaggtgtggtcatgggcgcctgtaatctcagctactcaggaggctgaggctggagaatgcttgaacccaggaggcagaggttgcagtgagccgagatcacgccattgcactccagcctagacaacaagagtgaaactccatctcaaaaaaaaaaaaaaatgtactggtatttagtacatggaagcaaatgtgtcaaaatggttgattctcagtttgtttacatgcgtgactgttattttcttctttatattttctaggttttaccaatttcacattttaaaaattaagaaagtctatatctttctttcattatttttcatagctttactatcatgaagtttattacaaagcttccatagagctggctctatgtaaactggtaaagtgggttagtttatcttgaacacattgtatttatcttctggcctccctactccatgtgaccactgccaagtgcagtccattggagctgacacccccgatgtcaaggtccactaaatcctgccttcctgacccaagtccagtaggctgcaaaactgcctaccctgttgtcttgtaaacatacaaaaaattttcaactctactcataatcaaataaatcaaaatatccaaaggattgtaacgaccagtgttactgagagtgcgaagaaattaacattcatgctctgctggcgaggatgtaaataggtatagactttcttgaaaaaaattgagacatatatgtttgtatgtgtgtgtatatatatgtgtgt

SEQ ID NO: 54247 - DNA, 1402 bp, Homo sapiens
tcagaaaaaagaaaggggagggcaggggagggcaggggagggcagggaaggggaggggaggggaggggagggcagggaaggggaggggaggggagaagagaagagaagagaagagaagagaaccacacacacaagacaagagaagagaagagaaccacacacacaagacacggagagtccgatgctcaatcctaggccttggaggcctgttcctccctgccgggaagcgtctctcacccgagactacaactcccataaggcatcgcgagcatcgcgagaacggcgccacagaggaaccggaaacaagccagttactttcatactcagggacaccgtccccccctccgccccccgccctccgtaagtgctatttttacatcgaatgccctagtctggaagtaggtaaactgaaactaagctcaaatcaaaaggagaaaggctggaaaacaagaggctacaagctccagaagctccgagcgaggatgaaaattagccagcccacaggtgggctctgcgcggccctgaaagtcgcactctgacctgaccctttccgcctctcgtttttccttccagcctcgcttcaaagttctgtattgcagaatgaaatcggcgcctttccccagcggtttttccaaatacgagcaaaggaggcacaaaacgcaggttccagaaactgtgcctgcaaccattcgtccttatttcccgacacacgggcccctgctccccgctaaggctggggtcctggacacgagttttgcgctctgatagaagggcttagattccagattgacactgggctctctaaagcctgctcctcaatctactgatccggtccagcttaagatccagtagaaagaaaacatagcctgcccggaccgtaacctttttgtttcagaccctgcatttgtaaaatagcctaataaaatctctccctggcttacagagcaagacagcgtcctggtccaagaaccggatgagtcaaaaggcgttactgttgagtcagacatagaatacatgaatacctagaaattcgtaaatgattctccaaaggctgttgaaatagcgttttcaggccgggcgcggtggctcacacctgtaatcccagcactttgggaggccgaggcgggcggatcacctgaggtcaggagatggagaccatcctggctaacacggtgaaacctcgtctctactgaaaatacaaaaaattagccgggcgtggtggcgggggcctgtagtcccagctactcgggaggctgaggcaggaaaatcgcttgaacccgggaggcggagcttgcagtgagccgggatcgcaccactgccctccagcctgggcgacagagcaagactctgtctcaaaaaatgaaaaaagaaatagcgttttcaagttataatcaggtgcgat

SEQ ID NO: 54248 - DNA, 1724 bp, Homo sapiens
agacatgagaaaaattaagtttagaaacggctagatagctcacgctagaaaggaaggactccaaattttaaccaagggcagatgtgcatggaggccaagtcatttccttcccatgctctcatactgacccaacaaacccattctgcacgtgagaaaactgaggcccggaggagggaattcacacacgtttgaagccaagctggggccagaaagtagatcggctgatctccaaacctccacgtcaaaggtcttcccaggaggacatatgccttcaaggattttacaatgtataccaccctacaagtgatgggagagaggggaaaaaagcaaccgactaaggagaaaagcaaggagcagaaaaaggagcaaaagaggagctgtcagaacggtgtgaggagagtgggaaaggagccgcctccttttgcctctcttcctacttattaacaaaacagaacgactatccaacgtatttcagggagctaagtcttagccagcttcagctgtgttttaacccttagctaaatatagacaaggctaaggcaggccaggtgtacacttcaggaagacgtggaaattcccagggcggaccaaaacttgagctgttccggcggtagtgatttgaggtcagtttgaaagagaagttgagaaagcggccgaggggcgaatttggctgcactacacgctcgccacaaagaggaagggccgccggccgccggggccgagtgcgcttccagcccaggcggagcggtagacgcaacagcctccgcccgccacgtgacccgtagtgttgtggtctggcccgcgtgggtggcgggagcgccgagagggcgggggcggcgatggggcgggtcacgtgatggggtttaaatctcccgcagccggagccgcgggggcgccagtgccgcgcgtcgagcgggagcagaggaggcgagggaggagggccagagaggcagttggaagatggcggacgaggcggccctcgcccttcagcccggcggctccccctcggcggcgggggccgacagggaggccgcgtcgtcccccgccggggagccgctccgcaagaggccgcggagagatggtcccggcctcgagcggagcccgggcgagcccggtggggcggccccagagcgtgaggtgccggcggcggccaggggctgcccgggtgcggcggcggcggcgctgtggcgggaggcggaggcagaggcggcggcggcaggcggggagcaagaggcccaggcgactgcggcggctggggaaggagacaatgggccgggcctgcagggcccatctcgggagccaccgctggccgacaacttgtacgacgaagacgacgacgacgagggcgaggaggaggaagaggcggcggcggcggcgattgggtaccgaggtgcgcagggtgcgggcggccggaactgcgcatctcctcctccctctccccgggctcctactggcctgaggttgagggcggctgggggctcggggcaggctccgcggcgttcccctccccaccccggccctccgttcagccgcgctcctccggggctgcggttcctactgcgcgagctgccagtggattcgctcttttcctccgtccgtggcccgcctgggcggccttgttctttccgcagcagccaggtcgggagactctcgcagtcgctttaaaataagtttctctccccctcttactcttttagcatattgcttttgttagagcttttttt

SEQ ID NO: 54249 - DNA, 688 bp, Homo sapiens
ggtatttgttagatctttatgagaaactggaaacctaattggtattcacaagtgaaaagcttagtgttgggaagagtaacagattcctaccttccctccatattaattaagatgatgtgattgtggcgacttgacattttctatttgatctaccttagggttgcagctaattagttacctaagactattgcatagtgtgtgttttatacagagtatattacatgttagcaaccagagcaactgctgtagtaaaattttgtcctgttttctgccatttcgagttgcgaaagggtgttacataatcttagatgatcatcaggagtatgttttgctcacagataacgatgtagacaagtttgtttaacttaaattgaccttgactccaggtcaaattggagtcaactctggtaagatgatgaaacaataacttctgaaatctctatttgaaatgtcaggatttttttgtacgattagtgggcacgtctcaaagaaatgaagaattgaaatattatacaccttttttttttttcttttttttggatacagggtcttgctgtgttgccctggctggagtgcagtggtgtcatcatggctcactgcagtctcagcctctcctggcctgagtcttgctctgttgcctaggctggagtgcagtggcaggatcttggctcactgcaacctctgcctc

SEQ ID NO: 54250 - DNA, 488 bp, Homo sapiens
cttaccactttattgaacagaaatgtacattttcttgtagaaagtttccacatatgctcagagcacagactcgtgtaaagcaccagaatcttcagaaatatgttactaaatttgtggacggtgccttgtgttgtgaggaattaattttaccccagaagagagggcattgccctgggttactaggaggtgacctatagacctgtgcaatatcatgcctgataggagtgtctttgtttgcctggcgctttagccactggacaatgtgacttatgataggggcttgggccatgtgctgtcagttctgcttccagaagagctgggaactagaggtcactacgggagcaggatgtgattgaaccccagtaaaaactctgggcaccagggttctggtgagcttctttggctagaaatactctgtattgttacacatctatgccaggaaagtaattcatccatgactctacatggaaaggacaacagaagctctg

SEQ ID NO: 54251 - DNA, 2351 bp, Homo sapiens
cactttctatgatcctttgcaaaatttaaaacatattaactagttttgacttctggttatcttgtgatagactaaactaataggaataagtaccttgatgaaattaatcacaattttttctactttttgctttaaataatttcaatgggaacaagaaataagacatctttcctctgcccaaaaagcaaatatacacagtgcaaaatttagccaactgcagaaacataaccttgcaatcctagtataattaagctttctaatacctacctccacatcaacagaaaatggagttcttatctgtaacagaaataaaaccaataatggaaatttaaagcaattttccacaatttaaacgactctcccaattactctttagcccagagagaaaatgaagattctcttaccaaaccataatcttaaatcacctccaaagatcccagatttcaaatcaaaatactaacattccaacctcactaattttaaaactaaatcaatgtgcataattataatacagaaaaaaaaacatgcaatttaaatatcaattctctccaaaattcaacctcttttattacaagtggtaaccgggattaaaaaaatcacccgtgggcaatctatatctatctatatctctgagacaattatttaaagattggcgggggggaattgcaaataactccagcactgcagatttttcaagaataggaatggatagtctgatggcgaaatctgtagaactttccagcacactgactgaatatttcctcacttgtaaagaaagacacaaataacagagtccacttcatctatacatacgtagacttttaaacacatcgcgttactaaatatcataattacaggaagtcagccttattctgtagcagtcatccacattcttacagagcctgcgaagtttcaactccaattttcctatgttcctgttagcaagtgcccaaggtgtcccattccacgacccatcatcccattaacagaagtttgatttcattcttttggggtatcagaactcgataattcccaagagttctgcattgtcttcccatatttaaaaacaaaataagagtaatacaggaaaataccccgacttcagcgcgcgaggtttaaccacccttttctttaaaacacagaggcgtcctctcgccagcaacaggtagggaaatgagaagcagtttagtcccgtctttccctgaacgtgcacccagatcagctcatggggactgggaaagagaaatcatctgcacacacccaacctcgcagccaagcagacgactaccgcaaccggccgctcgcaacagcttcagaggccggcggccgaggcttggcagtgcgcggcctcaacctgagagaagcccatccccaggcagatgagacattccagccccggggccagggagccacagccctgccctcgccccacgcccctcacccccaggaagcgcggagaaagcgccctatgccgggccggcctgcatccgcccagcccggcctgcccctccctaacgccgtcacacgcccccgaacccgctggggccacaactcgcccaagcccttcagggtaggggaagcccaaggtgacggggggcggcccctgcccagagagcaaggcagcgcggtcgctgaagcacgtctccggctcctgggaccctcctctgtcagccagtggcgacgatcaccagggcacctccggcgtctgtgccgctgctccgctgctcccctccccggcccctgggaaactttaccgggttccttagagaaaagcggacgccactgctgtccagtccagagacagccgtcagcgacccggatggagcgggcggggaagaacgggaggcaagcggggcggagagcaccaggggtggggagagttggggaagagactgggtaggagaaggcagagggggaggtggccacgcgagggaggcgggggaggggctggccggaagtgaaccgcagagcacgcgcgcgagcccgcccacttcccggccccggcaccggcgcctgcgccgaatcttccgggggggggggggggggggtggctggccacaggcgcctgcgcagtgtgccgctttgcgttgctttaagagggaaaagccaaatacagaaagttggagtttgcgaagacaaacgaagaagatgtcaactgtttttgagaatgcttcggcgtgcacaaagccttttaatgaagaaaatcactttgttttttggtttggttgtctttgtgctcatggatgctagctagtctttttattattttactctctcttttcccaaggagattttaaagtagcagatgaaacatcacaattatgaacataaagactggtgaagagttattt

SEQ ID NO: 54252 - DNA, 3227 bp, Homo sapiens
catataaagatatcattcatttgctttttggcagtaatgatttcaatcttcattcctcctaccatggcctcagttcaagctatcatctattccagcctggactttttccctggtctatagactacctatagtcttggccctttggtccaaacacacagccactgggtggtctttctcaaatgcagatttgatcatacctcctcaaaacgtttataatttaggcattccaagttcttcataatcaagcctttgtcttcctctgcaaactcatccctgccacattcctcaaatcacgcctcatctttgttttatgaggcatgaaatatgctctctcacatcttcctaaattttcatgttgctcctaacctagtaagtttctcatttttcaatactcagcttagacagtactttcttaataaagacttggcctgtctgtgacagttaacaacctcctttctggtgccatcctctgctacagagcttgccacacttcaacataatcaatttcctgtcttctcccccactagactgctagctgaaggtcaggaacttcggtctttttacccttgtatccccaggaatgaatgaatacaacttgtttcttatactcagaagctgtagttaccaaatatttatttttgactaatacatataagaaataaattgttagactattttatttaattatttgtttatttatttattttgaggcagagtctcactctgttgcccaggctggagtgcagtggtgcgatcatggctcactgctaactctgcctccagggttcaagcgattctcttgcctcagcctcctgagctgggattacaggcccccgccagcatgcccagctaatttttgtattttcagtagagatggggtttcaccgtgctgggcaggctggtctcaaaactcctggcctcaagtaatccacctgcctcggctaagaacattttatttagtatataaaatctttcaaaacaatgtcgctaaggaaaaaggatcattccaggctggaatcgatgatagcctgaactgaggccatggtaggaaggttgaagatagaaataattactgccaaaaagcaaaggaattatatatttatatgttatttgcataagcaaacgcgctgcttatcaagaagtcctcaatggagaagactgtgaacatatatatagtaaatatccattaaatatttgtcaattgagcaatcgttcgttgtttagattgttatctttctaaggaagggacccgtgatatacttttatttattgtttccagtgcctgacagaatactatgtccataaaataatctcaaatctaattttactgattaatcaaatgagggaatccattaattatctctaaatctcaacaggaatgtataagacctgtgtctttgaatttctctctacatattgaaatatctgtgagctctttgaggaaaggggttctacctattgatttttatattttaaagtcttaacagagaacactgaacatagcagaagtttaataaatctctgttattaagatttcatcagtgaaatacaagtttgctttgctcatcattgtatcccagtgacctagggcaagatcttattcattgtaggaatttagcaaatattcgttaagtaaacatgatttggaaatcttgctattggcaggtacaattaaatctaacatgaaaagtttcccttgggggaaaaagtaaagtttcccttggtgtcttagattgaggaataaatgcagatcagagtatgattctgaaagatgttttattttttactatgaaacaactctaccctacagaggtggggagcagggaggggaagggagagaagctggaaacaaacaagtgaggctcacaggagaaaatagctcctccaaggggagccacatgctctgatacccatggcagtggcatgaggaagcagcctaaaattagcaggatgggcaagcccaggaagggaaaaccacggcagcctttcctgccctcaacaagtgaggtgaggggctgggagtcccggctggaactacccaatgtagcctttggagctccactgctgtttgtgccaggtaaggtcctccctcaaaattcatcttgggaggtaaagcaagagatttcttaaggggatgtccagataattgaaatatttaatactgtcccagtaaaaaggtgcctccaggaatctaatgattaagagagcaatagatgaagaacattctattcatccttaatcagggtattcatctgaaccactccctctcaccttattgaattggggctctctggggtatgtaggtgctgcttctttcaagtgttaaagaggggagggtgtcctagaaaaatctttaaagccatgtgggaaaaggaatgatgaaagggcattgccaagcaatgtaaagaaactgcagagccaagaaggaaagatcagagataatacaaataggactcagtgggcaacagtctgcttttttcatgaatgaagtgcagagcaattgagctgattgaggacagtcaacagaatcctagagaggaccagaatattctgtattattgtttcataaagaactggatcagtgatagatttttacgttgcacatgaataactcccagtcagggtgctgatctatcactctccattgtttctataagtttctgtctcccatactagaattcattttaataatatattaccaattgctttttgaagttacagctcctcattaatggtaaaaaccttccagtgctattaacacagtttctcacagggttaatctgaaggagttgtgcaagtggatagcagaaattcagaactttaaaaaaataaattaattgagatataattaatacaccatacaattcacctgcttaaagtgtgtaagtcaatggattttagaaaatttacagagttgtgcaaccattgccacaaacaattttagaacatttgtatcaccccctcatatccaatagcagtaactcctcttttcctccaacatcctcccactcacagccccaggaaaccattaatctactttctgtttctgtagacttgcctattctcgatatttcacatcaatgaaatcacacaatgcgtagtcttttgtgagttcgtttgtttgtttaatttttgagacagagtctcactctgttacccaggacggagtgcagtggtgctagcttagctcactgcaacctctgcctcctgggtttaagtgattctca

SEQ ID NO: 54253 - DNA, 1679 bp, Homo sapiens
ctgccctccagcctgagtgacagagtgaggcaaaaaaattattcaagcacagtattattaataatatttgggcatttgaatataataggatttaaaacatcaccgttcctttgtatttgacatctgtcccagttcatcatcattatcctcaggagcatttatttagaagaactgaatctgctttgtcttattctacataagagtgtttatatgcattcaacggtagtctattagacaattcacgatcatagaaaggttaggatattcctcactttcctagatttctctattcaaaatcacttaaccttaacaataatttggttagtctatgttgaataccaagcttatgctgacatcctttttagatcagataatacaagagatatatcaatacgctcaattattattttcctatcacaaagcacatagcataaactggatatactgctctgatatttgtctctgctctacttatttggctaaagaaggattgtttgatacctggttgtcagatcaaattataatttaaatcctttagctatgtttagctccttggcagtaggtgagtagagaacatagaattcagaagcatatggttcaggaacatggtaactagatatgaagcattttacctctatgttaccggtgtgaatctgaacttgattactattggtgctctgtacaagatgtaagtgatctgatttgcatctctaatggagcaccccatgttacaaaactcatcacccttggcactaattagcattcttgttgtcagcctcgggatagacgccaaggactgaatcagtctggaaacctgaactgctgctgtgtctgactcatcagtctaggtggcccattcagcctttggcctttccttagagtttacagctcagtgcaactgggtgtgctccactctgtgacttcacaaagtgaactaaaagatgtttatttaaaataaatatatttttataatagtaatgataatagtggtggtttacatttattgaccacttgctaggagccaggcattgttctaaaagtattaactcacttaagtctcacagcattcctatgatattttcctcttttacagaggtgagaaaactgagacacaaagagattaaataacttgcctaatgtttctcacataataagtggcggagttggaatacagctctaaatactaaattactctcttcctaattatagcatttatttgattttctcttttatcatcttactatatagctgatttaaaaaaaaaaaaatccgtgtccaaaccaaatggggcatatatcaatttccaaattttaaaattgttcatctttcagtactagtttttaagtactatttgttttcaaaagaggtgatgtccctttcttaaatttagttcatgtgcatcattattctgaacttaaggtccttaaagatctcaattttaggccgggcatggtggctcatgcctgtaatcctagcactttgggaggccaaggtgggtggattgcctgagttcaggaattccagactagccagggcaacatggtgaaaccctgtctctactaaaaatacaaaaattagctgggcatggtggcaggcacctgtaatcccagctacttgggaggctgaagtgggagaatctcttgaacctgggaggcgaaggttgcagtgagctgagattg

SEQ ID NO: 54254 - DNA, 1162 bp, Homo sapiens
caaacgaaatctttactttctttcctacattcttacttttaccaattcgattaaaataataataagaaaatggcctactcacctttggcttattatctaaaagtcttcattacttaacctctgcccttaaaggaatgtccctaaacggattctcattaattccctgatggatcatctctgctcggcctctttatctcaacattcttttctgatgtatgcatttgtctgtatttatcttttcttctttcaaactgaaaaatttttgagataatgtgtcttatatgatttccatattattattgacatatcatttccatattcctcaagttcttactctggtaatgcagtatatactaatttattaaattactaatgccgttcacacgaaaaatagactagaaataaaagtaagatggggatgatcactgtgatagtgaagggatggatattgtaatagtgtaccaagtacactccatctgcacccagattttaaaaaggtgatctgtacataactctccaggactggttcccgttcactgggatttggtttttgacccagcaagaacttctccaaaagaactgacttagatacttctctagggtgatatcattggatatagaaggcaaaaccaacaggtcaatactggcattaaaaagagggagcaaagtctattttttctttccctaaaaagcattctgggcatattaattacacatcaccagcaaaaggtcacctcaaatttgcatagtgctctacagttttaaagtgttttcacaaacagacctatgaaatgagtagggtagttctgctcatccctgttttagatgagttacttaaacatatttatcttttcctatcctggctctctttacaaataattattaactattaggctatttttgggcctgcctctaaaccagatttaggttacttaggagttctttggttttttcatgaatgtgcttcccacattataaggaatgtagagcagtgtttaaagacacatgtagctaggtgcggtggctcatgcctgtaatcccagcactttgggaggccaaggtgggtggatcacttgagcccaggagttggagaccagcctgagcaacataggaagactccatctctacaaccaattttaaaagttatctgggcatggtagaa

SEQ ID NO: 54255 - DNA, 3130 bp, Homo sapiens
tgagccgaaatcgcaccactgcactccagccttgtgacagagcaagactccatctcaaaaaaataaattaattaattaattaaattaaattaaataggatatgtggtaaggggtggtattgatgtcttggtattagccactacctacttatgcttttcttaagttaccaagaagtttctgcctggaagaactcaataaattattttattttattttattttattattttttttgaaacaggtctcactccttcacccaggctggagtacagtgccatgatcttggctcactgcaacctttgtctcctgggttcaagcgattctcaagcctcagcctcccgagtagctgggattacaggcacgcgctaccatgcctggctaatttttgtatttttagtagagatggaggtttcaccatgttagccaggctggtctcaaacccctgacctcaagtgatccacctgcctcagcctcccaaagtgctgggatcacaggcgtgagccaccgtgcccaaccagaactcaataaattttaataacacttaaaacatagacatatcctcccacttacactcctaccctcccatgagtggaacatggacatgaagacttaagtttactaactcagtagcagtcaaacaggacatacaaattgtgtcacaaaattcaacataactttattagacaacatttattattatcttattgtccgatatattccagttgcactctgtatatgaagaagagttactctgatgcttggagagagctggaaatgtgagtaagcaaatgtactactttttggctgtgttttaggccccacattcttcacttaagagatcaagcattgctaaatgaagctgggcaaagacaattaaaggaaagtccttttctggtgcacaagccttcttgaaaaaatgaaaatgaaaaaaacttgaggctataatgaccctagttgagttattcagttaacattcacacaacaaatatgttttgagcagctaaaatgtaccatacactgtgctaggtgtgggatagacagaggtaaacaaaacaaatgagataattttagcccttgtgtttattgttcagtaaggaagagagacactaaaacaaataaacctacaaataaatatataattataaaatatataagggttctggaaaggaaaagaacagggtgttaggagagggaataacagaagttgggatagggactttggaagggctggggcatggttaaagaaagactctgagtaatcattcttttaacaagcgttattactggtgagtcagaataacattcaaattacgtttagaagttgttaatgtgctaaaacaatgagtcataatatttatccaagccatattttagaataaatagtaacctcacagcagaatggtgataaagagccaaaagtccagttacatctgaaaaatgtgtctcttcagtgtcttccttctttcttcccaggcttgctagctagccaaatgagcagatctggcaagccatccttgtgcgtgaaaggtgggtccttttctttaaccatctggacctgccctatttatcccaatcattgactcatttctattgagccatgaatcatgcctggcacctactgccattctgtaagtgtcatgaggatttggcgttctaaaaacatgccaccggtcagggcatttctatgaaagcattccctaacatggatggaggtttgagagtatggttccccctgaccctcaaaagtcttcagcatagcagggtaaatttaataccttttcagaagccagcctgatccctgcctaatttctaagtgggtcatgctgttaaagtcagagtgacggttaccgattgtttttttaggcctgctgaggccatcctggccatctgagtaaggacaaaaacacttctgacagagagtttgggcatttgaatcattccacttatctccttctggctatccaattgctcatagatgtttccactctcattttggtaaggacgagaaatgttctctaaataatttagataatcctataatgtttgtataatggaaagtattagttttgaaatagctattgatatttgttttatcaagttaatagagttacattgctttaaaagccaaatgttattaaagaacagaccattttcaactcttttttgcaattttctgtttatttacctctagcttctaaataacatgccagtggttcaaactttttattctcaggatccctttacaatcttaaaaatcagtgaggcccaaatgaggttttatgtgagttgtaatattttatttattaatcatattagaatttaaaactgaaaaagattttaaatattgtttattcatttttaagtagtaataataaacatgttaacaaaaaaaatttataaaaaataactacattttccaaaatgaacaaaaaaaccatttagtgagaagagtagcattgtttttcattgttcgcatatctctttaatatctggcttaatggaagacagctggatcctcacattggcttctgcatccagtttgttgtattacgttgtttgggttgaagtaaatttttaaaaatccaaccttacacagttatgtagtcagaaacaggaggagtattttaatagtcttttcaggaaattgtggctattcttattttataccatattaaaattaactagcagtagtttctgaaagatttgttgcaatgtgaaatctgaaaccacaccaataaacttttgtgctctgctatactgaaacctactggtctgtcttgaactttgaatggataatatcacgcattggtcatcaggaaaattagtaatgcagatcttccaaaaggtgatacattttattatataatattttaaaatcacatttgttaatatcatcactgatttcattaaaaaaatttaagtattggaaaaccataaacttaccgtggagaatacaagttttccaaacttctaattttcccttgaaacctcaaattttttcattccaacaaatactgtcagttttttttttacttgaaatgtcaggtttacttccttcagttttgagaaaatgtctgctgaatacccaagtttgaataaccataatttgtctatcatttgttctttcaagt

SEQ ID NO: 54256 - DNA, 6234 bp, Homo sapiens
aatcaggactacaaacaagttgtcccaattctcagactatcagactgtgtttatatgttgcccaagccagtgagtgtgaagatgaaaaaatggaatcacattagattttatggtattatgaggaccaaataggcaacatctatgcctggatttattgtttattgtttgtatgaacaccaaacttaggcccaaatagattttatcctctttgaagtatgctttggtttagagcaatggttctcaatcatggttaattttgcccttcagagtcattggcacttttgttgtcacagctggggggttgcgttcctggcatccaggaatggtgctaaacatcccacaacacataggatgacagccccccacaacaaaaattgtctagctcaaaatgtcaacagtgttgaagctgagaaatcctggtttgagcaaaatggaaaaaatgggctatttttctagtgagtactgatccttaaaggaatagctaaatccacagcttctacagaagcatccatttcatgggagctctgctgtatcagatcattcaagatggttttccaaaacccagagtggagtctagagcgaacaaccatgtttaccaatatccatatcagttaggcaaacattcttatgtgaaacaagatgcctctcaatttttcaagttcagttcataacctacatttgagattttagctttactattttcaaagtcttgaagtaggagagcaacatgttgtgatttggtggatacaagactttgatgaggagttataggtggacctttatgcgggggggtgtatgtgtgtttgtaacacagctaagagagctacttcttattgtctcttatcatcattgctaagtcatctaaccttaaaacagtgattaagtgccacagacactttaatttatcatgccagtttgtcacaccttagagacagtgctgactcttcaaaggcagctaaaccacaagatagtttatactcagtctcagctaaagtctccccctctcttcccttcctcaactccatctgcctagacagacaggtgacatcagagggatatcaggtaatatctccactcaatttgaaatcttcctaggtactgtgtcttccctgcatctatgtctaggaaaagagtccaactctgtaaaatagttggaagagatttattctcagccaaatatgagtgaccatggcctgtgacagagccctcaggagattctgagaacatatgccaaaggtggtctgggtacagcttggttttatacctttagggagacatgagacatcaatccgtacatgtaagatgtacattgatttggtctggaaaggcaggacaactggaagttgggccttccaagtcataggcagattcaaatatttttttgattggcaattggttgaaagagttattaacaatagaaaggaacgtctggattaggataaggggttgtagagaccaaggttttatcatgcagatgaagcctccaggagcaggcttcagagaatagattataaatgttttttatcagatcttatcagacttaaagagtctgttttatcagtaattccaggagggtataatgaggcatgtccccttcccatcatgacctgaactagttttcaggttagcttcagaatgcccttgctgagaggaggggtccattcagatggtagggggcaggcaggggagggtgcagagcgggtgtgcgctaagaatttcatttttggttgacacatgtcacccagagcatacctctggcacgtttatcatgacagtaaagctgtttacctttcaatctctcccgttcaccttgaagactatctctaataactagataggagtccatagaggcaacaataggtaaaaagttgttattattttgaaaagtccaataggactttaacatttatttatttgtttgcttgtttgttttttgagatggagtttcagtcttgttgcccaggctagagtgcaatggcatgatctcagctcactgcaaccttggcccccccgggtttaagcgattctcctgcctcagcctccagagtagctggaatagcaggcgtccaccaccatgcctggctaatcttttgtatttttagtagacgtgaggtttcaccatgttggtcaggctggtctaaaactcctgacctcagatccgctcacctcagcttcccaaagtgctgggattacaagcatgaaccaccacacccggctaacatttattttattttatgttattttattttattttattttatttattttattttattttattttatttagacagagtctccctctgtcacccaagctggagtgcagtggcatgatcttggctcagtgcaacctttgcctcctgggttcaagcgattctcatgtctcagcctcccaaatagctgggactataggtgtgcaccaccatgcctggctaatttttgtgtttttagtagagacggggtttcaccatgttgccctggctggtctggaactccgatctcaggtaatccgcccacctcagcctcccaaagtgttgggattacaggcgtgagccacggtgcccagccacatttattctttacatttaattttcatgagctgattagagccacagattgagctgcctttgtgtggtgattctgattagctccttctattaataattagatgctctgattggcagatgcatatacttttgataaataaaaataggaaaatgaattaatcattcacatactttgtttgttagataaaatatctaaaagaaatagcttcatggtgggaaaatggtccttagtacacagacccaaaccctgacgaggctttctcagcctcgtcaggatatgtgcttttgcctccataaatgggttaaggattgttcaggcattgggcactaggataggcagtggctcagattccagaaagacttatcagcaatgatgtgcttgcgttagtttccatcagtgagggcaggattgaggtcatagtcactgccagtgtcattagcaaatttctgagtcagagccaccagtgatggatggtatcatgtggctatgagccatgataacagattatttgcatatgtttgtttggcttcttcctgccctatttacttgtttagggacttctggcattccattccctgtgactcactttctatactgcccaacaaagcatttctttgccaatcgtggcaagaagccagttttttttttttttaaagcaacgcttagcgagcagagttttatttaactccttcctctgctggtgacagcgaagtacttatcttcttttaaagaaagttaaaatgaaaaggagagtagcccagcaaaacagtggtagaatttgagagaggactgtgggattccaaaactagttcactactctactcataggtgatacctatgtttttagatgctctttaactgtggatagagatagactatcctccatcctctacgcagtatcaaaaaaacttttgctctgtttatgcagggaaaacagcactcacacttcttgaatgtgaagggaggtcgatgatcaaattagaatcttactcctatcactgctcccaccccagcagcagctgctctggcaggctttcaaggctgcagcagccctggccccagctgcttcagcagtaatttgaagagtgcaagggggcaggggaagcgagaatttgaaaaagagcacttcattatataacagcaaaggcaggaaaccctgaaataactgggccggtagtgggatccagatttctggagttcatgggcccctctccccattcaatcaattctggagacttttcttactcaatgattgcatggggcacttgtgacagtcaaggggcaaaagagctttcaatcagacagttctttatcagtaaaaaccactttgatccaactccatcctaaagcactgtgcacttgcagcatcttccaaggtgcaaaattatcaactggattgaaaaacaaataaaatggcaaaacgaaccttgtagctgacatcttttaaccaataaggcagatgctgtttctcaaggatgtcccagcattatgtttgtggttatagatctactaagcaagaactatatcctttcaactcacgtttatagcagtgggcatggtgctgggcacaaagcaggcacacatttattctgtggcaaataacttccatttcaggccaggcacggtggctcacaactgtaattccagcacttcgggaggttgaggcaggaggatcacttgaggccaagagttcgagaccagcctgaccaagatggcaaaaccccgtctctaactaaaaacacaaaaattagccgggcatggtggcactcgcctgtggtcccagctacttgggaggctgaggcaggagaatcacttgaacccaggaagtggaggttgcagtgacccgagatcataccattgcactccagcctgggtgacagagcaagactccatctcagaaaacaaaacaacaaaaaacaaaacaaaacaaaaaaaacccttccatttcagctaagaagaaattattattttcattactttgtgacttcagagtatctttaggaggaatagagaaaaaaagtaaaatgtcaaatggccatggaagaagacaagcttcccaagtctctatgttgtcaagtcaccctacaaagaatgtcctcccagatgaccagtttagtgatgccacacaagatagatttgcactttgaatactgcatacctgaggaggttgtagatctttggttatagtgactttagcccagactcataattcctagaaaagactaacttaatctttgctagttggagactgtttggtctgtctcatttgttgtcagtgaagctgaaatgatcaagtctgtacaccccatgccattagtaaccaacagcctaagacctactgttgtgatgaacgtgatgacagctacactatgttctaatagggtaactggtttggatcctgatctgtggcaatgtgagccagctctttctcacgaaactttgtagaaaagcagctttcagcaataacaaccatcctcatccttataactatgactcttaacagttttctaagtggcttgtgagatgacccttggcacctcctttactgagtattgatgatgtgccacactggaatgagcttccatcacagacattaggaggcccattccatacactgtagtatctcacataactaggctgggctcttgaatagaacacaagtcttgccctttgatgttaaatgaataacaaccaactgatggtttaaattgtgagcaacatattttctcaaggagatccttttgcaagcagggcttttgtgtaatctctgcagattgggaactggctcatatatctgagctcaactttaggccatgtcagagcatattagattgacctcattctactgtgaatgtactgtttcatttactcaaccccttctgccaccaccaccttttttgatgtttggtttggctttctaattggtttgcctcaagaaggaatgaaaactttattatgtataagctccaggagggtgtctaagtgccattaaagttttcaatggtccccaaagctgccatttgagcacacaatttgctcagaggtcagggtggaggacatactcaccagtttgccgggagcacccaaaattcactgatgcttcctgttttccattcttgtcgttagtagatgtttcgggaagacaaataataacaagatttttctgtcaaatagttctttattaattcagaaaccactcggtgctaatcccatcctgaattacttcagcaaacaaatttgggacctcagaaagaataaaacactagcattgaactacagcgcctcctggctgtcacaatatcaatgcataacatccctgaggtgaaagtctcttacacagctaatgctatgtggttttccccagccccatattctccttaggtaaatgctattaagtacgataggaccaagtacagaatatcataagttgttcagacaagaactgtaaaaaataacgaaatattcgtaacagcgaatgacaaaagagaaaaaacgattggctttccccttctctgaagcaagagccagtatttcctaaatgcaggtccaaaaattgtaataatagaaatccatgcagcatttgttgcttacagagtttgtggaggaagtttaattgtaaccttttttatgcttacagtctttgggccaaatgaaaaacaaaaatatg

SEQ ID NO: 54257 - DNA, 763 bp, Homo sapiens
gacagagcaagactccatctcaaaaataaataaataaataaaaaataaaagaaatcctgtctatagcaacaatggggatgcaaatcaattcttaaacagtcttatgatcctaatgtcagaaatcctatctataggaacaaggggatgcaaatggtcaggatctagtgctacgtgacttttagtgacaaaggaagtgggtcaaagtgcagcctgattaatgcttaactatatttctgtccagaacctagtatgcaattcttgtcaaccctgtggttatggtttcaatatcacactgactggaattgtgtgtctcaactaccacttaacaagaatagagttagcttgactggcttagaccagtcatgatttaccatctgaggctgagaggaaccagctttcttcagaacatatgaccaatccaagtagagtagacaaagccagggttctatcaacaaggaggtaggaggatgaagagttactgagtaggtacttgcttggtccactgtgtgctgctgtgaccgaatacctgaaactgggtgatttttaataaagaacagggatttatttcttacagttctggaggctggaaagcccaagatcaaggggcctgcatctggtgagggccttcatgctgtgccattccatggcagaaggcagaagggcaagagagcaaatgcgcaagagaagggagggagagagggggccactcttactttcatgacgaacccactcccaagataacaacatgtatccatttattagg

SEQ ID NO: 54258 - DNA, 1072 bp, Homo sapiens
actggaacagaatagcttaatcctatttttcttaagattgttttccctcaaagtagcccagaaaaggggaaagggggcattattttcacagcaatcaacccattcacaagatccattaatgaaatctacaaaatacaaaggaggaggggaaaagaaaggcaattaaatgattgcgtccataggtctgatgatgcgaataaaggtaatctgagaatcgactaattttcctcgaggattgcatccttagaatcctgggccgccggaggcttctgggctacttggggcagggccgaggctcggagcggctgccggacacccacccccgcggaggcgcgcgccctaggtggccatctggaagggctcgggctggaagccgaagagtctctggctgtacagctcgctctcgcccggcagcttcgcgcccgggaacgggaggtagtggtcgcggccgaagtgctcacagtggagacccacccagtcccgctccgagccgaatcgctcggcctcggccaggatccgggtcagagccatgatgtagctcagggccatctgcagggtctcgtacttggacagctttttatcctggccccactggggaaccaccctgcgtaagcggtcgaaggcagtgttgagcccctgcatgcggcggcgctcgcgcgcgttggccgccaggcgcctgcgcgccgcgctctccagccgcccggccccggcgcacgtgcccgcgcactcggtgccgcccgcgcacgggggtgcaacgcgcgctcccgccggcgggccgctgggcttgcaggacttcatccccggccccaagcagcgaggcgccgacctcgcacgcccgcccgctcaggacctgcgcgtgggctggtctctcgagccgcttcccaacgtgcctcttctgagcaaataagtcataaacaaagcaactcacgtgcaatcaaatagtttacagtgggggagtgcgggactcggccttctgttctactggatgaccaggctgatatctcttcacttgcccaaatttaggggaaaatgagatgctcaagagaaagtcattttctcaacatgaagttga

SEQ ID NO: 54259 - DNA, 878 bp, Homo sapiens
caagctcaccatctattggtaatagatttctttgcaaatgggccctttcacacattagctaggacgcaaagtccactgcccaccagctctttaatcctctctaccttggtatactgcatttcttgcaatttgaatttatataactgtaacttctatttcaggacactaaaaaatgcacctgctatttgcctgagggaccagagacacgtggaaagtttaacagtagcagcccacaacatgtaccactggcagctggactttcactgaatttctacactgcaaccaaaggtcaagacaatggtgaatcatggaaagacttcaactttgaaagccttacaaacaaaagagagaggatgcatttgttcaaaatactggcttttcttttcagcaatttttccattttacactaggagcttcttttcaaacgctgcacaaaacagttacaaaccaacagctatgaattcccttgctttaatatccatttccctttggccatctcatgtgaatcaaatttccaacagcaaaaacagagtgatgtttgcctttctgaattccagtgtactgctttggcataccgaggttccatcgccttatgacccacaaagattaatgatcagaaaatcagagtaaagttttaaaatactcccatcttgtggcagttttgaaatatggcaacctgaatatgacagtcccgacttatcagtccttattgttcatttgtccctctgctgtagataaggttccagtaaattcaacacacctggatggagaaagttctaaaaccatcaaggaagtggcaaacttgtaaactaaaattgacaaaacattaggctgggtgcagtggctcttgtccaagcactttaggaggctgaggtgag

SEQ ID NO: 54260 - DNA, 1163 bp, Homo sapiens
tatgttgtcatgtgaaaaatttaaaaatttaaaaatgtcagccgggcgtggtgactcacacctgtaatcccagcactttgggaggccgaggtgggaagattgcttgtctcaaaaaaataaaaattaaaaaatttaaaaatggacttgtcttgaaaacaaaaaatcctttagaatattatagaagctcttgaactttattactcagaagtttttactttactttcagtagtcttttatcaagtgttcaaaaagctcaaagcaccacgacctagtctttagtctatccaccaggttttcctgtggttactctcatcctggtcaaattttgaataacttaaaacaaagctacaaaaaaaaaaatcatctgaagccctgcacttaaaatctgaggtatttttacctcataaaacctaacattattccattctctgaggcctggtaccttcaggtcttttagtctctgtagtgactactgaataacgatgggtttacatgcccattttctgcactagactctgagcccttcaagggcaggtgaacttgttaacctttgtacctctggctcctagcccagagcctggctgaattcctactgaattgtgtccaatattataagatttagcgtttatttgtctctgacattttcctgtggccacctgtattctctccaccatctcaggacaatgaacccaagggcagacaccaccatttatacgtctattataatttttattgattacgaattaggaaaagtgctatcttcgcctctaggaggataagattctcacatccaaagagcagaaaagcatgacaaagaggcgtagcaaactaatctttagatatctattcaggtgtctctgacaggccgtgaaattttcctggtctcacaggcccaagcctcaaaagaagtgaattggaaaactctttagagagcatccccaaatcatggacttccttatcttctttttccttcttccattcatactaaagcgtgttgttttaaactgtaagttctttgcttaaatttttatttcctagtttttccaaatatataattaacatacaaaatatgttttaacggagagataggtagaaagagagagaaaaaagaaagaaagaaagaaagagatatcaatcccataagtctgatgtttgctgaattt

SEQ ID NO: 54261 - DNA, 874 bp, Homo sapiens
tcaaaaacaaaacaaaacaaaaaaacactgcttccccccaactcccagagagcctgttgtaattgctctagaagacagcattttcaaagttccttgggtgattttcatgtatagccaggttgagattcactgtccctgaaggccccaacacacactttgcccaacttaatatgacttatttaagatcatcaattgctaactgtcttcttgaagtaattttcagataatctactcttgtgctaactgctctgagtgaaagcactcagaaacgccttaccttgtttctcactacttagggaccaacacaaggtcaatattccttgaccttgagggtcaatatttaaatattaactattaacaatatttaaatatttaactattctattaatatttatctatttaactattaatatttaactattccattaatatttaactattccattaatatgtatcctaatcaaaaagccattttaaaaatgagtctttcagtaagttatttatatactatagcttaattccttctacctctctacttaactacttaattccttgcaaaatgtctcattttcttgatcctgaaaagaatttctaattgcctgagctatagataaggttaaagatactcagttaggatctgttatgctcaatgtgaaattggctatgtctagtcacacaaaactcatctaatttcattctcctcaacacttggtgctaactaaatgaaaacctgatggctaaaagggagctctagctcttcttttttaaaattggctctagttcctctttatctgaatcttcatttcattggacgtacccaaggcataggcatttttatcaaatactttggtcaaaatcaacttgcatacatgaa

SEQ ID NO: 54262 - DNA, 720 bp, Homo sapiens
gattagtgctttctaaagacaagatacataggatataaaccaaagaataagcatttcacagtcttacacaaatttagtgtttaaaaggcattaactaccttaattagatgaaatttagtggattttgttacattttttagattatttgctttttacataggcaaaagattatgataatccagtttttatggtacttcacaatgccactggggatatgtgaacaaatatcttaaccaatttttcgttaatgtgccttccctccccccgaagagtgtaatctctttcaatttctttttttctctcaggctctgcacggaattttcctctcctcttcatcctgatggtgtaatacatgatcacgtgtttgttgtcttgttttcctctgggtcacatgggtacttctatttccttctcctttttcatcttttctctcattatggtctctaacaagatcctctccagggtccctctgatctctatgctaataggaaagcactggaatgatgaaaaggaagacaaagagaaaaaaaagtcccaaaagcagctggcagtccttggttttaaccatctctatggaaacaattccacacagataggtctggaaacaattctgtagggatcactggagcagtggtgagccagtctcaccaagccttatttacaggattcaacttgcaaatgagaatcgttgacaagactttttttttttttaagaaaggt

SEQ ID NO: 54263 - DNA, 3130 bp, Homo sapiens
cgatctgggctcaatgcaagctctgcctcccgggtccacgccattctcctgcctcagcctcctgagtagctgagactacaggggcccgccaccacgcccggcgtgtgtgtgtgtgtgtgtgtgtgtgtgtgtgtgtgtgtgtgtgtgtgtatttttagtagagacagggtttcaccgtgttagccaggatgaacttgcactgatctctttaccaggcttccccttaaccctctgcgcagaaattcggggtttttctttgtgtttgagacaagagtctccctcggtctcccagactggagtgcactggcgcaatcacggctcactgcagcctcaacttccagggcacaagccatccttttgcccagcctcctgtgtagctgggactactcgggagtcccatctactcccgtgcgctgccatcacgcccagctaatctttgtattttttgtagagacagcacctcactatgttgcccaggctggtctccaactcttacgctcaagcgatcctccccctcggcctctcaaaggcgtaagccaccgcggccagccttttttggaacttaaaaaaaaagccataatgtgtcattaggaaccttggtgacatgacagcaaaaccaaaatgtacttatttattaggtgtcacttggaagcgcaattttcaacaacgcaaaactataaaaaaaacccaacgtcggcctccacaggctaatcagtctccgaggcactgacggcgggagagatgaaaacgcgaaggccagaggagaaaaagaggaaggatttgcagagagaacggtaacgtggtggacatgaatacacccaagaaacccggatcccgcgcggcacattgggacgaagcgcgctggcgggcggccagcaactctgggccaggggaaggaggcggacacccagcccgagagccgaaatcggccccagtggacgctttcatcttcgcggcccagaaacactcctatttttcaccgcacaatgcaaacatggtggaccagaaaatccgccccgcgtttgccggtcgaaccacgtggggccctttccgcgccgtcgatgcctagccagggcggggccctcacagaatttgttcacggtgggggcagatcaccggagaacttctccagagcgctacggcacggttccttctacacactggcagaactgccattgccatcgccccgaggcggcagaatggtacgctctgaaaactggatggttctaacgtaagcaagaaaaacggtgcgcgctgcagctctttaactggaacagcctctgctcggtctacctcgcccccaacagctgcgcaacccaccaccgcgcaggcgcgctgcgtgccgccagcgccatgcgaaaccgactttcccgtctcgcgagagtggggccggccgccttcgcagttctcgctccgccccccacttcttgctcgttccctcccatccccccaagccagtagctgtgctgcgcagctccctaagcggttgtcaccgctggagacggttgggagaaccgttgtggcgagcgctacacgaggcaaacgacttctcccttctttgaactggaccccgcgagcaccagagtcggcgtaactatcgcctgacagggtatctgaagtaaaagggggtaggttgggctggtggtttcgagagcggagtcgggagaaggacgaaaggccgggaggggctgggttggggggtagtggggtggtcgccgctcggaggccgccgcttggaagcggcggggctgcgcctccccgaccatctcccacttcagggagggcggcttgccgatgggaggacttgctcaggtggaattcagtggacgacgccgaggcccgaagtaggggacatccagcattttcccctttccctgctggcttggcctccgccattttgggtacagtggcgcggccacctcggcttcccgcccttccccgctctttttacttttttgttccccagcttccgaaaactgatctagaaggccaggggagggggtggtcaaagctccctggaagggatgagggtgggtagtgaagcgagcagggaaaggccgggcagttgggtggagggaggatcgggtttgccgggcgcgctcccgatggaaatggcgccggatgggcctggcctcccaccgcggcctcccttcctccgcagtctcggcagggctacctgggctgacgggactgcgagtgacttctgacgcagattcccaagatgagagaggctggagctgggggaggaaagccaatggcgacgaaggtgctcaactcccaaatccaggacaaaggaggcagacggcctcctttgtaattctgccgcccggtggcgaagggttttaagccaggcttggctgctgacgggagggggaaggggcgtactctccctagctttctggtctctagggcagctagataaacggaaagtctcctgggaggaataaaggacgcttagccggcccttatattccagatttggaacttcgaaaagagtacgtactgattttccaaagggttttttttttttcatgtttaaacgttaataaggacttcggggatgattttgtgagcagaaaagtgggtgatttatcaaataggaatgtgaaatgggcatgtttcaagtaggtcgtctgggcccagtgaactataattgttgctttttgaactttcggggtgggggtgggtgatgtagcaattgttttgcgtagtttggcgtatatatgttagaatttgtttttaagttttacttttgggaaacagttaaaacaacccagtgatggtagatgtgtgtgtattgaaattgagctttcgatgttaaatcttccaagagttgtattttgtgcagtttttttttccgatggcattaaggctctagaagtaaaatacttcaaaatacggttatggtttattttcttttggtagctaggcatgttttttctttagtgtaggagtatagtacactgtaatcgtattttaaacaagggaataagcctactaaacataaaaacaaattgtaaacccagtcacgtggtggtggtgtgattcggatgagggtcctgagaactggatccgtaattttcattgaagacagtacaaaagggaggagaaaggcctgagagtaagaatt

SEQ ID NO: 54264 - DNA, 1579 bp, Homo sapiens
gaacaacaacaacaacaaaaaacccagagtctccaatgatctagtattccagctccgatttctagatagctaggcatgaagcctgacactgaatcctaagcaacctaaaatgcaaacagccacaactgctatggccaaactgcctggtggaaaaatgtccacacacgaattccttcaaatctgcatcgtggtctgactcccactatttttcgggagtgaaaccacttcatgtttcataatccgtggcaactctcatttttaacacagcccatcataattcctaacgtgcgatgcgacaaccacacaaagggtgttttgcagctgctgggaggcagatcggtgctgggcaccggcagttcccacgccgaggggcgttcacaccgcggccacgccccggctgcgctacaggacttctccggcccgtacgcgacccccaaacccggccgcaggcgcgcaaggagtaccagggccagtgcccgcaccttgccggggcctagagccccttccctgcctctcttcctgccccctccccccagcaaggctgcccagaggcctgggggccccccaggaccatcgcggcgggctcacccaggctcctgcgcgtcagcattccccgtctcccgccctcggcgtcaggcacccaggccaaaacctgagatgcgtcttccctccgccacccccaaacctgaaaagtcatcgcccctccccgcctgctccccgacccgggagtgacaccctgcctggccctgtcctcgctcctggacgccgtggcacctcgagccctcggccactatgcctcagaacccgggcgggaacgggccggaacaagggagggggcgcgttgccatgacgaccccgggagcccccgagtcccaggcagtccccgcccatcctgggttcgggccccagttccgactggcggcctcggcgtctcccccagctcccagtccaccccgcctggccgcggccctcagcccgggactgagggcctagcgttcggtttcggcccgctcgccttacccatggcggcggcggctgcgcggtctcgggcggaggctccctcggcctgtccagcagctccttccaggcgctcggcggccaccaccgcatctgcagccaggcccgctgcagcccacagcgcccccggcggcgggagggcgcccgggcggccccagggggagcggcgccccgggcggggcggggacccgcggaccctgcggcgggcgggagagaagcccgccgtctctaagcctcctcgcatccgctgggaccgcgaggagaaggaaaggaacgtgaaggagaccacatgtgtgaggagccagagtgctgggccctcggtcccgtgtcccgggggcttcgctggagcgcgaaggccggatttcaaggggcggccggccacacgcaaacgttgcttccaccgggctggtggggcctgatctaacacgcctgactactgcccattcaccttcacaaacacaaaggggaccaaaagaatttagaaaatctgaagcaattaacagtaggcagaaacctaataaaactagttagtcccaaattacgacttttttttgttttttgg

SEQ ID NO: 54265 - DNA, 1813 bp, Homo sapiens
atgacgcaaagacctttgttcacgtgtttgtctgctgaccctctccccacaattgtcttgtgaccctgacacatccccctcttcgagaaacacccacaaatgatcaataaatactaagggaactcagaggctggcgggatcctccatatgctgaacgctggttccccgggtccccttatttctgtctctatactttgtctctgtgtctttttctttcctaagtctctcgttccaccttacgagaaacacccacaggtgtggaggggcaacccacccctacacaacccagagaagtaattaaggaagggtggagcttgaaggcccaggaaattcctaagagacaatatgaactttttgatcccaaagtcacatcaataatagggcttgtcaagtactgtgtcacagtttactagaatcactggaaccagttttggctgtagacagtttgcacaattttccagtagtcattaaaaagctgatctccaatatttgttttcctttaagcaaacagcaaaatccaagtctacactgggtcactcacggtttttataaaagaaaggagtgcccagcatgtctcactaaaaccccagggtctctgtaagggatcctcctcttttccctgttatccagccctgaagaatgggtgcctgattcagaccttccacctccccagcctctgccggagtgccaaaggtcccactccccataacctagctgtcattagtcaagtgattactagaaagaggttacagcaggtcagggcagacatctaacagaacattgaagcagccagagtccaggaatgtcatagaggccgcttgcatcccacttgcccacagtcctgcccccgccactcagagcgcggctggctcttcgtggcatggacccacctccggccagaaaggagcgcagccagtagaagtctctgcgggttgtgggccctccggcccctgccgcctgcggcattgcgggagggggatcggccgccgccagggctgccgcggccgtcgccgccgccatcaggaccagggtcgcgtcaggagcctaggttgccaacttacagaacaccggacgggaccatagccggaacaggcggtgacaggaggctgaccgccccgccggcggggcaaagtaacacccggcggcgcggcgccggctgatggcgtacagcaagggcggggcctgtgtcacgcgccaaggggctctgccgggaggggcggggccaggacgcggaacagggcgtcacccaggctcgtaaactcctccatcccgcctcacccggcgttgccactgtcagttcactgctcaggccccttctgttcggacggaaaaaggaaacggtaggcagtgagatggtcccattaaaacccacaacctggccgggcgcggtggctcacgcctgtaatcccagcactttgggaggcccaggcggacggatcacttgaggtcaggagttcaagactagcctggatgccgggcgccgtggctcacgcctataatcccagccctttgggaggctgaggcgggcggatcacaaagtcaggagttcgagaccagcctggccaatatggtgaaaccccgtctctactaaaaatacagaaattagccgggcggggtggcgggcacctgtagtcccagctactcgagaggctgaagtaggagaatcacttgaatccaggaggcagaggttgcagtgagctgagatagcgccactgcactctagcctgggtgacagagtgagactccgtctaaaaaaaaaaaagactagccaggcgaacatggtgaaaccccgtctctactaaaaatacaaaaa

SEQ ID NO: 54266 - DNA, 1359 bp, Homo sapiens
gctgtgtccagagaagtctcttttatttggccaagcctttctcgtggtcattataatcccagtccacaaggctacagttcccccagacagttctagcataatacaaacactgtctcagagtgagatgagtcggttatattacttattttttttcagcttcactctctgctggagaaatgtcatcctcaccagtgtcccatagctgcaccatccatgtggctgagctttctctcagcagctgttcggaaatttttgctaggtctaataattcttctgaggaataatcttggatcgtcgaagattcctgcaaaggctattgcttatggccaggatgtacgtatagggcttttgcttcctgctgcataccctcaaaaggggacgataattatcctccacctcccagataacctctgtgtctttatctggctcactagttggttcccaataattccaaatatttgcatcccagtctggtttggcaagggcagcctgcattagcacagttttctccctcccaactgtacaaagtgtcaagctaaggtttccaactgtgcctcctgagtttcaagcttatctgccaaaccagacactaacacagatgtggaagtttttgtgtttttcttttttgagacggagtttcactcttgttgcccaggctggagtgcaatggcgcaatctcggctcaatgcaacctctgcctcctgggttcaagcgattctattgcctcagcctcccgagtagctgggattacagcctcacaccaccacgcctggctaattttttgtatttttagtagagacggggtttcaccaagttggccaggctggtctcaaactcctgacttcaggtgacccacctgcctcggcctcccaaagtgctgggattatagtcaggagccactgggcctggcgtggaatttcttatatccctttctaattgcagttcttctaactttcagacatttgctgtagctgctacctgtacttctgtggttgctggcatagaccataatagcggccaactcactgtcatagcagcttactgacctttctcaccacagtgagtcatatggctttttacaaacaagcactctagactctggggttttggaggtgtttctgtactcacgtgatggtccacaggtatctagcaaatgggcagcaccacttcatttagatgaggaggactaccccaggatttccccaaggatgcttctttcttcatgctcatgctttggtttcctggctcctggctggatcaccacttgtttcatgtaagggctgtatatgcaaagccaccctcaaatgcagaaagagctgagaaattaaagaagggagcagataaatccagtttgtcagt

SEQ ID NO: 54267 - DNA, 1101 bp, Homo sapiens
tggtttctctctttggtgttgagggcggttttccgttgctggcgacctagacattgctcaatggtgtcatctctgacctggcaccttcttcatacatttataaacatgcaatttagagatcctaaaaactttttctagagctcccctgggaaaaaagttaatgacaaaatcttgacacctctctacgtcttcttcggagacagagaagttgagagaggtggagaacgagggggagggggagggggtcgagagggagtcgaggagggattccagctccagtttgggtaaatccagctcgcgttttgtctctcgctcaactgtgcagggtccagcgaaggcagagccccagcttcactccctgaggtctgtcctggggagacactgctgctccggggggctgacctggcggggagtggccgcgcagtctgctccggcgccgctttgtgcgcgcagccgctggcccctctactcccgggtctgccccccgggacacccctctgcctcgcccaagtcatgcagccctacctgcctctccactgtggacctttgggaaccgactcctcacctcgggggctcgggccttgactgtgctgggagccggtaggcgtcctccgcgacccgcccgcgcccctcgcgcccgccggggccccgggctccaaagttgtggggaccggcgcgagttggaaagtttgcccgagggctggtgcaggcttggagctgggggccgtgcgctgccctgggaatgtgacccggccagcggtgagttggggccggggcagagggcaggggtgcggggagcgaggactccgacgccgaggcccgaggggggtccgggaggcggcgctcggcgcgggctggatgtggccggggctctgcgtccttggctctcccgctgcctcaggggtgggctcgttccccgcctcgaccccccaccccgggacgctcgggacgcttttgttgccggagataaacaatgcccccggccggaggtatcggccacccgctccggaggccccgccacagcgccgggttgggggcagcgggggcgcctggggctctgaccccgggctgcggtggaagcggggctgggggagggcaagt

SEQ ID NO: 54268 - DNA, 1160 bp, Homo sapiens
ggaaatgaaggtcatcagaaatgcccagagcaagagagaaaatcctttctctctagccactcagagtggcaagtgtattttgaaaactcctccctctctttttgtcctcatcctgtccttttccttttcagtggctttactgttattttttaattcgccattgtcattggacatttattgacagaaatcaaattgctgtgtttctgggcaaagcgcctgctgcaaagaggtgtggttcctgaggaatgagacacgcagcccaacagctgagcctacactgtcctcacataacctccctgccttaaatatcgccaatatttagccttgccttataaagtaaaaatgcacaataccttccagagtttcagcaagcccaaatgcccccctaggctcagttatgtctcctgtacattggaggcagagcagcgcacccctcccccatgcagacctgccctcggaaccgccaagaggttactaatcaggaaggctctaccatcgatccaatggtggtgacctgggggatttgtgtgcattgtttttgttgaagcctcctgtgatttcggcgcgaccagatcctctgcagcgaactccatgtcgcagcttgtggctgcctgtgtcctgtggtgagagccgagccgcacaggagatcctttgtctaggaagggctaggctgagaagatcactttggagttgctaagctctgcattgccattggctgcactctttgtggggctgtttttgcaaaaggcatgcccagcacgtctacagtgctggcaggccagggctgcctttaaacaccatgataataataccaaaaagcagtttgcagaactgttccactgtagaggcttcctctgcagaagcaagcaagatggctacctcgtgggcttcgctgtgaagaatgcagaggctaattaagacagactttaaggggaaaaaagggtatttccctgcttcatctttatgcaagatttttttagtgacttttaaagtatacattttacataagctctttaggttctgcctagcaaacatgttgatgattttaaatggtataaatagttttacagagaaatagccaaaaattttggggatgtgggagctaattttatttcttaaacagaggctcattttgcaatttgattttttttaggttataa

SEQ ID NO: 54269 - DNA, 1466 bp, Homo sapiens
gaccctgtcttaaaaaaaaaagaaagaaagaaataacttaatagtttattacagtttgtttattcttcctatattcaaaaaaatttcaacttacaagcctttcattatatttttgtgtgtgtgagatagaagatacatatagagaatgtaaaacatatgtataagttaacagttaagaaatatatagctggcagttgccgtcctactctagaattgaagctggtttatgtctttttcagtgtctagtgcttttacgctctgtccagtacaagatctaatactgtctttttttgtccaaagagcacttgatattctggaataatatatttctatttctctgcaatacaaagtgtacttatgtataaagaaattccataatcttggccacttgaagaattcataagcctttctgaattttaacatattttaacaaatttgtttaatcctgatttcctatttcaaaaaatcaaagaataaccagtgtgctaacatgagtcatgtgctaatagctgactcatggactgatccctaaccaatgtatttctacatttttgtgccttaggagtcattgaaagagaacattctgaaccaattagttttattagtgtgttaaaagccctgagaaaatcttgctgggtaaagattctcaggcagaccttatgagaaatttcctcagtatttgaaacatgtgaaagcttaatttgaatcctgtactgattagttactgtctatggccaaatttcaggtaagcactcttctaagaaacctgttgactctaatatagctgtaaaaaaatagggaaattcaatagattgtgtcattaaagttcgttaggctgcttgaagccccattactttgtttaccatacaactatgttagaataaattttgtgaaaaatctgttttgaacctcatccaaataggtttagttattggaagtcttacttaaaatatggctccaaatcacaaagactcaagatttgccttgaccaaaggtgatgtttttattagaagcaggtggttccatagggaggctaagtatatcacactgattttttaacaacagtagaaaatatagtgttgtgtagtaataatattgaattcttgtctttccaaagtacacttgttgttctgaaataatatccttccatttctctgctcattgttcaatacacagtgttttttaggtttttgttttgtttgtggatatgaggtctcactttgttactcagactggtcttgaactcctgggctcaagtgatcctcgtgcctcagcttcctaaagtgctgggattacagacatgaaccaccacaccagctaacacacagttttgacaaactgcaatgtgccagttatcaaggataggctgttctgagaagaatctcacaatttggaaagagtgacaatgctgtctgagtggagttgaattgggagaaaaagtttcttgaattaaggagagaagaaag

SEQ ID NO: 54270 - DNA, 1761 bp, Homo sapiens
gcgtgagccaccgcgcccggcgaaaccatcattctgagtaaagtatcgcaaggacagaaaaccaaacaccgcatgttctctcataggtgggaagtgaacaatgagaacacttggacacagggtggggaacatcacacaccggggcctgtcgtggggtggggggaggggggagggatagcattaggagagatacgtcatgtaaatgacgacttaacgggtgcagcacaccaacatggcacatgtatacatatgtaacaaacctgcacgttgtgcacatgtaccctataacttaaagtataataataatttaaaaaaagaatgttacggggcatatcctttctctcaaataatggaacgaggttaaaaaaaaaaggttaaacataaaatggcggcgggctggatcggatcacgtgaccgccatttctttccttcccacccaaaggaaagcccttccttcagagcaagcgcaagacatatagccccgctcattgttaagcgaggccaaggcaacccttaggcgcgctctatttcccctttcgtagcgaaagggccaggcgtattgagcggtcaggggagcgcgcacgcagaacgtcagccagtaagcgccgttcctccgggagatgtggaggaggggggcggcgtggaggaagagggggaagttggcgcatgcgcctaaagctgacgggtttgaaatggcttcgatgttagccgggacccgactcaggtgaaggtctggtccccgtagttggagcagtgggcggccaagccgggtctcttaacatcttgtcgaatctgtggaagggccgggagcgatcttttgggtagcccggcggccccgggcggcgacggtggggctcttgtgggactgggacgggagggacgcggtcccttttgtgcgggtcggagcaggcccggcgcggccagccccacccccaccgctcggctcctcaggtgcccccagcgcccctcagcctcggcatggcgacgctgcagtccgccgccccattgctcccgagccgctgcggttttaccctcctggccccccggcccgggacatcgtggcggctcccggcggcgtgggtcttggggaatagaggctttctccgtgcgtggtaaacgagcccagggctctcgggagccatcgagtgtcgtggggcggtgggttccgccttccgtcgccggcggccggcacggagctgggactggaggaagatggacggccgagctctggcccttgagggtcgtggcggccgaggagggggtgcacgggcggagaatcttcgccttttctggtttatcttggggggaggggttttcccagtggttctttaagggacatccattatctcaacggccttttccttcgaggtcggggttggaaaagaagccccctaggttccttttctactttggaaagtagagatgttcgttatttaaatgatatctttaaatacctgtgatgggggtcttgtcccagtatccgttattggttttaacattaccctggcctcactccccaacccattgccagaagaaacacgcaggctgtatttcctgtgaatataaagttgtgaactttttgttaacaattgggtggatacagcagatggtcttcgtttaaatgtgacaacttgtagtcccagaaaggagtgctttttctgagtctccctctaatgttatcttgtaaaatagggcatttttggtgatctacttgatgtaaaatgtttttgctgcattttggatgttcatttgccctttttc

SEQ ID NO: 54271 - DNA, 2016 bp, Homo sapiens
aggatcatgaagagatgaagaaatggctgtgaaaagccaactagcctcggtgatagtaagcaaaggtatagaaacactaaggaagttaccctttgtattgtcaaaggtttcagttttgtgtaaggtggtgattcacgggcagttaatctccatcactaaaattaaatccttttttattcattgcaaatagataatctgtggaagacattttggcttttctcgctagcagaaaatgtgaggcttcttcaggtttttcctgttcattgtttcacgggagcatcttccccaaaacactgcaaaactcaaagttctcaggctgatgtggcagaaagagcattgatctcggcttcaggagctaaattctctagtcctgactgtgccactaacagactgtgggacttcagacaagtacattcctttctcgggtttcttatgtcaaatggacagcgtgagaaggatcacaatgaaccagggatcagcttcacgattaaaacctaagacttaagagacggacatctgtccgttcctggctacacctccggcccatctggcccaccccaaactgcgcgaagcccctctccaccgacgccaggcctgtggcctcgcgcgaagctgttggtcgttaacatctcccccgcaatgggcgggatggagggcttcagcttccggctgcaaatggcgaggcggcgcgcggcgttgcccactggcctcggcatgggcctgcccacgcacccgcccagcgcgcgccggaccctgtctaccgccgttgaagggcttcccagccctagcagtgcgtactgggaagcccccaaaaggctctgcgaggccgaggagacccgttcggagtgggggaggggaagataaaccgaactatttatgttaatcagtgcatgcttcctttatggagattggccagggttttactctagtaaccaatcacttcagaacaagggcgggcccgttgatatctctcacactcattggttgagaggttgcggcgcaatggaaggtcttaaaccgagagtatccgggattatttttccccgccgtgcggtgcgtgtcccggaagtgacgcatggccaaggccgggcggccgccttgcccccgcttcctttcacgctgtcgctgcccgtaggtggttgtggccactgtgcccggagggaggcggcggtggccagtaatgcctgggaaactcctctggggggacattatggagctggaagcacccttggaggagtccgagagccagaagaaggagaggcaaaaggtgcgctgagcatgggccgcgcctccttttgggctgcgccggcttgggcggggaggggaactgtctgtccctgatgatggcctgtcagaaccgggccggagcatccgagggcctcccttcgcgccgccctcggccctctggggtcgctcagggaccgtttccacctccaccctcccgacctggagaaagatggccctgggctttgggcctctcctccgcgtggcccctcagcccttcccgttggcgcctgaatctcagatgggcagactcaagctcccatcaccatggaatctgttctttctctcctgaagcagtgacgcttgccatttcgttttcattggccctcttagaagatgattaagaaaaaatgattgctttgaatatgtgttgcttctgtcaccccgtcccctgtgcaagaatcctggggaaagcgatcttaggtttacagacctcaataactagtctgtagaggcttaaggaaaagtgtcactgagacttgccaggatttgtcagtgatggagatcgtgtgggttgcattattaatagcctttactgtcagtattttcattcaatccgcaggtgtttattgaacctaatttgtaccatactctttgctgagtaccaaggaggttaaactaaataagtaaagaaatggtctctgctctcaaggagcctgtagaggagttgtagtctttcctcctcccagccccctgccctccaaaaaaaaaaaaaaaaaaaaaggaaaagaa

SEQ ID NO: 54272 - DNA, 2539 bp, Homo sapiens
gaggcagaggttgcaatgagctgagatagcgccacttcatccagcttgggcaacagagcgagactccgtctcaaaaaaacaaaaaggccgattttcaatgtcagatattattctatcccatttttgaaatttattttttcttttatatatatgaaatattttatttatatattatatatgtgtgtgtatatatagatatatagacataggggttttgctgtgtcgccagggctagtctttaagtcctggcttctttggaggctgaggcaggagattcgcttgagctcgggaggcagaggttgcagtgagcccaggtcacgccatggcactctccagtctggatgacagagcgagactctgtctcaaacccacaagacctctctctcccgctagtctataaagcttcttgacgataaggcttttgtgcttgttagtgaatactagtcctgtttctcctacctgacacagtgaacgctcataagatgtttgagtgctcgcatgaatgaacgaccagacccgactgaattattttttttcttcaggctcctgagtctggtcgacactttcagagtagacgtttccaagagatgattaaggacacacatccgcgcgtctgtacgtgcaaactcgagcaatacaacataaagcactgaagatggcgccactcaaaagcaactagaagccttcatttatcaggctggggctagggaaaatctggccagtgttgaagaatacaaagctaacctttgcaattccttgcggttctaccgttccgtaggtgccttctagaccaagggccgcaagtggtcaattcactaaatccaaccacagtcacaggccgctgctttgaatttaccacgcggaaagcagcttttcctgtgcttcctgcttcccccggaagtgccttgctacgggaagtgacgagagccgggtggacccagggtggggaactacctcttcctctccacgcggttgagaagaccggtcggcctgggcaacctgcgctgaagatgccgggaaaactccgtagtgacgctggtttggaatcagacaccgcaatgaaaaaaggggagacactgcgaaagcaaaccgaggaggtgaaacggagggacctggggccaggagggacgctgaatggagcggaaccccggggtgcgggagaagtgcccgggctgggatcgtgggagcgcgcggcggataacagcgcgtccagacaccgggcgtgggtcttggcgggcggtcgcccaggagtggtgcgctccccgggcagtggacgcgtcgtttgcccgaccgagccaggtccgccgtgcgctgacctcttcctctgagcttataggcatccacaggtcggaactctggtagagaggccctgttggagctcgggagagggccgggtgtcccacgtggtccccggcgacttgggcgcgcctcacacagtgcgcagagttggaccttcagtcaggctccacgttgttggctaagacagaactcccggcatgagcgtgcgcgaaggaagttacacgtcaagtcaaagtgggtactggaggccgggtgcggtggctcacgcctgtaatcccaacactttgggaggccgaggcgggcggatcatgaggtcaggagttcgagaccagcctggccaacatagtgaaatcccgtctcgactaaaaaatacaaaaattagccgggcatggtggcgcgcgcctgtagtcccagctactcgggaggctgaggcaggagaattgcttgaacccgggaggcggaggttgtggtgagccgagatcgcgccactgcacgtcagcctgggcaacagagcgaaactccatctcaaaaaaaaaaaaaatgtgggcactggagctttagagtagactggagaggtcttaacttcatctgcgcacgtgggccgcgtctttagtgactttttaaactctcgtaagggaagtagagtttgttttccggtaagccgccctgagaagatgacgtaattcagttattacgaaaatctgttttacaactgtttgacccacatgagttgactggatttcccatggaaatgtaaaggcatgtgttgcggtgctgagtgtacaccatattttttatataggccagcagtgtgcagtagttttaaccttgatagctgaccggtgctttgctgttgcttcctagtgatttaacttgtgactgagtctctgttctgagatcaagtcagtgggaacaaagattgtccttgaacttaggttgtacgctacttagaattaactttccttgttggtttctctgtcttttgatatggagttcttacaatagcaatattttagaattgtaggaagccgcggcagatttgtactcaggtgcaagaaggtcgtggtcctggtttacattgcatcagtcaattgcgttcaatttggcatgctcaaatccagaggtacatgaccaaactctgttatattccaaaagagaccaccaggatgggaaactcagtcttatttggtggaaccaagggatgaaaacgaataaaattttggaaggagactagcttgtt

SEQ ID NO: 54273 - DNA, 772 bp, Homo sapiens
ctgtggtgattgctgcgtcttcccattggtcattgccgagcgtattgcggttctccgggagggttatattggttcccattccacagcggccgcaacgtgtcgagagccgtaagtaaagtgtcgcaaagcagaaggaaggcgggagtcccgactgcaaacattgaggaaagccaggcagtagaggccgctatggcgaacgttccgtgggcagaggtctgcgagaaattccaggcggcgctcgctctgtcgcgggtggaactgcataaaaatccggagaaggaaccatacaagtccaaatacagcgcccgggcgctactggaagaggtcaaggcgctgctcggccctgcgcctgaggacgaggatgagcggcctgaggccgaggacggcccgggtgccggtgaccacgccctggggctgccggctgaggtggtggagcccgaggggcccgtcgcccagcgagcggtgaggctggcagtcatcgagttccacctcggggtgaaccacatcgacacggaggagctgtcggcgggggaggagcacctggtgaaatgcctgcggctgctgcgcaggtaccggctctcgcacgactgcatctctctctgcatccaggcgcaggtgagagcgagcccggccaggccggcccctgttggcaaatggcgagggatggggaggagcccctgccaaggccaagggcagacgttgtaaggcgcaattcgtccccacgtttttgtagctctggactgagtcccaaagagcgtctgtggtcttcaaa

SEQ ID NO: 54274 - DNA, 2053 bp, Homo sapiens
aaatttccattgatctcttctttgacctagagatttggaattatgttgcttaatttccaatatttccggaattttctggcttgtttgggttgatttctaattttaattctattgcggttagagatgatactctgatttcaatcctcttaaatttgaggctcacactgaggattaagtataaaaaaattttttttgatacctgtttcatggactcgcctcacaaacttctgttttaaggtggggtaattatagtgcgttcagggatggatttttcttctgctttggttatgcatagagtgcactgtggcccttcaacactatactctgaaatcccacacagtattttcctcatctggaggtcctataggcttacactagggaggaggatccagttcaggccagcgtagtcttcagctgcgccgtgggactttcgggggagcgcctttgccctctcagaacggctgggcggaacggtgggtttgtgagccctccaggctcagggtgggtcgctcaggggccatctggggactttgggaagcaatgaaagttgtaccctaggatttttttctactggtcttctcttcagaggcgagaaagccaagttaagaaaacccagactcagaaggaggtggagcgggactgcgttcaggcaaggtggcagaacgcctcgccgtggacgaagagagcacatctcttcttgcgaggcctaaggaagtagggctcccactcgcctcggcaacccaaggacccagccaaggagagagcctccagatgaatccttcctctcctccttccttcccagccgctcaaactttcacaaagaggaactgggtgcggtaaagaggccggacacggaaccgctcgtccggtgaccgaagagacggcgaggaggagcccgcgaacccgcctctgttcaggccccgcccactcgacgtaatttgcccgcccctctccaccctccgaagggtggagcctgaggccccgcctccaagcggcctctccccggagtgcctggcggccagcagggcggggcaggaggctgggagagggacgggtgcgggggtgggggagaggaagggagcggtcacgtgtgaggggcggcccgaggtcacgtgacggagcgccggagcggagggagccggggctgggagttctcctgagggaagaggagtggagtaggggggacgcggcggcggcgttgacaatggtgagtgcgcggcggccagcgcgctcgcctcccgccctcgtcccggagcgcgcggcgggccggccaaccgcgggccgggcgtcgccggaggaggggacgggggagcagggcggggagcggggttaggcctgtcgggccacccctgggtctgggaaaagctggcggcgccacctcttcccggtctcggcgaggcccgagcacctacgggcggcggcgtgctctcctggccatgtcggagcctctgcccgcgttcttcgactgcttgttggggctctggctggggactcggaccccgcctctgcgggggctggtcgccgcctccccttcctaggtagccagtccctgttctcctcccgggcagcctctcttccatccaggtggggcgacccgggagccccccacctccggactcttcgggggacttgggcactcagtgtgtcacgaacttgataaactctgatattttaaaacctgactatggtgacattctttgatttcatgaccccagttcaggctttctgttgacacttgtaaaatgggagagaaaaataaaaggacgttggaatgggggatatctttaactccagagacacccgtttggtgcccgccgttttaagcattggctctcatttccgtccgcaagctatttcgctgaacttaacgctctgggttgttgaaacggcctatgaggcagaggagggaggggaatcagtgctctcaccacagtccgcggaagcactagcctgggcattgtggtatttagctgggtgtcggcagtctctaggttagatctcattttacccattttctggtagtagtcgtcagttctcttcatttagcgcctac

SEQ ID NO: 54275 - DNA, 919 bp, Homo sapiens
attacaggcgtgcccggcctgacataatttatattaaccaactcttgagatacaattttgagagccaaacctgggaggatgctaaaaagtcctctggatattatagggattcctaagtttattaccacatcattacaaggtacgtgggagcgacctttggttattagctatcacaacagcagactcaacctatgtaggtaggtttcttttactttgtctttgtgggcagatgatttatgttagctgcactcttgtagaacttgagtaataatgacactaaactcttgtgtcttttaatgttgaaaatatcttcatacaccaaatatttcaagtattttttgtgtgtgtttgttttgagaaagagtctggctctgtcacccaggctggagtgcagtggcacaatcatgagtcactgcagcctcaatctcccaggctcaaattatcatctcacctcagcctcctgagtagctaggatcacaggcatgtgccactaattttgcaccacccagctaatttttagaagagattacatccccctatgttgcctaggctggtcttagactcctgggttcaagcaatcctgtcgccttgggcctcccaaagtactgggattataggtgtgagccactgagcccagccagaacagttaaccagggtaattattccctctgaggtagtcaagtaaaagtttgattccttatttgcatagtgaaatgatgaatacttttttgaaaaaaagaacactaaacaatatgaataatcaaaatggttgttgttggtttttgtttttggtgagccaaagttttatttattcatttgaagtattctctgatgacatcctggcctgagactccttgccatagttcttaattactgcacaactgcaaacaaccactttacggggtttcccccatctgtc

SEQ ID NO: 54276 - DNA, 2590 bp, Homo sapiens
tgatgtttaaaaattattttgtgaatcaaaggcacgtggcaaattgttactggaatcctattagacatacagtattgtatattacataacacgttccttcaagttgtaagatcttaatgatgtaagtataaagagatgtggatggagatgctaaacttgtgaattttttttttttttagacggagtctcactctgttgcccaggctggagagcagtggcccgatctcggctcactgcaacctctggcacccaggttcaaacgattctcctgcctccgcctccctagtaattgggattacaggtgtgcaccaccacgcccggctgattcttgtatttttagtagagaggggatttcaccatgtttgccaggctggtctcgaactcctgacctcagatgatccaccggcctcgccctccctaagtgctgcgattacaggcgtgaaccaccacgcccgggttaaacttgtgaatttaacatgttgcagcctcacatgagaacacggtattcaacaaatgcaatggaacgaaactatggctggggtacagagcacgtatttttgccatgtggtcacaactatgtggtcatagctgctaggatgatgtacgcaaactgctcacattaaagcaaaagtacttacgtaatacaaggggtttaatagtgcaacaatatttcttagcaacatttctgaggggcatatcaagttattatcgctaacgttatcatatcaggaaatgacggttaacaatgcaagaaacttttgggaaatgctatttagtgtttgagtccgcaagacatactcgtaccctgagcattcgcagttgctgctccaccacccattctctcactgctcacccacgtgcttctggacacttgcttaccaaagtactagtttgcatcacgtgacacgactagcaggccccctccgctcatgtatgacatcccaaagatgcctgattattttcccttctttagggaaaggtggtcccaatcaccaacaaaacagagaaagagaacgagaattatctctagtggttttgcctgctaatcttctttttccctgaaagaacaccctcacggcacggcgttttccttaacggtcaggcgttttcccgggcagcttacctgctcggcctgggtctttctggacagcaggcgctggaggtgcgcgtcactgtccgccgccgtgtccgcggctgcgccagacagtgtagaacctgcggcctcgatgtccttctcccgtgccctattgtgggctcggctcccggcggggcgccaggctggccaccgggcagccatctgctctgcccttcgtccccactttgggccctttcccggggttctggggcaagtttctgtccttgccaccgcctcctcctctgcctccggtggctccaaaataccaaacacgtccttgttcgtgcccctgactgtgaaacctcagggccccagcgccgacggcgacgtcggggccgagctaacccggcctctggacaagagtgagtgcgggaactactgagggcggcagagggtggtgtctgctgggccgaggctggttgggaggaagctacatccccttcccctggggatccgaggtcccatcgagtgttgtcatcgtgcctctcagtgtctgcctccttcgctggtgtgtgagcccctcaaacggcttaggactgtatctgattaattcttaacgcctcgtcccagaagcggccttttcccttttactgccctgctctctgaatggtttagacactcatgtgttgggaagatttgacttttttgagttgttaggtggacgcccgctctttcttgcattctttgtttctctcccacccccgaatgggatgtggcagtgaaaagccagcggagactccttttaggattctttatcattgaggaggcgccgactcataccacgctgttaggctgtgtggtggttgccaagaggaaccagactcagatccagatcccctcttaagaaacgtaacggtatcgtgggggaggacacgtgtatggaaagtgaactgtaatacaaggtagaacatgacaaggtctagaacaaggtagggtgtccccggctccagagagaaaagaagaggtagcatcagttagtggcagcgggctttgctcagcaaaacttaagtttggatggattcgttgacagagaggcatgtgaatgttttcaaggtgagtttcgggatgattagggaggtaagggagtttcctctgaccatatgaaactgggagattgaggaaatgctatccagaattgtctccaggaataggaggagaaatgtctcacttcaacaagcgacattggtgcctcctattgtaaatctaaaatatagactacaatatgtttttcagagcagaagtacagtactttcactaaacatgtgatggaactcacagtatatgttattctttgacatattcttccagtgttaagcaaggcctttcactttacttggtgctgggagactgtctttattttctgctgttataacataatacctgagactgagtaatttataaacaatagaggtgtatttgactcatggttctgagccgggatctgatgagggcctt

SEQ ID NO: 54277 - DNA, 621 bp, Homo sapiens
taattggtaataaatggtaaaatgatattttttctcttttactcaaattcttggcatttacttcatatggtgagagcttagcctgaatgggactttatcgtgcaataacttaagaaaatttgtcctttttgaaaaaaaaaaaatcagcttatgattgttttttcttttactaaaaggcagctggtcttcatccaactgctgagcagattgaaatgtttgcctaccatctccctgatgcaacactgtccaatctcattgtaagtggaaactccctttcacatctcccctaaaaatgttgatatgtcaggtgattactggttaacctcatgagcatgaatggatagtctgcctttgagaagttgctatttataaaatttattttacaagtgaaaattttttctcaaaatcttttgggactttagccctgaggaatttcctctcagtatttcaggtggggaaggatatgagggagtgattaaagcaagcctttatggaagtttgttctggattaaagagattgtcttttatagacttgagtatgttattcattgttcattttaattcacttaggcagtccagtaatttctgtctttttttccccaaggatatttttgtagactt

SEQ ID NO: 54278 - DNA, 2382 bp, Homo sapiens
gttagcatttctgcttcatttgtggctgctccgatagagacaccattgtgactgtaaccactggcagcgtttggaagtctctacattggttttcttattatggaagtttgctctcccacacagtttctgattcttttgcagcaagtggaataccagcaggtcacactgatttatgttatgacgacttaactttggacttaccattaaaaagaatacagggcagaattcaagagctgttttctttagtaacaggaatagaatttccataaaattcccaactgttcctttaattccagtacatggaacaggtactttctaatggtttaggatcatgccttactgagtggactgaaaggtctgcacacattttcttatcccaagagaccaagttgggtgagcgaagaggggtccccagccagggaaaggctgagcttcaggagatgcttctagtgtgcccactgtagaccacatgcctttccttgtgtgataatttgctttctttctcactgtgaccactgacatagctatgaagcttttacagatatgaatatagacttggacctttacctgcagtttaagaaaagccaaagtaggaccccagggcctgtgcactttccactgtgttagaaagagcttagggccatttttccagctgaggccccaagtctccccgtgccttgtttccagcctagccagtgtagcacagcgggcaagcaagaactctgcagctagactgcctgcgttcaaatctcgatttcactgcgtcccagttgggctctgtgccttggtttctccatctgtaaaatagggagaatgacagttactgtggaattaatatcgtaagacatctagtaaaccccatggggaagtgtttgctaaataaataggtaaattttgctggacttctagtcctcccaccatactcagtacttaaagagaaacagaaattatctttgagccttgccaaaacggaccgtgtagattaaagtggagctctatgaaacggagatgtgtctacagatgggagagtttcccttcttacatggaagatttgggccagatgggtgatacgctttaactaaaatgtcacttgtcagtgtcggccctcaaatgggtgttcttaagcaaaatccaactacttataagatttaaacctagatatccttgaatagccaatagaactgtagtaagggtgaaaaatcccaagacttgaattggagtaatcagatgaggaatgataaaataacctaattattttgtcttgattctataaagtgagagggctgagctagatgactccaaatgcatgtgatctctgtaatcattaaacttcctggtttagtcaccttactcaggcctggaatgtagacgctaatgtgctcagattaaaaagggaatgatgcaatagatgaaaatcctctggtgtcatttgcctgattaaaattccaaaggctgcctatctgactcacacaagcaaccgtgagattacagagatctttggttatggtttgcatcttttgaccactggctactgtaacctcttatccctatgtcgaacaaatcaatgacagttggttcatactgcactgcccaggttacatttttttttttttttgaaatggagtctcactctgttgcccaggctggagtgcagtggtgcaatattggctcactgcaacctccacctcctgggtttaaacagttctcctacctctgtctcctgagtagctgggattgcaggcacccgccaccatgcccaggtaatttttgcatttttagtagagacagggtttcaccatgttggcaaggctggtctcgaactcctgacctcaggcaatctgcccacctcccacctcagcctcccaaagtgctgggattacaggtgtgagccactgcgcccagcccaggttactttttaaatgggggaattaaatgctgggtgtggtgatgcaagcctgtagtcctagctactcaggaggctgaagccagaggatcacttgagcccaggagttcgaatccagcctgggcaagactggatggagttcaaatccagcctgggcaagacaagatgtagtgagactctgtttctgaaataaatcaactagtgggggaattaggataaataatgtcatcacttacgggcagatggccttcccaggatgttatcctcagccaatgggggctagggcctaggatgcgcatttcagaataccaacaattccacctggtttggggcactgaatggtttggggaactaaaggttcatctttgtttgcttgtgtaataaaggagcaagctaaaagtcatagtctgagggtaaattgactgaaaaggatggggatcctcaatctgggagacagttttaatatgcttatatcaatc

SEQ ID NO: 54279 - DNA, 1615 bp, Homo sapiens
cctgcctcagcctcccaagtagctgggattacaggcacctgccaccactcctggctaagttttttgtatttttagtagagatggggtttcaccatgttggccaggctggtctcgaactcctgacctcatgatctgcctgcctcggcctccccaagtgctgcgattgttacaggcgtgagtcactgcacccggctggactgagacatttcttatctgtgacttccttctctccagcagtgattcccagtgagcactggtgacttcagttcactctttctcaggaatattttttcctgggtcactacctgtgaactaaagattttctggcttaacactgtgaataggtaaacatttattgatcattttctgttaaccatgggctattagttaagagatctgatctgtcacaaatggaagaatctgccccaacattcttgaaatcccattgaccaggacaatgtttagttttagttagttcagtgcttctgaggagcagggggtcacagagttatgccactggcataaaaaactaaagagaaaagcctgggactggaaatttgcagagcagctccaccggttgaaagttggctttgtttagtgcccaacttcgcagaagattttcctcggctgagtgggcttggcagagccccggcttgagagggttgcttagcaatgagatttggtggcacccaattctcaagtagtcaagcaacccatcaataccctgcttccccctccactaaacctcagctaccatccagagcctcctattagacaatcaagtgtgtgccagagggagggaccaaaggggtggggtgggggggagtttaatcattgaaccaagcaggctggaggtatttagtccgcaacacctcgctccccaggaggtctgccagcctggactggaagcgtgcaacactccagagtcgtaggagtgaacactgcacaggaatctctgcccatctcaggagaaaccaaacttggggaaaatgtttgcggtccacttgatggcattttacttcagcaagctgaaggaggaccagatcaagaaggtaaggaggacccacgaagctgagagatgcccagctccttcttcacggacaaaactgattcccttaaaaaaaaaatcagaagggagtgaagagagcttattagaaaagatactgggagcatatgaccagtaaaagactcactgagggaagagggagtaattctcccacactcctgggcattgcattactgtcctgaaccttacacttcactcggaacttcctggcaggtattggatgcggaagcgggtgaggagggtgtttggaaagcttgaagaggattgtgtttgctgtaagggatgtttgctcggaaaggccacaaaggcgaggagaatcattttcaaagaagttttaagaactgttggagcagaaggctgggcgcagtggctcacgcctgtaatcctagcactttaggaggccgaggtgggcggattacctgaggtcaggagttcgagaccagcctggccaacatggtgaaaccccgtctcaactaaaaatacaaaaattagctgggtgtggtggcgggcacctgtaatcccatctactcgggaggctgaggcaggaga

SEQ ID NO: 54280 - DNA, 1020 bp, Homo sapiens
aacagaatgagactccgtctcaaaacaaaacaaagaaagagagagaggaagtgtggccccttacagccctcaggtacttggtgggataaactcccactaaattctattcatttagagagttgagttagaggttgtagcaaatttaaaaacattataaagcaatcacttgttgattagattcagagccctctactggctacttaaggaggcgctgcctaggaatccactttcttttgttatctgcttagtaaaggcacaagttgcaccatgtctctcccacccccaagggggagcctttggaaccctgaaacctttgattctgcaaacttatttcatttccttgggctcctttgtgttggttaaccttttgtaccctaggatcatgcgggacatgtttgtccaacagccctggtgcaggctcaggagcaccctgtgatgggaaatgcagcctctgctgatgggctccaggtccttctggaaggacagtcagcctttttcaatgccgggagctgacctccctctccctgtgggaggcgagaaagttggaagcacttttatagccaccttaagcaagtgccccaggaagtctctggggtagtgtgggagactggtttatggctgctgggctgagtcatggttctgagaacactcctcccaacacgtggtggaaacacacctggtcaaaaggcacagctcgtttctctgcggtcaggcagtgagtccccttcttcgtctctgtgcttcctgcctctagaattgtccagatcctgggccagcggtgcctgcaagggttactactgagaccctggaacaatttctaaaaatcttcccataccagcatggaaacaaaaataaaacaaaatgaaaaaaacgaaaatagaaaccactctgacagattcttttccaattcaatatattgacattatttgacctattgatagcaccaggccagacctggtcactgacctgcagattgttcatccacaggagaactgggaggttttcagtgtgtatttttca

SEQ ID NO: 54281 - DNA, 396 bp, Homo sapiens
caggagttcgagaccagcctgggcaacatggcaagacctcatttcaatttaagaaaaaaaccaaaacacccaagctctataaccttcacatcctcattgactgattaagtgcagataatgatatttgcccttctaacctcaccaggctgttatcaggagaaatgaagcaataaatgagaaattgctctgcaaactgtcaacgttatgtaaacattgctattcagagtgtgctcccaggtgcgggaggtacagctgttatctgttggagatcactcctgaagtaacattcctagtgccatgggtcagatgggaattggtacagacattccaacttagaaggcagcctttattgtcttataagcaggtgcgtttcctggggtggcagcctggcactgg

SEQ ID NO: 54282 - DNA, 1219 bp, Homo sapiens
cctgactcccctaacattctgggaagttaatttttttttgtcttttttttttcttcctttttgtggagaacggggtctcgctatgttgcccaggcaggtctcgaactcctgggctcaagctatcctcccgcctctgcctccctgagagctgggattacaggcgtgagccgccgcgcccggcaagtttctttaattttgtatttggccaaagaccaaaggcaaatccgcccggctgggaggaacgcggtcaggctctggccccagacttcgcgcgaaggcagcttccgcaagcttctcccgggcgccctcttgcggaccggccttgagaccgtaagggcggctccccagggcggggtcaggccccgtcccgcccccgtcccgcccccgtcccacccccgtcccaccccgtccggccccgcccccatgaggcctcgcccccgccagccccccgccccctccaggccccgccccctccaggcccccgcccccgcgcccaccttcttcatggcctgcaggtggcgcaggttggcaccgtgcgcctgatgtccgggcactgcgcgcctccagagcgtgaggccgatgacgctgtaggctacaaacatcaccgcgagcggcaggaagtagatgagggcgatcaccacgaggtggtacctgcagggagagccgaggcctgggcagcggagggcccgggggcgactccgaagtctgccagcgcctggtcctgggaccccgcgggcactgtggagccgcccctgcgggcccaccctgggcgcctcccagggacttggtttgatttaaacaaaaataaaggtggcattgggtagcctgtgtgccaggagacggcttccctgcaaaagggacgccagcagtagccctgcgtccttccatatcacatccttccacgtgatagacacgtgtcaaaaaaaggaaaagtgaatgaaacaaattaagaaataatttgtttgcaatttaaaatgccattaagcacaaaggaggcagtaaaattatcccactcccaccactattaacattaactattaatatctggcatattttttccagaatcatatgtatgaatagtagtcacccctgatgggagtttcactttcccgggtttcagtaacccctcccaactgcggatccaaaataggggaggagagtacaacaagatattttgagagggagagacctcattcacagaagtttaattacagtatat

SEQ ID NO: 54283 - DNA, 953 bp, Homo sapiens
caaacataacactggtcatctgagcctgcgcccgcccttcctcccaggccagggcgcccccaccccctgggtttttcctccgtggacgccgcttccttttccttcttttctccctcctccttcttctccttcttttccacgtgtcttctcctcccatcctcttttctctccatccccacctcccactccttcccacgccccatctccccgacccccagcaccccgcgccgcccccaaccctgggccgggcaggtgcaattcctcaggcggcctacagagggcgatgtgcgccgccactgggccgcgcccctccggcgcgcgcttcctgtgaggtcaggtgggaggaaaccgcctggagccgccgggagtggacgccgccgaggcccggagtcgcgcctgcaggtgagtcgccgcgccggggagggagcgcatccctcgctgcagcccgggccgggacttggagccggtgtcgggctccagaggctggggctggcggccggggcagcgtccctcccgcccccggcccggaatgtcaggtgcgccgcgggccgggcgcgcgggtggcccaccgggcgggggcgcgatgacaaagcacaaagggactgcgcgcgaccaccatccgctcggcctgcgccagggccagcgggcttcaggagggggacgcgcctgtcccgggctccaggctacgggcaagaccacagggctcctgacctttttcggcatacatgtcaccagtgctatctggaatgtaggtggacactgaggctcatctcctgagaatgaatggcctttacccagactcaaggggaggcgtggaggggccccgcagtccaggggtccgcggagtggagcctttcgagggccaccgcagcaaccccctcccatattttgggaaggctgggccctgcgcccgttagccaaggttggactggtgttccctgcgaagtgaggga

SEQ ID NO: 54284 - DNA, 3326 bp, Homo sapiens
ttgggaggctgaggcaggtggataacgaagtcaggagtttgagaccagtctggccaagatggtgaaaccccgtctctcctaaacatatacaaattagccagttgcagtggcgggtgcctgtaatcccagctactcgggaggctgaggctggagaatctcttgaacctgggaggcggagcttgcagtgagctgagattgcaccactgtactccagcccgggcgacagagcgaaaaaaaaaaaaaagaaaagaaaatatccagggctccgggggatagcccttgctttccagtgttcctaaaagaagataaagtcacactatcaaataacaaatgcctcatcaaaacacaacccagagatcagcccagttcttccaacaagaaacaggccagtcatgacagtattataattatgatgacgaggaagggaatgctagccaaccactcccctccccgccccggcctctatcaggggtaagcccaggaggcaggagtgcagagtggctgagggcaaggcctctgccctgttggaatagcctgggcctgccccttcctagcctgtgagctgtgacggggattcagtgagggtctcaggctgtgtacagcccaggacagtgcctggctcagagtgagtgctcaacaagctttaagtgtcgttagtattcttgctgaaaacatgaaaactaaccccagagctaagcagtggaattctgcccgtgttgggggtgaagagaccaaagttcagaaaaattcattaacatgtccaggatcatacagctggaacaggggaacaggcagggctgagctccaagtccaggcaggctgagcccagagccctcgctttgaagctgttttatatgactccttagcaggaagctactcagggcggactgactcaagagcattgtttcctggaactcctgagtccaagagctgggggaatgctggaaacaaggagaaggaaggcagagaatgcttgtggaggcagcaaggaataaatagatgcaagaatattggaaggtgtcataagagggataaggaaccaatcgcacctctgtctcgccccatcccctctccaggtgagaagtgctggctctgtgtgagactttatgtcagacaggggctcagtgctgaccgttcagccctgtgcctagggacagcccttcagcctccttgacgatttcctgatttagtctgggtctgagggcacctcctcatctggccaattcagggtaaaagaatttggaaagctcaaacactcaagaaatttagttttttgttttgttttgtttggttttgagaaagggtcttgctgtgtcacccaggctggagtgcagtggcacaatcaccatcactgctcattgtggcctcaaactcctgagcccaaatgatcctcccaccttagcttcctgagtagctgggaccacaggcgtgcaccaccacacaagctaatttttttttttttgtagagacagggtctcactatgttgctcaggctggtctcaaactcctgtgctcacacaattttcctgtctcggcctcacaaagtggtgggatgacgggcatgagtcactgcgtctggccaagaagcttagtttttaaaataacaatcagtaaaataggttacaacttttcagtcaaacctgtcaggtgagatgaaaattcaggaaagccaggccacattattttcagttaagttctgtgaaaacttctgcaaaatcaatcagaaactccgtcagttcatctcaaagtcctgggagtctagacagaagttcaggcttcgcatgtactggggtggttggtcggaaatttggtgaggtcggtccaaaatccagcaaggtcaatctaaactctggatcagtcccaagtttagtgcggcaaggtgaagtccgagcggtgtagtcaaatatttagccagattcatcatgacgtcaccccgaccatttggggttgggtaggccatcgggtgtgggactgggtatgtgatgggcagacagacaggcagaggattggcagtgtgcgcaggcctgggagccaaagtggagactgaatggtagtttctgggggtttccagaaccacctccagcaggagcccagctggggaaattgtgaggctgaccaagagtagtgcgtggtgctcccagacatgtccctgccacttccttgaggagacctgaaatgctactctgttgacccctacaaccccagcacattgctgagctgccagccttctgacgcctaccccctgtccagccactgggcagccagccagcatgttttggcctaaaggacagcagctctgtgcacacacgtagcacacgcttgtccccacacggcctgcctgtctgttctcccacgctcctttccctttctggccagagctgagcaggcaaagccaacagctggcctggtgccctggtgcgtggaggtgtagctgggctctgacccagctcctcaaacaggttccatatggccctcccggctgccccccactccccttccccaccttgactgtttctgagattaaaaccctttcctggtttcccagcagtggcagggaggggctgccacgctgctgttggggctgagccggtgtggaatactcatcaaatgttagctggagggggatggatttcttgggcagttgggtgagggggcatggaggggaacacatggcttgagcacaggagagacctgttggcccctgcagcccagctgcagcctctggagaagctcctgagtgtctgaccttggcaacaggacctcaagacttcagtgggaacagacagccttctgggcctctctacttctctccttgtacccagaattcctcctgcagctaagaggggtgtgatgaaagcaaagaaagggacagctgggatgggagaagccctggggggagcagggaggctcccacatgttgtaccctccggtaacactcaggccctggacagtcagcagaaattcagacatggcattggaatggggtcctggggcagccatccctgctgagcctggtgcctgccctttggtagcagggctgtgggaaagccttgggatgctgggagcagagtaatagggtgtggtgagagtaggggatgctccaggagcttgggactgcagctatctacccctggtactgaagtatttgaatattttaacagccagcttggtggtcctggtggcccccgctgaaccttagccttaggttagagcccatctctgctctagctctggcttcttccctggaaaggcttttgttgaccgtgaaacctgaagacatgcacacacacaaacatgtgaatgtgtgtgtgtctgcctgtctgcgt

SEQ ID NO: 54285 - DNA, 902 bp, Homo sapiens
ctaaagtaagacagggtgattctaagcctcgtaaatgttgattggtgaggctggctcttgagatctgccatcttggggcttttaaagagtgaatcagcaaggtgtgacaaacagggacccggctagctgtgtgactgctcctttctggagcccagtttcttcaactgattgatggtaatattcactataaaattgtatccacacatgagcttaattaagatattaatatagtcatttttggacacaccggaaagttagatgtaaatgccttggaatggagactcccaaacttcctctttccatagcacccttagtgtcacagtaatttttttattacttatgtgcccccaagaccaaaagaaacaccaaagagatccattattaagtagttaggtctaaataaatcaatgtgtatgtctgtcctaacaactttgtagccatctaaaaatacacataaaggaaaagatatttttattccattcttaaccacagttatttactaatgggatgtataatatgttgggtactgcatggtttctcaaaccttggaatcatatcggatgccatcacctcatttcctggtccacaatgatttgcacatggtatttgctttttatcacagcaaccaccaaaacacttcgcaaagatatgatgtcactgaaaggaatgtagtgggccctaaagctgaaactggtagtgtgcggagcatccggcaggtgtcactgtacttcccacaaaatttaaaatatccctgcagccactctgtgaattggcgatggtgcccccaggggcctcagtgcaaggtttgggagcagtggcctcaggtattaactatggctgtattcagagagtaaacttttggataatctttacttctttctttctactttttcctcgtccct

SEQ ID NO: 54286 - DNA, 574 bp, Homo sapiens
ccttcctccctccctcccttttttttcttttattttcttcctttcccccaagagtagaaagaaccagggaatataaacaaaaacgctcttagaacaaatcaggccatcttgttcccaaatcccaggaaactcctagaagctgggatctgagcaaagggacaaacggagctgcaaggccagtgggggtgggaactgggctgagtcagggaaggtctgtgggttccgcggagcccccaaaacagctgccttttggggtccagatgtactaccagaaggaaggtccaagagaggccagaggggagggctgaggctgcctggagctcactgcattcctgccagggtgagtcactgccaggacgccctgctgtgccgatttgcagcaacagccttggtgtcccaggactcttgggccccctccagataggttcctccaacccacaaagagctctcctttgcacatcgatgcccaaaggactgtcataatcactcagcccatttatggctttgttttcttccaaaacgtagccccctgcaaggaaaaagccccagccatatcaatcatttactctttgat

SEQ ID NO: 54287 - DNA, 606 bp, Homo sapiens
aacagacagacaaacaaaacagccctgggctggggtgcatttctgcctcctaagatccaggtcgcacctactgtgagggaccacctcctgctccacaggttggtgggccaggaatttgtgcagggtggtgaaagcaacgcagcaggctccccctgtccctgttcagtgggggcctggctcatgccttgctccaagcgctggtgtgaagacaacccttgacccatgactggggcactgccagggcatggagggaggcaggtaatcatgtgggtggaaagggggatggtggagtgttggctgcaaggcctgggctccagcctagctcttcctaacttgccagctccctctgggccccaacctgtcctcttgactcagatccaactaatatttattgagggtttgccacgtggttggcactgggctaagcactttgcatgactgtctcaatcctcagcgtaactctgtgctccaggtcttgctagaatcccctttgacaggtgtggaaaccaaggctcagagagtctaactaacttgcctgaagtcacacagctgaatgtccaaaacaagatcgaaacacagttctcaaattccttccctccctttttt

SEQ ID NO: 54288 - DNA, 2221 bp, Homo sapiens
tataaattctcagctctcgtggctgtggccgccctatgcactcttcccagtggtggacacaaacgttaatgtacttgttattatttaaggacacaaaaatatagaaggtggcatttttcgctttccccttcgaagactctccccagagctgccagatgaacgcccacgccaccttctcccaccaaaggtggatccagctaacaggagactggatcgcgaccatagcgcgtttgtgcccagttctggggaaagcctcatgttagcgagtggccctcggctcgtctcgcagatcggccaagtacgcggaggccgcgcggtttcaccattaatactcctgaaggacaatagctcatcaagccccaccgaaagccccggacccgtcgcggagcctgggctggcgggggatgaggctgagcaactcctcctagaggtggttatgtggagaaggagcaatcccttctccctcctcctcctccccccgctactatccgcggcccagagaactgccgcttgccgccattgacacgcacagatagaacccaaagaaaggcaaagagtcctgcccggcaccggcgccgcgtgggccaaacctgcgcccgtggaggggcgcgcagagggcaccgggcgccgggagcaggcggcgcagcaccaggtgagcccgccatggcgatggcattattgtttagggtgctccggggtctggaaacaaaacgcgccgccggggcagtgcaggggccggagagaaccacctctgcctctcccccgagcccctgcgggcgcaccctcgatagccgacccaccctctgcaaaaacaaattcttaaatccagctgcccaacttgcttccttgggcgataaagggggggctgctaaagaagtggtcaaattcctgcggccagcgaggggccgggggcgtcgagggtactgagaggggaaggaggagggatgcgaggttcagcagcgggccccaggcgaggctggacccggaggaagcggaggtctcctgggaatgcggagtttcgggcgcaggagcgggaggacggaggcgcccggccgccgatgggcacggggcgatgggtggggggctgcgcagggcccgagggagcccggggagggccgctcgggggcctctgaaggtgcccgggcagggcgccggcggctccaggctgacaatggagggggcgcggagcagccgggcggaggttagggacccgagtccgggggcgggccgcgccggggaaggtcaggtcggggacgccgggtggcggggcgagggctgggggttgctgcgcggacacccgggcgccgcgggcgggcgtgcgccccggggccggcgcggaagagggcgcgaggccgggcactccccttcggttccctttccggggcgcccggtgccgacgcgcgctgcgctttcaccgggaaatggcggcccggccgtggctcgcctgggcagtctggctcccgctttgcgcgggaaaaaataataataataaaaatatcgaaaaagggaataaaagtaaactggctgcggcgcaggaaagggctctgccgggcgccggacgccgtgcgtatcgctcgcggggcgcggcggttggggaccagccctgcctcccccggctcccagcctccagccccggcgcacctcagccccagcccggccagccccccggatcgcccgtgggtgtcctcccccgcctttccttgggggggcgccctcagttcttgccctctttgttccttacaacaatggccaaaggggcattggttccccaagggccaaacgagcttcctccaggagtttcccgtcgcgtgcagtggaccaccgtgggcctgactgaggcctggtccttgccagggttttttggcaacggccctggatgagtgaagggatgaaaggcgcgagaagaaatgggctgagaaaccaaagtgcggggccctgagtgtttgaggggacgcgatgggaaccgtggctccgctgccctgattttaagggcagttaccctgtcacagccacgctggaactgaggtgtccttccagcttctgtccacctcagaggaattcaaaacaagggcccagttctaagccccacagaccccaggatcccctaggggccattagtccaccgcggcaaatggtttcctcactttgctcatttgtgtttgttttgaaatccaattgtcacctcactgggctgcacagttgctactgaaacggttcaata

SEQ ID NO: 54289 - DNA, 758 bp, Homo sapiens
gttactattgctagaagtgtgacttgtgagaagtgagggatttgccatagaagtccccaccacttaacagaattatgatcttcccacaacatttgcagtagagtaaatttagtgctgtataaatccagttttcctattgattgccaatataaggatttggcaggattaataaaatccccaagatcaataaagtcactcaagaatgtaacaaacttttatagttcatgggactatatttgccataataacatttgaaactattaatgatgattaatgtttttcttgtttcatttgctttgaatttttttttttttagaggcagggtctcctctgtcacccaggctggagtgcagtggcactatcacagctcactgcagccttggaactcctgagctcaaatgatcctcccaccccagcctcccaaagtgctggggttataggcatgagccctgtgcctggctaatgattaatgttattacaaatatttaaatggtgaagtccatgtctcaaggatgtccagactaaacatccaaaagagataagaactatttgatgtagattttctgtgatgtattatctttttctctctaaggaaaaaaaaaaaaaaaagtcccaccactgcttttgcactagaacacataatcaagattttctttcttatagattgtttcaaaagagttttttaagagcccagttgcatgatccccaagcatcatctgcattccctgaattgtgctgcatgctgagtctctgccttc

SEQ ID NO: 54290 - DNA, 678 bp, Homo sapiens
ggactgataatttccagaaatgtaataaaaatcactagaaaaattaaaaagcaaactacaagccataattttttgttatcagattcaacagatatacaataactgtcagtttgctgtgaaagtttctagatgcttgctatacttctgttgtcactgacgggtaactaccagttcatgggtgagccatggtcgcagaccatgcttggggtagtgttggtttcgaatctgcagaatatattagtggagtagtacgtgtctgttctttgcagataaattaacttatattgattgggaggagcatggccagacatactttactgatggaatgtatgtgcaagcttgtggagaccactggttcatcattaactgggtctagtctttgcaatgacctttgaacatcattttctcaagctgcgctccccacatgggaagctttttatcctgtgttgtgtctggaattccagagccctgggcaacatccctggtttcaacttctgtgtcccttctattttgctttacttcgttttgctttctgtacaacatcacaggatgccttgttaacctacggagaaatgctctacaactgaaagtgggaaaagccaattaaatggtgtattacgcagtttctttaggaaagcggaggccacatttaacagttagaaccgtattaagtccagg

SEQ ID NO: 54291 - DNA, 1220 bp, Homo sapiens
ccacatcaggagcacaggatgctgcccagccaacgtctctatcactgccttatctccagatctaacaggtacctgatgaggttaggctataacctaggaaaccttaggaaataacccgcggcattttctctcctatgtcccagccgccgtcagccaatccagtggactcgcagccaaatttgtcatccactgtcacatccctcagtggggctccgacaaatgtgaagaacagcttgaagagaccatcaaaaactgcctgtcagcggcggaggacaagaagctaaagtccgtcgcgttcccgcctttccccagcggcaggtaagatgcagttcccctgagttgattcctccggctttttccctggaaatcagctgctcccccacttacatctgatctgggtgttgccaagggctgccagcacagccaagtatgctgaccagatgacagggcaggaaacccggttttcatccttcagaaaccatggggaagcgagcccactggctcctaggcagcaggtcttccccggctggggccagccccagtgcctccttgatgttaaagccccaggaggaaggctagcccaggggaggagcgggaggcagaggccagctggtgtgttattttttgagagccttccaggttcaaagtccatattcccaccagctgtccatgtccaggacacatgatcagaaaacgccaggctcgaaggccttgctactcaaagtgtggtccataggcagcagtgaccgatgtcagaatgcagaatctcaggccccccatctccgacctctggctccagaatccccagagaattccgttgctgctctgggagactgcagagccaggagttcgaggctttgatgaatacacccagagaagtgaaaatctgtccccgagtgattgctgaaaaggagactgggcaatgactggattgtcacagatcccagctgggcattgtttcagatacataatgaggatatctgctgtcacataaaacatatcctttcccttcatgcccctagccaatctattgctttaattttgaacaccctctcaccttgagagctgtcctttataatatagctatggtttatagctgtgtcctgggaagcccaagaggaaaataatgagacctaggttcctgctgtaatcacacatcaacctaggcaagcagcattgagtctcagcattccaggcccagagatgctgtgagatgcatt

SEQ ID NO: 54292 - DNA, 2825 bp, Homo sapiens
taagagagcggaacaaaccctgattgtccaggaacccctcagtaactttacctttgctccctgccacaacacacatacacacagacacacacacacacaatctgatttacacaaaaatttgctcagtcaatcctgttttctctgccaagagcatccaccctgatctcaagggtattattccacaataagcagcccataggactactgaaaaaccaggaagttacatttatgccaaagctgttcagaggttgtgcctcagaagacacacagcaggaaccgtgtgggctctgatcaaagcaagaatgtcatcccagagttgctccagtattgcttcacaaatattacaaataaaacacgatgctttttgagtcgtcatggctcacacaaagggtaggtttcaacatcagcctctggagagccacattcccagagtggccgtcccggataagaaggccactacagcacgactcacagcaccatggaggtttcctccacctgcgggacacagcaggatggagacggttgggcggcctcccttcctgggacactccatggccagcccctcagggactacttgaagaacagaacccccaaaagaccagtttctgaaaagggactcaaagtctaagggaggcagcctccttttatccccaggggagggcagctctggggcagacaggttcatctggatgtcatattcactcccgcacagaaaacctaggccaagcaatttgtccatcctcctcagagccagttttgtggtccccatggtctgcccaccacctgtacctggacgctggcttcatttggccaccagacaaaagtcaggctggccctggagtccaccggcctgcccagcccatcacttctgggctaggtagtgctaagcctgcccagcccaccctggctggggctcagtgccctcttcttggtgacacactgtgctccttggagaactcctctctaggtgctggggtgagggcaggtgtgatctgagatcccggggctctctggcaggtgcatgcacgcacactggaacctgatacaggcttttgaacacaggtgcacagtccagaaacctgcaagtcccatcccaaactatatctgactctctgccctatgcctgtcctcctacaggatcatcagcccccaagagacctcaccactccccatcctcaccttaaattccagggtcaaaaagactctccttgtagggaaaggtagggtgtgttgatcaggtggtgttggaaggagagccccaatataggccactaattcagttccaggtggactgcacgcgtcccatcagagttagtttactcaccgctggtctttgtccctgcagcacccagggcttcgggaagggagaagcagacttcctagtgctgcaccccccagctcccccgagcctatgggcactgggttgactccagtttctttcctcttagagactgaggtttctccctttcctctcacacctgcttctgtccggaccggccgcttctacccagcggaccctcggacggtcctcgcaagatccgggttacacccgccccgtgttccctcttccccggttcgcccttcccggcctaagcccatcttccttaggaaaacttagcagggatttaggggccaaaccaggagggtggagttttctttgccctcggccaggagcacatctccctgttgcgttttttgggggagacagagaggggcgggcctgagtcgagtatccctctcctcgcagcgccacaactgcgcgcaccgacctccccacgccagacgcggcgtgagccaggcctctaatccgctcgcccctcttccgggtcccggtcccgcccggggcgcccggggtctcgagagcccgcctggcggcgcgatctcacctgtcggccgcgcccgcgcgctctcgctccggctcccgctcccgctcccgctcccgcttggtcgtcttcccgagttactgacccgaggcgctcccgggcggggcgtgactcagcactcgtgctggtccccgaccccgcggcaacgccccggccaggccccggaaacggtcctggcacgctggggctggtctccgaacggcccgccggactaaccttgaccctgagcgaacggccttgaactttgaaacaaatgctcccatggccagatgtcgcctctccggctcctgccagcacccgcgccccagtcctgccgagccattcagacttggtttaaagtgtcctttcagcatactttaaagcaaaaaagagagagagagagagagagagagagagagagagagagagagagagagagagagagagaaggaaggaaggaaaacaagcatccccctgttcctctgattttctcgaggacacctttaaagccactggaaccttggagagtggggttcccctcacacgttgggcgcactgccaacatccttccttcagacatacacataataattccgcaaaccctgttgagctcctacatttgccaggcactgtgctaggcgttggagggataacttggagagaaaactgacaaggttcctgctttcacggaggcgacagtctgggaaaagacagatattaaacacaccaccaaaaaatacatgtatagagaaaacaaaaaccatgtatcaccaactgcagtaagaaagattgggcatggccaggcacggtggctcatgcctacagtcccagcacttagggaggccaaggcgggaggatcgtttgagcccaggagttggagaccagcctgggcaacatagcgagacctacaaaaattagccgggcttgttggtgcacacctgtagtcccagcttctcgggaagc

SEQ ID NO: 54293 - DNA, 2400 bp, Homo sapiens
ctgggaccttatcactttcagaggagaagcagcagggttagggaatctctgttcaaagggccagagaaccgaggggtatggcgtgcagggctatcagacagtgaagctgcccagaagaaactcagcctttgaggggagctcaaagatgccctgttccggattcagggtgtcccacagtacccaaatccagagctgcttcgagcttgacaccttgccccagattctccccacaggggttctgggtataaaggatgaggggagggttccaggtctctacccactacacgcccaaagcatccgcgtgacacaagaaaggcctgcacaatactcaagagtattagggctggacccagatctgagacctggaaagggatgaagtggcgtcagccctgcgggcttacttgggggtggtggagcgcaccaggaccctggctgcttcccgaggggacacgtgccgacaggtcactacaaggcggggtgccacagccactccggagccccatacggtgccgcactccaccaacactgccgcggctgcccacaggggcccggagtctcggaggggcagaccccacgggacgcccacctctggcggcagaagggcggccagggcagcggtgctgtgcggcaggcggtgaagcgcgtcgcgggcggcgcggaaaaggggggcggcggcgcagagcagcgtgaagcccacccattcgccggccttccaacagagcggcgccaccaccagcgccaccagcgcccccgcgggccgcgcggtgaacacgccgccgccctcggtgccgggcaggcagcgtgcgtcggtaagcagcagtgggccggccacgttgctgagcaccccgcagctcagcgtgttgagaaagatgtcggggcagaaggcgccgaaaggggagccgcagaccagcaatggcgcacccttgggcacggccccgagaggcgacaccgccatggctggcccgcgctcctcctccacctcctcctggcctagccgcacgcccagcagcgcaaaccagcccagcgctctcagttgatccgcctcctcgtcctccgacacttcgtcatcccgcgccgcgctcgagaagcgccactgttccgctgcctcgtccccgaagaggcgcgcgaagtgggcccagaaggccgggcagctcagcagcagcagcagctcagcaggaagccggggctgcaggggacgcccgcgggacggggcaggtgggccgggctcgaggctcgcgcactggggcgtgcacagccctgggcggccccgctccgcgccgcccccgggacccgcggccgttggggcccactgcacgtgcaggcgcaggtcgtccctgcaactgtcgccaggcaggaagacggcgccggccgcggtcaggacttcgctgccagctcgcaggaaggggacgaagatgcccccgtggcaaagcaccaggcccgggctacggctcaggattaccccgctgcagctccacgggcccgcctcgggctgtccggcccgggaggcgctcaccatgcagcccgcctgctcggccgccctcatggcagacccccactgccttctcatggcctctaggccggacactcgggagcttctccgagaaacagcaagctagcgagcgaggacccctacccggtccggctgaagctgcctagcgccacccacagctggaagcgagaggcgcaagctctgactcacgtcttcctcatcgagcccgattggctaagccccaattgacccgacccgattggctgggcttgtaccgagctctgattggcttcctattctgattttttttttcctttccccgccctcgttagtttgtccaaccggtgggacataatctgccccattcccccggatgagccccggggagagtaagaggagtgcggcgtcacgaggaatcagaggagaggagggtgggtcccttcaagcctagtctcgtttgctggaatgtgggaaagggaatagaaatgagcgctgacgtgcctagatttgcccaggccacgacagtacctgtgagcatctgcccaggtctaggcgaccttcagcctctgacccttgggataatatggaccaaggaaatccttggccaattcagtgttttgaaaatttaaaagtaaaccctatagcaatccactagggggcatggaactctcaagattactcctaggatttttttttgctgccaaagccccaacacaaatctccgagaaactggatttgctgtaaattaaattgccctttaaatcgactatgaacagtagctgaaatcaaaaattttaatcatacaggcctatattttacagtgtgcacatttcacataacataaccaccagccaggatttatctaggccagggtccaaatactttctgtagaaggccagaatggaaacagt

SEQ ID NO: 54294 - DNA, 763 bp, Homo sapiens
tatctatctgtggtgttcatgtaagagatcatgatctagcttaaggtagagcattcaatgaatactgcaggaggcattttgaagaaagaattgaagagaccaatgtctaaatgattaaaaaaaaaatttaaaaaagacaaatgagtcaaaactgccactgatttcaagcctgggaatctagttgtcaccaataggaaagctagcggggaaagcagagttaaagagataaagaggaatgtactttgaccatctggaattccaggaaatgttacacaaaattagaataagaatgtccttcattcattaagcaacaacaaagtacctaatgtgtctaatgctttgctaggtgcaggggttttgcaaagaaataagacacagtccctatcatgttagttcatagtctgatgagagagaactataaaaaaatcaataaagacaacagacattggtaaggtgggagtctaacacagtctcagaggtcaagggaggcttaccagaagcagtcatatctgaactctgaggtctcttatagaacattttaaaatttgccgacaaagcgaggggttgaggagaggtacaggtgaaaaagccaggcagtagctacttgtgcatattcaaggatggctaagttgtttgtttggaatatagttcaaggtaggcagtaaaaagaaacagagggaggatcatgaatgatcctatgtgctatgcaaaagatttatagattttatcctgaaaatgatagagaactatcaaaggatattaa

SEQ ID NO: 54295 - DNA, 1768 bp, Homo sapiens
aatttacgcattacttgttatacataatcagggcaactttaagacgccattccaggcagatttggggtagtaggcggctggcttttagctaactctgcttagctgcggggtaaatgtcaaaggtcagccccatggcgaatctccctaagccccctgtcgcaaccgaagccgatggaatcaacaagacaaagatgctcctgacccactggctagaatcgtgaagaaaacgctaatccatgtcaaatgcacataaggaaatttttccatgcagagaccagacaggggaaaaggggaagggagaaggagaaaatacagggttcgacccgggccatcggaagacaaccaagcgctgacttgggggtaagccctggactaggggcctgtagaccaggttcgagcgctcacactcgctaactgcggagccttggccagcctcagtctccgagtctacaaaacaaggataatcataaagggctcccacccgcctcaccgagggctgtgaggctcttccgagacagaggacatggagccatttcgtaaaccggagcgcacggtacagacaagaaactgttatccggcccagcagctgcgagacccccgagcggaatgcaagtggaccccaggcaaagaggacagcaggggacggagcagatctggccaagttgtcccgtccccgcccagaatcagccccgcggccccacagaaccgcctgcgtgtcacttcccccccacccaaccccgccagggccagcctccgctccgacctccccgccttccgtcccagcccctcgagccccaactcccctccccgacgcgaccctcagactcacggcctgaggggctcctccggcaaaacagcggctggctcggaccctccctcagagcacactaaccagcagcacccgggaccgccagctactcgccggatgtacgtcacacccctccccgggacttccgggcgcgtaatgggccccgccccctcacagcgttacgcctctctgccccggtgccgtcccaccagcgactcgggccgcggaggggcgggcataaggcgtgacaaagcgcgctcggggtctggccccgcctcggccccgcctgctcccgtctggctagctgaccgcgcgagacgtggcagcgccggaaccctgggtccggggctgggtcctggagtccctgagcggcctggtacactcgggatcgcggcttcccattccagacgcaccaggaaagtcagaagtgggtaccgacggtgacataggtcctgggaaagatgagttgaccttggggccctccacttgaggtggatccctccaagcttttgctttttttcttccttgctttttttttttttttttttttttttgaggcggagtctcactttgtcgcccaggctggagtgcagtggcgcgatctcggctcactgcaacctccacctcccggattcaagcgattctcatacctcggcctcccgagtagctggaactacaggcgcatgtcaccacacctggctaatttttttgtatttttacagagacaggtttcaccgtgttggccaggctggtctcgaacttctgacctcaagtgatccgctggcctcggccttccaaaatgctgggatgagaggcgtgagccaccgcgcccagctgcttttgctttgagtcgcacttccttgccctggggtggcctatgttttagaaaaacagaaaaacagctaatatttattgtgcacttatgttccaggcagagcactgggtactttgcacgctttg

SEQ ID NO: 54296 - DNA, 2836 bp, Homo sapiens
tatcagttttaaagaaattgacaaatgtaatattataaagcttaaaaaagtttatttctattaaggaaggataaagcacttaaaattggataactatgtagtgggttctaattattagtatttcttaagttccagagagttccacttgataaaaacagttacttcagctagtgccaaattctaggagtagctttggtctcccataacggccaccaaatattaattgcaaataaataacctaagtaaaagcagtgtgtttgttctgcatatatagcttgaagatccacccctcaccttcaaaccagacagtcacctctgtaagcctttcctacagagaaattctggagccaacactatttccagaaaaacagtcccatgaattattagtcaaaagttactggactgtccttgctgcttaattgcaaaattaaataaaatggagagtggggggtagttctcacccttcctggattttacctgatagttaacctttggctagatgtgtaagctttacagttcgctttccttttcctcccgcaccaggctactttttgttccttcaatgcctattcattcgtctcctctactccccgcttccccttccttcatacaccaactcagagttcgaggcacctgcccatttccttccaaataaaactgtaaagaggttacaatagaagcgcctgtggtgacacatttacgaacgcctccgttatcgcccataatctactcctagtagctgggggtggggggagtaagaggataaagaaaaaccccaagtagctttcctccacctacaaggccaaaaaaacgtggtgccctaaggagcgtggagggcgccagcatgcagcctcccggtttccccgtgcagccctaggtgcaggacccggggtaggtaccccctagacgccgaatcctgcaaaggtaaaaacttggcactttctcagtcttgtttccagactgacgtcatctgtttgatttgagggaaacagctttctgtttcataaggagcattcccagcatcggcgctgagggaaaacaggcggcgcagaggcaggagcacgaccgggccgcggaggaccggtccagcgccttcacagacggctcccgatccgggcctcagttttcccgtctgtaaaacgagggggtggacttggctccgctcagcgccgataatctgagctacggcggcggaattaaggtctttaggaagtcactgccccccccggcccggagtcgccttttctccaaactgagcaatcctcttacgggaattatgttacttccaagcacctttctagggtgggtcggtgatttccttttcccaacagaccctgtcagagccagacacctgcaaaactagctgggcccaggttcgggtaccccgaggcgtgacaaagggaccatctccgttcagcggggagggatggccggaggcgaccctcgccgccccgaccggcggcggcaagtatgcaatgtgaggccggccaggccccacaacgcgcccgaggagacgggcccgcgtcggagacctggggccgagcgcgggccgcaccctcccggggaggcaaggcccgggaatgaatgggcggacgggcgcggaggggccacgggccgcagacactcactgaggaagactcggtactccagggagaagggcgcggcgcgctcctcggtgctgaagccgctcatagtgccggagtcctgccgccgccgctgccacagagccaccagcccgcacgcggcgccgactgacaaggagagagccccacgcctgcgcactgcgagcactggaccggcgggcggggcggggagcgcctttaacgcggctctgctagtgttcccacccccgccgggccaaccccgtgcgcaggcgcactccgccaggcccgggtgtccgcactccccagccccgcccctcgggcccagcctccgcgatggcagctagggctcagaggctgggccacgtggctgccgccggcgctggttctgttccttcggctttgggctctgacccgggagggcaaatgcgcaggctctaagcttggactagctaggagttgaccgccgaccacgcacacagggaactcacctttgattctcacacactcctccccgcagtcctattccttatctcaaaaggcgttgataagtcacctgcttccccagacaggctctgcttgcggtcttaaaggtgagcatttttctgatccgtcgtaacaaagttgagccatattactgacacccctagtggctactagtaaggtactcgcttctccactttctataatctctctcactccgttgcttatctgggaagtgaagataataatataactatttcatgagttactgggatgattacccgagttaatacacgtcaaatgcctgaagcagagcctgtatctttgtaaacaatctggaagttgttactgtcaccctccccagtgggggaggatttacgcccccgcgccccccgccccctccatcccccctgccaccctacttaacccacctgggtctccaggggcttcagatggaagcactgggaaggtccaggcgtgagctagagtcccgtgaaggagtgttctcagggacaggctcttctgatcttgatttcctgtttatattccatcatatcaggccagaccccaaaaactaaagtctgattgaggcagtgggaaaatatttgcatcacttacctccccaggaatacatgtaaaagaaaaaaagtatatccacaatcctaaatataaattagcaaattattattcacatttcaaagaatgcctggttttatttatttatttattttaatttcatggccaggatttct

SEQ ID NO: 54297 - DNA, 2380 bp, Homo sapiens
tgctctgggcaggctccttctgcttagagaatactcagaggccccagtgacccaggagccaatccaggtgcaagctgtttgaggactctggtcttgggagcataagactgaaccacagcccacccccaggggcttcccagaggccaggcaagagacgtctatcctgggcacagggctgttgtggaatcacatattcctatcctggcaccgcggcagtctcactgtgcaacccgatgcactctcatgatgtgtttgggcctcgtttgattcatctgtccaaggaaagactcagaacctcaaaggtcagctggtcccacctcccacccagccagggtcagagtcctgcctgtggcaccgctgacagatgggcactcgcaccacaggaggcaggccattccccatcagatgggcccaaactgctaggactcatctgatggggaatggcctgcctcatgttgcttttaatcaaatggcataatggctataaaagggcttaagaaaatgaaagcatgactgaagggggttattatgaacatcattggcattagaacagcatttccacatcagaggccatgtgagagaggatgaactggggctgagccactgaaggagggtgctgcggaggggagggcacacagagaccccacccagtgcccaggttgtctgggcaggttagaccactagctggagttgaggctcggctctctgaggtcctgatgagacaggagacacataatcgctgcaagaggaaggagagaccgcttcctgacctcagcagaacccaacctcctggggtttgctgtttgcagaaggcacctatcagacccctggttccctggtggtgagggccctggcaggctgggctgacagggagcagcgtgtttgttctggaaggcatagagaggctgtgctgaacatggctgtctagtgggccctgctcactcctgtgaagaggtctctgtgaagccaggggactcagggaggaaaaagtacacagagggccagagccgaagggtctgagaccgcctaggctggtaggtgagaactggagagggagagcttgtggcctacagtggcctggctagttcagagctgcactgtggtgaaagccaaggccgtctacctgccagggaaagcaagtgtcccacccagcacccggtaggcaacagggcctcaaaatgtctaccttcccaggccccatgtcctttgctcaggcatctcagacagaaagcccaagcttctcctcccacctgtgaaggtcgactccagagtcctgtggcccatgagcgcctcgtgcagcagcccagggccaggtgggccaggcccactcacctacgatctcgttctcctccaggttgatggtctccagcgccggcagggcggtaagctgctcagggaagtcctggaactggttccgggacaggtcaatggccttgaggtgctgcagggcactgacctcgctggggaggcggtgtaggaagttcccctccaggtggagctctgccacgtgcagggaaggagagagaacaggatgaggagggggccaccccgagaccacagtgactgcccgctgtggctctcaccctgcctgggccaggaaggcacagaggaagccctaggccacagagggagccccgcacagggctgattccatgtttatttgtgctagaggaggggtcaccctcctaccgctgcccggggcctgccacctgtcactccagctgaggctgcctgctgctgactttggaatggaaggctctcccagcagaagcctgggcctcagcgaggggtcaggaggtgctggctcctccctcagacaaagcctcaactccgggccctgacggggcaggtcaggatgggcggcctctccccctcggggctccccacactccatttaggggacaccactctccatggccctccctgctcaaggagccaccaggggcagccacattctttcagtgtcatgtgccccttctcccctggccaaccacagctgacccaatgtgggtgggttcctgctccgagagcagctgctctgaaagctggccagcgacctgtgcagggacctgtgtgggaaggcagctgggccgggggagtccctctgctgggaacccggctgaggcagtaccaagagatggggccagatatagtgtgggctgaagctgaatctagtgagagaagccgggcgcccacagggccctgtgcagggaggagagctggggggcaggaagcaagggcagcaggtggtggaggagcacagcccagggctgatgggaggaggaactggagtccccatgcttgggtacacaccagccgtgcccctactttcactgttcttccttaggacgttatttaatccccgcagaaaggacatcgt

SEQ ID NO: 54298 - DNA, 1642 bp, Homo sapiens
gtcttcaccatcactgtatcagaagcatcactcatcaagaatcttgcatgcaccaaaccctacacagggcaccttataagcaatatctccaacctcacaaaatcactatggagtagatgtttccccatttctcagataaggaaactgaggccacgaaggccaactggggccagcaaggctgctgatgccttggctttctttttatctcttatatggccccaaaccaggcatttaaggttttctctgttgtttccagttcagaggaagaataaaagtgtggccaaagccccagccacgggatcggccagtgtgttgggcttccagcccaacacagccacagccacgtctggctttgcttctcacctctggagtcacagcacccaggccatctgcccaaggtcttactgccccctcttctggacagagagggctgagatcttctggtcccagaagactgcattaggggttccaaagattcttcctgcaccaggccagggttcagagtggaacaaccagggctcccaggatggaccggggctctggaaaaagatcccactccattccactcccaacgttgtacccagcctgagagcagcccccatcatgacatttccttattgattaaacctactgaactgtggtttccggtgtctgttaaatggacctcttcttccccaagttcctcttattacttcctgtaccatccttatcttggacaattgccaaggctgactcagaggccttagattaaccccagctgagagagaagcttgccaattccattaggggacagacaaggctggcctgcagtaattatacaacccatgctcgaaggaatgtgccaactccaaaaatacctgctcaccaaacctcaatcagcacctcggctctgaacctgcggcaatgagcaatcacagtccctgactgcacggactccccagcagggcagagtcagacggtcaggtgggcagtgtccttccaccagcccatgctcagtgctgaggaggcttcacacagagacagctgctgcccacaggggtcagagggcatttccagatgccacactcactccttgggggtggacaaggggaagggcagaaaaagcacttttaacaaggtctggaacagactaaaatgaagtactaaacattctgcctccataaaaagactaaggcaggccaggtgcagtggctcacgcctgtaatcccaacactttgggaggctgagacaggcggatcacttgagtctaggagttcaagactagcctgggcaacatggcaagaccctgtctctacaaacaatacaaaaaattagctaggtttgatggtgtgtgccgtagtcccagctagtcgggaggctaaggtggaaagatcacttgagcccaggaggcagaggttgcagtgagccgagattgcaccactgcactccagcctgggtgacagagggagacctgtttcaaaagaaaagactaaggtagctcttttttcttgctgtgtgaacttgggcaagttacttgttactttatgctctgtttgcttacaacagtacctacccttggtggcatattataaatgctactattatgaagtatatttatatttacataggcatggaatatctccagtactgctaatggtggttg

SEQ ID NO: 54299 - DNA, 836 bp, Homo sapiens
tgaaacgcaataccaatactttagaattttggccttggtgtttgtatgaaattctgaggccttgatttaaatctttcattgtagtgtgacttccttttaggtatattgtgctaagtgaaacttgtcaaataaatcctccttttaaaaactgctaaaaaaaatgtagcattttatcagtggcaagggattagcaggcagagcacagaggattctcaggcggtgaaagtgacatgtggcagacacatgtcattatacattaatctgagcctaaggctgtacaacaccaggagtgaaccctaatgtgaaccatggactttgggtaacaatgatgcaccaacgtaggttcaccaattgtagtaaatatgcccctctggtgggggatgttgatcatggagaaggcaatgcctgtttgtgggcagtggggagtatattggaaaatctctattcttaactcttaattttgcttgtgaaccttgtgaacctaacactcccctttaaaaattaaatattttttaaaatgtgccatcttaaccatttttaaatgtacagttcagtagctttaagtatatttacattgttgtgcaatcaactaatctccaggacttttgcatcttgcgaaacggaaactctttacttgttaaccccctattttcccatcccccagctgctggcaaccacagaacattataaacttttttccaggcaaaaacatccccagaaacttcaatcctcatggttctggctgctcccgtgagaggagcaggaccaacctagctcagactctggcctggccagaactttctcctgcaccggtgttgagtctctaacacataact

SEQ ID NO: 54300 - DNA, 978 bp, Homo sapiens
ctcgtccgctggcccggcaggcggggactgggagaataaagctggcagagggaagaatggtagtgatcgcagaggccccggggctcccacgctgcccggaggccgagaggcacgctctggagcaggcgtctgcagctccccagagcggaagcaaaccccgaaagtgtcgcttcggggacgaaatgcacagcagcctctccaagcaagggcgcctcccgcgaggaatggaggcccgcctgggagcggttctccgagctccctattccctggcacctctgcacccactcccctgaaccatcggggtccaggtgcagtgagcaagcaagagcccgcgcatgccgagccccttggcaccgccagagcctccgctggtgcaccgctgctcttttccaccgggtgacctgggggaggggaggggacgctgcaaaaatcggaacacttctcgccctctctcccccagcccctgcaacgcttgacctcggactacatttactttgcggggcaagaagcgtgtggtcccgctccgggccgcttttggctccacttacggcgacaatgcctcctagcgccctgcgcagcgcagtcacgctccctccgccgccggcggcgccccaggcgagttccgagccggcggggcggggcgcgcggggctgcgggatctgcgcgcgcggccactccgccaatcccggcgccaggaccggcgccgcggcgggagcaggctgggctcgggatgcgctcagccaatcagtgggggagcggcgcgcgcgggggtggcgcgcggaagggcagcccgcgcgctcccggccgcagggagtaaccgctttgtgtgctgcttctagagggagaacgcctgagggggcggagatacagagtgggacgcgcagtacatcccaggatctctaggaccggggctccagattgggttttctcgagggaatggagttgaattagccagatcagggatactttgaaacacgt

SEQ ID NO: 54301 - DNA, 783 bp, Homo sapiens
ggaggaaggaacatttaaataaaaacgaaccgagaaggtccttccttccacaggtgtgagtcagaccctgccccgacacatcatcctgtttctcactctgtcctccacctggggccgcacctctccctggagctgagctaccgacagccaggaactagaggtaactccaagtcactgccatcctaaggcagaagagtagttcccccagtacctcttccagaaggttcagcctgttgagaggtgcccacccctcttaccctgccaggtactgcaggtttacgaaaattagcaagaagtagtcaaattagcaagaactcaaggcagttgtgctctgctatggaaaatacgattctaatcaaaggtgactcaagaggcatttctcaagcgtcagttgttgccataccaccttcctgatttttgctatatctgagccccacccagtggtgagctggagtcacttgtgcagacttggagcttgctccttctgcccattttttcccagctctgggtacagtgccatcacctggattactagaaataggcatggtggaagaacttacaccatagaaatcagcacacactacaaatcatgactttttttttttttctgaaggaaatgctttaccaacacaccatagtattatttacttatatttttccttcaactcactttttaacttaaaaaaacatttatttttaaaaaggaattttatatcattccacaagtggaacatagtatcatttgccatagataaaaagtaaccttaaaaatagggccttggg

SEQ ID NO: 54302 - DNA, 2075 bp, Homo sapiens
cgacaatgacaaacaataagaagaaagttttccttgtccgccttcaccaggctcacaaacacttagctcgcgctccctctggctcttctcccgctcgctggggttaagccactctcttcctcagccctgcccctcgtccccgcccccttcaacaacttcagccacgcccctcactgcctcgccccgccccgcggcgacgtcacctccggccgaccagcttccccaactccctctggctcccgccttcgcccgcttccggtcgtcgtcgtcgccgctgctgccgctgctgttgctcctgaggctgctggctgaggccggaggatcgagcggcggcggcggcggcggctgagagggcggcggcgggagcggagcgggacgagggaacgggaggaagcgagcgaggagcgcgcagagcgcgcttttccgtccgcctgaggagccgaagcagccccggccccgccgccgccgcctgcccgccggacaaagccgagagcccgcgcccacagccatgtcctcgtcagccggcagcggccaccagcccagccagagccgcgccatccccacccgcaccgtggccatcagcgacgccgcgcagctacctcatgactattgcaccacgcccggggggacgctcttctccaccacaccgggaggtgagcgccggccagccgtccgccgcgcccggtgtcccgccgcggtcctctaactcctcggcgcctcggtgcccggccgcttcgcccccgcccccagctccaccgaagccccggggacgctgcccttgggcccgcccgagcgttcgggaccctttacttcgtgttcgctcttgcccgcagctcgagtcggcgcgcgccccactcgggaatgtggctgtcctgtcgcgaaaaagagctcttgtttccgcttcgtggcaggcttacgcattcgacccagttctctctctcctctctgcctccttcccgggcggatttggctccacttggccttgcattacagtctgcattgcctgtcgtagattgtgcaaattaatgcttgattttggagctggctccggggctttttaaaaaagaactttgggagaggaattcggccctggcatcctgcgatggcttgtttttgctgcttttagaacaccgggaggaggctggaatgcggagtctggaagcctcgcccagcgttatcccgctttgacagcattgtttactttgctggacgaggccccacgggtgaggggagtccccaggccgggaggagagcgtgataaaataaagctcaagtaatagccaagggaaagtaggtgggggtggtagggtgctgacagccttaaggtagggtgtctttcggcagcgacgcctttggaaatggattgaaggacctttgtcaaggacaccccagttgggtggggtggttgcttgatcctgtggaaggggctagagagaggcaatccagagagagggtggttccctggcattgcttttcaaagcatgaccaggaactgtttacaaataagtaatactggggtagaggtgaagcttggtcacgggaagagagctcaaaggttgtctgtgccctaactgggctgtcctccagagggaggagcctggaaagcgattttgaggagccttattgaagggaacggggcctcctttttaacttcagaactttgtcttcttttggtgctggggtggcctcttgctagagggtggggacttcgcagctcctgcggtctagaggattgctagccttgttcctgtgggcagggctcaggagctgtactacaaccaatccgatgcagttaggcctggaccatccttaaatcagttgcacaatagcaaggcctgtggagtaaggagaccttcttgccaacaccaagggataaaatctaggagggagctttacagagaaattcagccaggccgctctgggggctgggcgggctgccttgaaaggctttttaaatgacccaggcagaagttcagtaatatatatggagagctgggtttaaggaaatgttaactttgcagaatagtggagttcttaggtggcttaactcatggaagaaatctccccccgatatg

SEQ ID NO: 54303 - DNA, 516 bp, Homo sapiens
caggacacaattctccaaggtagtatttaaagtgacttatagagccttcagcaagcacatggcctagagcatggagctattccctaggctcgggtaggtaggctttgccccagtgactctgtccaggcaacagaatgactctgctgctgacgtagcaaacactgagctttcagcaggggtcagcaaaacacagagtttcactactttgtgcactacttttatttgacatgaggcaatgccctgtcgtcaagggtttgttcttggagtcaatacagctgactgtaaacactcccacaagctgtagctacaaatagcttgacctttcgctctctggcaccagccatgtaagaaagtcctggggtgggatgttcacttctaagaactagttcagtagtgtaattgggttcaaatgtttggttctaaaggctaaggcttggatcccaagataggtgagcacaaacctctagttgctgttaagcagtaagtgcccgtagggctcaagagaccagagctcag

SEQ ID NO: 54304 - DNA, 701 bp, Homo sapiens
ctattgggcaaagtgtacttttgaaacttggcattccagggctggcctggcctgaaacgtgatgcattcagaagggggtaggaagccctccaatctggagttataagagaccacgtggatggtggcaggagtgggtgggaagttctctctgagcccttgatgttcatgatgtggaggccagctgcccacttatccttctctggtgttcccctgacgtccctaggactttactgttggaggaaggcaggctcagtaacccattctaaccttcttggccaaattaacacattctgacttttgacccttgacctctgactcatgcatgactcaaagctgtggccggggaacattgtcagtttccactgaagactgggccccgagggcctgccttggtgactgctgtttggatagtcttggtcctaccttccttctccccacaatctgccagaaagtgggtgaggagagaggagagtaatgatcttcccagaggttctggaaggccgctagaggctaggtcttctgctcactgctgggttgccctgtgaatgtgggaacagaaagggcctgcgatgggtgaggggcacagctgaggcagagcttcccctgagggaagcccagttcctcttggggagagaggctcacagcattgagatggactgcggcttaaaggagccatgaccttgcagacctgctgctgccat

SEQ ID NO: 54305 - DNA, 1435 bp, Homo sapiens
gaggatgaggatgatatttccattaaataagtttccttgttgcttttcttcaggcaccactgacctcgatggaaaaatgaagtccctggcccaggaaagagacccaactctgtggctgttttggattagtttgtacaatgccctgcagacctactctctcaggaggctccaagtgaccaaatgtgacaagaaagttttttgtccaaggcagtttggaagagaagttggtgaccgtcgggataccacagccgccccaggacggcctggttgagacattcactggagggtctgggtgcagcccgctgcctggccggtaggcggcgcgcacaggccgtggggcccgggtctgggcgtgcgcgcggctggtagcagcggggccgcgcacgccagggtccgggagccgggccggtgcccccggagccatttccgggaggggcgaggccggcggctgccgggcctccaatctcggcggcggcggcggcaacaggggagcctgggtctcgcggcctgcgagtccgtcgcgtgctgagggagacgcaggaggtggagccggccgggtgctcgagggaaggagactggaagctggttccggcgtgaggaggtggaggggccgccgcgggctccggggggcggtgagggtcgggacggaggcgccgcggggtgaggagaggacaggggccgggtgggccgagggcgggcagaggcggcggggcggctgcggccggggcgggggcgggggcgggctgaaggcgtgggcaccagccgctgaggtccaagcaagtggacggcgggcgggcgcggggccgcggtggggcgggtctggagcccacgcctgccgcggggtaggcatgggcggccaggatttgctggtcctccgacgggaggggtgacaacgagagcgaggccgtgctgattctgaagggagtgcggaggaggcaggaccctggtagcctcggcaccttcagcccgggttaggtggcctgggctgggctccccaccccgatcgcgcgcagacggggcgtttcccctagtttccacctgggtggaatgctttgtgggagtctgggtctggattagtttcatcagctgtgggagggaaacctagttgcagcaggattttgattcgctggtctggggtgctaggggtggactgtgatatctgggaatgaaatctgagccttcaaaggagggagagaaccataacttggctgctctggcgaatctaggcgggctggcgagacagtttaaagctctagaagtaaacaaacctggttcccttttacagagtctgaaaaaggggagcgcggagaggaggctggaagaggaagatgcctagcacagaccttctgatgttggtgagccttttgcagacatcctcctggttccaaggcatttgtctccgtttttttagtccaaaggatcccagtgtgtagat

SEQ ID NO: 54306 - DNA, 514 bp, Homo sapiens
cattactgttttgaacatttccttgagtgaataacagacttacactcaggggccctaggtctctgttgtggcccagcaagctgcattcagacaaggaggcagtttgagaggtacgagttgttatggaagcctgagaaaactggtttgtgtgcacttcagttttgaccatacaaccttcactcacttagcactgtgcagtaatccactgagcaaaattgccacattttccttggcagggaatctgtgtgcctgtggcagttcagaaattatttgtagagtgggtcagcctgtcagcaggaatgtttttctttgatcttcagcctgtttttctttaatgtgagcagaacagtaaagagagaatacattggaatatcttgttggttcccctgtttggctttacctacagctctttggttttcttcttttaggtcatactttcccaattagtatgtaggtatttatgatgttttgaagcccagagcgatggttccaatatcttgtggaattcagctct

SEQ ID NO: 54307 - DNA, 956 bp, Homo sapiens
gaaaataaacttcatgaggacaggaggttttttttcctgtgtgctccattgcctaagtttgttttgttcactatgtgtccctggcctgcatatttgtgaatatgcagtgaatatgaatgtgaatatgtaagtgaataaaagaaaacagctcagaagctgtggctttgaggatggaaaagaagggaaccatagttgataaactacctagcagaaaggaccttagttccttttaatattttggggtcagacagtgcaagctgtcgacagcagcttaaggagatacattagagtcttcctggcagttcttagaatgccttgtgctagtgttgaatgggacctccaaattcctagtgtgctgcgtgtatgtctgttgaaggagctcatcacttgcacaaggaccagaatcacttttactgcagcatggccagttttctggccactgttcctagttatacctttgattcttttacacacacactgtagctgctgccaaggcaggatcaaagtccaaatactgccctcaaggatgtgctgactttagcaatgccaaccaagtgaagcagcagtgatgtcaatgtggcagagaaaagggttatggggaaattgggtgcaacttttttttttttttttttgagacagagtcttgctctgttgcccaggctgaatggagtacagtggtgtgatcttggctcactgcaacctccacctcctgggttcaagtgattctcatgcctcagcctcccaagtagctgggattacaaatgcctgctaccatgcctggctaatttttgtatttttagtagagatggggtttcaccatgttggccaggctggtctcgaactcctgacctgtaatgatctgcccacctcggcttcctgaagagctgtgataataggtgtaagccaccgcgaccggctgagtgcatcttgacctttagagagaagcttcgcttttc

SEQ ID NO: 54308 - DNA, 698 bp, Homo sapiens
ccatcagcccgtctcagaaaactctgtcccaccctggtgccataccctgttgaagtctttgaaatgaaactgcttgaagatggcatcacggccttccagctcattccaccccacagccctcaggtttggcagcagctggtccctctcctcagcgctcagcctgtgtgctttgccagcctagaagagggaaaaaaacagaggcccaagggcatttctctttataggtcaaaacagaggggctccaacctttaggggaacttagcttccactggctgctttggacgtgggtgaccaaagggcagcaggtctttgagcaataggctgggaggcctcaagggtggcaccctgcccaggaggtggggtccaggctcgtctgccgataggccctcaggtcttgggttttaacactccacacacacacaagggaaatcacaaaagcaatgtaattcatatgacggggacagagaagcactcttcccccaccctgccctcaaagccttacggaccttccctccatgagattattacatcagtgagggcgtaaaagcaaaataaatcccagatgcaaatatgttactccacaacctctcaggaagagtacccatgactctccccccttccttttcctattatgtacttcatcatatgcaccccacgtccctaccgtaactttcacgtgtattgaagaggaaacaggc

SEQ ID NO: 54309 - DNA, 1527 bp, Homo sapiens
ttttccctgctgttttccctcctgaaaacgtgagctctctctggactgatgtagcttggcccctctcttcccctcggctctggatgactatagggattgaatggcagcagcgatttgcatcatctgcccagtaggtaggtctctactccagagctggccttctccccgtggctgaccgcctggtccgtgtatctagacaaccagaagtcagccaaagcatcagagcccactgtttacttccttggctcttaaaggggtgggtgagtccaggtgagctcttaggaggcttccctttctcggtagagccttctggaaccccccaggtcgcacagcctgcggctgaactgacaaaccttccaggtgccggctctggagacagagagggggacgctgccccgtttgcctcctctggcgaggtgtggggagtggttaccgatttcccaagcctgcatctctgggacctcagcgcccctcacaaacagccccactcatcctccctcccccaagtccctctcctatcaaaaggccctcccagtcttgcctgctccgaaggcctgtggaccagaaatggtctgatgaagctcgcgagcttacagcagagcaagggccccgcccccgcccccgccccgggggtgggtgggggaagctcacgggaggagggctgctccagcgccaccaagcccccgtggcctggcacgggcctcaagccggcgcggggagtggctctggggccagcataccggcgcagagcgtgagtcccaggcagaccccgtacccagagtgccagcgggaaggggcagcggacaggcacgcacacgagcgcgcaaactcagcctccctctcgctcccaccccagtataaagcagaatcgggccaccaaggggacgagatccgtggactcctccacgactgtcttccccggcccaggaaggtcgtaggccccgcccccggaagggtcccggaacaagcactggccggggtcagggcaggcctggcctcccaactgggtgggattcgaacccgccaccgcccctctcagggcttcagcttcccctccccgccgccagcgacagagagccgggcagagaccccactttcggaccccggcggctccgcaggggactcgaaaagactttcccccgccccttcccgctcccacctcgcccgcggctgccccggccccgctgccccgatcgcggccgcgcacccctggactcaccatggcgcgggcggcagcaggtggccagcggagagggcaggcggcggccgggcgcgcaggctgccgtcccggggcggggccgcgctcgggccgccctccggtaatgattaacgtccccagccagggacgcgctcggcctgcttgcttccagcactttcctcgctgctcagagccatcctccgtgcttgtttcagggagctagggtgaagcatgagggctccaaatgcccgcttctgggttggaatcccaccccgccgcttacagctgggtggccctgggcgccagaatacctatttttttctttataa

SEQ ID NO: 54310 - DNA, 750 bp, Homo sapiens
ctgtttcttatttttttaaggaaattaaaaataccgtaattagaataatacaaggagagaacactttgcggaaggcctagggtaagggcacttcccacccactgggttggctcaagaggttgggactggggcgccacctcccgcccccttagggtctgcgatccgccgggggcgccgcgggcttttccgccggctccatgcatttccctgaggcaggatctttttgggggaagctggcatcccggcgctggcctcggcccccgactgggagttgggtggcgcttgattggaactccggcccggagccgcctcagccgctgcgcccccgcgggcagacaagcccgggcggagcgcgctaagccacaggtccccgcggcgttcctcccggtcttcggggatgctaatggcagcgaaaatatttgctgaagtgcaggcataaatcagccgcctccccgctcccccacccccaccccttttgtttcctcttccttctctccaaaagcgctgggctgctgggcgccagaatttaccttttccatcttagcggcctgattagcatcgccgccgcttgtggggctggattctaccctctcctgcgtcccccacccccagtccccatctccacctccctccccagccgagctaaatcggtctgcggagccccgggagctctaacgccaccgcctagcgagtgagtgcacggagccgccctccttctcacctcccagaacaggctgcccccagtgcttg

SEQ ID NO: 54311 - DNA, 737 bp, Homo sapiens
gtgcctatggagtcagaacagagaggtcactcagaggtgacagcatcttgggctgcagagtgaacatccagaacatcagggaaggctccctggagcaggtgccattggcactgggtgtacagagagggccatggctgtagggaaggcactgttccatctacccagccttgcagcagtcccctccacccctgcccctacctggctaacatgcggagaggagaggtgattcagcaggcctggcttgtttctttcttgcccactgaggcctcgctgttggacaggctcccagacgttgcagtcagctggaggcctcaccttctgagctcccagacctgaccctctgcactttaacctggcaccctggccccagctgagttggactgtttcaggagtctgagtctgggccttcctcagctgtacacccccagtccccaggccccagcatggatgtgagcgagccacagcacccacactgggacctttgcatggttgggagttctgtgccatagaacaaagagaaaccaggcagtgagttctatagaaatcagaccgggggctaagggaagacatgcttccttttttgctttgccctgggatgtaggacccaagtgaagtaaggctccctagtgatttgggggtcttacttgtgtccttgagacctggaaaaccctctcaaggcctcagggaaaaggagaaaggatgggaatgccgcatctgcctttggcaagctgctgatt

SEQ ID NO: 54312 - DNA, 3237 bp, Homo sapiens
gcgtgaactaagaacttttctccgccgctttctcagggaaaccagctctgagaatgacggtctggtgatgtggcgatccccagaccctgggctcatgggggcttcagctgcatgctgtggcctggcagcttccaggaacatgtctttgctctcttcccctccacccgtgtgttttcaatggtgattggaggcctcaggggagccgtgcgctcctcttcctccctaaggagaggctctgggccagccgggcagcgagcacagtggacgggctccaccttccctgtgcttccactgcttggtaagggcctgcccagcctctgggaaccccaggctcttggtgaggcaccaccccacccccactgctggctgtccccaggtcccccatgctggccacatgccttagtgtgatgccacactttctttcacacctctggcctctagctatctctgtgaggtgggaacggtgaaggtgcacctattctacagagaaacaaaccgaggtcccaggagctaagactagggcccagagtcacccactgaactggtggcccaaaagtgttctggtatttcctgtcactaggccgtgcttctatcctttcttttttcacccctacctcatacttccttatccctcctcaagaaatccctagaagggaactgacaaacttagtgcctgacatgtaccaggctcatttcatgagatcctgcagctgtgaggggaaccaggctcagaggcagggggtggttcccccagcaaatgggggcaggatgggattgaagcaggtcccacgcactccagagcgccttctccttggctaacctcctgcaggttttgggctttttgctccccttcaccctccccgcttcctggtgcccctcctggaggagccctctcacggtgtcctcagctggatgcctgccctctggcccttgcacccttcctctgctgctcactcagaggacatggggagcgggccgagccctgagccaaggcggcccagcgattacatcagcaggtgcaaacaagcaggcgggagcagggacgggcgtccctcggggctggagacggcactccatccgccccacacgagtctgtttcattccctccttctagcttgcatcagccttttgcagctctgtgtcatcacagagtgggccaaggcagcagctgggaggctggggcaggggtggaggtgaggtgtggggctcgccgggaccctggcagcctggaaggtccactcactgttttttcctgagaatggagtacaatattccccccttactcgaggtctccctgtccacagtttcagttacccatggccaactgtgacaccaaaatattaaacagaacattccagaaatcagcagttcacacattttaaattgtgtgtgattctgagtagcatgatggaatctcccactgtctcactccatcctgcccaggatgtgaaccatccctttgtccagggtgtccacactgtatacaccatccgtcacttagtcactcagtggctgtctccattatcagatcgaaaaaaaaatcatctgtctagagcttggtactattcaagttttcaggcatccacggggggtcttggaacgtatcccccacagatacggggactcctgtaatagaaattagctagtgcatagggctgcccagctggcaaaatatttttgtacttctgactttggtgtttccaacagccctgtcagtcaaagcaagtaaaagtggtcccatttctcagaaaggaaaattgaggcccagagggaagtggctgcccaggggttgtcttgtgagtcactgacagcaccaacgcatttcacctcaagaagcgcatgggattataagagcctggagattgaaaaatccctatagtcatcaagttggaagtagttaaagcctgcttcctagagaaagtgagctgattccttggccgaggaggagacagctactgaaagagctatggagtgatttctgcactgatggtgggtgggcaggcaaagggaccattacatggctatgggggtaggctggaggcagactgggcactggtctaagaagtctcgatgtctggattcttaaccttgaaaatttgctgtgagcttcccacttgtggaactgaagcttggttattgctctctgagcctcaccacaggcatggtcaagaggaggcccccaggaagtgtttgatgaatgagtgaatgaatgaatgaatgaatgggagtgagtgcttgctcaccatctgcctcccttgaagtgcatctgtgcagccacacaggccttccctttggccagtgccacctgtctccccatatctcaccagctgacaactcagctgctcacccaaacccagggccggggtctttcccagcactgggaccagagaggcaaacacaggaaccatggcctgcatgccaggatgcccacattccagtcctggcttggcctcctaactgctgtgtgatctgaggcaagttactactcctctgaggtccccaggatgttcctgggactctgagtctacaaggcctggcctccccggggcccatggaacctgagccccagtcctgccttgggaatggaggccagagatggctgccttcctccctcacccctggggactgagcaggaatccaagtggcttccacattcaggaaaatccaaggggaaacccctacccagttccaaggaccccttctattcaccccttactgccaggcgctctcaggggctctttctccctctcctcgtggcaccatctctacctctgtttatctcgcccatttgccctctccttctcatgcccatttcacagattggcaaaggccagagtctggccactcctttttctctgtcctttctgtgacttcttttatgccagtgtgatgccaagataggagtgacgctgcagccacagactgtttgtttgcccttgcacaagtcattgcccctgtctggcctcagggtccccagctggagatgaagggtccccagctggaggtgaagggtccccgactggaggtgaagggcttggatgcagttttgaaggccccatagcccaggatctgagctgcctcctggtggtggtgctgacagcaggcaacaggcaaggactgcagcagtttttccacttggaaatgtgtttggcagttgcctcccctttgcgaggaagggttgttcggttctagagcgtggcgctgagggagacgggggaaatttgtgtgcccttggtg

SEQ ID NO: 54313 - DNA, 986 bp, Homo sapiens
gaaagtaccctgtgagtagagccccagccgctgctcctttttcttcctcccatcccttgctgcctgcccacacgtggctccccttctaagcctgatgccaagaccaaacagtcctccaaggaaagtattaatcttactgtgtccatattgaaaacttgcagaaccaacaccgtaaattgtaaaactcaaaggcggttgacaagctggctacaagtgtgacaaagggctgaatatccttactatgtaaagagattttgtagatcaataagaaaaagtaaacatctcactgtgaaaatgggcaaaggatatgaacacgtgattcacacacactgtctcacacaaacacactggccagtaggttatgagaaaatgtttagtctaatttgcagagaaaactaatgaaaaccaccacaaggtatactgggatttttaaattattattattaaggaatttgcaaggaccttttcccaaatgataataccctcttgctggcaagggggtgggaacatggccttctgtggcacgtggccgggagtatagattggaaccagctccctggagggcactttagcgtgacctattgaaaaccttccaagattacacaaccttggaaaatataagccaggaattttgagctatgataatgttgcagtggaatagcaaaaatctggaaacaacctcaaggttcatgccattttctttgcctcctttgcccccatgacctctgggaatgcagagccctgagtggcaaagagctgccctccacctcccgggccctgggcagacttgggagcccagcaggagcctgcacctttgccgagctcttcactgcctctctcctaccctgtgtcctcctccagcccgctttcagaagggacccagacagtattgagcccctcggtgacctgtggacccacaggcctcctgctgtgccgccccgtcatcctcaccatgccccactgtgccgaagtcagtgcccgtgact

SEQ ID NO: 54314 - DNA, 2720 bp, Homo sapiens
gaaggggtccctctagctgccccacctcgagagatggtgatgtgcatgcaggtggagattggggcagggatgcaggcaacagcattatcctgggtgcagtgtggagaagcccagcatggggagagaggacaggagcagcctggggtctgggaaggacagaggggtgtggctccctattggtcacctgctctaggttcacatagatgtgcttctgggcattggggtccgctcacagaagcttgtcctcaggagtttgtccacagaccaagggtcaaaaacacgaatgtgtccaggccgctcagtcacgtgaatgagagaagccgccaaaccagcaattcacttcacagagaaatgtgcctgctcagctgtttcttgaaacatcaggctgtctcagcatatcattcattcctcacttctcttagcagcacgggtctctacttgagtgaaatagaggatagatgtcctgttcagtggcctctcacatttggctgcagtgctatagggaagcgatagggagaagtggggactacagccaaatggtgaccacagagtgcactggaaggggtaggccctcactactcaaatctgtgagtgcccaggactgctccaacctcctgcttttagaaaccagaaaccaggattcagaaacgtatgtgaaatcattctatttgtaactgttagctcaaattgtttgtaaactgcaggccaaacaagatccatccagtttgtgatctgctgggcaatgggaagctatgggaaggttttgaagcagcggagggtcaggcttaggttcaggggtttgctagctgggacacagtcctgagcccctggccctctctagagatcaccaggtgcccctgcccaggtgttgctttccctgggttgcatcaggggaccatgatgcccacaccagctacctccctcctgcattcctctgtgggatggtgggtgaggctggtcctctccccacgagcctcttctatgcctgatgaaattcagggcagggcttggctaccaggccctcaggttgcagcaattctcctgctaccaggtacctagggacagaggcccagcacccacctcagtaaatactgcaattacccaaagggggtacaccaggcagaggctatggccaaggactgcaggggttcattggggtctctttcataggcttctaggatggcagaggtgggggtccttggctgctatctaatccatcctcatctgattccagaagtccctccacagtgactcagacaagggcttccccagtttctccttgaatacttccagagatgaggaactctctacttcttaattgtaataatagctggcattttaataaatgactacttattttcactgtaggggctgattttacccacaggaatcaatgggagttaagcctaagccttccactccatgccaccttttcaaatatttgaaaacagctttcttggcccacactgcctcttctcctcctcctaagtgctcccagtctctcgcgtggctgggctcagcatccatgtgcccattggtgctccctctgggttctggtggcttgcctccctttcctcaattcccacagggtagttatgaagctaacattatccatagttccagctcagctgcaggtttaagggaacaagctttggggtcagcctgaccttggtttatggccagactctaccatctgctctccatgtgaccttgagccaattgcctaaactcctggaacctcagattttccagcaatgaggatgacaagcccttccttatagacttcctgtaaggactaaatgaggtaatatgtgtaaatattaagagagtaatcagtatgaatctctttccattttgtcatcatcgggatcaatagcagttgcaggtgtgtcactggatgatcactatcacctctctcccattagatgaagataagagggaggaatatgctccttgcatttgcagacacctgagattacaaagcaccatgtgccccacattttctctttttatgtagctaggagaaggccagtgagccacgtggctagagcactgactcccagtccagtgctcccactacagccccacacagtgggaaacacaagccagctgcagcccttcctccacaatctgtactgctcctgacattgacgtacctttgtggcattccccaagcaccttcataccaatgctctccttgattaccagaattaatcccactgccacaccactggagatagtcaggacagggaccctcctcttggcctcacagatggaaaagcacaggacaattagtacctggcccacctgggtcagaaccagaactccagagcatctgggctagcgtagatgattagccaggttcaatctcagctcaatacaatcctgcttccactaaacaaacgtttacagttctcatgttggtggaaggaagacagacaatttaaaaacgtgatatgtaaagatacacaaaaaataaagccaggttatgagtgaggatagctggggaagtcaggggaagatcacttcagcactaccaaaacagataggggaactgagaaaccagtatcttagagagaagggaagctcagagaaatttgatattctgtccttcttcccccaccccagcccctctgcccaagccacttgttgatttctaaccagtgagtgccaaactgaaagcagcagctaaggggctgagaagccaggcagagcttttg

SEQ ID NO: 54315 - DNA, 1786 bp, Homo sapiens
aatagctgcctggcctgggaggcccagttcagtccgggtgtgggtcccgcttcacctccagagcagcggcagccggtaagggtagaagcggcctttggagaggggtctctgcagcggcctggggacaagatgagggctcctttgagtcctggggtgcaggttatagtagctaaaggggaggtctgagacagtggggtctggctccaaggtaaagaaggagcagcaaccaaaaggcctgatgcgcagcgcacccatcgcaagcatgggcagtgcgtttaagactgggtgactcactttttctcctataaaatgggcgcacgcaggccccagctcagcgccagaagggggagccccggcgcgccggcagaagacaaaggaaaaaagcgtgtttgcaaacggggaagcggcggcgtgctgccgcgaggggcggggcggggccgggggaggagcccgcctgccgcctgccaagcccagtggtcctggccgtgcgccggaggcagcggcggcgtggcgcagcggcgacagtaagtgcgggccggctcgggctcttccggctacggtcccggccgcccccagactcgcgctcagcgacctccctcccgggccctgggggcggctgcgggctgccaggggagccgcaggaccctaccccatccgtggtcccttccccaccgtccctcctctctctccttgctctctgccacccctctttctgggtctctatcttctcttccccaaatcctctcccctcctcctccctgagactggacctcaccgcctgtatggtgggggcctggtatggacccgtcggcccgaagtatccagacggtggctgattctctcggtcccagctgcggggcctgaggctggggctgtttacaccgcaaagccggttctgccgcggccagtaggcggtgccctgcgcttcccagtgccttcccacaggttagccctaccagctccccaccccggttcacagcccaggagatcgaggcacagaggggcgagccacctagccagagtcaggaacctccttggaaccagcacccaggcttcccagcccagatgaggttttgccgcggccccagcagtgcctgcctccttgtgtggggctgtctgtctgtgcatggccgggctcccgcaggtgacccaggagcacgttccaggccacagccagcttgttttggggaaggttgggcacttccttgcctgcctttctctttattttttaatccagaagccagcagctagcttttataaagactaataagactttgctcactccagtgccctggcctgtgaccctggttagagaaaattcctggctccttcttcagaagctcagtcaagccttgacaaatagacgctaggaactgagaagggggccctagccaggtgtggtcctgagtgacagggctggtggaccttctagccgcccccacaggtagctggagcctctggaaagaaccacttgccggttctctcttgttctatgtgggtgggtcatgattattttttacattttaaacactaatttttaaaatgtaacaagtgagcttgttacatttgtaccattttgtgccagacaaaatagcatagactgggtggcttaaacaaaatttgtttctcatggatctggaggctgggaagggcaagatcaaggtgctggttgatttggtttctgatgagggctctcttcctggcttgcagacagcctccttcttgctgtgccttcacatggcttttcctctatgagtgggtgcatgtggaaaaagcgattttccac

SEQ ID NO: 54316 - DNA, 815 bp, Homo sapiens
tgtttctgactgtgtttcaaacttgctgggtgacttgagaccatgtcctcctttgaggaatgaagatatgagaccgtagattgggacccagaaacttttcccgcaaagggccagatggttcgtattttaggctttgtgggccccacagtctctgtttgctactcagccctgcccttgcagagtgaaagctgcccttgacaacatgtaaacaaatgggctgaccgaaggccgaccgcgttccagtgttcacacaaaggaagagggcagatttggcccgggggtaacccgctgctaacctctggactgggaacactcacttacagctctttcccagttctgtgatctattatagtggtacctaccctgctgaatttgtcttcatatcactgaccactgcctggcctattatctatttgtttatgcatttgctagccatctctttgactagatgggcagttccataaaggcaggaacttgagctgaatctcccatgtctacaacatctagcgagctcagtaaatatttgcagaaggatgaatccatctctgagtatttgtggagaggagacagggacaggaggaagaaccgccatcgctggattgtgcaccgtgatcccgcagtgcacctccaccacagcctgcacacccggacctgcctgggccccagcctccccccatccccattcatactccagctcacccctgtggaggcttgagcacatcaagctcattcccgactcagggccaaccgtacgctgttccctctgtccaggctctaggttagccaattatttgtattttagttttattgcattt

SEQ ID NO: 54317 - DNA, 2037 bp, Homo sapiens
cattttcaaggagtgtggagtgaaggggaggaggggcctggttcctggaggcagcaaagttaaagtagtttttttttctttacccaaagggagacctaagagagtctcttggccagcagagaaaggaacaagcagcagtgagggaaagagaaaatgcaggcaagaaaggtgggattcatggtgtgagtctccaggaagtcagcttaggctggaggaagagccctttttgcggagtggaaaggaggtgtgctccagaaagccttgcacacactgcaaggaggaaggcggggaagctcattccagaagacaggaactttgctcatcgtccagcagggattcctgaggaggtgtgagaaaggattgaaggctggggagagccccggggtgctcagagagcaagatttacagtgagcccaggcctggagctgtcatgagaggccaaaggagggacggttgcatgcaagggtcagatggggaccctcttccttagggtggccacagtggcttcgtctgtctggccagcattttccagagcttacctgtctgattctgaccccagatttgtccttcccttgggcctctggcctccccttcagcctggctgcatctagcctcctgcctggcccctggaacaggcattgccccccttccctgcccagccagccctcccagctggtccctgcccttggccacacacccattatctttcctgagccagtgctccaaacacagggccttggaacttgcagaaaggttaccagccccaccccttatggggacatctgccctctgctcacctcattttgctcaggaatgatctgggctgatgcccagggcaagggcacctcccctgcaatatcccaggccgcagaactcagctatccgaaagcggcaagtttgcaatggcaaactattcttggctccaacctgctcgctgctgctaatttcatgcccctgtgatccaggtaacgctctgctgccttgagctgccacccccaggcttgaatcgcttttcctcgcccgcccggtaggagcccagctgcctctgctgctgcttcctggaggtgggggctgcacaaagctgcctcgcagaagccactcagcagcacggacactgagtctgccgcagctcgtgactaatttgctgcacttatttcaaagtgcccaaatggcattcagggaagagaaagcttaaccagggtctgccagagataaacgggctcatttcggggcctccctgcccgaagaaacctctttacctggactctgagcctggaattgaattcttccagaagagacccttagcacggagcctctcagtgtggcggaggagaggaaatgtggcccgtcataaaatgggcctcacatctggccagctggctctggtgggcttttaaattgtgtttgaagagcatctctcccctttcctggtgttcgcaaactgggtcagtgtagcaaatggaaatgagtttccttctcaccatagcgagcaactcaagtgcccccctgcccaggccagcagtggctcatccacattcacccaccatatgggggtaccctggcgcctggcacccctgggccagggcctgtccacagtctgggtgaggaacccccatgcccaccctgggccagtctgggtgaggcccccatgcccactctggggctctttgcaggggttgcagagtaaggcgagagcttggaagcctgccccatgctgcccacccacagacactctttaacatggtctttgcttagctgccaaccatgtccgtcaattttgggtaactgacagaggtgggggcttttctcttaatctttttcttttcttttctttttaaaactacgaagacccataggcctctggaaatgctgaggggaatgggcggtgggatttgagagaaaagattagctaatgtattcctttactcttgtctaccactgcagaaagaggagaaagaaatcaaaccctggccgggcaccatggctcagcacctgtaatcccaacactttgggaggtcaaagcaggtggatcacctg

SEQ ID NO: 54318 - DNA, 2982 bp, Homo sapiens
catgccactgcactccagcctgagcgacagagcgagactctgtctcgaaaaaaaagaaaaaaaaatcaaactctgtcatttgctggcttgggcaggtcacctgcaccttagggccaggtagaagaaagacactgccctccctgagaggaacgtgtctcacattcctgcttgctgctggaaggcatgtggctgccaggcccagcatctgaggcttcctggtgatgcaccgcgaccccagtgatagtgtttgggcttgtgcctccaggagacagacaacctcagctagagcagcttatacatttgtagggggatgataaatatgtctccacccggtctctgccctgctctgcagcaaaagatgctgccaccagcactcccaatgtggacctctgtgtacctctgggaaattcctctacctctgtgagcctcaggctgcttatctgtaaaatgagagcgattccagccctgcctcgccctcactggctgtggtaagagcacatgggctggggtgtgtgcaggccctctggaagctgtgctgcttgcatgtcagagttccctggcattctgcagagctcccacttccccacctgggttaactgactttgatgcgattacttagagactggatgttgagtcccacaccctgcctgagctccaggtcattgcagggtgcagataacgctagggagatagtggtgcgcagggagatcagatctcacattcagggagcacagctatccctctgttcctcagagctgggcctctcccacgtgggtttgagaattcagaggtgactgatgggcctctctgccattagcgctctgggggttgagtgccttggctgcttgaggttctgccagccctcctgtggatgggatggacaacacagtgtggtttgcttcagctcaggaggggctgttggtgctaaggaagcctcaggttgctttcaacagatgagctgcgctggcatcctcactggtggggaagcatcccttcatgcttttgtgccagccgttctgtcctgttgggaatgtttctctccccactggcacccatacctgccatatctgtctgacatgcttcccccaatctttccagctgccgtccaagatggccctggtggaaaccccccagagcccctccttccatgccccccaacactttgtatctgttgtactccagctccaggcttgcgtccacctccccgagggcacgcaggtgccacagctcctccgttgtatccacccagccaccagcacagcactggcacacgggcttgacacctcttcagcaaacaaagggacaggtcaaaacaggaagaggtgctgacctgcacagaagtggctgcccagccagggctgagcaccatgagattactaaccagcctaagggtctcctgcccagggccctcctgctggggcagagaaacttgcttgggaggcctgtcacctcctaatgtctttgccctgcatccacctgcgttccagccctgccttcttgctgagtcatacccagcctttcacctctggttctataaggcccacattgacccccaggcctccaggcttttagtcagctatgtaaacagagctgctgtggcataattctgagtggcgccattcctatcacaagcctacaggtctggtgcccctggagttgtgcaaagttcaacctccaccatcatacacagtggccccactgccagctccctgacgatcttctcatcccccaactcctctatggctggagctggcctttgggtccatgtgctcatctctagaagtggagttggttgtaggggtagaacaaatcaaaacagacttttgagggagctctcaggaatcaggccccagtggaggtgaactctgtgaacgatccccaaacactgctgtacataaaatcccccattcattagatggatggattgctttgggggcagtcttgttaccatcctagtcacagtgagtttggagctgtattcaaatgttttcacatttccgtaagtaaaatgggagaagatagccccaacacctcttggaagcaaatgagatgaacccaggagggacatgccagctgcctggctacaaagtaaataatcaagagtggaacgtagaccttcgccgctggtttcttaggaaggcagtgctggtgggaatactccatcagggagtgcggtccagggaagtaagagggagggaaagggaagtagggctgggacacagagagcaaacacaatgggcgatggtattttggagcggccacagctttgcagcagcacacacggaacaccttggaaaagtcttgtggagccaccacgttcagagcagccagtctggggagaggagaggcgggcgaacgatctgtgggctccttccagctcctgcctctcattggttaaagtgggtctcacggggcttgactcccccatcctcaggggagcgtcccccacccctctcacagccactggtgcagcctagcagggcgtggggtctctctgtgggggtcagctcctcctttggtggcagtggtggcagcagtggcagtgattttatgaccatgggaccaatggctgtggacaggggaccaaggtgagttacctgaggggcaggcagggtaagtccgtctggagcaacatccactaagtccgtttcttgaaatcagcacatgccacctgcaaaaaccctaatttcagcagagggtttggtggggaagggctgcagggactggtgtgctaaccctctgtgcccctcatgggtgagcacactgctcctcctgtctcttggggggtcaaagaaaggaacatgatcaactgtcctggttttcttcaaggaactgaatttaaattgaaacaggaaggctgaaatattcaggaaaaccctgattagtaggaacccagctatcggaaaccctcatgaattaggaatctatctctgcctagcaaaatactacaaatgagtggcttaaaacaacctggatttataa

SEQ ID NO: 54319 - DNA, 2381 bp, Homo sapiens
tctgtgggatgtgctgagtcaactcctgtcaccatgtgcatctccatctcctgatctgtgctcatggaatgatggcctggcctcaagtctgttctctgagttctttgtaaggcagagaaatgggcccagacaacagaaagagactcagagtcttatccagtggtcaatatccaaaaagcttttcaacattaaatgataccttttactgcttcaatatcaacaaacaggcacattcagttacctgaaaaattctcattcagggaacctgagcctgctcgaagaaacaaaatcatcagagattctgcattacacagatcgagcagccactggatgaaggggcctcaccggggcttgggctgggggcagacgcagccccatctgcagccctctcctcctaagggcctctctccttcattctactcagtgtcctcccagcctcagaggcccagccactgtgtcaagatgtaattgactgagtgcccccgaccagtccaggctctactgagcccatcagggcaggaacaatgaggtgcagctcaaaggctatttctcaggctcatggttgacggacctcactagctgcgattatcattttaattgcaaggccaccacagccttatattcagggtacagatttcaaagaccacaaagcactctgcaggcttcaaagggaactatggaaggcttgtgcttcagactcaaaggggcccatgacatctttctttctgttattttttagagatggggtctcactctgttgcccaggctaaagtgcagtggtttactcactgcagcctcgaactccttgctccagcaatccccctgcctcagccttctgagtagctgggacttacaggtgcataccaccatgcccgactaatttttttattttttgtagagacagagtctcactatttgcccagggtggtctcctgggttcaagccatcctcccaccttggcctcccaaaatgctgggattacaagtatgagtcaccatgcccagccttgttttgtttttaaagataggtatattaagagataatgcacacatagtacagtccatcctaatgactggacattctttgagttttcacagacacatacagctgccacacagctgctttagctgtgagttccagcacatcataatcaggcaattcatctgtctgtgtttgcacagttctttgtcacacccctgagctgctgccagaaaatgccctttttcctcattctgtgcaatctaggagctacttccccaaatggctttgaccttctgtagctgctctatcaagagagaaaatccagagtgagaacagagtttccctgtagggagcagggcctcttgtatatctaagaggtcactttgtggcaagaaagcgagaatgtggttgggtcacaagaaaacccaagcgagcggtgcctcatgcctgtaataccagcactttgcggggccaaggcgagaggatcacttgagctcaggagtttgagaccagcctgggcaacatagcaagacctcgtctctactaaaaacttaaaaacaaaaacgtggatagtcttgcattttggtgataggccaagaaggctgataggtcaaacttttcttttcagacataacactgagttctgtccccatggcctcagtccatgggcagaagtgtgggctgcacagcaccaagggcctcactggggacaggaacgacttatccttcctatgcctctagcacttagtacagctgacattggcagctatttgttgagtggctgagtgagcggtcttaggctggagatggggtggggccttgtttggaggtgggctcacccacggctcctgggtgtctgaagacagtggggagaagccccacagagaggggccctgtctctgctcgcgtggaactgctcacctccatccctgagtgaccgcagcacctcctcacttgtgtgcttgcagaactactttgagagctaccttgccgttgcctccaccgtgccctccatgctgtgcctggtggccaacttcctgcttgtcaacaggtaggcgactctcttccctctctcaggcctctgccttggtctcctgcctcctctactcccctcttgcctgcagctgctttttttctgcctacttaagtggtggtcaccaaagtaggatgcagcagctcagatttatgcatgaagagtgagaagtcagatcagatccctggtgatgcccccagggagctgggctgtcactctccagccacatactgtgacatcgctgtgacattgtggcagcagccagtgggaagtgtgtggggatgcaggggtcttcctcccttctcttctcagggatcctgtcagtctgcaagtctgtggcccagaatgggtcacctgactgttcagt

SEQ ID NO: 54320 - DNA, 1921 bp, Homo sapiens
tttatttaatgtgcgagattgaaaagtctccttttctcccctcctggagaaccgtggctttcccgactggcttatccataatcgccaagtgttttattatgttaaatctgcagcatcataaatacttatgaggaggatttacatcttggagacttatgaagaaatcataagtggggtcctgagccctcacgagtcagggagtcgggggaccggcaacctgggtactggaggcagcctctccaagagtcttcacaggactgagacctgccccagggtcttggtcttgaagctgtcctcttggccatgccctgtctccaagtagaaccccagacattacagcagctgaaagtctagactttcctaagaccctaagagcacgactgtcccctgggccactctcccttcctgggtggaagcagcagagagggaagccagtgtcctctgttcatgcctgtggaccaggcttgcagctggcacatttcatgaagcttgatgaatgttgaaaatagccctagagcccacggatggaggctctgggcaagagtggtttatgcagcagataattagcaggcgggaaggagacctgtgcgggtgaagggccatgtagggggacagaggaggggacagagcagcgttccacactgcatcgtttctggaatgcatttggtattgacctcctcctctctgattcctccccaactttcctgccctgggggtacctgagtaagcagtcccccagctctctgcaaaacaaccttcctgttcaaggaacttattaccttgtagcgacaggcacacaggagggctcccatgatgctgcaccattcctgctggactttttcctggccgtgtctgtgaggaggcagttagaggcagaggccattcccgaggctggcggatgcttccagctggacttcctgccatgctgaggcagcagggatcaagaagcagacagccgctgggaggttcagaccagcatgaaacctccccacccccgggtgctactgatctcccttgcttgtcaatttgtacatccagcaaatatttacccagtgcctgccaggccctgtgcctgtgctgggggagaacaaggcagggctctgcctttgcagcgcgcctcatctttccagcctggcctttgcctccttcttgccccaaggaactggttcaaacttcttggcatttgttcccaacctctctctccacttgaattttttcagatttagaatcattagctgttagggaccttaatattatcgggtctagctgcttctttttagagatgaagggactgaggcccagagaggttgaatatttgtcaggggttacacggagagccgatgacagagctgggcagggctccggtctcctgactcaggctccatgccctgctggcccttatcttgggagtgggtgggacagctccagctgctaggagagggtggggacactgtgtgacagagctgagtgtgtaggaccacctcgagcatcaggggtaagtcttgactgctggcctccagggcccctgctgtactcttacgatagatgctccgggccgccaagggtccaggtgtctacctggctgcccaacagctcctgtccaggccaaagcccctgcagaccttgagaagatgtgtgtcagtgtgaggtcttcatgggcatcttaatgcaaggttccccacaagcaggccctgaaacaaggattcaaatgcgagtagtttatctgggaggtgaaggtgggagagtatggaatggggacaggaaagggaaggcagtcagcagaggatgccttatcaagtcagctccttcaggagggacaagaacacagtcctgctggggatcttggagagccagtgtggagcatggctgagcaggagggagctggggtatttatgtaccaacttccctagtcattggttga

SEQ ID NO: 54321 - DNA, 1334 bp, Homo sapiens
tgttttgttttgagatggagtctcccttcgttgcccagactggaatgcagtggtgtgatctcagcttattgcaaactccacctcctggattcaggagattctcctgcctctgcctctgcctcagcctcccgagtagctgggattacaggcacctgccaccacgcccggctaatttttatatttttagtagaggcgaggtttcaccatgttgcccaggctggtctcgaactcctgacctcaagacctcaccctcccaaagtgctgggattacaggcgtgagccaccgcgcccggccctgtcttttctcaaggtcacttggcccagtgtcacagagctgaaccaagatggttaggctgagggataggtcccgaagtgctcagatctccgggcctcaaggcccaggctggggtggcacggcaggggctgatggggaggtgcccaggccgccggcggatgctcccggaagatgctctaagctgccgctccaggtatcccctgggctgaggctacctggagacgcccacggcagtgacacaccaagcggggtatggcgaatcgtcaggtccgcaaaaccacccagttcagcaactcatggctatgccgagcccgccgcgctcagctcggccagaaacagctcctagagccagggactggaccgcccccgctggcctctggcaggcaaacagccaccggccacgaaatagatggccgcgagggcttccgggagccgcggggcaggccgggagccgggccgcacagccaatgcccgcgcgggggccgtcggtagttacccggcaacgaggtggacgcccagtagagggagcggagccagtagggctggaagaactggcaagaaagccctagagagaggcgacctgccaattttggaagcggctttttgttttgtccccagatcactcattcctacctggtcttggaggaagatcgtcaaggcaaatgataagaaacagaaataaaccaggggaacaaataatgataaaaaagatactcatatttgttgagcacttactgtcggcctggctctttgcaaggattacttaatttgatcatctgattttgctgtcccaagttgtaaatgagaaaataggagtttagacagattaagcatcttggccaaactacctcaaactagggagtgtcagagctggaatttgaacttgggtgggcatgaactcaggtggcttgagttcttaatgagtcaaaccgtggacactcatttcagttcagcaaacctaaatctgtgttcctactaggccatgcagggccaatccaggttttatggggtctgaagcttagacaatgttggggggggg

SEQ ID NO: 54322 - DNA, 663 bp, Homo sapiens
aacccaacaatattatggatgatgattgtagctgcagctctagacgtggggccaggcccttgcagtatggctactagagggtcaggtgagcagtgggcaggggtgcccacagctggcccctgtgagcatcaagctccctccccagggacctgttgcccactcccaggccccctggctcctccacttacccagtcgttagcccagctgacaaggatgataatgcctctgccttggagagctggcgccgacgtctttatcaaagccaatattaattttcactaattaggagctgccgctaatgagcgtcacagctaatttagctcatctataacctaggaatggcactgctctcatgccaggctccagagtccaggatgttggtgcccgctccctcccccacctcctctccacaatgccagaggcaccagctgccagtacagcctgttcccacatgccaccagggccagcttgttctgcagagggtccagtggccttcacctccagggagccctcagggtggggccaaagggaaaatccctaaggaaggggtcagagtatgtgccaatcagctccaggagtaagtttgaaacaggaggttcagtctgggaggcttcctttttattagggtaccatccctgctgaggctttggctctgtcagttct

SEQ ID NO: 54323 - DNA, 1267 bp, Homo sapiens
tggggagcagagcaggcatcgccacctcctctgtcccctagctggtctccgtctttctcccaacatggggctggtttcatggacctcacctgtcacaggccacagggacccggatatcatccagttgagcctttccaagccccaagatgagaaagcagaggcccagagcttgagaaagggactgtttcccacctggctcttggggctactctgccccagctgtcctcaccattacttctccctccccactccccacctcatccgccctgaagctgccacaggtacagggctgtcaaggacaggggcaggggctcctcagagcctgctgtggtggtccttggaacctacctcccaaggaggctcctttcagtgcaggagggcagtagggattggcaggacctggcagctcatccaccaagcagtgaggaaggagaggtgtggccctgggggtcagggtagttgcttctggtctattggctctgcctttagcttgctagacagtttaatggctaccattgtccacctttgcaatacaggactttggacttatttgataattcataaatatttatcaggcacctctcgtactcactgctggggatatggccatgaacaggacagacaaaactgtcgccctcagagcctctcttctaacagagtgtgtactctgttgtatccatgatcccgccccacccccaccctcaaaggcggggtaggcccaggctgtgggcaactgggaagggaggggagggcctggccatagcacagagagtaggggttggtgtggcaatgtgtaggcaggcaccagtaccagccttgccaacttggcagctccacgtcgacagggaccaagcatggtggggctggctccttcctgaggctccacccggcctttcgtaattaaagccgtaagtcatcttccgacgggagcctgtaggctggggaggccacagctgaccttgcttggggtttagtgctgggagggagagtgagtacatctgggcagaggtttgtagagggagctgaagatcaaaggctgccctctgttctggcctaggctggggacagtgtttgggctctgaggctctgcttggtgccaggagcagtgccaagagcttcctccacaagcaaagaggttacttcctcttttctatgagtgctgagtctcaagcttgcaaacaccccaagtgacgccatctgtctgtagcaggaccctttgctccgggccctctccaggagggcctatgcccagagtttggagtgggag

SEQ ID NO: 54324 - DNA, 936 bp, Homo sapiens
gggattacaggcatgagccaccgcgcccagcctgtatgctcattagagaagcacaataactgtttgttgaatgaatgaacagatgaaaacacacatctcgtttctctagcagcaaaattcccagctaaagaaactcccttctatcatacatttatatgcctccttgcaatcctgtccccccaactccccactatgcaaacgcagccatacaaaacccagcaggaagtgacctaggagtctccatggctgggaaaggaagccttaggcaaggggatagctacagtgacaccccctcctgggctggccccatgttagagattccgaaggcatagactgatagactgagttctaaacaggccccactgtctgcagcttctgcctggccttgcccagcccatacagtggactgggaggacaggtgagagtggccactagccactaacttgggtagaagtaagctgccttgctgaccagcacaggcaggtgactcagcatgggttggctgagaatagcttctgtcccaaagtctaaagttagaagaggaaattgccccacccttgactttttccctagttaatccaagagaggctatgagcctctgctacatgcagatccctttagagttggggaaggggaagacctgggagctacagccacttccacggtgattctggtgttcacctgcgtgtgttgaaggcttgggtattaattctctaacgtggaatcggtgtccatccatcctcttcctcagtcctgcccattctccaggaaccacctcaaacaataacgacaacactactgagtccttattttgtgccggggatggtcccaaagtaatatatctatactttcacacttatttaattctcataaccctgtggggcagatgccattattatctgtattttacaagtgaggaaccagagcacagagggt

SEQ ID NO: 54325 - DNA, 985 bp, Homo sapiens
aggagttggaagtctgtgcccaggaacaggagtgggtacagacaggtggtaaagtataactgggctttggaagtataagattcccatagtgcactgggtcagtgggctgcagattaggaaaatagaattcaaaagcacctgcccctcatttgccttaatgcaagtaccaacgcacattataattcttttctcaggagaacggaggctggcttcagggccgaccggagggagtgggggaaggtctgcacgtgcaggtgaggaggacctgcccacctcgtgccttcatctgtagacagataatacacacatccgcggtgaaaatgatggtgctctggtattcttcccccaaagtgccagctgccaatcggattgaattagatttcacaagggtttttgaaatacatggaattcaccagcaaattacccttaaagagggaaaatcaatcatttggagcagagataagctgaaggcgaggcagcctcggattgatcccgtctgtgcaggcgtgtgtggaattcagcagataacctgcggagaggagggaggggaggctggctgagaggtacaggaagggcagagaggcagggcaagagggggaaggagggagttggagagggagagattggaaagaggaaggtgagagggcaagaaggggggaggaaagagaaaggagaagagggacagaagaaggaaaggaagaggagagagagaagagaggcttagtctgcacaggctgctgtaacaaactaccattgacggttggcttgtaaacatagaaacttatttctctcagttctggaggctgggaagtgcaagatcaagggcccagtagatgtggtgtctggtgagggcctgcttcccactgtgtccccacatggctggaggggcaaggattgttctggggtcccttttataagggcactaatccctttcatgaggactctgcactcatgacctaatcacctcccaaaggccctgccctcc

SEQ ID NO: 54326 - DNA, 1799 bp, Homo sapiens
ctggaagctcaggtcatggggctcttccctggcagacccgagttggggacagggttggttttggtgagggcagcactgactctgggggccccactccgcactccagattcccagccccgatccagcttgggctgagggtgtcacaccagcccaccaaccagaactccctgggtgcctcacaagagccctggccctttatcttgccccagcatccccctaccccccgaccccaaacataaaggtggccttggtccttgctgtggctcctgaggccaccctgccttcacatgaccctggtccttcctcttccatgaaaaggaattaagacctcctccaagggcacattgtagtttacagggttggttgacggtcccctagcatttgaggtacaaagaaaagaacacacaaggtccctgccatagggaatttcctggcttaggcaagaaaacacaattcacatgcttacaaaacacgggggagcagagaaatgatactgttttcatttaattctgtgagatgtgcttaccctccccacttcacagatgaggaaattgaggcttcaggagaggaagtgagttgtctaaagtcacacagctaggaagtgacccagcctgttcctcaacgttgaactgtgctctcttaacattgcgtcacgcccctgggtcactaacccaggggccaccctgactgatggcagagagagacaaacatcccggagaggcaagctggtgtcaccaatagcagggcagtgcctcaggatggggagggccaaagagccagagagacaaaggaggcatctgcaggcctcgttgtgctggagggagcctggaggctggctcaggcctccctccctttgggggcccaggccacctgcagcggaatgcgccagtgctgagagccctcaggtaatgaatgaccaagggaagccatgcttagaagtcaggccacccaacccaaaggcaggacctagactgaaatccacccctctgaggcagggaaaggtctgcatgcaggtggttaagtagcggaaatatcacccttgaccctccctcccaagggagtatttaacgagctgatgtctgttgagggcccaacatgtaagctcaacaaacagctggacaaccacgctgggtcagcacacggagccgggtctgctgggacagactcaggtcggctggctctgggagccttagagagactaggagggagcagtggctcatctgacccttctcaaagctaccccccacttccaggaatgggaggcagggagggggcaaggtctagggaagttgcggggcagccctcctggcagccggctgataaggcgctgccctcgtgggggtgggaaagctgcagccctaggagcaaagtgcaggagctacacggggagggaccggcagggagccaggagggatttcatgtgtccttcccctcccaagaaataaataaagctaagctgtcacctcggcctccccgcgggcagctgccagctccgcagcctgtagtggctgggctctggctccgggacccgcggtgggcgctatcagccttctcatcgcctctctcagctggaggagaatttaatccacaggctcctctccacacacactagggctccttttgatgtttctgtttatctcccttccaacaaaatcgcccctctgcagctccaagagcccctccagcctcctccgcatctccaccccatgaaggcagtcccccagccccctgtgggacaagggcagggaggaggcctagcaggagcagggaggtgggtgtgccctccaccagtccaggct

SEQ ID NO: 54327 - DNA, 3642 bp, Homo sapiens
tctctcaccgtggtttcttggtcctgtggacatttgagtttgtgatgaatgagtgtggcttcttgggctagctggcatgggactctactgcccaaacccattatgctacaaatctgacccacagactcaagagaggagatgatccacccagggtccccagggaaagcctggcagtgcagggactagccaactctcctctgctaacccactgcccttacccctgcagcaggctcagtggaaaaggagccccaggaagcttggctgtgcccctggttttgtccgtgctggcctggacttccccttcacacctgagtggggtgggtgtagctgcaaaactatggctctgccgggaaacagaagtgaggaggacctagggaaagggctctcccacgtactcccaggaagaaacaaaacctgccccaagggggccctgtgctgcccccttccccagcaggccatgtggcaggtcccaccagcacctctcccagcttctgcccctttctccctttgcctgacatcacctcctaccccagagccaccccagggctgggagctgaattcagctccagcttcagctacggtagtatttaccaccagcacacataccttgggggctggccaaagggctggctcagcagacacggggctgcaggccagaggagggtatggcagggcaggcagagtagagctggcagccaaagcaagatgcgcaaagctgagctgggtggggttgggggccctcaagtggacagaggtgtggacaagtggggctagcgtggttgttggcctgagtgtccctgtgaacaaggtggggcagggcaccaggctgggagccctcagggtctaagcaatggggttaatgaccccaggattgtacccatagcacccgcagcagtagggaagggatgttctcccctggaggcaacttccttgagatgcacggcgggtgggtgcatcagagagaaagcagagttcagggagtacgggagagggggcattgctcaatcccccacacctccccacccctcacacactggccacccatcccacaggtcccaaaggagttgttccccttttagaaaaaagctgtcttaggattcaagtttggggagcaggggaggatgttcagttttcaagcaagagggccagacaggagagggtccaggacaagccagagggacaggacaaaccaagggtccacaggggtttgtcctggggagggagggaaggccagaaaacaccccatttactgtgtctgagactccagctgggacaaggcccacagcagcctgtcgttaggaggacactcgaaggcatggcatgggggagaggggcagcgcacagcacgcagaggggcctgcacgtgccccgcggactccacatctgtgcacatgcctgtgtgttgtcagggaagctgtgcagcccggctaaaattacaattctttggcgagaggatgttgcttattgtcaggagcagatccttttggacacctgggtcattgtcggagaccgggaaaagtgggtggggaggaaagcccctggctccagggtggccaaaagcatgtgggacaggaaaatgacccggggcctgggcctgagcatgtgccaggcgggaaccgtccagttgccgtgctgctgtcaagacccaggccccccgcccgccacccgccacctgccaccaggtaaggaggcagggccacctagaggaagagtgccgtgaacctgggaaagcctgagtctcaggagtaaaactctcgcttggattgcaacgtcctggggcctcagtgtccacttagttgtgccctcattgtgtgcccttgggcagatcccacccttctctgagcctccgtttcttcatcttaacctgagggctgccagctctaaaatcctgtgggcaggagggaagagctgtcttatgaccatgtattatgtgctaggctcttgctgagcatcttatacctgtcacatttagttctcataacacccccaacatgggtggtatcatccctattttaaagatgaggaaacagactcagagaagtgacttgcccaaggccacacagtgctgtgtgactgagctgagattcacaccttggacaggccagcactgcagacaggaagagccacccacctctccagaaccctccagtgggcaggcggggctgatgcctcatccttcagctatttagaaaaaatgaactgaccgtgcattgacctccacgccctccgtgcaacattcctgctctgcctcagacccaagctgaaaacatcattctttcattccacaaatatttaccaaggtcctaacatgggccaggcccaggcagggaggctgtggggatgcagagttccatcaggggcatctgctcagaacttgggcctggacctgtgcctgagatttctagctgtggcaccctcagatgtttctgtcccagtacaagggaaaggagctcttgttggcatcttctcagaatgccagtttttgtgaccttcacctctctccacccagcaggccccgggtgacccctgtgagtgtgcacgggatgggtgtgtgtgggtgtggacaggcctgtgtatttttcatgacagggcgtgagcttagcccacagtcgccaaggcaacgccctagcctttggaggtgggacccaagcttggttagtcgggcctaggaagccccacccaaacagctgaactctgaccagctgctagaggttgtcaagtaaacagttattaattgcctgctgtggctggccctgcactagatgcaaaaggtcccgtccttggtctcacaggacatcccaaagagaatgggacctggttccagctccccgccaggccccatcccccaggatggtccacaggctggggctggggctgtaggaaaagactatgttctgtctttatcaagatgcagagggaaacagaggcatggatcaatcaggactggggctgccaaggctaagaaaggaagcgtcacaaggcataggctcagggcctgaagccagcaagtctgccctggggctttctggccagtgaggacaaagggcatctcagatgtgtttattgatacctgcccccgcaggaagtgtccattcacatcagaccaagggggctgggaaggggaagccaggctctattgaaggaagcggcacttccagcaccttgggaaagcctccgtgcatccggggctggagctggaggctagcatgcctccccagggagggcctaggcagctggccagaggtcccggcccgtggatgcttctgtggatgaacccctcccagactccccaggcccttttggaggaggactgtgtgcagctcaggctcccggctccagccagccaccctcacgcttctatgctgtgaagacgtcctcagggtccagctcaagtctttttgccccctactactctgtgccaggcatcattctaagtgcttgtttgtttggttggctttgttgctgttgttgttgttgttgttgtttgagatggagtctcgctctgttgcccaggctggagttcagtggtgcaatctcagctcactgcaacctccgcctcccaggttgaagcaactctcctgcctcagcctcccgagtagctgggactacaggcacccgccaccacgcctggctaatttttgt

SEQ ID NO: 54328 - DNA, 678 bp, Homo sapiens
tgtcctctccacactaaaaaagcatgattgaagtccatggggcttctttttgagacagtcagaaaagaagcaggggaagcactgcagaaagtgggcacagtgtctgagcacctactgtatacatggccctatactcagtgctggggaagggaggatgccccaaagggtgcctcccacacatttccttgaatctcagacttgtggaagaccagaaattcaggagaaaagatgggtgatgatttcaaatgtctgctaattggttcaaagctgttattttcagtatagagagagagccctgtggcctaggtctggttggtcaggcagggccttccccagttgctggggctggaactggactttgcctcccactgccctgctctgtccacatcttctggcactctgccctttcagcggggttcactccttcctgcttggtatgagccatcagacatggctccaggcctggcattaagacaactgcatatttatggggtgcctactatatgctagttcctggtcaggcaggtagctccaggctgggctggtcaccccatccccaggtaggttggggtagtgagagcaagaagagcccctagaatgggagcttgctgggggcagaggttattgtctcttttgttcagtgtcaaatctccagagcccataacagcatctggccat

SEQ ID NO: 54329 - DNA, 424 bp, Homo sapiens
acaacgtcctttgaaattaaagacgccaaaggaaatcacaaaatcaagggcagaaaataggccgctgtgctgttggggacaaagatattgacaatacattacttttattagtggtacagcaacaaagaatactaactaagcccttttctgtattaacctaatttattaaagctaaacagcaacccagtgaaatagatgagtaatgccactttacaaatgatgaaatacgggagagtttaagcaacttgcccaaggtcgtacggctactgtcagcaatgagataatgtgaaacttccactccacattatcatcttgtcccaacatacaaaattacaaatgccacaaagttatttttttggaacttcatgtaataaaaaataaagcaattagtacttttgcaacagccaaaatcttcatcccaatc

SEQ ID NO: 54330 - DNA, 1934 bp, Homo sapiens
cacattctatagagaatcccctttcccctatgttttccttccttcctctccagatccaggagataatcaactaagagccagtcaccctttcatttccatagaaatattttacaacgtgctcgctctcttagtcggctacctgagagcttcctctgcacaataaaacttggtctccacaatcctttatcttaacttgaatactttctttctattgattctaggttttcagataaactcaaccaattatcaactagaaaatgtttaaatttacctatggcctggaagccccccgccgctttgagttgtttcgcccttctgaaccaaaccaacgtatttcttaaatgtatttgattgatgtctcgtgcctcccgaaaatatgtaaaacccagctgtatcccaaccaccttaggcacatgttctcaggacctcctgagggctgtgtcacgggccatggtcactcatatttgcctcagaataaatctcaaaatatttttacagagtttgactcgttttgtcaacacctagaatccagagtaaatacatatgcaaacgtcaatatagatgatacacatgtgcttcctgcagcttcgctacccttacaaacaggcaactgaagccaacggccaaagtgtcctgcgggacggggctccagcccacctcgatcacgtgcgcccagcacaggcacaacacagctgcccaaggggtcaccctacaagactcacccacccccacagtgggaagcgcagcctgagggaaggcctcggggccccagccgcgcaggaacccactcgagccccgaaggagatgctgcccagggcctgggccgtcctcccgggggcattttcgcagcccgccccccgcagcccccagccgcccagagaaagccagagaaagccagcgaacgcgcctgcgcagtgcgcgcgcccccttgccaactagggcagggggagcagaggggccaggcccggcacagcccattctggggcagatggacgctgcgaggcacctcctccccaggatgagggtcccagggcttacccgcgcccaggaggctggccaggaggaagagggcgtacatagcgccgtctgactccgcagtctgcaatgcggagcgtcagctgatcccccgcagatataaatctgccctgccccaaagccgtccagagcgcaggcgctaaccccgccccatccgggcctgcccgagctcaacagcgccctgactcagcgcctctgagggcgcctgcgcgaaggggaggccaataggagggggcaatgggaggggcgaaaggaagggctatggggaggagtgaggaagaacttggagaaagggaagggaaaggtcataaaagaaaagccctactaattgaataggtcagagattatatatgtaaaataccttttaaatctccacattgttggccggccgcggtggctgacgcctgtaatcccaacacttgggaggccgaggcgggcggagggttcaagactagcctgggcaacgtggtgaaaccccatctctacaaaaaaaaaaatacaaaaaaattagcccattgtagtagcgggtttcacatagaatagcttggggtttcacatagaataagtagtcgtgtaacagggtacagggctcagtcctggccaggggcacgtgggggcaggtggtggcacctggtcaaaggcaagtctgggctgggcatgctggctcactcctgtaatcctaacactttgggaggccgaggcgggcggatcatgaggtcaggagttcaagaccagcctggccaatatggtgaaaccctgtctctactaaaaatacaaaaattagtcaggcgtggtggcgctcgcctgtggttccagctatttcaggaggcagaggcaggaaaattgcttaaacccgggaggtggaggttgccgtgagtcaagatcgcactactgcactg

SEQ ID NO: 54331 - DNA, 2153 bp, Homo sapiens
cagctccacatttatgtgccttataaatacccccatcccctacctcgaattctattccctgcctctttctctggtaaactcttattcatccttcaaaatccatttaaggccaggcacggtggatcatgcctgtaatcccagcgctttggaaggccaagtcaggtggatgacttgagatcaggagttcaagaccagcctggccaacatggtgaaaccccgtctctactaaaaatacaaaaaattagctgggcgtggtgtcacgcgcctgtaatcccagctgcttagaaggctgaggcgggagaatcgcttgaacctggtgggggcggggaggggaggtggtatggaggttgagctgagatcatgccactatactccagcctgagcgacagagtgagactctatatcagaaaaagaaaaaaaaaaaaaaaaaaaaaacagatactgccagagggaaacctttgctatttgctatgctttaggaattggtggacacttcctcctcactgctccctctgggatctgttcacatctcaacagcatttcttattttgtcctgttatttttttagcaatacatttattgagtgcctggtatataccaggcactgtaccaagggctgaagacagagaaatgaagcacgcaggctgagtggaaaggccacacaagaggctcgttgttatgtccccactccggggaagccagattgctggccgggcccacagctccatcagggctccttgtacacacgtcccattcggcaccctgaggccctgtcacccgctgggctgtgggtgatcagattcccagtcagtctattctgagagccgatcagtgcatgggatgcggcctggccccacagctctgtccccagatgttattcctattggacaggcggcccccatcagctgctctcttggggagagcaggagctgccaagaaggccttgcatgagctggtgagtcagcagcagcagggcagtggggcaggccgggagctgctgagtcactgtagcagtctgcaagttggtgaggtcagagcccctagagaatctgatgaaagctgggaacactctgccagaaaaatgctcagacacattttgcactgacttcaggaggctctcaggcctcagccacccatctgtggatgtcagaaggagaaccttagtaaacccaaagaggggaagtgacttaactgctcacaacaccaataaataatagaactgagatcagagccagttctcctgagtcacagtcctgtcaatttatcagattatgtccctgtgccaggcatctatcaaagcctccctttatttcaaggcccagctgcatttcacctcctgggaagcccccctgcttcctctagcctcaggcacctttctccttctctaaatttcagatgatttgctgctagagcccttactcttgggtgaacttggagggtgaaaagaacaaagactagattagatcagttgtttctgagcctgaaaaggaaagcaagaactgggctgtaatcaaactgaccatgttagcatatcttaaaaccaaagcttcttagctgggcgtggtggtgtgggcctatagtcccagctacaggaggcttaggtgggaggattgcttgagctatgattgacccactgcacgccagcctgggcaacagagcaagacactgtctcaataataatactaataataataactggcattaattagttgcctgttaatatacctgactgtcaactgatcactctatatacataatctctctttttttttttttttttttgagatggaatcttgctctgttgcccaggctggagtgtggcggctcgatctcagctcactgcaatctttgctgcccaggttcaagcaattcaccttcctcaacctcctgaatagctgggattacaggcgtgcaccaccatgcccagctaatttttgtatttttagtagagacgaggtttcatcatgttggccgggctggtctcaagttcctgacctcaagtgatctgcccgccttggcctcccaaagtgctgggattacaggcatgagtcaccatgcctggtcaatatatacatgatctctattatttatttatttatttgagatggagttttgctcttgttgcccaggctggagtgcaatggcacaatctc

SEQ ID NO: 54332 - DNA, 842 bp, Homo sapiens
caaaaaacccttaaccatgccagcactctgtaagttctcaataacacatttaaaagtaaactgaggcacaataaaattagaaggtttatttattcatattttattttatttatttatttatttaaagacagggtctcactctgttgcccagactggagtacagtggcacgatcttggctcactgcaacctctgcctcccaggctcaagcaattctcctgcctcagcctcccgagtagctgggattacaggcatgcgccactaccgccggctaatttttgtttttgtttttgtttttgtttcagtggagacagggtttcaccatgttggtcaggctggtttccaactcctgacctcaaatgatccacctgcctcggcctcctgaagtgctgggattacaggcgtgaaccactgcgcccggtgtagaaagtttatttgagcaaatgatgactcatgaatcaggcagatccaaaccagaagtgattcatgagctctactgagagaacacagctgggacagatacagaagtaaagctaaggtggaggctgcagtgaactaagatcgccccattgcactccagcctgggcaacagagcaagactgtctccaaaaaaaaaaaaaaaaggtaaagccaagaaaatatttgattatttgatttggcagggcacggtggttcacacctataatcccaacactttggggggctgaggcgggagggtcacttgagcccaggagttcaagaccagcctcggcagcatggcgaaaccccatctcaaaaaatacacaaaattagctgggtgtggtgttgtgggcatgtggtcttagctgcttgggaggctgaggtg

SEQ ID NO: 54333 - DNA, 2348 bp, Homo sapiens
tcgtttgagcccagtagttcaggaccagcctgggcaacatggcgagaccctgtctctacataaataataaaaaatattagccgggtgtgatggtccacgcctatgatcctagctattcgggaagctgaggagggaggatcgcttgagcccaggaggtcaaggctgcagtgagccagatcgtgccactgtgttccagcgtgggcaacagcaaaactcttgtctcaaataaataaataaaaaataaaaaacaaaacaacaacaacaaaagaagaaaaaggaggaggaggagagaaagaaagaaggaagaaaaagagaaagaaaattagaatgggaagaatttcagttttataactgtaactgattattttaaacgtatttttattgtaaaaataaaacccggatacagaatccaatggttctgatgtacggcttaactaattactacaaagtgaactgcctccgagaccaagaaaaagaactttgccagccacagcagaagtctctccacgcgccccaccccagtcactccttcctcttccataagtagtcatccttattctgactcacaggacgcattaattgcgtttttaacagcaagtccgctggaggtgggaggcgctcggggaagcttctagggccgtcagggcccattccctccgctaacacccctctctccccaaccctcaggttgcgcaagacctctccagcccggcgaacccgtggggctcagcagtcctcctccacgctcaagatgcagtttgatgcaatcctagaggacgcagtttcaagtttctcgagatagagaagcgaaagaggatccgaaaccgcgcttcacatctgaatctgatttcagattcctccggaatatagcggaagcgcggggttgagggcgcagaccggggcagaggagaggcgcgcaggtctgctgggacgcagcgcggggcgagcagtggcgcactcgtggcctgacgcatccgcgagactgcacgcggccaggcgggggcacgaacgggttggggcatgcgcgggcagcgtcgagtgggtcccttgggggtgggggtggggggcagtcgaactagggagagagtctgtggaagggctcagttgtcacttcacacctttccccgctgtttattgatctttaactctctctgtgtgtcctctctctctctctctctccctctcctctctctgtttctctctctctatcccttcctgtccaccctttggggccatctcttccaagaaacaaccgtctctcccagcccatgggaaattgtctctcctgcgaacttatccaacctgagggggtctcatccatgccgataccggctgcttgtggaaccttgtaagagttcttccctctccctgtaaaatggagataagctgtgtggtgctgaggccagcgccgggcacactcaccctcaccttcttcctgagagaggaaagagcctggagacctggattctacctctgcccccaacccctaccacagggtagccctgccaccacctgctggttctttgggcaagtcactcttttattggacttccatttcctcagctctaaaatgaaggaggtgagcccagtgtggtggcacctgtagttccagctacctgcaggctgaggcaggaggatcgtttgagcccggggggcagaggttagagtgagcggagatcttgccactgcaccccagcctgggcaacagagcaagaccctgtctttaaaaaaaaaagtgattaaaaaataaaaataaaatgaaggagttaaacaaactcaggaattttgtatgaatggcataaatgagcacattagaaggaagcaactttccttctctctttttttcaatcctgtacaggccagcttcccctctgccctctgctcccctcctccctccctaccatcctccagccccccaaagccctcccaatttgagcctccttttggaaaacatctctgagtatggtaccgttggtatcggtgactaagaggctccaaggatacccttctgggggatttccaaaataatgaggaagtccatttccaaaatcatgggaagtcccaactgggcctcccagacagttggccactgagtctgtcccctaaaggatctgcttgacttgcacagtcttaaaggcatcatgtctggtttttaaacataatttcagttagtagccaacagttcagatcaagggatcacacggcctgtttgacctgttcttgcagggtcatgcatgctccactgagccatgggaagtgtccacacccagccatgggagccctgtgggatctgaaactgacatttctgctttaggtgccttaagctgaagaaatgcatagtagcggga

SEQ ID NO: 54334 - DNA, 2855 bp, Homo sapiens
gattggagagacatggcaggggcatcacagggatgagccctgggctggggccgcagccaggagcagagcaggaatgtggcaactgtgggtccctggggcagggtggagacggggagagatgccaggcgggcctggagggtagggaggactggaggctacagcatacagctcaccattcatagcccagggcaaaccattgagtcatttggggaaaacatgacatcactgagtctcactgtctgccgcccacctgctgtctgccctctatggttctcctgatgacctcagtgccccaagtcctgcaaggggacccgcacaccccatgtagcagggccaggtcagcactccagcttcctgcactgggttctcctccccagccactgtctcccaccttcccaccactcccttccctgcctgggtcccctgccccagccctactcatacacactgctgaggcagaagcttctggaagtggtgatgggcatgaagagcttccagaagggcttccatgccaagcccttgattggaattctgggtggggaggggacagctcagaagcctgtgtcgagcttttagagttgcttttccttgagaatggtgcctgctgtttgggtgggatcacttttaaaaagtaaagcctggtagagctatgtgaccagcactatgccatgacctagaggagattcagactgacgggcaggccctgccttcctgcagaatacagttgagtgtctgagagttctttctgtactaagcatctttgaactgagtgctttattttcgtccatctgattgcgcgaggtagtcttattttacagatgccatccccgaggcccagagaggttaggcaacttgtccaaggccacacagccaggattcacacccataactgtccaactccagatgtgctcttagccactctgccatccggccacaaataaagccaccagagaaccacagaaggtggaacatatccaacatttgcccgataaattgtatagtgcagacaggaagtacagggagttttcatctcaaagtgtaggtcactccccagagtggcttgaagtctgtagatccatttaggagaacatccagcttcactggctgtgcaaatcccacccatgcggctgtttggggtgagaagtttctttaaatgtctgttgactctcttctctggaaggagcacgggggctcagggggcgcctgtcctggcattggtggccacacctagaaacggactatgaatcaagccaggggcccagtgccagcttccttggcctgtctgtgggcgcagatgccagcctttgcagctgctgctgcaactcacagctctctcccggtgccgccctcagtcaggccagctggagtggaggggccagtggccgtgccctgtgcagaatgacatcctctcaccttcacaagggaagcgtgattatccttgctttccaggtgaggacactgaggcctagagaagttttctggctgtctgagctcccttggcctgagctcccgcggtagaaccgagactcaagtcttctttctgcaggcagatggccagtttcttcctggaggagggaggagccagcttgccctctgacactgggtagcacagccctgttcgattctctgttcggggcttgcacttctgattcattctgcagtcactggctctttgtggttcgggaaaatgaccctctagggtaggagaaaagctcttggagcacttttgaagccatagaggccctttccaggctttggaaaatgttccttctccacccagatgccaacaccaccctggtcctggcagtacttgtccctggaagggcctcactgcggtgactcattacccagcatgcagcacattgccattgctctcagtgggcaggtgctgtggggacacgggtctgcgggcctgctgtcttcaggggtcccccatgccttttaacgcgtgtatcagtgtaccccaagcctcagttctgtgtagtttgtacaactctggcccctaccccaaggatttctgggaagcccccaggaatgctgataagttcacagtctgccctccccagccccagtctcatcaggcttcaggggtggccattcctcccctccaggagagagagaactcaaaccagtaactacccctcctcaggctcaggcccaatggttgctgtaataatttctggggagctgtctttgctcttgcagagaaggcaggccttgaattcagactggaggggccatttttcttccagttgccctcaaattttcctttctgtgataggatttgtcctttgtctctgcttaaattcaaagacttgttaaaatgacttttctcaaacaagaggctaccctcaaaagaactttgcctctacggatagaaaactggaacctacttttattttggttttagttttattaaattgtataaaatcaataatacatgtccatggtgcaaagttgaaaaggcacaaaacagtctatgtgtggtctctttcccatgccggactcagacactcagcattgttagttttgtgtgtgtgtgtaagctgtgtttaaattgtccagctttaaaacaaaacccttccctgtttcacaattaggttgaccgaggcacaacctgaaaaataacctggaaatagcatcgggccccctgcagcgtccagctcttcccgaggactgttattatgataacgatcattgctaaggctgtcccttcccaaaaagtgttgctgcccacagtcccagcccccagacctgagcagtcacccacacagcatgaatggggccagccccagcctgcccgctcagcttccaagcctagcagtctcaggctctgggctaaccctggcctccca

SEQ ID NO: 54335 - DNA, 720 bp, Homo sapiens
gcctatggagcatctaacaattcctcggccttcgctaagaactgcttctgccacagctgcctgctaaagccaggttctgaccagggccttttctcctggtcatatctctttcttctcatggggcggctgctaatgggaagcgggtcatcacagcgctcgacaacattatctcacttgggaggcttgggtttctcctgctcagcagagaacagcaaggcgcacagaggcccagtgacttgcccaaggccatgagccgggatgaaagccagacttcctgctgacctccacctccctaaaggacagcgtgacccctggaccggaccgcactgcagcgtcctgcccagacctcgccctggccttgggttgtgggacactagctcctcttcttctcctcctcctctctgccagctctgccagctcccctgcacccctctcacctcctaaatgcagcctctgccctggcctcttgctcattctctctctcctccctttcttctccctggatgacctcatccccacagcaatgtcaatcatcacccacagcgggtgactgaaatctgcatctcactccaagaaggcccctcagccctggcacccaccccaagccagctgtcagtgccctcccaaaccaagcaattcccgactccttgttgccagtaaaaacattcattatcagcacctgcatttctatgttacttttttttttttttttttggagac

SEQ ID NO: 54336 - DNA, 3403 bp, Homo sapiens
gagttcagaagtgcagttaaagaatataaagagagaaagaatcaaggcaagaataaggaaggagaagaaggagaggacatggagggaggaagaatgtgaggaggcaggggtgggaggctggggctccccagcattcccgcctccctctgctggtccgtggtgagggaggagtgagggcctcctgtggctgacattcttccagggaactctgcacagtcctgctgatatcatcagtttcttttgctgctgccttgaaaagtaaacaaaaaagggctgcaacactgcaactccatcaggggcatgggaagatgagggtggggatggggtgaaggaacaggaatccaacaaatattaagaggacaaactttggtaggaaaatgatagaccaagcaaagtaaaaggcaaacaactttaatggttattttgctaaagataaaactctgggtggtaaaggaattaaaggcagagtctcaaagagatatttgcacccccgtgtctgtattagcactactcccaatagtcaagaggaagcaagccaagtgttcactgatggaggaacagagtgtggtacgcacatgtaacggaacattccattatatgtataatacaggaaggaaatcctgtcacctgacacaacatggatgaaccttgaggacattatgctaagtgaaataagccagtcacaaaaagacaagtcactgtatgattccacttatatgagatactgagaatagtcaaaaccagagagacagaaagcagaatggtggctgcgggggctgggaggagtgggaattactgtttaatgggtacagtttccattttacaagctgagaagcctatggagatggacggcggtgacggccacacagcattatgaatgtattaacagttaacgttactgaactgtgcacttaaaaatggtgaagacagtatgttttatgagtattttacgacaatttaaaaattaaaagaaaaaaaaccagaacacactaagggttataggcacaaattctccttatgcccaccaccatctcagctggtagtatgacgggtgtagacaccattagaggcaatggtgaatctatggggaaccacccaggaaagtcaccatccaaatgtccacatccctgcttggcaattaaaacgaagacacttttcttcagcacctggtgaagatgtttagtttctagtgctttccaagatccacctcaggagaagtcaatttgtccacaggaagcgtagtttccaaagctgtctacggtgaacctctgagagatgtgaattgaattcagctttagggagccaaagtagaagttctcaaacaactgaaaaggaagaataaaaacccagaatgaatatttaaagtatagatgaaaatattaaacatcagattatcttgtaaaaacaccaaaccacaacaatcccaacaaatctctcatgctttttcttttcagtgtttactctgaataatgatccaggagaggagggatgggggtgggagtgagaaaagaacagccagctcttctctctgattaattctaaagtctcccctgacaaatgcaccagagaaagaggttctgaaaagtcaaatccgaaattcatctactgaccagatatgaccaagaacttatagcaaacgccccatggccacaccctgactcacagagtctgaccaggctgcttctgacttccagtgactgaccatgcagggatctcggctttgttgcaccagggttaaatttgacgtaacatatatctaatcaacgccatttgttaggagcgctgactaaaataaatagaagataaggctcctgactcacaagtgattcagacaaaccactgagggacacagagcatgcacacacacacagaacaacccaagggacacttctactgccaacagaacaagtacaagtgattacttatcaaatacctttattagacttggattcaagccagcgacctaaaataaatactttttgctatgatcctgtactttacaaaagctttcaaaagtgtgtcagagtgagggatgaaccatacatactccaagagggactggactttgtgattaccacatttataaggcaggacccaaaatgacatcagaattcatcccaggaaaatgcagccatagtgcctgaataaggagcgtcaaagagtaaagagcgtaccttcctctgttaggatgtaggaattgctctttcttaaaatgtcagtacaatcccaagaaagccttggttgttttttagagatagggtctctcgctttgttgcccaggctggagtgccttggattgcagtagtgcaatcatggcctcaactcctaaactcaggcaatcctcccatctcagcctcccaaagcacggagattacaggcattagccaccatacctggccccaagaaaggcttgtgacacatgtccccaacgatgcctgaggggacctttgcacatggacaagtgactgtcttttcacttatttttatacaacctccacaaacatggaccttggccaccattgcttttcctcttcctgcaattaatggcctagcaaaatgcctgagggttcattaaaggctaactttataaagcccagtaaatattgattcttcaacatgacatcaacttgaccccaaagatctatttagaggttgtatgctgcattgtcttgtgtttcagaaaggtgatcagctcctgcctgcattgatttacacaattaacttctcttcctggctttggcagcctgcttaaaccatatccacccttttatgtaaagaaattcagcctgaaatggttatctgctaatccctttgctgaacactaatttgaagtgaaagacacgtcactaagactgacagatttatagctctgcaaactgaagccttctaggtacagaaaagctataaccaaagaagcaataaaagacaatacaaaagaaaactaaaaggaaactcataatactttcaacaagttactttttaaggattggcagcctgtgagtgctaccttcttctctttgtgcccatgttttcaagtagtggggaggccacagtgagaagctgcaagtgaccgacccatgacttcacttcaccttatgcagatggcctacagacagcatgaatctgccagggatattctcctactccaggtttaaggaaatagcaaatgtagcaatcatgaagttagctgggatgtgactgcaatgcaataacagaagaattgagagagataactaaacataaattctcacatccactaaggcaagagcaggctgtggaaagagtgctggattctaaacgtatgcccagacatgtaagctgtgtgactgtggacagaaggcaccacccactgtaccaaccacaacaggggcacaagatcataatgggcaaagacctcataaga

SEQ ID NO: 54337 - DNA, 771 bp, Homo sapiens
taagtcatcaaaaagaattaagttcacaaataagttaccccccccccaaaaaaataaattttgtttcaaagttatgtttattaaaattcctcaaacctaaaaaaaaaaaattctgagtttctgccaaataccgtgcatttgtcttctgggccacctgtgagattacttctgaggagaccaaatgtgggaggtaggaagaggcaagaaggaaatggagatccaccacatccggggtcaaaaaaaaccttccatctactttaaaaatactcacatgggctgtgcccaagtggattctttctaaacatcatcacagaagaatgtaattgagtctgtttaccctaaggtaagtcatgctcctctacacacagacacacataccttcacctaggtacaaaaaaattgatatttcttttctactgaagaaagggcacaaaaagtttcttgggcagactagacgtttttaatgctttcctattgtgaaaataagtaattcaaaatctaagctgttggaatcttaacatattgtaaggcttaagggaatgtgattatgtgagtcacttaaacttgtatctgtaacctgggcagctgtaactgttgtttttctgattatagattagcctttttcctcacctacactgttttgtaaatggttgtaaatgaataaacagtgccagagaagatcccttcccttttaactgttgatcttcattttgattaaacttccctcttacatttctcatacaaagacttaaaagactatcacatcatcta

SEQ ID NO: 54338 - DNA, 1989 bp, Homo sapiens
tggcttaagcctgagaggcggaggttgcagtgagctgagatcgcgccactgcactccagcctgggcgacagagcgagacttcgtctcaaaaaaataaataaaataataattgatgagttgtgcgcttacagaaccaagaagaggtttcgtgagaaataacaacacagaaggtaaaccgacatggatggaggaaaagggcacatcattagcaatactcgatgacatcacaacccagtggcctattccccgaggcctctaaagttctcaacgaaaaaagactttcaaaggaaaagcttaaaaaaaaaatgttccccacaaaaacagactaagatgaaagtcgggccctcagaccacgagctccggaagaacaggcagttgtcgcggagacagcaaatgcagcatctacctgtcctacatggccctgcgctacgagactgctcggaaggaaagagaggaataaccaacttaaccctgcttcgaggtggtttggagaggaagaggaaagctgtgtctttctgcaatatcgtgagggaagccgaggccctgaatcatcaaagagaaggagaagaggactaggcggctgcaggtaaaccaaggtagggcgaggaggaggacccggaattcctctacgcgagcgcgttctctgctcccctcctcgcgtctccgccccggccacgcccaccacggcacgggcgcgcgcacgccgccttcgccgctggctccgtctgttggggggcgaacacgccgcggtcctcgtcgtggtgagcgcagccactcaggctggtcctgggggtggggctgtaggggaaagtgctaaagccgctgaggtaagaggccgaggggtcgagggccctcgggagcttggtgaaaagggagttaacccccaggatcctacctgcagggactagaaaaatggagaaggtaggaggagaaacaggagactgctgcagcagacgtgcgataggaaatttccccaggccgggtttgaccgagtgcgcatgcgggccgagggctggcgcctgcgcagtgggacagcgccgatggcgtagtttcctggggacccagctgggtgggaaaagtggctaggagttagcttgggagccgctggtgttctgagcgctcccctctctggccactttttctccacgcccacccccgccccgttcccgcccccccccccccccgttacagctgcggcatctatttggtttgggttgtaatccagctgttttgaagtggaacgatttgttgatgatggaatttaatgattacttgtaataatttgcctttgtactagggtaggaacttttaaggaattactctttttaagaaaataggcatatatctgttagaaaggaaaggaatttatattcataaatatatgaatgcgaggtcatccctgccgtacatgaagtaaatgtttaagcatcttagctcggacacagcaatctgtgtccacaaagcatcgttactctcctgtgaggatctccactgtcagccccaacttacctgacagggccaagtcccaggatacttcatcatcagtatttgtttgacaaaattttactgggcacctccggtgggcctggcaaactggttgaagatagagttgtgcgaatagatctgcacaatgagaaagaaaaaaatccataatgatccaatactcatgacacagcgcttctctatctcctgcatgacctttgctgagctgctcgccctgcgttctgtcgtttgttcatcattcattcatccgaaatgctcgggactggaagcacagtggaaacactgccccaggttctgtgctcggcattgagggtagaaagacttttcgaaggtggcagggtgtttcttaagatcattgaaccttaaaatgaaagtgtaggccgggcgcggtggctcacgtctgtaatcctagcactttgggaggccgaggcgggcggatcacgaggtcaggagatcgagaccatcctggctaacacggtgaaaccc

SEQ ID NO: 54339 - DNA, 720 bp, Homo sapiens
tctgaaataaggtttcctttgtgtgaaactcagcatgaggccagaatgtgttagtcctgtctgcttgccatgtaatacctggccaacacaacaacccatgattgatgggtgaatgcttgaggcctagtagtgctaacgtgaagtactgcctgaaaaaggacagctgtgtcctctctccccgtttgttttaggattttcgcaataaggtacatcccccaaatggtttctgctacctttttaaaaatcaaatgtttctacgtgagctgtaaatttttgagaatatgttttgctgtatcagcccttgcctgacaaggaataacatgaactagcttatgtttcatgatcatcttccaagtgctgtggcaactgagttggccacttcttgttggcagttcttggcaccagtacaattctaggttctgaacttgcaccatactcttatcgtcatccaaattgcagtgttttggttcagttggaaaatcaaggttacagtttgcgttcacagaatgaaatttcccagcagtgttctgtgattgtcagagtgatgtaatttgatatattaaaaatcaacaattttttcctcagctttgttttttagactgaaaatgatttggagttttggtgaacctttatattttgacactacaggagccagccacaaggccaaatgtgtcagctgccagtgtttgcttgacatacaggagaacattaaggaactct

SEQ ID NO: 54340 - DNA, 1001 bp, Homo sapiens
atgcaactagcaggagaaacataggtttagagccttgctcctgcagcttcaaaaacaaggaggcaaaaattgagattgaatatagcacagagtgtgggtgacaccaaaccacggactgagttgataggctgcagggaaggaagtgaaaagttcaccttgtccttccgtctaacagaggactgctggttttgcagaggtttgcttttttttttttttccattcaataaaaatagctcggtgggacaacatattatagcattcgtggaaataaaaactaggaaccacatcataggatgttctgctccaaacttggcgctgatcccccaggcagctccaagttccctctgattcaggcagcagcgacggaggccctcccctgtcccaggtgggacccggccttcagagaggaagggaggtggtggtatgaggcatcagctgtttcctttgcctgtgggccaagatccttgccatggcagaaatacaactttgtccccagtgtctgccttctgcactgtaaaaagcaagtttccatcacaaagggttgcgattcaggaaaccagggttagaggcaaacgggtcttatttgaaaatggtaaaacctggccaggccttggacttcctgcattggttgctctcctgggacctgggaccagcccagcagggtggggtggggcagcaatgcaggttacaggatgtgaaagtggggactgaggttaggaaaaagaataaaaggctgtgaccagaacacacccagcagaggccatgtgcagttctcttcttcagggtttcctgtgggtacactgagaacattgtgttctggctgagaacttatccggcggagcctgctgcatacgtggcccctgggtcctagtgctgcctcttacctagcctcaggcctggctcccctgcctgcacctgcgtgcagcccactgtatgacccagggaggctgtctccattgtgtcctcctgctgggtgaggcccccggccaccagactccgag

SEQ ID NO: 54341 - DNA, 1325 bp, Homo sapiens
ggctgaggcaaaggatcacttcagtccaggagcttgaggctgcagtgagctatgatcatgccactgcacttcagcgtgggtgacagagcaagactgtcaaaaaaaaaaaaaaaaaccagaatacctcttctagaaggttctagtgtataataaatagacacctgtgaaaaggcctcagctgctcctggcacacaggggcttttgcagagaggccctggagacaagacccaggcagagtccctctgagcgacttatccagctttgcataggggcattaccactggacttgggctcagagcaagtgtttatgagataaatgaggtgccgtctcagaatcacagagcactcctctacctttgaccttctgcaggctttcactggcttctaagagccaagaaccttctccgcccccacccagctctctctcccctgcaatctctccatgaacagcattgttttagcttcctctgctctgggtcctgggaaggggcttggcctccagaaggggccagatgccctggcctctcaccccaggcctggaagttagcctggcctgctagcgggcagcccaaaagagccagcagagaaccagggcacgctcccaggaacaccagggctggtagcaagccgacctcctcccgcggaggctggggtttggcccctccttcatctgtttgtttccctgctgcagccagaacggtctgtacccgaaggatggtgctaacggccaaggaatccgtagggtcctaaagttcgacctacttcctttccttgcccttgttccccaaattcagggtttcctggccatgggcttgttgtcccttgcctagggtcactggcactgtggagatcaatcaccttgagtgaggccccctacacggcactgtgcttcccccggtccaccccccaggtgccatggccctgtagcctcctccctggttccagtcctgtccatctgtcaataggcctccctccctggcactgctcactgggtctcagttgtccagcccccaccccacctccttacccatcacccccaatcctgccatagcaaaaaaaaaattcttgtgaaaagaatataagctcatggtaaaaatctaccagtgtaaaaggtgtagaaagaaaaagtaggctgggcacggtgtctcacgcccataatcctagcacttggggaggctgaggtgggcagatcacctgaggtcaggggttcgagactagcctagccaacatggcaaaaccccatctctactaaaaatacaaaaattagccgggtgtggtggcacaagcctgtaattccagctacttgggagactgaggcaggtgaa

SEQ ID NO: 54342 - DNA, 2458 bp, Homo sapiens
atgttctctttatgatccaccttatgtggctgtatatattttgcatatctacatacatattactatgcaaagttgtatacacaaagccatgcatactgtactttatggaaaatttaagagcgtttcagatataattagaaccatatgtgtttttccccttctgggctgtgggtgggaaatgaatctagagcctgcccccgaggcttgcgaggctgaactaagcagccagactggctctaaaggcaatggggagctattaaaaggtttggagagggaggtcctagtgaggctgaacagaggtaaaataaacagaaagttccaggctctccttgcttctacttaagaaaaatcagagcagtaaatcccaaaccagttctgcccacaactcaaatgcagatgagcatcccttgctccatctatgcaggaaagccatagtgtggggctgtaggactatggagtcagcctctgcaagcaacaaggctcagaggctgaggggcttcaggccccagcaaaacccagtgatcctgttgtcaaatctgaatgtcatcatctgcctccagggcgaccagctctggatgggggtgtcagggtcaggatcctgttccatgtggcaagagcttggggaagctgctgcaggcctactgatgaccttctttcctggcccagacactcttaaaaacttcctggcgagggaggcaacacaccttattgtgcagccctcatcgaacgcatcagctgcactaagtgctgaagaaaagttcccataataaccatgtgtgataataaaaagataaagaggcaaataggtatgtaggtcagctcaaaaatagccacccacccgcctggcctgggtagccctttgtgccaagtgggtagaaaggttttccttgcttcccttcccaagctgatgccccctgcacttttcaaggttgccttaaatacaactccttcctgcactagctggggtagccagggcagtagggactgcagccctacaggggcagccctgcgctccctccaccaaatcaatcctggggtcagagggcacaaaggcttggcctctctgacgtgagttctcggggctaagtcagggtttagggtagtgagtcacagacattctttcccccatcccttagggtttgcgcacacccaggaagccttcccctccccaacagagaccgctttgttagcacgacccacccggttggagaagagttacagcctcaggggtgtgagggcctcctcggcctctccctccctccccctctctcctctctagggctctcaccagaaaggcgccaaccctgcgccctgcccccacccagccgccggggccccaaatgctgagctcagcatctctgtggcctggctgccctcctcccgggcagtgggaggagcctccttcctcccgagggtgggcggggccagggccagccccgccctcctccccgttccccctctccctccatccccctcccgttcctcagtcgcacgttctccaagtcacgtcccccgcttcccctagtagggggtcgacggagattggacccttcccccagtcagctgctctgcatctgtcacctcggcggcagcgctcccttgaggtcgcacctccgctgtggagggaggcgagagcgagctgagtggggggtcttcccttcccccatcccgctggccccagacaagccaccgcagaccgcggcgaaatcagttaagctcttgcgtgcaccagttcccggagcagagtctgaaagtttttgtgtttctgtgcggctacttttaagtataaaaaattcagcagtggctcctgggtgcctatgtcagcgtctggccctttgtggattacgtacgggacaactggggtggggaagggcccctcttcacaggcagcaattcccagagtggccttcctatgggaccccagagctcccagggggaggatcccagagggggatatggtaacagaatcactgtcacttctgggattgagggtggcagctaaagggaaacccctcgagtgtcagtcggacttgccatttgagtcagcactgctaggtgctgctgaattctgcagggggaggaagaacctgatcagataaaacaagggctgacctagagaaagtctcttgggtcaacatattcttagcgataacagaagatcactccaactgttctacaccccaccctacaacattgaccccccgctttccagcatttacagtcccttttagtttacaactaagagtatgggttgcctgggatcaggaaatgagcctagatgtagagtcctggctccagccttgctgacactatgtgactcactgcacctatctgaatctcagttttctcacctgtgcagtgacattgatgaggtctgtcctgcctacaaactctacacacatatattagttgttgttttttaatttttagtagagatggggttctcacaacttgcccc

SEQ ID NO: 54343 - DNA, 852 bp, Homo sapiens
agcgattctcctgcctcagcctcccgagtagctgggattaccggcgcccgccagcacgcacggctaactttttctatttttagtagagatggggttttactattttggccaggctggtctcaaactcctgacctcatgatccgcctgccttggcctcccaaagtgctgggattacaggcgtgagccaccgtgccaggcctgtgcaagtgtttttagaatcctgaagcgctccataagggtcaatgatctttgtgaggaggctggtgcggtggttcacgcctgtaatcccagcactttgggaggctgaagggggcagatcacctgaggtcaagagtttgagaccagcctggccaacgtagtgaaaccctgtctctgttgaaaatacaaaaataaaccgggcgtggtagtgcattcctgtaatctcagctactcgggaggctgaggcaggtgaatcccttgaagccgggaggcagaggttgcagtaagctgagattgcaccacttgtactccagcctgggtgacagagtgagactccacctcaaaaaaaaaaaaagatctttgtgaagagatggcaaattgccaggtgggctggcagcttccatttcctgccagcccaggtgttccagagaaaggctcagcatgcagacctgggcagctgccttttgcctagacttgagtttcccaagcctttgactattaaggccactggagataaaatgcacttctgagtgaggttagaggcatcgcagaagggtgatgaaggagaccaaagccagggagaagaaagttccagaggattgagtggggcctaactgccaggagagagggagatcctggaacctcctaaggctc

SEQ ID NO: 54344 - DNA, 6614 bp, Homo sapiens
cggtgaaaccctctctctattaaaaatacaaaagattagccggacgtggtggtgggcacctgcagttccagcttctcgggaggctgaggtaggagaatggtgtgaacccgggaggcggagcttgcagtgagccaagatcgcaccactgcactccagcctgggtgaaagagtgagaccccatctcaaaaaaaaaaaaaaaaagaagaagaagaagaaaaaacatcgtaactcttgtttccttagggtgtttaggtgtcccgcccaaatcagcctggaggaaatgtgaatgttcctgatggattaattcagatcttctctctggccagcaggaagacacacccatgcaggtcacctctgtaagagtgatttcaagagtatgtcatctactccagccctccaagaacaactagccgccttgatccagtgtcttttattatttttaatttttatatccccattgttaagcaatctggtgtctttaaggctccaacaagcgacagagcttgaagaatgggaagagaaggccttgaaagtcccagtggctcacaaactattccattctgcagctgtctttaagatgtctcctggatcccctgatttctttttttaatccataaatttgtctccataagtgggtctcccacctgtcaaatgagagtagggtgcagagcttggattctggttctttcaggttctaagtcttggcccaagtgtcagctttttcttttttctaagttggggtggggatgggggttgcggagggcagtggcctgacatctcctgcaagtgtcatttgtcacgcgaaagcaagcctgacccgaggcaaggcccgcctatctggttaggttccttgcccgcccccggggccctgggcatctgatgtaagtttggctccctcttccatcagggtcctcctgtcccagactgataaacctttagagcaataaaggtcgagtccgtctcaacctccacccaccctcagcaaccactgttagcctctgagcactgctgccaggccagatttcctgtggccccgcctgaatgatgaaacacgggatggccattgcactccctggcttttccagagatctcggtcctcggtcctgatgcaaccgtctggatcttttacacaaagcgctaggcgagcgctgggtgctaggacccggggggcgcccgggcagggaggtccggctgcgctgcctgcagtccgcggggagggcggatgggtctgtgagtccgactgctgtgaatcctcgcttccatccctgcactgggcgctatgaacccgggcccatccacactcctctaaccactctcctcaagccctctccttgggagcagttggaagtggaagcagatagggtttgggaggaggcagggatccccattaacctatgtcctgggctgtagagtaacagccaggatgggcaggtggggccttggggaaggggcagcatggtgcccggagcttcccagtctgtggaccccacccccatatcccgagcctttgcaaagcagggatagagggggtaagggcgcgagggcaggccgggctaacgtctgctcctgcgccgccgtcccacgggcatcccccccgtgtgtgcccagttgttcccgaagctttaggatccaagacgctgggggcaaccattttccttgcccgccgccccctcacgcttccctgcctctcctcctagcctggtcacgggctgtcccctcctccagcaatgcaaccctataataaacaagtctttccttgatcctcccctgccgcgagcgccctcggggaccttggcagctgcagccgccgcggatcctttccagaaagggggcgtggcggtgggtcggggttcgactgcgagctttctggggctcaatggaggcggggcccggccgctgtcaccgggcaggagagaacgttgcttacgtgcgcccggagtccattggccaaggcgggccacactcccgggtctggattgggtcgtggcgcagagaaggcgtggcctcgccgcgctagtccttataggctgctccgcgctggtgctagggcgcagcaggccaagggggaggtgcgagcgtggacctgggacgggtctgggcggctctcggtggttggcacgggttcgcacacccattcaagcggcaggacgcacttgtcttagcagttctcgctgaccgcgctagctggtgagtgtcccttctgtgtgtgggtcctagagctcgcggtctggtctggtctggtccccagactgacgcctggtcggtccccctcttgtcttacagcggcttctacgctccggcactctgagttcatcagcaaacgccctggcgtctgtcctcaccatgcctagcctttgggaccgcttctcgtcgtcgtccacctcctcttcgccctcgtccttgccccgaactcccaccccagatcggccgccgcgctcagcctgggggtcggcgacccgggaggaggggtttgaccgctccacgagcctggagagctcggactgcgagtccctggacagcagcaacagtggcttcgggccggaggaaggtgagcggtgggcgggtgccgacgcgactcgaggggccgggaaggtggggaagccccggtgctggaaggggtcagagccgccttggcttcctatcccatcgggacccagattgcttgggggcagggggaattggagtataaggtgagtgaggcggaaactgaggcacggagtgggaaggagcgttggtttcttaaggaaacagcacctcccccgcctgtgcgtttcgttttgaagccgctctaataccccttcctgtgtgctctcctttccagacacggcttacctggatggggtgtcgttgcccgacttcgagctgctcagtgaccctgaggatgaacacttgtgtgccaacctgatgcagctgctgcaggagagcctggcccaggcgcggctgggctctcgacgccctgcgcgcctgctgatgcctagccagttggtaagccaggtgggcaaagaactactgcgcctggcctacagcgagccgtgcggcctgcggggggcgctgctggacgtctgcgtggagcagggcaagagctgccacagcgtgggccagctggcactcgaccccagcctggtgcccaccttccagctgaccctcgtgctgcgcctggactcacgactctggcccaagatccaggggctgtttagctccgccaactctcccttcctccctggcttcagccagtccctgacgctgagcactggcttccgagtcatcaagaagaagctgtacagctcggaacagctgctcattgaggagtgttgaacttcaacctgagggggccgacagtgccctccaagacagagacgactgaacttttggggtggagactagaggcaggagctgagggactgattcctgtggttggaaaactgaggcagccacctaaggtggaggtgggggaatagtgtttcccaggaagctcattgagttgtgtgcgggtggctgtgcattggggacacatacccctcagtactgtagcatgaaacaaaggcttaggggccaacaaggcttccagctggatgtgtgtgtagcatgtaccttattatttttgttactgacagttaacagtggtgtgacatccagagagcagctgggctgctcccgccccagcccggcccagggtgaaggaagaggcacgtgctcctcagagcagccggagggaggggggaggtcggaggtcgtggaggtggtttgtgtatcttactggtctgaagggaccaagtgtgtttgttgtttgttttgtatcttgtttttctgatcggagcatcactactgacctgttgtaggcagctatcttacagacgcatgaatgtaagagtaggaaggggtgggtgtcagggatcacttgggatctttgacacttgaaaaattacacctggcagctgcgtttaagccttcccccatcgtgtactgcagagttgagctggcaggggaggggctgagagggtgggggctggaacccctccccgggaggagtgccatctgggtcttccatctagaactgtttacatgaagataagatactcactgttcatgaatacacttgatgttcaagtattaagacctatgcaatattttttacttttctaataaacatgtttgttaaaacagttggttgagtctctcatcagtaccatgaagtgaaaaggagggagatgggtgctagtgaaaggcaggtctcatcaggccctggggtccacctgtgtgttcctccatccctttccgggactgcctgccagcctggtgacagaggtatgtgtaccgtgtgccatctgtgccaagaacccttggccctgtgctggctgaagctactaggagaacacactggaaacccctgaaggtagggggtgagtcagacctcccaccgagccagagtctccagagggagagctcacctggctgccccggttagaaggcccagacaggagggcccactgagcccaaggtctttaataaacagtgaaagaactagaaaataccttttttctttctgggagaaaaaaatcagttgttctaccatcatgaaaattacaaatcttatctctggatttaaaaagactaagagggggagtttgaaaaatgctacttagctcatgcctctcactggacaaggaaccaagaggggcatgagctgccactggaaggaagtctggaccaggcaggtgcagaactccttgcacacacacaggtgagggaaggagtgctaagggcttagagagcaaggaaatagcaggcctaccttaacgataccttgggtcacccagacgtcctctgtgacctgttgtcccagccacttgggatgctgaagccagaggattgcttgagtccaggagttcaaggctgcagcctgggtgacagcaagaccctgtctctaaaaacaaaagatgcattgtgcattctgggccctaagttccttgtcagaaaaattggcaaattggagttgggccagatgaagcccagggcctttcccccttcttccctggaattacatccacccacaccaactggcatttggagagtttttatctcccttgtttctcttcctggtcccagacaggccttgtttgctcaagactaaaacagtggctcttgcacttgagcgtgtgtaatcagatcacatgggccctcctggagattctcagtgcatccgggccagggccccaggaatctgcatttacatcagggattccaatagagggtcctaaactttacgatgacttggaagacccatctctctttggtagaactgagtgatttgttccccaaaatggataaacttggattagaagtgcatttggaaatggatagtgagaacagtgaagaaggtgcccagaccagtgtgaggaaagccctcacacccattttcttagcacatcctcctaatagccaccctgtgaggggtgggtggcggcaggggtttttaatgttttacagattagtaaatggaggcccaagccctggaatggtcatcttcttggataagggctgactttgtccactcccagcctattgagattcagggctgggagtaaagcaagcttgacacctgggctgagtctgaagggcactttcccgggaactgagatctgtgccaatgctcacgaccctgcctccccagtctcaaaagagaagcaaggaaacaattgtcttcagagtacagagtcttgttggtatttgggggcctgagctggatggattggtcagcattagcccttctccaagccaaggaggcagctgagcccagcaccgtaccttttcttagatagtcagactgaggccaaatcaaagcttgggttcccaagctagctcagctgagatgccctctcccagagccaaactggcttccctcattctcacagggcctgaaaatcctcctgcagcaggacagaagggtccgcaagtgggagccctgagcttgagtctcacagtaaagggaagagggttgctgaggcccaagacagttctgggtcctgaggtctgctaagacatggcagggagctttgccccaggtaccggacttgctaagaaaaaatggggcaggcttctttgttgctaagcaggaaagctaagaaagcttataaagacctacacataaaatcaactttggtaaatgctttcagaaattgtcctatttagtgagaccctatctgataaagaaaggaaggaaagaaaaaaaagaaaggaaaggaaaggggaaaggaaaaaggaaaggaaaggaaaaagattgccctatttggcctggaaaatatgtactgattacctcccttcctacaggattccctctcttattcctatttcccacctcatcgggtcaatgctctagaacctgcaatggttccctattgccagattccactgctggtcttttaggacatttggtgttgggccctatactccctactgaggcttacctcccaccattccccttaactgggggcaagtcaatctggactgcccttttctctagccgcagactccgctcattctagtgccttccaccaaggatatcttcctgagttttgctggcaagccctgtccttcctttaaggcctagagcaagt

SEQ ID NO: 54345 - DNA, 1798 bp, Homo sapiens
ctcggtttcccctttctgacgctgttaccagtttgcggcggttaaccccccagagagagcctgacgcagatttgctgcaggaaaccaccgagtctcacggcttggcacgaactcttccttccgggccggccaggatgcctgagcgtgggggtgggcagggcacctcctacttccccccgcagataaccaccaacccggccacatcattctcacatctgggaactgagctcactcgaggcttttctcacgtagcctcctttgaacctgtttcctcatctgtaaaatggggctaaggatagcatccacctatttcagggtcgttttgagggaatcctggagagaaaactagggttttcagcaaaaggatcggcacaaagtagatgttcgccgctcccctccctccttcccgctcccccgggcaggaaggctcgcgtgcgcgaggccacagcgcaagcgggtgcagagcaggattcgaacagggttccatgcaactccgtgcccagggtcctaccaccgcctgagctcagcggtcttcagccagcggggcccttccacccccttccttaatagttttcctcctccgcctcctgcacggcctccgcctccgcctgaccgtcctcggaaacctcccagccgcagcccggccctccccagcggcctgagtggcctcctcccgcggcgccccccagctccgcacctccccagccccgcccgaggcgcgcccagcgagcgtgaccccgacccagggccacggctgcgcccgtaggatcgcgggcgcgcgggtctccatgagggactgggagagatgcgtcacccgctaatccctcaactgggtcgcacccggtctgccttggttggtcccttctgatggcggaggcgggacctcgacttggtggccaatgaggagcctcgtgggggtgctctcggctgccatggcaacggaggggccgcccgcttccccgcggggcgaggccggctctcccaggactggccacattgcagtcacgcgctgtggccccagtcctgttagcatgaggtgggggtcagaagttgaggaacaactcggacctaaagccttgacaattgccaacagtgtagacaagtcccagcatgcccaaaatttataagagaaggctgcctggaagagggacacgatgaggagggtctgctgaaacggacaaagaaacccagttcagtgcagtggagtggacatggcacgggcagggcacggagtggggtcggtgcttagtaagcggattagggtttccaagccaagacccacccagggcaggatggggaaccaaggtgagcaggtgcgctgaattgtgggtctcacactgtccttcagtgtcccgcaggaagagagagctaaggatcaccagggtcattcccctgcctcaggcagcctgcactccaccttaggtacagtcatgtccggtcttcagcattcattaacctcgtattcttcccaggaagaggaaggtgaccaggttcattgtccccatttcataaatgagaaaactgatgcctgcctgctaaagtagctcacccttgggccgtggggcctggcattgggcccaagcggggcccttccagggaagccccagcccgcagttctgacgttgcccacccttgctgatggtgcagggatgtcaggggcaactgagccccatgtttaacgaggcaggtgagctggggtcagaaccctgccctggcctctgatggccctgggtggggatgtgtctaactccctcctcagtcactctgggagggagtccagtgttgccccacgctcgtg

SEQ ID NO: 54346 - DNA, 4495 bp, Homo sapiens
ctaggattacaggtgtgagccactgcgcctggcctagtttttgtatttttagtagaggcggggtttcgccatgttggccaggctgctcttaaactcctgacctcaagtgatccgcctgcctcggcctcccaaagtgctgggattacaggcgtgaccatcatgcccggcctggcattttcctctctgattataacaaataatatagtcccagttgttttaaaaaattaaataatatttttaaaatataaaaatgaaagtaaaatataaaataccccaaattctatcatctggaaacacagcattgtttctggagcacatcctttcaaaaaaaaatttttttttttttgagatggagtctcacccttgttgcccaggctggagtgcaatggcatgatcttggctcactgcaacctccacctcttgagtttatgtgattctcctgcctcagcctcctgagtagctgggattacaggtgcctgccacaacatttggctaatttttgtatttttagtagagacgggatttcatcatattagccaggctggtcttggactcccgaccttgggtgatttgcttgccccagcctcccaaagtgctgggattgcaagcgtgagccactgcatctggccccccagatttttttgtggtaaaatatacatagcataaaattgatcattttaaccatttttaagtgtgtacaaattctatttttataaatgcctcccgaagctagggctactagtgcaatttcgacaccttgacggactggtggctaaaattttgaggtaagggcctgtctgacattgttcacatgaaaacacagaggtagccagtcactgtgtgaggtggtaaggttggtcctgttaaaatatgaaggctggtcaggcacggtggctcagcctgtaatcccagcactttgggaggccaaggcaggcagatcaattgaggccaggagttcgagaccagcctggacaacatggtgaaaccccatctctacaaaaaatacaaaaattagccaggtgtggtggcatgtgcctgtagttccagctacttgggagactgaggtgggaggattgcttaagcctgggagtttgaggctgcagagcgccgtgatcacacgccactgcacttcaacctgggtgacagaataagaccctgtcccagaaaataaaaataaaatatgaagcccaggccatgtgctgtagctcacacttataatcccagaactttgggaggccaaggcgggcagatcactttatatatatatatgtatgaaggccaaggatgagggaaggccggtctgtcttgtgacaggactttcaagaggagaagcaagggccatggttttgctaaacttctccaagagatctgtctcttagccaaggaagatgagagagatcccccagcccttcctgggggaggtgtctgtgattttcctggcgggatcctcagtctaaggggtttctctctggccttggcctttgggttgagcaggagctgcaaactctggtggacaaaaagagccaggacatggcagtgagccaggaacagataaccagcctggggaggaacaggcccttgacaggaaggcaggagctgctgccagcagacaggaaagagtgaggccagcctcctccatcagcctggctcaggcaagctttgcttcctccagctccacagagggaagggaggccaaggagagcctccaggtcccgaacaaagatttcagagggtggtcaggagactctgagtcatgaaccacagtcatcggcttagcagatactgtgtgctggcttcagaaggaccttgaactcaaggagcttaaactaactgggtggggcaccctttcgctactgtgttaactggatccctccttccaaaccaggagtgatccccttcctcgctgacatcccaccacattgatgtagccctcactcaacccttagcacacactcattcgtgtttttgccctccatggaccccaaccgagctgtaaagtctttgagagcagctcctgggtctctaggggtctttgtatctccccattgtgtccgattcggtgcacagagcagatgtttaggcaacatccacaccgtgaggtttatgtgaggggtaccgacaacaagagcagccggagttctgaacaacacagttttgaggcccttccaaggtgatctggagggcttccacaggaggagttgagaaatacagggggtcttggaggtagcatagagttcagtgaatggagagtaagcggcaggaaggggcattctggtggaagatcctgctgggggaatgaggtttggggaccgagtcccaggaaatctcatatggggtgattcccaggtccagatgcccttgcaggcttgcactgtgtctgccaggaggtgagtgccagacacgggggctctgattacagtccggagccatgatgggctcccagttgccaccttttccaagaagctgacttttgaggaatccgcctggccacgggaatcacaccatgtttgcactgccctcagctgttgattacaccctcatccgcgcaaccggcatccaggaagaacactttcttcctcacagggtgtctcctctcctgttttcatgtttatggcatcaggtggtttgcagagtgctccacacccagacatgtgcgtccagtgaggtcagctgagaaaacaacagcttgcccaccaccctgctcccccctcattctgggagctacaggctggggccacggtcacccctgggcacacgcccccacccccaccttcaacacccccagtgcctcccgcttcccttctgcttcccttccgtccctgctgtagcctctctcttgcccaaactgttgtttatcaacacagaccagaacattttgctgccagcagaaacacacatggtgatggcactgctacccacaccctgccgtcaacacactcccacgtgctgtttgccgctgtcaaagccctgctcacacacacattctcacccgctcctgccagcacagctgttccctgctgcctggaaccaggcccttcatcccgcacgacacacatgttctctgtgggtttttctcaatgtacgtgtgtgctcatggtggaggcacacacttgtgaaccaggccagcacacactcttccctccgacctgggctggggatctatcacttgctactgtgtgaccttgggcaattgacttcacctctctgggcatcagatgcctcactgtagaatggggataatgatgacctatagaagataattatccatagcctctctaagggctttctagattctatatgggcttttccatagggtctgtggttaggacagagagcaggcacccaggaagtgctgaatcagcgggagccttgcgggtggggtgagtattgttggagtctttctggaatctggcccgtggttttcctctccgaggccggctgtcagcctcacctcatgttcacagcatcctggctgcctgaccctgatcccggaatgtcacctgtctgcttctcatgtttcaccagcgaaatgggcataacaaccggtcccctcctgctctgccccttgctcgccctcccccgtcttcccctggccatcagcagcccttctctgtcttgcctcttcaactcagtctctccttcttggccggcaaacctgctccagtcttttttatcctgggaaacagagagatggatgcagaagggaaagaacacaaatgtgatttgaggattgagaaaaatctgggctgagcggaagagcgccctggctgtccctgaggagcaagtgccagcatgggtggagcgccaagtcaggccatgctggagagccagtgcctggggtgacattgccctaagcagcaccaccttacttcctgctcttggtggaaatctgtgagaggggtggtgggcagatcctggcctggtctgtgctgagcaactgtggatttccccttttcctacatgcagagactttcaagctctgcccactgctgggagccactggagagctgctggctccggagcaccatggtaaatgggttgcccctaatcattgggatcccaggcaagagtacaaatggagaaccacacaccaggtgtgtacatattcaaaatgtgtacgccaagcttaatcagctgtcatataaaataaattctatcttctacctcccctctgaatttcagaaaaacctggaaagccaggtttgaatctggaattcctggactcttcagagtccctctctggaattctggggcaagggacagaggggcctagttgtgtgacgtgcatggtggggctttaaggcagttggctcactgggtgaaaacacaaaccgtttcaatctgatcaatactttatgctttttattttgtcctaggcccgtgtggccaaaagacccagaaggcagttgagcagcttaattaagacctgcattcaaggccgggcgcggtggctcacgcctgtaatcccagcaccttgggaggccgaggtgggcag

SEQ ID NO: 54347 - DNA, 2885 bp, Homo sapiens
taatcccagctacttgggaggctgaggcaggagaatcacttgaaccaggaaaggggaggttgcagtgagcacagatcacgcctctgcactccagccttgtcaacaagagcgaaattccgtctcaaaaaaaaaaaaaaagaaagcaagaaaaagcaacttaacatgtagaactctttctggtcatgccacattgtttctttttcctcatttcctttcactcacgagctcgagctcttttgaatgctcaaacgtgtgcttgtggtgaggtgcccctggaattccttttattctaagacaatggccttccaggagtacctgcaggaagacctgttaagactggcctgggacctcctagacttgcctgggacctccctgcaggagttgccaaatggaaccgggagggaagagaggtttgcctttgcccttggccttggtttggggtggagacacccaggctgagacattctcccctccatagctggccaagttccaatctggcatggctgtccctgctgccattgtcatgggctctttcgggggagttccggacagcaccactgtgcaaaagattgtcctggcctccagaaagtcggctccaaatgacactgagggaagaaagaggaaatctctgcagtgtacttccctgagtttttggggaatggttctctttcccctctttccatcccttctctacaaatccagggctcacagttaagccctaggtttgtaacacggcttcataactaagaatggcattaattagcaacactgtataaataaaaaggggggccaacaaggatggagggcgtggggggagtatgtggttggccatcccaggccaccttcctcctccagctcccaggcttgcttcagctttgctgcaagttcctgccaatatatttctgcttgggacaggagccaagggtcagataaagttccaactgtattttgcagcaggtctgacactttgcccagtgctctaggcctgtgacagtgccaggatagtatattgggaaagccagtccagaaggagttggtttaaatgtgtttgaggtagcaggcaggtgactaagcagacagttcagcaacacaacactcagtaacaccatcagaccaatgtggctcccagggacatggaaggcctgtgttcctttcccaggaagcccccagcagctaccgtgctcatgccccagcatttcagggaccaagatctgtagccccattttgtgatctttagtaagacaagtaaacactgaacactaagtgtgcttatgccaaccactttacatacatgatctgatggaatcctcagcacagctgatgagggagttactgttattttcctagccatacagttagtagctgacactacagggaacagacacacttactgtctatgaggatctcttctaaacactttccatgcattaactaattttttggggaaactgaggcagagcaggagcaaagccagttgtccagtgtcacacaactggtgggtgtggacctgaaaccactggaggctgggtgattccagaatggagggttcacccctgcactaccccctgattttccaagtggggtaacaggttcggagacagtcagggaagagaaaccagggtgagatgggttagttcagatgaggtcaaaggttgcactctcttctgcttcctgacaagcataatgagaggcacccatgggaacagaagctcagacatctgaccctgagccctctgccactcttccttcctctcctctggcccagttggtctgaaccgtgttgttccaggtctcacgggagctgctgtgggacacagaatgggcaagaggatttttgttcacacaaggttgttcctggaggaccaggcgcagtggctcacccctataatcccagcactttgggacgccaaggcaggcggatcacctgaggtcaggagttcaagaccaatctggctaacctggtgaaaccccatctctattaaaaatacaaaaattagctgggcatggtggtgcttgcctgtaatcccagctacttgggaggccgaggtgggagaatcgcttgaacctggaaggtggaggctgcagtgagccgagattgcgccatggcactctagcctgggtgacagaatgagactccatctcaaaaaaaagaaaaaaaggttgcccctcacctaggcaccccgagagcagtgaaaagctgcctgttgtgcctcccacagccgaggctctgtcttgaacctggaagtgagccagctgggcccagccttgcaggaggccaggcttcctgtcacattgaagctctgctgatagcccaaggccacgtgcggcgatggcacctgctgggtggggatgggtggcctggtgtcagtcctgcactgtcattgtccttaccatctctgctttcacctgcaccagtggacaaactcaggcacacgaggggctgctgccatctgtccctctgcctggcctcaggcaggatcattaggactggatcaggagggagcatcaggcctggcttcagggtgcctggcagcatgctcagatatagcacagcacacaggcaggaccagagacctacagaatagatgacctttaagcaagacttgaatatacaataaaccatcagaaatctgcatcttactccttgcggggaattaggttgttgtatactgtcttgactttttcttatgtttacagacataactatgtctttatttacatacatgcatgcccacccatctttttagaaaatgttttcatgttttgctaatcaatcattcattctttcctcctttccatatttatttatttatttaattattattattattattttttgagatggagtctcactctgttgcctgggctggagtgcaatgatgtga

SEQ ID NO: 54348 - DNA, 5686 bp, Homo sapiens
cgtcatccaggctggagtgcaatggcatgatctcggctcactgcaacctccgcctcccggattcaagctattctcctgcctcagtctcccaagtagctgggattacaggcacgtgtcaccacaaccggctaatttttgtatttttagtagagacagggtttcaccacgttggccaggctagtctccaactcctgacctcaggtgatctgcctgcctcgacctcccaaagtgctgggattacaggcataagccactgcgcccggcccctttccatatatatttattgatctcttagtgtatgccaggcaccttggtaagtgctgggtatgtggagatgaggaaaacagacatgatctctccctcatcgacctttcagcccggtggagaaagcaacttcgaattctgaactgcagtaagagctaaagagagaaaacaggaagctctgagagttaataacaggatctctactcaagtaacatttatgtggggatcaatatgagaaagagccaatcatttgaagagtgtagggaaaagcattccgggcagaaggaacagcatgagtgagggcacagaagtctgaacattgtgtggggtgtgtggggaagtctgaggctcttcctaattacagtgtaggggtgtagttgggggttaagccatacaggcagggtagaatcaacgtgagaaaaccccaaatgccaagccaagaaattctgtaagcaacggggggctactcatgtcacttagtttagtaacagcggttctaaagctccagcctggaaaagcccagaatattaatgttcaagaggaaatctctgcttcaaatcaaaggctctttctcctgcttgctggaaattcaaagcctgccccgtgcctctgagccttagagccagacaggttgccttattactgattccctacagaaacgcagcccagagaggccaagagatttgcccaagtgaaacagcaaaccaatgccaaacgcagaacctcaaaccccaaatgccagccttcagctccagccctaaacctgtcccctttcacctggagattctttctggcaggcactcaaagcaggtaggtgagaaaatgcctttttttttttttttttttgagaccagtctagctatgtcacccaggctggaatgcagtggcaagatcgtagctcactgcagccttgacctcctgggctaaaggggtcctcccgcctcagcctacggagtagctgggactgaagacttgaaaattaaataaattgcattcttgaaaatgcatgttaacacgaatttgtggagcacttacttactagtgccaactacggtacctggcctgggaaatagacctgccccgggaggtagacctccccgagggcactcccagtcctggagcccccaaacttcttgaactacagaaattcccctaggactcccctcccctgccccccactccccaagttgctgaaaatcatgagtaacaaagcggccaggagtttcctgtcttgctgagctggcttactcaatttccctcgtttgtccgctcagaccagacggggcaaagggcagccatcaaaggtgtctgggacgagcccggcggggtaatgggccgctagggactcagtctggcccgggtctcagccggggcagaaggcagccgggcgagggccgcgggtggggggcagggggccggggacaagcagccccgcccaggccggcgcgctgtgtgcacaacgtgcagggctgcgaaagcggatgcggcctgatggggcaatcgctggcaacgcgccgcgggttgtcagcgggcgctggggggtgggagcccggcgccggcgggccctgcctccagcattggccccgcccccagttccgcagtcgtggctgggtttcggggagggcgcccggtgcggggggcgcccagggcctgcgcacacgggtaggcccgcgtgcccaagcccccttgcagcccaggcgccctggctcattatccatcccggccactggcgttcggttccgctcctgtcgcaccaccccctcactgctctgacagataccaggagctggtgccaacccgcagacacacctgggcagccccacgtgggtatcgcacgcgcaggggcacatctgccctgccgggtttggagagcagttgcaagtcagcccctggaatgtggtcccgtgccggctggagcaagaactgtgtaacctctctgagcctcagataactcatctgttaaatggggaggatgatagcatcactgggttgttgtcaggatgaaataagatagaggctataggggcgggtgtggtggctcactcctgtaataccagcactttgggaggccaaggtgggaggatcccttgagcccaggaagtcaaggctgcagtgagccaagatcacgccactgcactccagcctgtgcgacagtgtgagacctggtctcaaaaaaaaaaaaaaaaggctacaaagtgttatatcagagtcactagcactcacccagtaagtgatagccatgaagattcttaaagagaagggaactgggagctacaaagccagctgggctcacaggctgcaactggggcatgtctgggtttccggcttcttttttccttccctgtatcatatttattttttcctcaatatcacccctcatctttcacccagggcctgcaatattccttcgttcatttgacacacatcggttgatatttgtgcctgctgtgaggcattaaaaactgcttatctggctgtgtggcacccgggaactttccccaggccacaccagctacacctgtggcctcctcagcctgggttgctgccctgagtcactggagtaggtcacttcctctctcagtccctccatctgtgcaatagggataagaggcctggcttctctctagtctcctgggactgtcaggggatgagtcagataacggtggggaaggcgcagagaggcagaaagcagctcttactagagcggggcccatctggctgatgcaaggcttgcactttgcatgtaaccccagccggtacaaacagggatggctccgggaagcgtgaggagcagggggagcagagaagtccccaaccctacccgacagccggggtgtgggatccagactggcagcttaggagtctgagcagctggggctctgtccaggctctgcttccccagctctgcgagcatgacagcaggttcctgacccctctgatccggctgccttttctgtcactcaggggttgcagtacctccctcacctagctgaagttggaagtgaaggtggtaactcccagagggagtggagcccttccgtgtttctgggaggggtctgagggctggccgggggggtccgggtgggggaggtgggaccagacaggaggaaggcagccctggccaaaggctcagcatattccatagtcacctcaggcagggggttctaggggctcctcccaaaagagtcagagacccctgcaccctcagccgaccccaggcatgacagaccccgcctcatcccacagtgcacaaggagatcacactcagatctgggccccagtctggcgtctgccccaggccagctgcatgaccttgggcaggtgattgaatgtttttgggtctccatttttccacttgtgaaatggggatagcgatgcctactttgtaaagctgttgtgaggctgggggaaaatgagaacgatatcaagtgttcacagtagaggccagcactgttgtgagcggcagctcctctccctcccctcccctccccctttccctatcacaggtggggccaggtggaatgtcacagtaagtccttgggatagaaaggtctactgacatattcaaagtgcccccgcccccaaggtttctagcctgataccataagctttgatggcaagagctctgtttgcttggggactttatatgcatgattgtatttgacatatgacgagggccatacgtggcatccattatatagatggaagcggaggcaggagaagtcaaatagcttgtctggtcacatggctagaaagggtgagtgccaggatttgaaaccaggtcttccggactccagctcatccaccacacaccccctgcctgcctcttgcttttgccctgggtgttctcctctttcctgagtggcctcttatgatgtggagtccccgaggccagggacggtcatgagcatggcttccttgtcttccagggtgtggctcaagcacacagtgggtcctcagtccaccctgctgaccagggagatgagtcctggcatgagggagatgactcatgaagccgggctgggcgagggtacgtgcctgtgtctctgtgtgcgtgcatctgtgtgcgtgcacagggaggggaatgaacgagtactgtctgctggaggccttctctctccaagctcctaccccatccggcgctgctcctgagactcagccttcaagggggctctgagcctgagaagcaagggtgggggaggtcttggccatctccctccctggcctaacgcagggcctggtgggggctgtggctgatggcggttccatgggaagccaggtcctccctggtccaaggggaagctcttcgggcatcttccaccagtctaggccctgctatttttagatgctgtcccctccccaaccctcccctccccatcacataccagctgagggaggaagtgactcacctcaagcccagacaggtagaggcagcctcagtgggccccgggcaggcctggttcctacgctggggttgccttcctgggatcacctcaggcctgccccaacctggggacaacacagggctgggatggagcccagggcctttcttgggctcctccattctccatctcacaggacctaacaggcctgggtctctgatggactgtggagcctctgctcaactcagcagacctcatcaggcctcggactgcactgtgggcctgtggccggcctcagcccagtctgagggagccagacaggcgaaggggactgcctgtggccccaccctgtctttgtgagtgaccagtgttatggaaagaaaaaatacctggttcagtggggacaggaaaggtgtgatgacccttgggatgtgtgtcccagtggagtggccagctgtcccagaatgcccagatctgaggggtttctggggactcgggactctcagtgctcaccaggagagtcctaggcaagtcaggacggttggccaccctggtgctgcattgcaaggtatatcctagcgagagggcaggtgtggggagcttgttttggtttcctgacggagtctcacctagtcagggccgcaggacccagcccctggccagcttgctctctcaggtcagggcatcaccttgtccatctcaactggaaagaggctgggctgggctgtgtgagaacccagagccccggggcaggctggaagacctgtgagccactttggccagggaggataggggcctgtcaacatggggttgggtggacaggttagcagaggctggggctgggagaggaagggcacctacccacatagggcagggcagggggaggcaaccaggaacagcaggaaataatgacaggagcccaggatgtgcctcaggtaagcttggccccaggtctgcagactgtcgggtacttgcaaggaggaatgggagacagtgtggcgatggctaactggcaggctggcagggcttgttggttactt

SEQ ID NO: 54349 - DNA, 10030 bp, Homo sapiens
ggcacaatctcggctcactgcaacctccgcctcctgggttcaagccattctcctgcctcaacctcctgagtagctgggactaccagcatgtgccaccaacacccagctaatttttgtatttttagtagagacggggtttcaccatgttggccaggatgatctcgatctcttgacctcttggtccacccgcctcggcctcgaaaaatgctgggattacaggcgtgagccacctcacccagccgataataagattttataagtaaatgatacagatgaaaagtgcctcctggcctagcgtgtccatggcggaggctggaactccgatctttgggctcagtgcttccatgccaaggtgggaccagagagagactgaggactaaagacatccacagagaagcagctctgagcacctgcggtggcctcccaaggcctgtcactcacagcctgaacaccatggacacacttgctgcccatgtggcccctgcagtggtggtagctggcttgtttgacttgtggctggaagcaaaattagggcccacgatgccaccttctgcacgcaggccatgggctggcagccagcagatggcagagcctgccagaggtgattccagggcttgtggccagggcagcactggggcggccggggacagaattgggtctgactccaggagtggctggcctgagtgctggagagagcctcctcctctaccccttggggtggtgacctcttcggacaggagtccgcactcctctcaatgaccaatgtttgtgattctcattttggcccctgctacatttgtccttacgcagggagaggagacctggggccttttcagcaggatcagcaggactctgcttccccccggaggcaggaaaaggaaaaagcccccgcccagtgcccgtcccatgagcgactgctgcctccagccaccgtccagctggatgcacaccgtggctgatggccctgggtctaagccctctaagatctgggagaagtgtcccccagccagggtgtgggtttatggctgcaaagcagctccctagggtgaccctgggcagaggagtaggcgaggctgggaatgctgcaggtggggacagtgcctcagtgctgatgggcccttccttcactcagcctcccatggagaccccaggttgtggtgcccaggccctggggctgcagccctgaacctcttctccagggaagcctttgcctaagaactacacaaatacctccagaacaggatgtgagaggcccaaaagggccaggccagacctccctgaggaggtggcaggaggttgggccctgaggggtgagaggaacctcaggcagaagggaacccgggtagcagggctccacggtggagggaggggctccgcaggctgcagtcagggtgggagggccctgcacagtatgtggggccaggaggagtgcaggggaggttttgggctgtcagtgtgggggaatgaggccgggcctggccagctccattctggccccactttctccatctgaaggagcccgctgcatcctcctgtgctgccaggcacctgtctctcaggcctcctcatctgagtccatcaggaaaatgagaataatccagtcgaggtagtgggactgccagctggggtccctgcaggccctagcctgatccctgctctgactagcacgggctccagtggggagctgcaccctgcctcctcaaggaaaaatccagccagggagcagccctgccctccctccctagggactttgtttagaccaaattggtaggagggtggggaaggtggacaaaatgtggcaggccctcccctccccaagcaaagccccaactcccgggctctgggcagactagccgtggggtcctagagagcgcctgcccgcctgcccctcttcctgcctgagccctggacctttatttcatgcccaagtggctgtgagagtgacaggaggtccaggccctgtccctagggaaatatctccttacaagggtctggggcgggagtgacagtcctgtctgccctgttaccccctccaccacatggccttctctcagcttatagagttagttgcagcctccctaagggcaggcaggccaccaagaaaggttcagaaatgcttgctgagtgaattgctgagtggacagggtgcagccaggagtggagaagctcagtgtctctcattcatgcctgggaaagttctctgcccaaggccactgggtgggcctggcatgatgacaggtacagactgggggcctggcctgggcattgctcccaaatgcgctcacttctgcactctccggcctccgggcctctgctcatgctggagcacccactccacccccaccccagtactgcctgtacccacctccttcacaaacgccagttcctctatcaagagtccctggctagagccttcacaactgctccgctcccagggtttctactcaagggcagtcctcgtctcagtcaccttggagctttcactgcttggaatgggacttgacacccagtcattgctcagctaatctttgtccactaaggacaaacaagaaacacccaaatggcactcgccatgtaccaggcactgttctaagtgctttatatgtggtaacttgtttactcctcacaaccatcctatgaggtaggtgtttgtatcactcccattttgcagatgaagacactgaggcaaagggcagtcaaatgacacaggaaagcaaaaactggctccctccacccttctagggtctttgactgtgctaggaattacatggacagataaagtggttaacaggagaaaaatcatatttaattacgtacataggcatgggagccccacaaaatatgcaatttcaagaaagatcacatcttgagctacagaaaaggaactggggtccaggataacctttgtaccttaaaaaaaaaaccaaaaaaaaaaaaaaaaaaaaaacgggctgggagcttctggtgggtgatggcaatgcaagtttgggagggtgaggggaggaactgcatggtgagcaaaagttgtctcgttatgcagataaaaagtcagtctcggccaggcatggtggctcatgcctgtaatctcagcactttgggaggctgaggtgggcggatcacgaggtcaggagatcgagaccatcctggctaacacagtgaaaccctgtctctactaaaaatacaaaaaaattagccgggcgtggtggcaggcacctgtagtcccagctactcgggaggctgaggcaggagaatggcgtgaacccgggaagcggagcttgcagtgagccgagattgcgccactgcactccagcctgggtgacagagcgagattccatctcaaaaaaaaaaaaaaagtcagtctctcaggtcttaacagttgtctgagcagccccaagaataataggcagttgttgtcaatgagtcaatcctccttggtaggtaagatttccaggagggagttcaggacaacttaggcagatgaggcaacttcagagaaagcccttcctgcacttgctgttgctcaagtgcccccagtttgaagtaatcagcacaccaaaatggcagattttggggtggcatttcctgaactccttcagggacacccaaggtcacccagtcagtaaatggcaaagatccagcctcagcccccgtgggggctgcgaggctgcctcctggggatgacgtttcctggtgcagccagatggatgcccgtgtcactgccaggagacacctactggaatgggcagctgctccctaggccaagcccatcagatgaagtgccaccatcctcagtgtggccttttcatccttttccaccctcctggactcgggtcttctgcccactctacctgacaccagtgggtttgatttccctgagtgcagcaaatttgggctcagcaactgtttgtagaatgaccactctgctacaaggaccccagagacaggcacagtttcttcaagaccctgggcgccactttcctcccccaagcctgtttcctgctctgggaaatgagctgacttgctcatgtcacatggcgtgatgtctggtagggacgctgggttgcttctgaaccatgtcaacagtctatttacctgattcttggcatggctgtgtgcctgctccagacgccaggtgactttgtctgggcaatgtggggtggggatgaggttacaggcaggtcgggtgtgtgctccttgtccctggagcagtttttttttctctggacctgggagcagcaagggacaaggctataagctagtggagccagggagctgggatgcagtggcgcgttctgccacctgacagtgggtgggggacacttgtcaaagccttttttgctgcagtcagagcgtgcatcccacctcctctggctcacggccaagccacacagggagggcaggggggatgaggtgggtgaatgggggtgcctgcaacgcctctgccaaccgcagctaacaagtggcggcttgcacaccagggcaggcagtggtgaccctgggcaggggcagccaatgagctcccgggccacggtggcaccactgggcagcccgcctgtctttggctggtgcagccgcgggaggggcctgggtccgccagtcagggctgccgggccctgtctctgggaggcctgggcagatctgccgctccattcacaggagcccgacccgacttgggctgccacattttaaactttttcaacctcctggagaggagggcgggctgcgggggcggtttgggggaggatggtgggaaggacgatggaaacaaactcgcaacacttttcccaggatctggctcctgagtgggatcgagctccaggctggggccgggaatttcgaatgctctgcgggcacatggcaggcctgagggtgtgggggggagggattgggagagggaaaagcagagggtgatggtcgtggcccagatgcccagccaggactggcgctggggaccccagggacccagactgctcaggtcctgcagccccccagtcacctgagcacccctctgcctggatggagttagttctggaacagcatgtgtggcttaagtggctgttagccagggccaggggtcgggggaaattcaggctcatcatctagagctccttgtggcacaggctggacagtgtcagcagcagcaggggcttgtgccccctcccccccaccccttaggcctccctgctcaatgcagacccaccacggccagtcacataataaacatatattaacagatgtacaatttgagaattctaattcaagaaatacagcttccagaggatcctttaggatctatgttcttattgcacatggctcagcccgtctagggacatctaccaagaccagatggtcggggcgtgggggcagagcaccggggccacagtgggtaggcactctggccacatcagttcttataatctctctgggctgaagtggctgcttcattgcagggttggaccttgtttaaaaaccagatttgacatttccttaccgaacttcctttcccagcaagaatcctatttgttgggggacttttaaaaaaagagccgagagaaactctgggagggtggttatcacctcctggctggcagcttggggaagtaaggctttggaagacggcgggcgcaatgacacacccaccgccacaggaaaacatggtcattccagaaggcccaggagaaactgtgggaataaataaaacctccctcctcccactggcggcaagtgctgttttaagcaaaatcctcatttcaatgtgagggtaagaaaactattctggttcaggtgtatcctttgtccaaggtacgagaggaggcctggcggtcacatcaacagcgagtgaagacagaggcagccacgggcactgccttttcttcaggagtcgaggaggctgccctggggtcccggcaccactgactgactcggaggaagaactttctgaagtccttggtgcatgacttaggaaaaaccagtggcaatgatggagctgtgccctgtggcacctataaggcaaagcccactgagggacttaggggtggggaaatggttaggtagatcctggccccctctgcaggccttcccttctgtgggcagggggctggagggctcctgggcaccaggacaaagagcccaccagcgctgctgagaggggagaggtggtctcacccaagcaggtccttgtggggcctctactgtgactcaatactgacctggcacctgcctccatggcctgctcctctccaggttaaccataatcctgaggccttcgcgggttcacactatcatgattactgctgccatcaaaaccaggctggggtttcggggggctgtgaaaagctctgatgcgactctccttatgctgtcagctacagctaatgtctagcaaaaacatcaccagggtaccttccccaaacaggcctcattttctaaaacatggaagaaatcagctcaacaacttaaccaaatccctgcagagtttaaaaagtagactatatatatatatatcttcatatatgcctatttacatataaatagatatatatacatatacacgcatctataaattacattctatggagagttctctttcttcctcctatctttggccagggcctctggcttctcctgagaggtggctggtggtggctcctgtgagggaggaaaggcagctgggtgccccctcccccagcccttcccactgatatctgctgcgagttttacattctactttcgttgccatggtttctgtatcctaggagagaggcgatgcggagcctccgccagccctgcgagggagggaagcagccccatggcaggttttctgtctgtcctaagagctttctgcatttactgggtgagagagagggcagctgtgcagcgttcggcctccaattccattttaattttgtttctttgtttgtctttcctcaaatatacagtccatcaccttggctcagtgcatgtcaccaaaaattctccagggatttcatagtctggggaggagagtggcaacagttagctcggcattcaggcggcaccggctcctctagcttatgccacacaagtagccccccttgccactgcaccgctgcaccgtgctgcccgctcgacccccaccaaccccacttgcggcctgccctcctgcggcagcacagaggcaggcacaaatggcctccaggcagagtcagccatggatccaggccgggaggacacaggcaaaggagggggtgggcagggcacccacacagagaagaaccttcactgcttctgcccacacttctctgggcttggctgaagtggccacctctggcaaacgctgggaacagagcccagcgcccccattcgccgggctgcagaaggagggagcctgctaccagcaactctcatttcccctccacccctcctgtgctgagcggctgcgtctgaccctgaactcatgaccttctgttcccttcctcagaccgcaggcgagatgcctgggcaaggccggatgcctgtggcttccaggctgccaggtgtgacggcattcgagagagtgcctcagatcccaccagaggggggtggtcagggcccgcggcccctgccgccaccaagactgccagctcccacccacctcgtggctgcctgttcatcttgctccatttcctcctagctggagggatggagaaaggggagggctcttggcccacctattcccacatggttcttcctggtatcaggcaggcagtgtgcatatggggctctcttgggccccaccatatgtgatggcctaaataccagggcacggacaatagtctgctgtgctggagaaagggccgtgctgactgatggctggagtggaccaagaagccccgggtggccctcagcaacagtttcaagttcccactctgcctggttctggggtcccccacacccctggagccagggagcagagcggaggagtggggaggacagcatcgctagagggcggaaaccgaccttggtttcccagcaggccccacagctgctcggtctctggaggctggaggtcaggctggggacaggagtctttgccacaatcaccaggcttcctccctttctccccctccctcctctgctcatgaccagggccaaagctgccaggagttgcagggtggaggcagccctggctcatacttggacctcggtggtgtggctggcccaggactatccatgcagggaggcctgcacctctgacagtcggctgcagctgggggtgcccatcttctgtgctctgtggtacatatctgtgtcgccaaagtagcgtgcccggtacagcaagccttcctctgcaaagcaatgggacagggttagtgcacacccagtacctcccgaagcctgcaaggaagcctgcgagggctgtggagggcggaggaaagctggtacatgcccggggcttgggcagggctggcctcccattaggaagaccatggaggagcagagactacagtccttatgtgggcgagggtgacagaggcgcctttctctagaatgcagtgaggccagccaaggtgagaccctgtcatcctggtcaggcctccccagggtcccacagacagatccaggagcacagtcagggggtggccagggatccatccgctccagtccatctctacacactcacctctggcagccaacatgctgggctgatggcagtgatttacgggaacctgaggaaactaccaggtggcccctggctcccagccccggagaaacacaggagtggagaccagctcttgtctgggaggtggctggtgcagggcagtgccaggggctgggccctcagagcacagggtgagcagggctctctccttcccctgctttccagcttcatcccaagccacctcccaaatacagcccccgccttccccccacactcactctgctgcttctccttccagcagttgttccggaggttggcgatataatcatcttccacattccgctcgactgttttgaggctggagcctgtgtactcttcggagaaagtgtctcccacatagtagacgacacccaggtggtcagtgactcgcctgtggatgtggcccacggacctggccagaaataccaggttcaaagtgggtgcgggtccccatgcccagggcactctaggggtatgggccccaagacaggaggtgccgcacagaccagaggagtagttggttccctctcaaaccagagcagggacccgcacactccctgaaaggagagtctgaggaaaaggcagcgtcctcccacacacgtggcccagaccgcaggacgccctgcctttagatccctgcttaccacactgctgacctggggcctttggggagaggcctggtctagggaactggagacctgagagggaatctgggctctgcctctgtgcctccatctccccattcatcccctaagccaattgttgctgagtgcttgcctgcctatctaggagttcccagtgtagggttaagaggcttaggaacaaaatgacaggaagggctccagggagccttatcctcccagctccaatcacaggctctgtcagctgtgggaagagccttgacacccagacaggaccagtgctctggggacaacagtccctgccctagtcctctgctcctcacatctctccagttgcagggaaaagggctggcatctggccacagggagcctgagccggcggccagggtccagtggaccgactctgccccctgctggctgagaagggtcctgccagctcccagccagaggtggccaccttttgggagagggggacccaccccactgaagatgtgcacccactgtgtagctgaccctgggccaggtgctggacatcagtgaggggagctgaccccctaacggctcatgaaatgtcctcaagttcactcctggcagtcgagactaagcattcattaaactaatattgttgagcatttctagtgggccagacattttatatgcattactcattaatttccacagcaggtggatgttataattcccattttatagatgaggaaaccaaggttat

SEQ ID NO: 54350 - DNA, 2657 bp, Homo sapiens
acctaaactaatcccaggtctttgtcagctcagtggagggctgcagatggtaaagtttacacggatgcataaggcgtatagtctcatagtctttccagaaaagcacaaatatgacaaatatgcatgcaggtggttcttctgtctcagcaaattccagagcctgagccccagagaggacactccttcaagctcctgaactggtgcaggggcctgctgacagaaagatccccagaggccctgtggcccatcctttcttggctgcctgctcctgagcccgcagcagcatcagtgtcaggcagaattctgacagctggaggataccaccccaccacagaatatgaattaattcacagggaggctcctcgagcaggttacctcaggtgtcctggcaaatacagcccgaaaccctctccaaggggaggcaaacaggccaaagatcaacctgcaagagtccggagggaggaaagttcagcagtccaggctacctcttccaccagcgttccgctttctcaatctcatcaggcgggcagggccggttaggaggctgactgctgttcctcaatttcatttcttttccttcataaacatttacagagtcacagaacattttactttctagctgtgtcatcctgggcatcccttacctcagagattttcctcacccatagaataaagataatgatctttgctctgcatccctgactggcaggctcaagtgagaaggcacaggtgaaggagcttcctaaactgcaaagccctatgggtattattgccaatcacattatctgcgccaaccctctaatcttcccgaggaggaaacccaagctcaggaaggtcacgtggtagccgtcaggatgagactgggcccttcggagtgcctgttattcccagacggtttactgagtggtgatcacaagcaccacccggtgtctctctcccctctagcgtggattaagaaaaactccttggaaaacttaggttaaagaaaaaagaaagggttcccgggtgaagcgaggtgatgagttgtaaagccagcttcactcttccctccctggctcaggaggctcctgtccagggcaactcagcagcctcggcgtccacatggctgaccgccgctggactcttgcgggcgatggaggactggcggtggctgaggtcagcacctcccaccaggccacccgctccgaatctcatcatcgggaggagtgaggggcccggcttcaggacagtccgaggcggcggactggggtgggtgcaaaggccggcttgcattttgggagagtggtccctgaccctcagcccgagaggtgagagggagtgaagatacggaagcgcctttccctggcgcccgaagaacagaaatgtctccctgtctagcgcccattctctcccttaaaggagttatgtttattttcctgaactgtaatatttcccaggccggcgactggcctgggctaccgaacggccccttgggaaaagtagttcgagttcacttccaggtaagttcccttcgtcccggctgccagcgcgtttcattctcggagacctcaaaccccagcgggctccgccagcaccccgaaagctgaagtcccggccgcccgagtctccagacggctcgcatcccgcagaggaacaagagggaaaaactacgcctcccagcagccaccgcgcgcctcagtgcgcaggcgtagccgcgcctcgccacccctccccctcccccaactgctcccgtcggtccgttcccgtgttccccccatcagttctaatgtccccagtctctccggcacctcacactcaccgcgaactcgcggcgtcggatacagccgctgtgccttctccaggaagcggagcgcccggtcgggctggttgctctggatggccttgagggcgatgctgatacagcgctcagcttcatccttgttggattccatggcggaaccagaacgcggaaccagggagggggaggccgggcgagcgaagggctgcgccacccgccggcgcgtcgcgggcagccgggcgcggagtgatgacatccaccctccgcccctcctttcccgagttttgagcgagggtggaagtgctaccgtatgtcttctaagaaagggacggctggtgtaggtgtcaataatggtgcacgcccagattccatgttccggaggtcttagagttgagtatgcgccaaccctctaatcttccggaggaggaaacccaagctcaggaaggtcacgtggtagccgtcgggatgagactggggccttcggagtgcctgttattcccagacggtttactaagtggtgatctatatacgtaatgtaactacatacgtttcagacaaaggttatttattcactgaacagatattgagtgcccactgtttgtgaggcatggttttatgatggggatacaggggtgagcaaaacaaagctcctgctctcatggagcttacattccagtgtgtgtaggctgggggagctccagatagattcagatagtgataaaagctctgaagaaaaattatggaaaacacagggatagagagtgggaggcgctattttaaatagcgcgataaaagaaacctctcagaagctgtcattaacaggtaccagaattcaggaacgataacaggtagatgtgactgtctggaggaagggtggtca

SEQ ID NO: 54351 - DNA, 1156 bp, Homo sapiens
ctaatgtactttccctattcccaagccactccctggcaaagattttccctagggtattgggtgccctctcgcagatgacttgggaaccatttagtgtatttagactgtaatgatcccttgttacccacaagaaaggagagtcactgagtgcctcatttcctgtcatcctagcggcaatctgaacatgggaaagaactgatctcaatgtcatttctcatatttctccccatcttgttataatagataaagtagacaatgcagtgtgcaaaactcagattgcaaggatgcttgaactgcccactatctataggagagtttatgaccagcctttccgtagttcagccttagacaaagaagcagcactgaagttacagcttaacactgctgaatatgtgaccacagcagtaatgtcaagtgacaggagcccagatgctggggttggcctgggttcgaatcctaaactgtctccttactcactgtgggtctagggacaggttctttaaccctctgtatgcctcaatttcctcatttgtaaaatgaaagtaacaatagtataaacttatagggttgatttgaggaaaatatgtcactggagtctcagcgggagaggaagggagatcatagaaaaagtatttgaagaaacatataaaggcacaggtctaaaaagctcaatgaacccaaagacaagaaacatgaagaaaactgcatcaaggcacatcataattaaaaagaacatgtgccaaaaataaacaagtggttctcagacagggatgattcttccccacccccagcacatagacgacatttagcaatatctggagacagttttgcttgtcatagctgggggagggtgtaggctgtgctgctggcatctagcaagcagaggtcaggaatgttgctaaatatcctaaagtgaactggacagccctcacaataatgaattatcctgcccaaaatatcaacagtgctaagagtgagaaatcctaaaggcatgttataatcaaatgtttaaaaccagtagtaatatcaggcaagagaaaaaaataaaaggcatccaaatagggaaataagaagccacattatctcttcactgacaatatgattctatacctagaaaacccaaaatactctgccaaaaggctcctagacctgaaaa

SEQ ID NO: 54352 - DNA, 1448 bp, Homo sapiens
agatgtttataattcagcttaatttatatttaattactacaactcagtttaatttatatttttaagactgccagccaccagaaatgtgagagtaatattttaatgaataaattttaataatttataaactaccattaaagagcccaagccttcaaagatcaatttaaaaagtacctttaggagtgtccttgaagatctccttggcccgtctgtaagtatatattcttttcatggttttctccaaatatttagttgcttttccaaattaaagtcattgattagctcagaaaagcaaaataataaagtctttctaggtgtcccatttgtttccccttaagccattttactgagcaaagtgcaaccaagcaactgcttatttgtatttattatgtaagaaatttcaaaagaaaaaaagattaatttttaacttgaagttactgttgtctcatcagtcctgttacagttcaagtaggaacataatatcccaaataagacttttttgtttttgttttagagacagggtctcactctgtcacccaggctggagtagtgtcacaatcttagctcactacaacctccaactcctgggatcaagcgatcttcccacgtcagtctcctgagtagctaggactactactgcttttaaatgttttcatagagatgaggtcttgctatgttgctcaggctggtcttgaactcccggttgctcaagtgatcctcctgcctctgcctctcaaagtgctgggattacaagcatgagccaccagacccggcctccaagtaagactatttaagtgactcaattaattaagtatctcttatgcttaacaagagtgattacaacaaaatttcttaaccttttgtgtaacacataatgttaaaacttccttttaaatcatgctgggtatcaaattctctgggacttgtgcagtgcttggattgtcatattaaagataaagtatgttaatttaaagtgacaggaacgaaatcattctgaagggagcagggcaaggacatatgcatcatgcgctgaacctttgttcctgaagcattactatggattttggagcattaagtaatttaaagcacatgctgctgagtcagtacctgccagaaatcctaatcagaagatgagaaaaagaaaaaacattgacattgtttgattatatgaacaaactaatcaaatatacatatcacaaaacataatatacaaagaaacagttaaaacctgtaataatatcactgaacacctggaagtaggaaatgaggaatacatagaaatgttttagatattatctgctaggcacaaaacaaaacaaggatgtctcattactgtttctatatataatatttttttaacttcatggcaaatagttgctttgccactcatattaatataggcaatcaaatatggatgagttcagataattagtaactactctaagaaa

SEQ ID NO: 54353 - DNA, 1150 bp, Homo sapiens
aataggaagaaaatgggcgtttctaaggtaccacaggaaaaataaaatattttactctagtcccttagctataagatatttattctacttatatttactaatggccaccgtattttttaagacatggaaaattggaaggtaaagaaaccatcaaccataagattacagagaaggcaacttgaagaacagtttgttttaaactgttctcccaacattcacatagagtcaataacatctagctctttctcaaaacagcctatggccggccagaatgcgacggtgaaaacaaaacagggagaacgtaatgaaaacgggaaggcgctggaaaagataaaaactgaacagtccgagtagcctgcactttgtatttctcctttgagtcctcactgattttccacttatttcgattcagtggttaatatttctccgtattagaaatccatctgtgaactcccgcacccacttctaaccacatccacaaattccaggagagccagtcaaggctaccagagtgtcccagtcgcctgtgaggaggggggcgtcggcgccaagttgcgaacccggcactgggagaagttctcccgggacgggagaagggacgggttggggtgaaggaaagtggaggacgggaggcaagcaagactacggactcctctccaaaagctgagcgcatcagggagagacaggtatcccgccagacccgagaagtagccggatgcccggggcggacaaacggccagccacgaagcccagttccctaaggctgtctcgccaacccccttccccttcgccttccctaaattgctgtctccttataccctccagagtccaagactcacgcgtccaaacacgagctccagcagcctctcggtcaaagccgcccacctctgacagccatagagatgaaacagcggagacaaacctccaccccctccgcccactctcacgtgactctcctagccgctgggcctgtcgggatcgtggagacaggcgtgtgggaggggcacagaggaaaaggaacggggaggggcggggaaatcaacgcgccacgccccagcctcgggccccgccctagccccgtcactcccccttactcccctcagcgtttaggcgggaaagctggagagctcccagaagctctcgggcattt

SEQ ID NO: 54354 - DNA, 582 bp, Homo sapiens
gtcaaaaaatttttttgcaataaataaccttaaatatacaccatttttgtctatgtgtgagtctatgtaaactcctggaaatgaagctgtggagccgtgagtttcacagactgatttctcttggaagcagactttgggacagaaatttagagttccagacatttattgggaggtattcttgggttcaacagctatgaaagggagaaggaagacggaatttggcagaagcagaagctggcctgtgatgcactcatgcagcctaagataaccccgtcggaaagctgtggagctgaaatgactcagcagagttgtcctgcactggggggaaatggcaagtcctttatatcagtcattggatgtgggttgccacaaaaaagcatatccttgggtgagacagctctttgctgctgaggcaaaacttgaaggggctgacaaatgaagactgtctgctgacagaactcctagcagctggggcaaaaagatctttctggaaaggggtgtctacattttgtaatttttataattttaccaaattgacatgacaagttattttttatttatttttatttatttatttgtttt

SEQ ID NO: 54355 - DNA, 902 bp, Homo sapiens
aagtgggtgctaccacgcttggctaatttttgtatttttagtagagacggggtttcaccatgttggtcaggctggccttgaactcctcacctcaggtgatccgcccacctcggcctcccacagtgctgggattacaggcgtgagccaccactccctgccttatcgagggttttctcacaacatggtggagacggttaaaggggaagtagatgcatgtgaagagggggaaacctgagggcatcctgactttataacaacctgttctctcaggaattaatccattcctgagaaaattaatacagtttctcaagagcaaaaattaactgcctgaccaaatagcaccaagtctttcatgaaggatctgctcccataatgcacatgcctcccactaggccccaccacccagcactgtcaagttggggatcaaatttcaacatgagttttctggggacaaacaaagcatattgaaaccatagcactaggtaaatgttattcacaactgattcatgtggactgctataattacctttctttatgccatttcctggtttatctacagttaataattgattcctttatttactttgcttagttttctctgtgtctatcactaattcttccttcaactctttaacagatgtatcactgcagtctgtgctaccaacatctttcgcctgaattattgggataattgcttccttattaggcaatccagttgcttctttattatctctgtttccacccttgtctgccaatagtctattctcaaatggaagcaagagtgaaccttgtaaaaatgtatgccaattgtttcacttctataacagctctccattttcctcagaagcaaagcaagttattacagtcatccataaggcccacaggatctgacatatcccccc

SEQ ID NO: 54356 - DNA, 962 bp, Homo sapiens
atatttatgatccagaggagctgacagaaaaaagacagaaatcatcacagaaactaggaagtcatgggaacaggcgtggtagtgatgaagagatgactgcaggtggatatatgaggagaaatgggaataaaaacatctggaaaaacagtaaagcatagccagcaaacaggtctaggctgtggttcgtgataaatattggaaggcgaaaccctttccttttggctttcctcttcgtataccttttcctgttaaatactgttgatttcacttgaataataattcgtattatcagtaaacaatgaaatgcagcccctagatctctgggcagattccttttatgctttcctgatcatgtcaatgaaccgtgtgcatcacctaccctagctattctggaatgtttaggcaaatactccactgagttgagtcatacttgagagctgacgtcagtgtacattttagtagagaacccagttaaggtttcatgctccaggaagcctgttctgattagttttagcttaaaaaaaaaaaaaagatagtagagaacctagttaaggtttcttgctccaggaagcctgttctgattagttttagcttaaaaaaaaaaaaaaaaaaaaaagatcaacctgtgcttaagagttggcacagaaaacaattctgcagccatgttggttttagtgaccatgtttttaaaattacaaagtaatatgcaggtgagaacaatttacttttcatatatatataaattgtaagatgtgtatacatatacatcttaaattcaagcagatgagaatactttaaaccattcagaagaatagctaccccttaaaacttcccagaggtaacatgttttcttctggaaattaccatctatctaagttatacatatatataaattactttaaaaagggtcatctatactgtgttatctatattatttaaatgtatagatagcacctgtaatc

SEQ ID NO: 54357 - DNA, 1314 bp, Homo sapiens
ctgttattttcacgggtttgggtgtcaattatgggttccctagaatttgcccgtaattgactatgtcccactataggtaactctggaagggactggcagcttccagtgtggttctcccgcctgtcgattggaccttgcaggaagccccgcctcatcaactcagtcaagggctttagttggcccggcgtcggtgagtggcgggtcttagctccgccctggccgtccgctgcgctgcctgggtcggcgccgtttccagttgagagatggcggccgccgcaggtagatcgctcctgctgctcctctcctctcggggcggcggcggcgggggcgccggcggctgcggggcgctgactgccggctgcttccctgggctgggcgtcagccgccaccggcagcagcagcaccaccggacggtgagcgagcgcgcccggaggctccggggagggcggggcggcgctggcgtgtgggagccgccggcgggcaggccgccggggcagcaggcgagttacctcaactcccggccgctccggaggttgccgggcaccgaggagccgccgtgcccttcaggcgcctgcggcggcgaccaggaagggagggcgggcgggaggaagccgagaggaggaggaggggcgacggcggggatgttcccgcaggactggggacaccagggcggggaaggcacgggacttgaacctctccccgactcgcccccaatcgcgttccctcccttcttcgttcttaacagccctgccccaaggctccctgaacggagccagatggaagttgtcccctttccctcctcctccgggcgggttggggagttctgagttgccgcggccgccttgtgtgtgccaggagagtggcagtgccatgctgctgggagctgccccggagagcagcccaggaccccggcggggccgcccctcgtcctctctcgtccccgaggggtcgggcaggaaggaaaatcaaactttattcccctctgtgacttcctctgtgtgtgtgcatggggaaccggctccctcgagatggatgctgcattgcttcaggaggcaagcttcatcctcttgggtccttaaaggtgcttttgggggtcctttcgagggctactgtataagcgtgttcacgcgtgcctgaagcgggaagggtggtcagcaggcacaggagaagcgaatatggtaagttgttgacagaggcagagatttggtggttgtattaaccagttgttgctgggtttcattggctggcagaaaaagaggatttctgtttgaacactcttgggtgagtgtgtgtgtgtgtgtgtgtgtgtgtgag

SEQ ID NO: 54358 - DNA, 520 bp, Homo sapiens
tatctcaggatgggaagctccataatttgttaatagtgaaatgactagaatatactattagaaatggttttccaaaatcaaacttatttatcagttttgttggaatgtcttgaacaatgaagcttcagaattgtgatttttatttctatatttctttctgacttctcacttgtattcctatttatattttgcatgtttgttttcctgatttctgatttggattccagtgaggtcgtaagagctaatgtagtacaagggttgagttcaaaccagcaggtgctatgagtcatttgctcctttgctggggcagccagtgtgctgctgttaagtgtggctgtgtctcagtgagctctcaggaaagatccatttaatccaattgtgacagaggggagatgagagcatggttctgagagaaaaagtttacaatctcataggcaaagacttcttggatacataaaaggattctaactgtgtttaacgtaatataggcttttccattgtattttaatagttatcaaca

SEQ ID NO: 54359 - DNA, 3372 bp, Homo sapiens
cagcaatctgggaggccaagttgggaggattgcttgagccctggagttggagaccagcctgggcaagatggtgagactccctgctctacaaaaagttacaaaattatctgggcatggtggcgcacacctgtagcccaagctaactgggaggctgaggcaggaggatctcctaagcccagaatctcctactaatcagaaacacctggggtggggcccagagatctggttgaatctgccctccaggggcttcaattcacaggtgagtttgagaaccactacttaaaagacgagcacggtgcatgagagatgtgtcacaaagcaaactacaaaagagcagactcgttgttaggtgttgtctgttcaaaagattgctcgattcacaatcagtttgagaaggtattttgtactcttttgggcacagccgccaggtttttggctctactgggttccaaggtaaggaggcataaccgcctatttttctaagtgtttttcaggcccctctttgagcaggttgttttacacaaagtgagaagagttatttgcctttctcttctatttactcttcccatcccccaccagttgctgctggcttccaccctgcccagccagaggctccgcaactaaaatttgcttaagtcttttaatgctgttttgctagagaaggaagaataggatttggttcttgatttcctaataaaaattcctgctgttgcctatttgctgaactacagatactagtcctgtgttgcctttaggaaggaaaacacctgtgttgattccaatgtctgaagtgagtcaaccccttccctgtcccatccgtgcaaacagtgtgagcataatccagtggcaaggcctctgcgttggtccaactgccttggacaaatacatggttttagggccaggtgggtcctaacagaccaggcatttttctctgtgaaactttcacaaagaagctgcagcatagatggttaaaacatagatggttaaaacatagattttaaccatagattgttaaaacatctatgctgcaaaactttgggtcctgatgcaatgattaaccattacctcctagtcactcttagtgtataaggaagcgattttccccactcaaaaaggaatagagagacttaagggtgagtccgggaagtatgtagtttttttgtgcatctcttcaaagctgactttttctctgttgagtatttggagaaaatatttctcaaatgtgttttcctgttaggctaaattgactcaccattttcatttctaatcccttgatgagatagttgataaattaaaccataaaactaatgctacctgagacctgagactgtgcatgctttggaaaacgttttcatgcgcattggcaattacacgatgccacccagcttcaaggcctggggctccacattttgctccccttacattaacttccagggcccctgggaccaggggctctgtgccggcagccaggtgtgcaccttatatctgtgtacccccagccatattcaggcaaggtaggggaagtgctcctgccagctcacaaatctgcatctggcgccaagtccaggggacagccccgggatccctggtgagccacgaacccttcctctccacagcatgcctgtcgttgccgaggctgcaggcagggacagctcccttgagaaagtccagcaaattgatgccagtcagggactgagagctgggaggacggtgtgaactgcagcagggggaagggagaatttgtttccaagctgagcacagagcagctgaggaggtggttttgccccatggcagatttttctctgaatgttcggcttcagttttcatccctgggaactcctcacagaggcctctcatacccaccctccttcttcccaccccaggtacccttttttcctaagaactgcctcacaacaaactcattaaaatggcccagggaaggtttcccagatacaatacaggaagctcagtgaaatgtgagtttgagataaacaacgaagaatttgtcaggataagtatgtcccagatatttcactggacatacttatactaatgacttatttgttgtttatttggatttcacatttcactgggtgtcctacatttttatctgctaaatctggcagctctaagtggataacaggaaaaagtgcaagacagatcgtgacctctctggggctgtccatgggtccaccagcaacagtttttacagaaagagaaaccgcacactcaccatatcggcacctgtactgacagactccattcttccctcccagcagctccagaaaagaatcgaagtagctattgacggattcaaagcttccccggaggtgccgaaggccccagtctgaataggactcctccgtgtcagggctcgtgtcgctctgagccaggccacccccaaggctgagccacaaaaccaagaagccactggccagcttcatcctgcagccaggtaggtactggcttctctcctcaaaccccagccagtgtcccagaattccagggacaaaccccctacccagatgtcaggcaggactgggaaagggattatctggaacattcaatctgtctgttccccagaggtggactttaaacatagctatggaggttgggatgagatcagggcaattagaaagagggcaaaggttagggagtgggagggccagggagagagaacatttcaaagtggattctaccaccctggagggagggagatgttagccagcttctgagacgcaggaacggtgaaggattcggagttctaccccgaccagcttgttaagctgttgatcagttacaagtgtggctcttcagggccagcctcttgatagaagagcttgaccgaaggtcctagccacacccctcagccagctacctacatagtctccaaggagagtcaggaggatgtgtacagggcccaggaaagccccagcggtaggaattaatagtcactttaccaagggtcacgatagtgtcagagtaggtaccaagtgtgtgttaagcagaagttcagatttgagaccccagcttctgctgtggaacccacctggctctgacgcataaatcctctaatttggcagagctcccagatgtagccatctgagtgcagggacattttggcttctatttacagcagtatctctgtttacactcagcataagtggatcataagacaagatctacagatggtccaaggacaattctgggggcactcggctctcctggtggtgtttttcctttgagtttcttagaagtcagagggtttatcaaatagtctatttgggagtgtaggcttttaagactgttgactgaagtctagtgttttggcatcgttttcagtttagactgcttttagtcgtgtgaagaaat

SEQ ID NO: 54360 - DNA, 421 bp, Homo sapiens
gtgtaaagttgaaaccatataaataccacacttggggaccagtattccctcccttggtactggtgtgaagttgaaaccatgtaaataccacacatggggaccatcaaacaagttccaccttctggtcaataaaaaccaaagccacccaccctgtttcactcttgcttcatcctggactaaacctaagtccttgaccttgaggagtccttttgctgtttactgtgtgattaaactttatttcatatccactggtggattcatgtcacttgtcccaatattcacataaattcctgggcaagggactgcccagtgtccaacagtggatacttggtgcccaaataaaacaaagattgttttttctttgcatatgaatattcaactgttccagactatcctctgttgaactgcccttaaacttttt

SEQ ID NO: 54361 - DNA, 2700 bp, Homo sapiens
tttggcataattaaaagttgtacacatttttcaactgttttaccatctaagttaccaaaacacaaaatggccaatgtaattatccgcctaccaaagtcctgattttcagtacttcaaaataaaactcatttcaaaatgtcaataaaaacagcactacccatttaaaagagacagaaatagtccttttcctagttagtctatgtaaatctaagaaacatttgtcatcagctatcaaaaacaatggcaggacttaaggcacaatgtcccaaaaccaaaactgactatgaattttattaaaggtaagtgataaagtctcttttcccacataaagaaaaaagtaaaatttgaagttcacatttcagattcttaaattacgctcacaagctaaaaaaaaaaaaaaaaaaaaaaaaaaatcacggggtgtgtattcacatttcacatgaagacaaaatatagttgaggttgttcactttcagcttcttgaatatatcgtcttaggataccgattttctccatagaaacttgattctaaaaatccctttaaaatgttttttaaattaacttccaacgttcctgctatgcagactgaattcttcatctgattattttaggaaaagactagcctcattcataagctacgtctaaacctaaaaggggaaatacgtttctaaccagaactttaaaaaaaaaaaaaaaaaagagtaaaaaattgatgaaagaacgctgctgccacgtctttgcccctccccccttcacgtagtggctatttcatcccctccgagtgcattccaagcgaaagtccgagaaccactgctctcggagaaaccagaaacagttaagtggaaattggcaagtctctttggccttttagatcaattcctaaaagaggatctagctgcttcttcaaccctttcttaaagaaaacagtgcaaaattccaagagtcttcactctatccggaacgcgtaagatgttagtgtctaaacattgaatttgtatgtaacagagtcgattatttaggagaaagagtctcacagttatcataccatccttcctccccattgaaacatacatccgggggccagccatgtaatccaactcaaaatcctcacacaaccatggaatttgttggactgatgtggacttttaaaagctgcaaattctcggcagagagagacagagagacagagattgagagaagagctcttgtctctttttaaaaaaagttatggggaagaagagggaaggaagcttccctgacgacgaggtgacctgagagcctacttcctcggcgctacgagcagaaagctcggcgccccgggctacgtctggcagctaatgctgcaccgctgcgcgcaacagatgagttcagccggaactttctggggaggtccccccagctcccggcgactttcgatagggcaaaaatgcctggcgcgctgcggatccagctccaagccttaaaatccgctctccaccgccacatgcgaaccatctgcggctgtggcggccaaaagcccacgccccgcgcttgcgttccccttagcctcgttagggaggaccaggtgcaggggaacttggaaaaaaaaaaaagcaacagagtgattcctccccgggaaggaaaattcaagaaagtcctggtccctagggcggggactgaggctgcagcagccccagcggtccgaggcgcactagggacagaggtgggaaggggggcacgaaggagcgcgggcgccgggagtcgcgtggcgcagggagaggggccgagtctcccgaggggaaggaaccgaggctgctgtggtaacctggggaacccccgccccagaagtaccaccacagcgggaaggaatggatcgccgcagccgtccgagaaggtccacggctgcccagtggcctcagtctccgggatcgagggagcgtctcacctggaaagtgggacgagagggcggcgcgctcttcagcccccagtcgcctccactcggagcggctacttcctaccctcagcccgctggcggcgcgactgggcagcagagggagcccgttagcccttttataacctctaggccgcgatggcagcgccagggaggaggcgactgcagccctcgctacgtgagctcgatcacaccagcgccccggcgactgcgcaggcgccaagcccgtgcctccctgctgcccccacccgtggccggcccgtggagtctgaggccgagaggagtggctgggaccggccgccgtggtgtgggtaagcgggagtgggatgtaacgcgcctgcgcagggttctcgccccgccaccgttaccgtggttaccacggggtttcccccgctcctgttcagtttgcctccttgatttcagggtccgcgtcaggcctaagcgacgaggccgccggcaataaagtatcttaaaaatgagaagaggaacgtgggagtgtagaaaataaagcagaatttttctagggtggaaaataatagagattcagtcttggtatctcagctgtcttgttcctctcacatctcagcactcattttatactaatcgtgctctatctcctacctttataccttatcagtagataatagactaagagctccagggtcaggttatctcaattcaaatcctgcctcaatcctgtgtgtaacactaggcattaacaacctctccgtatccgtttactcatctgtaaaatagaaatgacggtacta

SEQ ID NO: 54362 - DNA, 378 bp, Homo sapiens
tagagttccttgagggcagggattttcatcttttacatttttgtgttctttaagggaccctgaataaagtcagtactcaataaatactttgttgaatgtcatttgctaaatatattttacccatggctaggacatagattgtagccaaaactgtccaagaattcatcatcagtgattcataattatgcaaccaagaagtaggactaaattttagatgttcctcggtcatttagtgtcaaagctggctttcctcagacacagtgaaaagggtggttggttatttaactgtaatgaattcttgactttttttactgccaatgtgagaggtacttttcatggggaataaaatactgatatacaatttaaagggaccatctt

SEQ ID NO: 54363 - DNA, 1751 bp, Homo sapiens
gctgagacgggtggatcacctgaggtcaggagttcgagaccagcctggccaacatggcaaaaccccatctctattaaaaatacaaaaattagccaggtgtggtggcgggcacctgtaatcccagctacttgggaggctgaggcaagagaatcacttggacccgggaggcagaggttacagtgagccaagatcgtgccactgcactccagcctggaaaacaagagtgaaactcagtctcaaaaaaaaaaaaaaaaagaataaaagtctatcaataaagaatatgatgtgaaaatgtttacatatgtttaagaaaaaaggctacaaattagtaggtttgatggattctaaatatacttatatatgtattgatgtataatagtaatcgcttagagaattccaaagtgtaaacagtgattatccctgagtggtgggattttgatgattttcttttcaaaaaattgacaattgtatattctgattattaaagattgactattttttactgttaaaataaggaaaaagtttgttttaaaataatctaaatattttcaactttgataatcatagcaatttctatgctattataactgaaaagggaaaatacatttttaaaaataagagttcccaatccagaggagtgtaaggaacttttggatctcaattccagttccagtgaggccctgggtctaagaccttaacctgggtgtttttgtaggtgttttgctttttagggtcattagggcaagtacaggttgtaccactctttctgttcttttacgaaggcagcagtgtttgttctattgtttatatttggtaacttctgagtgacacgtctctcctttgacatgcattgagtctttgccccaggaggctacagtgactcataagtttaaaaatatcacaattcttaaaagatcaggtttcttttgtcttctatttataaagagctcatcgtaaccccttttatcacagtcaagagtaggttctgaaagatagcactggggtgcatttgtctttttgctttttattttcatgttgagcaaactctgcctactggtattacatgagttctcagatcccacaggaaatatctgcaaactatttttcccacttgacaaaagaagccagtttttacctgagcgtctgttttagggcttttgacaggcaaaaatggctaatcccaaggccccaggggagtctgcattctgtccctgctgatcacaaggatttgaagggagagactcagcccacccttaatgaaggtactggaaaagcctggtacttaccccattactattgcctgtttttgagaaaccaagaataggaggatgttccctttttccacattttcattttggctactgaaaatactatggctgggtgtggtggcacacacctgtaatcccagcactttgggaggccgagggcagatcacttgaggtcaggagttcgaaaccagcctggccaacatgatgaaaccccgtctctactaaaatacagaaattagctgggcatggtggggcatgcctgtaatcccaggtactcgggaggctgaggcacgagaattgcctgaacctgggaggcagaagctgcagtcagctgagatcgtgccactgcactccagcctgggtgacagagtgagactctgtctcaaaacaaaaaaagaaggaaaatgaaaatactatccttattaaataggttaagtataggtttcatcaatgctccctttgttttctttttttttgagatgg

SEQ ID NO: 54364 - DNA, 914 bp, Homo sapiens
tattggtgacaattaaacatttaagtccaggtttcaagtcagtgtaacaactgaagcaatgtgcaggaggaatgttagaggtcttgctgaaaagaggaaataatcatatcttcagaagattctagggacttatttgtgattaaagacaaaagctccagagaccctaaggttatttacatgtcaaagtcccataggactaagtcccaaagtcccatagcactaaagagattctaaaactagaaaagttaaagcactgaatttccttttgatctcaaaaggtcattgctctctccactgccagcaaaccatcattgctttggggaaatcaaagtgccttcatcaggaaatgttgagggataatatgtgatgggacttgattgtcttgttagattggcagcttgcctttacctgggctgaacccagcatgcagaagggaaaagcactcacaaaagagaggtcctgagatttcttcatatcttgcagttagaagaaaacagttcagggtccatgtgtattaccatctcccaatcttttctatctctatgtgggtgtgtttgtgagcgcatgtgtacacatccccaatctgaaaatactgatagaaaggggagtgtgcggaattcctggttatgagtttcccaaacttaccatggagtaactgtttgttttttgattaatgtgtttttggaaaagaaaagatgagagtggctaacagcaggagctgcaacattgaactttgcttctcagtagtgagtgggaaaagagctttgctgtagaaccccaaggatatctgaaagctgaggcagaagagagcaggcctggaatactgaaaatggcagataaataaaagaaactttggtacaggacctacctgacctgagaatatatacatgggcaataaattatgaaggtgctaa

SEQ ID NO: 54365 - DNA, 1607 bp, Homo sapiens
ttagataaatctaatgtatggtttctactagattttgacaattctggaagtgactatagttttaaaagtggtttagatgatcaaagcaaggagaattaacattaattaaaggcctattgtaggttttactgctgtctaatttggttctcatgttaattttatgatatgaggattactggtttatagatacattcacagtggacagctgagctagacttcaaaccctaacccataagactccagggttcttgctctttccataatacctctgtttaggattagacagtggtggcattaaaaactaggatgaaaacataaacggaaggtgaatcctaaatttggctctaaattagggaaaaatacaaaataaactgttaaaactggaaagttatttgaatgtttaagatcctgtttatttacttatgttattttgttttaatccactgtggcccaaggcatagtctcaaaaggtcttgagaacatgtgccctctcttttttaaaatccatttaagctgtagtttttttaaactacttttgaaaaaaaatgtatttaagaagtagtagtgtacaatcgcattctaatttgagcatattatatgactttttattttaaatcctgatagataacgtagaataagtaatataatgaagcttatgttttggaaaattaagtctatgatcctttatcctaccagagttaggaaaacaattaacattcttatttatttcaaatctcacacaccaaaaaaagaaaaactatgataaaatatggttttagctatctgacatactagactcagaaagagaaagaggttaaaaacacacataccacttggttcctagtggtgaaacttttgctgatgcaggtgtgtgctagttcctggtccatctgggccatgtatgacttgagattatcaagtgttcctttcagggaagcctcttcgccaggttcgtgtgtttcaaagtccaagtcatcatcactatctaaacattcaaagtcttcatcatccagatcatcagaatctgactcattaggccttggccctacacagatcccaagaaagaaagagccacttagtaattattattattattattattattattattatttagttactacacatctcaaaataattagaatgttacccacagaaaaagactaatacacacagtcagtctacttcacaaaaatcccttctacaaatggtaatgctggcagatatgtgtgcatttaatgttgtggaaaagcgtacaagctgaatcaaaagatttagcttaaaaaaaagtgaattcaattaattaaaatatttttcttaaaaaatttttaaaaatacctaataaatgaatacattttgatgtaaacattcaagccatacaagtattgtctccaatctcactctctccccagaggtaagcatcttttagcagtttccgggtatcccaatctttctctctgcagttctgtacatatatacatattataattattttttgagttatctttttattactgatttgtaagtacagtaattccaaaaaagaacaatataatatgggagccaaggtaaaaccctatttaaacacacagcattcagtcactctc

SEQ ID NO: 54366 - DNA, 1969 bp, Homo sapiens
ttttccccaatgtatgtttttggtacctttgctgaaaatgaattcactgcagacatatggatttgtttctgggttctctattctgttcctgtttttatgccagtgccatgctgttttggttactataactctgttgtataatctgaagtcgggtaatgtgatgcttccagttttgttctttttgctcaggatagctttggctattctggctcttttgtggttccatataaattttaggatcttttttctatgactgtgaagaatgtcactggtattttgatggaggttgcattgatacctcttaattttctaagggttttccttatctcttaattttctaagggttttcctaaataagagtactagtttattcttgctgccaggtgatgcttggtaaagaaagaaatggcggtggatggaccaccctaactccatgattccaatcttactcagctttctaagagactcgtaaggaacctgcttcttcttatccagacacccactcaccacagtctaaccaaatcatcattttgcctttcaacccagagggacagacagtaattttacccatccaccccataacgccaaacacacgtcatcatgcagaatttggtgtcagaactggaagggactctatgatcactcaggctaatacctcactgtacatatgagaaaacccagagtacagaaaaagaagcgaccaagcagcaggggcttgacttggagtctagtgctctttccccagtctaggctccctcctgccatctaacaaaatgaagccaatttctcttacggttctagggcctctccttcgcgtctctgctgtggcacctttccttagccgcctctccgactgcgagagctgatcgagagctgccaccggccgccgaagcctggatcaggctctgtcccgacgcctgaccggaacctgaagccagcggaaatcctgagagaaagtctgaaacccactcagtccccgaaaccttgtgtgtcgtcactgctgtgcgtcggcgggagcattttgcgagtgtccgggggccttcgtcacttccgcccccgcggcaaagcagggaggtcggaggactggagaggtggggaccctggggaggtggctgctcggagtctaggtgacggggcgagacggggccggtaggtggcgggaggggccgggccggagccggcgggagggccaggcccggaggcccccaccctggcgtgcctgccccggccgcggctgaggaggaggaggaggaggaggaggaggaggatgatctccagatacactcggaaggcggtgccacagagcttggagctgtgagtggactgctcagccaccccagccggggcgggcggcgggcgctctggggaccctccttgaccagtccttcgttcctttcctttcccagggctggggagagatttttcttcggaattctctcctctcagccctgctggaccctgccccttcttcctccatctccagctgagggcgtgtcgcccttcgtctgaaattcctgaaatcaagcactgggtctgctgaagcatttgtagcatccgcagtgcttcaggtcccattgttaatggccatggtagctcgagaagttattaatagctaactgagggctccaggaaagtgctcacttgacactgtgcaaagctatttacatacatttgctcattcctatcaatgatatcagattgggaacattattttgcacattctacagataaagatcccagaattaaagattgtagcatgccaaagatcacacagcttgaaggtggtagagctgagaggtacaaacctgatgtcgatctgattccgaagcctgtggtcataaccatcacacatactgcctccccacctctgcaattaagcaccagaatccataaagatcagttttgcttttgagactttaaagagcaaatatttctggctttaaaaagatccaccctcacggccggccgt

SEQ ID NO: 54367 - DNA, 1639 bp, Homo sapiens
aaattcctaattcctacaaaattaacacaaaatacaagatcttagaggcagtcaataaaggtttgttgattgaatgatggtaacagtcacaaagaaacctccagagtcctttacctttttaaagagtagccgccaatacgcctcccagtctcggtcttgggtgagcacaggagagtcctcgtccactgttccctgctcatcgtacactgctctctgttctctgtcactgagaacggaatagacttttcccaggatctgagggcaaagagtatccgtaaatcacccctgctcctcccaccgaaacggcggcgcgagaaataaagatcagaaggcgccaagcggagctcagcgcgctcccccggggcggggcccggtagccaaaaggctagggggaggcccgcgcagccggtcggcttcggggcgggaccctgcatacctggaagcggcgggtggcgtcctccttgtcgccctcacccacccggtccgggtgtacctgcagggacaccttgtggtagcctcgtcggacctcgccgtcggaggcctcgcgtcgcacgcccagcacccggtaaaggtcggcggtgccgaacacttcctcgcaaaggtccagcagccccatgccgggcggagatacgaccccggaggaagcagccgctcccagctgcgccgggtacaacccaggactgcttctttttcgcgcccaaaaagcccagggcgcctgcgtcacaagcactgaaggggcgtggccacgccgcgcatccgcgctttacggcggccgcaaaatgaggtgtggcgagtcaggcgcgggcccgggtaagtaacgccggcatgtggagtcacagtccccggccgcgcgcaggagctaggtcttcagggaagtgatgttgctcgggtctctcctccccttgctctggaaatctggcgtccgtcttaccttttagtgtccaagaacaactttttcaaaaagttcatatattagcttgaatttacaaactgctggcctatttttttaagtagaaaacggccaaacatcagcattcagcagttacacatggttcaacttaacagatgtgttttttcaaaaatgttcttgaaaggaataggtaaagctgtagacccaaataattttgcaccccactggttggaaatgctggggtactttccctctagccctgtaggaaaaaaccctatactgaaacccaaaaagcacaaaacacgggtcttccaaaaactcttacctaataggactttcaccttacacattggtggagagagataacatgacccaagcctccgtcttaataacataaactgctgaagcaaaggctctttcttttaatactctgtgaagttcacagctgggtttgaacatgttggatcccaggtggcagcagagtgggctggagcaatcatccaagagatggtgagaaacttgggcctggagacccaaagcaaggttgaggctggggataaaactttgttagtagggtaaactcacagaggaagtatgtgtatacatatcttaaaggataaacaatgctaagtgaatacccgagttggcagaaaataccttatcaaatatcccctcactgatgtagcatttttcagaatcattctgctctgccaataagtttctgcaaag

SEQ ID NO: 54368 - DNA, 2105 bp, Homo sapiens
gcctcggcctcccaaagcgctgagattacaggcgtgagccaccgtgcccagccgaaaatcattcttacacctactgtcctggagctgacttcagtttaaaatcccctcaataaggtaagaccagagctgagttacccagaagcttttccataggcttagagaggtgggccccgcagccaatccaatgacggatcctgtctaggttgagggcaacgagtttttctccatgactgttgggcaatggatcataggagcccagctgctctacgaaacggccatccctgggacacttgttgtgagcagccacaatgcggtagaacggccgattggtgcagccacccagggcaaggcggatggttaagtggcccccacggtaggccttgcagaggagagtagctgtagaaaagcagctggttaggacacaaaaaacagcacaaaaaggacaaaatgacacagacggcacaattcccttttcccactgaaatgtctcacttccaatccattcctgtcaatccagtttagatgctactcttctttgtgaaacccctcttggccagtccagccagcaatgacctcctcctcatacccaaacccaccccgcatgggcttgccattcactaggctctgtgaccttgtcggagccttagctgcttcaatggggtggaaatttttcagcggtgattaagtggggaaaaaactgagagaaggatcaaatgtaaggcagtgtggctgcttcaggttcgggttgcctccatcgcgcctgggagagctctccccacccggccccgaactcccgagccccgtgaccgcccggaacgtctcgcggtggcccgatgactcactgaggtggaccatggtgccgccggcgtgcggctcctcggagagccccgctacccgcacgcaccagctctacggccttggcagggcagagaacaaacacagaaagaacctgcaagccgacaccaggccgcaccgccaagcggtacaagcccgaaaacctcgactccggaagcggatgatccgctcgccacgcctcctccgcttgccgccctatacttcccacaatgcaacacggtgacccctaacgtaccttaaactgctgcaaaagaggcgtttctcgtggtgtcttgtgggagtggcggtgcgatccctctcagacttgtgagtccctgctggagtcagaagttttaggcgaatcccaggcgcgccaaggaaagtgctacaaaagccatccatcttgcaagcgttggtgccgaggcgcaacgctgagaacgcaaatactaaagggcgctgttctttcctcgtggagctcacagtccgctggggagaccgtgagatgacagcagagaaactagcgcgatcagtagtactcagcgcaaggacagcgagcagagaaggcaaacctagtgcttgctaaggaagacttcacagaggaggtagtgtcagggccgagactaggagaaggattgtaagtgactagattttactttatccttctcgttaaccaaaattaatttacctctcaccttttctcctgttgtcgtcccacccctatcgaggcagtcacaccttaaaaaaaaaaggaggggttattcctgcttttgccgtgctgtgatccagggcagaggtgaagtatgattttttttttttttatctgtagccctagaatatgacctcggtgatgagggtaacggtgtctccttggagccctagtggtttagatccatgaagatgcctgtgtttggtgagaaggtgtcaatagctccaccttcagcaaagacctctctgttcagctttttcgtttactgttagttccaaagggctagcatgctctttgccctaatacagtgacccagcatagcagtcttcctccagggccacctttgaaaatgatgccttaattcctgtatttcagttaactgaacctgtccagaaaccttagcacctgacttcctccaggagtgatccaataagctttcatcagaaaccctaataatgaccccactataccttaattttattgtatgtatatatatgccatataattattatagcaattacactatagttatttatataactaaatacctacatgtaactcagta

SEQ ID NO: 54369 - DNA, 780 bp, Homo sapiens
cggaagaagctgcaaggggagagtccagtgagaaaaaggttagacgaaggaggcgatgtgactgagtctggtctggggacaagcgcagtcagcgcagaatgaggaggcctccgacgagaagcggtaaaggaaggtctacgtccgcgctcctgtggaggtcgccgggctggggttggcggcagagtccgcacctggccgggccagcggcttttcggtctaaatatcggggttttcagcctggccttagctaagggagcagaagatcggggtgacggctgtggtgtggccgcagggctgaggtggggaggccgggaagagagagtttcttcaggagggatcactgtcttacctgcagcagcctcagttatgtttttgacaactatagcaaccaactacctctcgcgagaacttacttttggccatcgcacgagcaagtttattccaagactcgcgataaccctctggggccgggagcagggagcgagacgctgagcttctgcgcctgcgccctagcgccggctgcagcctcctcacttcgagagcctgctgtttccgcggatgctttaccttgccaagagttgggtttaagtgcataggtttccacctttacattttgctttctcgactctttgatttcaatatttctctataataggagggaaaaaagcaaaaggaagtttaaagaaaaaggcctttattaaactgatttgaaaacatcatttaaatatttctccgtgaaatatgcaatattttttaaatgagcccgtcacgccctgttga

SEQ ID NO: 54370 - DNA, 2219 bp, Homo sapiens
ctcggcctcccaaagtgctaggattacaggagtgagccaccgcgctcgggcttttttttttttttttttaaacattctctgttagcaatcacttttaaaagactagaaaatcatttttggttttccaaaccacctccacccagtgagtcagttagtaaaagggctgggtctcaccgtttctcattgatggcatgaagcccaggaacccaagaggcagctgttgcaaatttatgggggaaaaaatacacgaaacaggaagggtgactgaagatacgcgcaacagcgaatacaattttgcaaaaccggcttctaggtatggtaggatcatttaaatccgtcagtgatgtggagaaagaacatggaggcatggctagtcctctgcacggacaggtaggtagccaaccaccagtgaggactgaaagacagtcctcactgaaaaggactgaaagtttgcagtggccaaaattatctcttttacctattcagtgcttgaaactctttccttgcctggaaggtaactcattacactcatcatctaattcggacacatttagcagattagctggccatcagctggcaaaaatcagggcgtttacggcagtcggaagacaacagcgtcatgtctgtcactttacggtggacatcagccatctacctctgcaccttggtttccttgcgcagtgtttgcacaggatgagctaatttcaacacagatttgctgctggtcggggaacagcaatcaaatctggaatgctattctagaatagcttccaagaactgtaaacgagaaccagtgtacgaccttggcctggcgcattctgtcctacggttcactaaacacagtaaaaatttccccaagtttccctaaattcgctgtgtcaccggaaagtacagccactaccagccagacggctttcagcactgcccgtgcgtttccctactcagcctcccgcgaggcagctgggccacgctccggcctcagcccctccacctgcccgagggcggggcgccactggtccctgggatttccaaacggacggaagggcttcccgtaagccaggccggccgcctcacccacgccaccccaacacaccccggccggcagcccggctacgagacgcgcaaaccgagtcgccgccatccgggaggcccacactgccctccagccgcgccccactagcaccgggacagcagcgcccagagctggccgagggcaagaccaccgaggcagacgaggtgggaaagggaggggggcgccgctcctcacctgaccccagcagcagcgtcacagcccaacccggtctcccgcaagatggagccgggggcgggcccagggtgggcggggcgtctcgcgagcccgttaggatcgcggctgcagccgggaacacccccggagccggagagggcgctgcggggagcgggctgtccctcagtcccgcccctaggcgccacctgagggaaaaagactctcccttcgggtggcccagcggatttttaatcacatttatctgtcgcaaggaccctgcaccaatcccttttaaggctgcctcaagtcacctaggaagttgcagcagtcctgggggtatccggggccccttcagtggcgggcggtagagaagggctgagactgggaggctggtgcagcctccccgcctctgaaataccgtcctccaggtattttctggggacaaagacggcgttttttgttagcctcctgtgaaagtaatatttgtgggaaatcttagttggaactgtagatgaactaatcaaaatcactcccgaaaggagttgttaggtgattttaggctcccctcgtggctacagcattgaacacacattagcattaaacatttgaggcaattacgagggctcagatcaatattttaaactcgttaaggaatttatattacagagaaaaccaatcagctaccttttagagtggtaaaaggtagcttctgggtgtggtcccccgaacagcagcatcacctggaaacgtgttagtaacgcagattattgaactccaccttagacctactgaatcaaactccccgggtggtgcccagcaacctgttttaacaagccttccaggtggttctgatgcacactaaagtttgcacatctgatgcacatcaacttacttattcctctacacacttttctacccaaaagcttcctcatgggggtggaatagagtggattacgattttaaatgggaagag

SEQ ID NO: 54371 - DNA, 2132 bp, Homo sapiens
tggtctccaactcctgagttcaagcgatccgcctgcctcagcatccgaaagtgctgggattacagatgtgagccaccacgccaggccaaattagtattattcttttaagaaccgaagaaggctcaggttgaaaatttttaattaaaaaaaaaaaagaaaaaaggtttccttgtttttaaatattttaatggaaacatatgagtcagatttcaaaaagtaggctaacggtgtttaaatactgtgccagtgtatttgagaagctgaatgaaaacaaaagtacctatattttaaaaataaatacaatacaaataaggaaaagttcattctacgatttcaatttatcaatcaagctacatggtaaagagaatcatttcaattgtttttcacctccacagcagtgtttgaggttggtaggctctcccaggaagcttggaatcttaagcaactctcaattagccctcaatttctctattttaaattaatctgctgacctgttgtgggtaaacatccataaattctgccctggctgagaaacatttaactttttcgtctaggatgaatgtgtgggtgtgtgtttgtaagggaggggtaactccttttgaccaaagtgttgatggttttctaagtaaatacttgctatccacaagaattttttttttcgtttatgctgctttttctccctttctgcactataaaggctggccttccaattcctgccccgacccttcaccgtgatccaatcccacaaggttcccctaatttctgctccgggtggcacctgacggccaaaagtgaacccctgcggttgtcgccagctagacgcggatagggcggacgactgtcaccggggagcaggcgtgggccaaagccgaggtgatttctgactgctcactggcgggcctcgcgtggctgaaggtctccgagcccctcggttcgccccggcaagccagaagtgcagctgtcgcggggcaggaagctaatcgcggcccctgcgccgctttgacaggccgagtgaagagaaaacgggctcactgcagctaacagcctcaccccttgggctaggaagccacggaagcaaaacctccgccccggcctgaaagcaaccgggagaccgcggaaccactgccaccgactcagccctgcccagcaggggcccgcccaggggccactccccaagggaggcagccagtcactcgcccgcccttccgggcccactcccgaggggacggtctcccgcccgccctcacacacagctagctcttcaggccaggcccccagggtttcgtccacctctcacctttgacgacgcggtcagccccgggagggggcggcgggggcgggggtgggggcggtgcagcccgggccggctccggggcggccatgctgggcccggggctcggctaggctctgggccgggcggggttgggggcgggggcggcggctaccagagccaagcggcggcgccgccggggaacatggcggaccctctttccctacagaggggctaagaccggcatgcactgcgcgtgcgggggtgggggcggggtaggctctagggacttgggcaaaattactgaagctaggagagaaacaggacgaggccaagggatcaggttaaaattctttgcatgcagaatgaagaatgaggaggtgctgcgatcgaacgactgcgaggaaacacacccgctctcatggcattcccagtaaactgagaagacgtgattaaacctcaggatctcctactaatagagaaatgtataacgatttagctaccagatctgaatactgaagggttggtaggggaccagagaatagaggaagcattgtaggttctagagtggagaagggaccatccaaaatggagtttgaaagagaattctggcctttgtgtttagagtctggaattgtcaagagtctgaaagcacagaataagactgcagctagagcaatttaggcgccatagtttgtcaaaacaggtaaggggaataaaggggatgacaccaagagatgtgcaaagaatctgaagaattcacctgaaaaggatacaacctcctcctggaaggcagaggagtaaatagggaattggaaattaattccttatttctgcacatgcacagaatctgggcccaggt

SEQ ID NO: 54372 - DNA, 441 bp, Homo sapiens
caagaagaagcctgtttgaatcatctgaggtttttgttgatgttcttgctgcttctttttaatgtgccccaaacttctattgtcccatccagatcttcagcaagtctctcctctttcttctgggactagaatagccagctgtgtcagagagctttaacagaaataaaaaaaatcaaaagcttgcgtcacttaatgactctactggctttggactgttctgccaagatcaacgttgcctcacttctcactataaacttgaaaccttggcaaacaatgccaaaaaaaaagaaaaaaagaaaaaaaaaaaaaagagagagacacccaaactaaagagaaggaaaaaaaggtatgaacagctttactttcaggggaaaattctctgaaattttcttgaagcagaagaaagttgatctggatagaaataaaaacaaaatacaaact

SEQ ID NO: 54373 - DNA, 629 bp, Homo sapiens
ggtaagtggcagatctagaaatgtttgactattaaacaatgacttaattatatattttattattctattccaaaagctcctattacagtgccagtcataagaaggcagtcaataaatactgcctgatgattaacatgacactagaaaagaacccatatctcccacacagactataagaccctcacctttctacacacaccctcatacacaccccactcaaggccactaagcaacttccaacaagccatgcagcattccttcagctcaactgctgcaaaggaatgacaagtaccaagcctccactttgctcacagccaaaaggacttggcaggcaggtggggtttccaatatccacattaggagctaactgaaactcagcctgccctatgacacacactcctgagtacagggagcaaaaggagaaaaacgcagtagcagagaaaagattctcaggctctgaatggcagtattatgtagggtaaagcagtaagttctcagacctgttctagatgtgtcaccaactagaagtgagagcataaaggaccagacaagagaggcagtaacaagtggtccagagaaatactaacaccaaaaacatttcacttaaattgtagatatagcattaaaca

SEQ ID NO: 54374 - DNA, 786 bp, Homo sapiens
tctctcaccctctcacctttccaatctcccaatttatttcatcctcctctgtgctctcagtgcatggtggggtttggattacaatactcacattctccctcatgttacagttatttgggtacgtggactacattttgtcttaagggcatctttctaattccacacagaggttgaatataataggcattgaatcactgacagtttcattgaaagagaaaactttttgtttgaaggtacctagcctagaacaaccaattctaacatcctgataaattctgactctccttaaagaaaagaactcacaaaatggccttatctagcttgagatactgctgacaactttttctaatagtgactatataaatggaaacaatatttgcttctgattcaagcttgaaaatagaaagagataagcatctacaaccataaaaagggccaagctatttgttgatttatgagctggttatcttaaactctccagcgaatagttactcaactcaaacaatttcctgagggctggactttggcagcttcaaactattacatcatgtacaacagaagaattgtatgctgataaaggacaaaaagtcttatttttcctgcacaagaacttagataactgtcatgtataacaaatttgtctaaaatttgttaaaaagtagttggaaagaaaacaaaaaggcacgtttcactttgttataattgacaaattataagaactaagaaatgacagctgcaggctacttagcccttccttataaagatctaaagttgtataatttactg

SEQ ID NO: 54375 - DNA, 1167 bp, Homo sapiens
ggtccctccccctggacctcccagcagctctagtcctccccgcgtgccctagagcagaccggcgccgcgtccctgtacccacaggacccaggtcctgccccacacgtcacactcaggtccattcctcccgcgacctaaccttccccgcaccccctccccaggcgctaccccctgcaccccgttacccccggccccgcccccctgagggtgtcgcactcacagctcctggcgccgcatacttaaccgccgcggctgctatagctacagggagccaaggcaaccagctctcgcgacactttccttggccatggcgagagcacacgagaagagactctcgcaagaaagtaaatgagtcaggctggaaacagcgaagtatatctcgcgatagcactgtttaaaatggcggcttcaaggcgtttcacgggtgtcccggacaggcgtggaggtggggcgcaggcgaggatgaagcttgagttggccaggagtcggaaaacgattgcaggcgggaccgcgtccgtcggggctgaggaaacttagcgtggcagaccctaaactgggataactttagggatatggccttcttttcccagttgcctcaaacttagagcagcgtcgtctttagccgaagattcattttcccagcattttccttctccaggcggagtagttggagacagagggcaagccagaaactgaccttcccatctcctcattcccttccatcaagaacttttcatcgttctttccccaccctggtttgtaaatggtatttggcttcataaaaacgtttgtccacaggtgccctgctccatcagttcgctccagcaatataggaagttaccaaaaaaaaaatttttttttattgaccttggatgcagaaaggaaccgcgttggtgtgtgatttgaattttggacttcttgtttcctgccttgtggccacgtcccccttacttggtgactctcagcacttagttgtggggctttttctctctgctctcagacaactataaaagcagactaattgaacagcatctagaacagaaggtggatgtaaagaacattggtcggccgggcgctgtggctcacgcctgtaatcccagcacttgagaggccgaggcgggcagatcacgaggtcaggagatcgagaccatcctgaccaacattgtg

SEQ ID NO: 54376 - DNA, 499 bp, Homo sapiens
gctctctgcacgttgcagttctggggaggccaagaggtaaaatggtcaggggggcttcccagcctcttttagtcctgttccccaaggctttcaccccccatcccagcaagctccctcttgcactgacccgacccacaatgtcccctgtgacaaagtcctctgacttaggggcagagtggagggtgaaaggtgaaaccaaggacagttaaagataaggcagagtccagttggctgccctgacactgctctgaccacagctcttccatcccattttactgctattctgctcctatcttccaagagatgtgctcttatccaccccacacacattcctcacctgcctcccattcctgactggcaatgggagggggaggagaaggatgtgtcactctccgtggcagacagggagataagcaggtcccagggagaggaaagatgagaaggaacactttccacccatcatagggaccatgttaggaggcttctcatgaagcttagg

SEQ ID NO: 54377 - DNA, 1110 bp, Homo sapiens
tgccatgcaataagggctacattgcaaggctgcacagggtgctactggggcacagaagtgagtcagaggcttcccacagacacacacacgagcggaaacagaaagtctttatatatcaccatatgtcaaggaacactggccgggagttaggagagctgggcactaggaacgctttgaaaccgaacagctgtgtgatttccgaggttatgttgcttctctactatattttagttccgaacttgtactaatgtttctctcccttttcttcttggtgggaaaagcacaatttggggtcaacagattcggctcaggtctaagtcgccggccgggaccacgtcgccaggaaacgacgtctccccgacaccttccctccccgtccgggctctctgcagcaattcatcccgtcactctcccaacgaccccgggcacacctccggcagatgcgaaatatgctgctcctcaggaggaaagatgacccggaggaccgcgggaggaccttcccactcgcgatcttcccagtgccccaaagccagggaccccactgccgcctaccccagcccgcggcaccgaacttgctcacaactgtgactcctcaggtcggattggacaccaccggaaacggaaattcaccgtcgcgccgactctccggagggaaacaaaaaggcagaaaaaagagaccggcgcctggacgactttcaggggagagctggaagaaagactgtcaacagctgagtgcgggcgccggcgccgtctacgcagtgcgttccaccgggtccgtatccctcccgattccgccccaccccgccctcggaactcgctgcctcaactcctgcggtgggactccggagcagcgtacaccgcccttgccttagtcctccccaaggccagggcagctgtgcggcctggcgcgggttacttggtgtggtgcaaaaagccagaaggagacacatttggtcctggccaccccggagtcacccaaaccaaaaggtaaaaggaacataaaaaagccttctggaaagtgtaaaaaaattcattgcacagtgatttttgtcttgtgaaatcatagttactgttattagcagttttttaaacgttttatattcatttttt

SEQ ID NO: 54378 - DNA, 2079 bp, Homo sapiens
gttactggtctaggtagtcagctgatccaatgagtgcagggtctgcaaaacatctcaagcactaatcttaggttttacaatagttatgttattcctaaaagcaatttggggaggttcagactcttggagcgagaggctgcatgtcccctaaactgtaatttgtaatcttgtagctaatttgttagtcctgtaaagacagactggtccccaggcaagaagggggtcttttcgggaaggggctattatcaattttgtttcaaaccataaactgaattcctccccaaagttagttccacctacacccaggaatgaataaggacagcttaaaggttagaagcaagatggagtcggttaagtctgatttcttccactatcataatttcctcagttgtaattttgcaaaggcagtttcaacagcagtgctcgaaaaattatgaaatcaacaaatagtactgaaaagttcaaatgaagtcatatatgaaaaagaaatcctagcactgttagctataattacttagccattaaatggggtactaataattactgcaggaactatcttttccaacagagcgcagagatcttttggctctgataaagctctgcacctaaacaaaggcgctgtataaaaatggttaataacaattgacctttactgagtgcttactatgatgccaagcggcctatgtggcctaatttcatcctctgggcattattatttccattttacaagctgtagagccagacctcagacccccacatgcaggttgacaacagttggtgccctttaccaccaccacacgttccgcaaatctcataaccagcaaacgccatgggtgagagcaacctagcggacggaaatcaacggggtcaggggtcaccaggaagtgactacaagactctagctcagaggtcactaatacgtcacaggcagagtgaaggggcattattaaagatagtttgacaaattctttttaatctcatttctgttggtgaggccataaagtgactggaacatctgaaaaaaaatgtcaggagggaaatacatacgactcagcagaggcgcacaggcggcggccatgatgggaagatgaaagaggcgcatgcgcggcatccgggtccccgaaatgcagacgtggcagaagaagtggcccggccctaaagcgtggaggaggaacttccgggggtgacgggacggccccctcggaaccggaagtggagcctgggagccttgacgttaggaacgaagtctaacctggatctggagccgggtgaggagtggcatcgggaggttggcgggtaggaaagcaaaggagaggtcagggtattactggccagattggggtccggtttcagaaagaagggaggagcctgggggcggggcctgggtagagaccctcacctcacgcatccaccatccaggagcaggtcctagaccatcccttcgtctcccggcccagattccggctcctgcttcctgccccgagcctgttaaaaggtgcaagacgtttggtctctgtgcttaacagagcagccccctctcttaacgtggccctagaagccgacttggcttctcggttttgatcctcggctctccgaggctccatggcttgactactttcagagttctaggaagcttgccccgcccccttgggttgtcaccctcgactatccacccagaatggagtcgagacttcagtctgactccaagctcttgaatgtgtttgaggggattattttctggagaagaagctcctttctttacccctccccccggctttggaaacataaagggagaggacatattttaaacttagtgtcagtgacctacctctgtaaggtttagggtttggaagaacagctattgagataactttgagtttaaagagttttagaccaggatcagctccttttctatagtcaaggtggcccttctagcaaagggggagaggtccattgttccctttgcagcaactctgagtgctcctgctttctgggccccttctgtctacaggataattggaatgatacagctgttgaaagtagatgtgatgagatagttttcttggaaggaccctgttt

SEQ ID NO: 54379 - DNA, 497 bp, Homo sapiens
cttgttgtctagggtaagaatatcaggcagtcttggattgactgagagtatggtgatcaaaggaaggccctacattcttgtgcctctggctacagcttcacccctagtatgcttgtctaggggagtgtaggccccttgttgggaatctgtgtttagaatactgctgtagctacagttgtatgctggtagtgtccttttcactgcctaaactgtggtattgggccagtgaaggtctgagtttattgatccttgctttgcattcctggctcagggtggaggagaaagttatttcccaatcacttagtttctgtcctttaccctcaggtatgtcaagagccccaccttcctcgggggcacctccagcctcaacagcacaggctccttgtggccaggctgcatatggccagtttggccaaggagatgtacagaatgggccaagctccactgttcagatgcaaaggtaggtacttggtcaatctaaaattggtctgatgagg

SEQ ID NO: 54380 - DNA, 1687 bp, Homo sapiens
aggcacactgtcagaggtgaccggagaactgagttgcaaaatatattaagatctggtagaggtaccagcttcctttccagctggagaggccccaacactggatggttctgtagggagcctagggagcctggtcatcaacttgcaatacctcacagagccagttcacatcccactctgagctcccacgagaaacactgcttctccaggcccggggttgttggggagagaggcagaggcagctggagcgccgttctctcctgctgggacaccgcttgggctttggtattgactgagtggctgacagttatcttccaaccccaactggcttgggggcaggacaagggctaggcttgatggtggccaggcttgcctgctccccacctgggatgcccctgctctggacctctcatttctcttcattggtttatttttcaatgcatctttaatttgtaaagaaataaaataaattaagatgtaaccattagcctcatctttactcccgaaagctcactttgcttttagtcctggccgtcggctgagcgagctgcgcatgcgccacgtgcccccgtggcgtagggcctcgtccggtcacgactatccgctgggcggggtcggtgctggccgagggggcgccggctgccggagtggacatggcggccggccccattagggtggtgttggtccttctaggggtgctcagtgtctgtgcagccagcggccatgggtccgtagcggagagggaggccggcggggaggcggagtgggcggaaccgtgggatggcgcggttttccggccgccctcggcgctgggcgcagtgggggtgacgcgcagctctgggacgccgcggccagggagggaggaggcgggggacttgccggtactgctgtggtggagcccagggctattcccccacttcccgggagactcggagcgcatcgagtgtgcgcgcggcgcgtgcgtggcgtcccggaaccgccgagcgctgagggactcgcggacgcgcgcgctgctcttctacggcacagacttccgcgcgtcggccgccccgctgccgcgcctggcgcaccagagctgggcgctcctccacgaggagtcgcccctcaacaacttcttgctgagccacggcccgggcatccgcctcttcaatcttacctccaccttcagtcgccactcggattacccgctgtcgctgcagtggctgcccgggaccgcctatctgcgccgcccggtgcctccgcccatggaacgcgcggagtggcgccgccgcggctacgcgccgctgctctatctgcagtcacactgcgacgtgccagcggaccgggaccgctacgtgcgcgagctcatgcgccacatcccggtgagtgagggcgggccggagggaaggaaaaggagagggcgggttgaggccaggactccaggtgtccaggactccaggtgtccaggactccaggtgtccaggcctccagggccgcaccctcatgacagccttactgtacccggtctaggtagactcctacgggaaatgcctgcagaatcgggagctgcctaccgcgcggctacaggacacagccacggccaccaccgaggatccagagctcttggctttcttgtcccgctataagttccacttggccctggaaaatgccatctgtaacgactacatgacagaaaaactgtggcgtccca

SEQ ID NO: 54381 - DNA, 1569 bp, Homo sapiens
tgagttcaggagtttaaagctgcagtgagctatgaacgtgccacttgcactccagtctgggcaaccaagagagaccctatctcaaaaaaaattctgattaagcatcacaactgaaggtccaagtctgtaagactggcgagaggactgaaaaagacgatgaatgccaagtgtttaagcttcatcctaccaactgagattgttataaatgagcaaacggtatctaactagtagcagtagtagcagttgttgttgttataaaatgaaacaagtctaatttttctttgcggctttgtagtggtcctataggcagtgaaaaacgacagttctttcaggtttattaaagtaaaacacgaatctttcccaacccaacatcttaaagtctcaaattttgattcgccacccccccccccaaccccgccctatgccaatcgcccctagaccaagccggctaccaccagaacagtgtccacttaccagggccctttcctgcatgtccccggccccgtactgcccccagacttcggggcccggagcccatcaaggagaagcctcagtcggcgtacgaacccagagtctcctcctaatctgctgacaagtatgaacccgccgctgttcgaacccagcgtcgccgcagccccggccaagtaaaagaaagaggtggctgccagcaagccaacgagccttccccgagctccgcgccgattcgtccagcccgtaggggtcacgcgaggtcacgcacggaaccgcaaagcctgccgggagcttggtgcgctatggcgacacccagcctgcggggtcgtctggcgcggtttgggaacccgcggaagcctgtgctgaagcccaataaacctctcattctagctaaccgcgtcggggagcggcgccgggagaagggcggtgagcagtcggagtcaggacggccccggagcggaagccggagcatgagcaggggcgggtgggtaggagggcaggaaggtgggtcttcttgtgactgaaggtcccccggatctgcccctccagaggcgacttgcatcacggagatgtcggtgatgatggcttgctggaagcagaatgaattccgcgacgatgcgtgcagaaaagagatccagggcttcctcgattgtgccgcgagggctcaggtgaccgatggctcctggggtgctttctcaggaaaagaatgggggagatagaagtaatgattctccctgccttttgctaggaaaggccctttcattcatttgggaggtatattattcacgccaaagtgggaaaggttacagttttgaaggctgtgtgatcttgacggatttattcattgctctgaactttcgagttactgtacgtaaaatgaggctaaccaataccaccttaaagaatgttgtgagtgtcagatgaagtaatgaatgggaaaatcattttgaaaaatgtaaattgctgctcaagtagacattattgtgtgaaatagaactaaagagactaaaactaaataatgacaatagtttggtttcctgtctaggcttaattgttagctgagatagtagcttctgaacatagtctcatttgtaggtc

SEQ ID NO: 54382 - DNA, 1946 bp, Homo sapiens
cgtatggacaaacagtacaaccatttcctgaaatcaaatgcattcttttctgatgtttccccagttagaccctataaaaaggtcggctggattgcagacttctggactacgattcccagaaggtggtgcggccctggggcctatccagagttaagacaataactccatccaatagttgctgtcctctcctgacagcctacaattcccaacatgcatggcggctgtttatgccttggggacattatggactccgagttgttgctgggatctgtagttgcttcgtataacgttgggagttggcttcctcttatgatgtctgagggtgggctcgagggaaaaaaagcaaatgcagccattaaataaaaatgtcccctacatccgcccgtacccgatccggatcccgagcgcgcgagggcggaagtggtggtggcccgcgcggccggaagtccagatcagctgatgggggaggcggctccgcagccgcctagaggccccagccgccgagcgcttcgtcccggccctaagtctcggagactggccaagatcaccgcttgcaccgcgctgttgggcgaggcccggtcccgtctctttcccaggcctgagattctcgcccggcacggccgccctgagcgccccggccacccccagccccggctcgcccctcaggccccgggcctcccctcaacccccggccggcggcccaggccccggatccgcggggggggacccggccccggggggtgcgggccccatggagctgatgtttgcagagtgggaggacggagagcgcttctcattcgaggattcggaccgttttgaggaggattcactctgttccttcatctccgaggccgagagcctctgccagaactggcggggatggcgcaaacagtcagcggggcccaattcccccactggcggcggtggcggaggtggcagtggcggtaccagaatgcgaggtgagagtgagctggggggaagaggagcggcaggccctgcttgggcctcgctcgggagctgtccgggaccaggagctgtccccgaccaagagctctcttcaaccaggggaagaaaggggagctgtccccggccgggagctgtccccgactgggagctgtcccaagcttagaacagacttcagaactcgcttttccggccttcctggggtgggctggcttctccacacctgtgtgtgtgtgggtgtgtgtgtgtgtgtgtgcgcgcgcgcgcgtgcgcgcgctgtgacagggagatcctgtggacagaaagtaaatctttcgtcactcctttgccttagagaggggataagggagaagaatcttgtctttgacttgggaatacttaagtgagttcagtctgaggcataccggaaagtagaggaagagaatgtgggtagggggctgattgtgaagaagtgaccacttgtggcttgtcaccgcattgcaaagtgcattgggagcttcttgcttcggggtgatgatctctgatcccagaagcaccaagaagggatcctacccagaggaaaatagaggtgaactggcctgccagagagtccatagttcataggtttagatcatagactttgcttctggccatgtcaaatatctgtcagaagccaaggctgggacttgcctgctgtgccttcctcatggcacagtttttgtcctggtcctcagtggaagctggcttttttcagcagttgagatgtttaatttgtgtgattctactcaggcctttccaagagtcctgttttccaaactggcttgtggagatttctggtgctcctttgggacagagagaaatttacatatatcactttttttttttttttttgagacggagttttgctcttgttgcccaggctggagtgcaatggcacgatctcggctcaccgcaacctccgcctccccagttcaagcgattctcctgcctcagcctcctgagta

SEQ ID NO: 54383 - DNA, 1372 bp, Homo sapiens
taatcttcacaccagccctaagaggtagggaaaaggtacatgctccattatccccatttcacatatgagtaactcagagaagcttagaaccttgcccaggatcacacagctcagttggtgggagggctgggattcgacgtcaggcctgtcaagctccagagccgcgttcttagccgctgcattttagcttcatacctggaagaagcagcaaggtttagggaaggggcgccgggagcgccgcaggccgggccagtgaacactgagggccagcagggctgggcggggtgggtgtgtgcgggagatctctgaggacggcgaagccagacgggggccggggccgggcccgggcttggggaggccgggacggccggagcagcggcgcggaggctgcgggcgccgagggggcccggggctggcgggtggaggggccccgccgagaggagacgggggcacaggtggatgcgaagagcgcaccggatgtgggacaccaaaggggaaggggccacaggcgcgcggcggcgactccggggtgacatcgagacagcctctgggctgggagagccctgcgggaagaagggagcccgcccggtccggaggggagcgaggcggttctgagggaggccggcggaaaggacccggggcgcggcgcacgctgggccgcccgggacgaccctgcgggtggtgatggtggcaacatccaagggagtctgttgggggggcctgagcgcgaccgtgggcgggggggtctcctcaggggcggctcacccggaggactgggcggcgtccccgctgtccccgggctccgccgcgtcccggggctgcccggcttccctgctttcggggccacgggccgcgtcgcggctgctccgccatctccgagcgaacgctctgccgcagcctggcccaaccaccgctcccaccgggggaggcggcgcgccgccgctggtggcacccgctcggatccaccggctccggccctagcagccgcgcgacctgggttccgggaaatcaagcggccctccgcagtgccgggccgagccgcggcctccgagacggcgggctccgcgccccgcccgcggaagcgcaccccctcctctccgcgcgatggcactgccggccgagcgtcggggaccacgacttcggagcaggggcgggctcaggcctgggctcatccactcagccccgcggagggggagccgggccggcccactcgggggaggggaggagtaagaggcggagcggcctaaccggaggcgggaccaggggcggggcgaggccctcagccggctcccagggcactcaccctccctccccgccccgcgtcgcctgcgcagcaccgagcgctgtttggaggctgtttatgagaagtttt

SEQ ID NO: 54384 - DNA, 754 bp, Homo sapiens
agtgcagcacgaaggtcaaataagggaaaagtgggcaactgggatgagaaggtgagcaggagacagagacaaaggggtaaaggggcaggcaggagtatatcagcagcacgaacccactcacgattctcaaagtaaaacttatggaaatccatcccctccacgaggttaccaagggcctcaggctcaaaggaagtgaggcctggatcacaaatcttcctacagggagaaaaaaaaaagcagcctatcaggcttctatggagtgacttgtcttccttccttatcagcggtgtctatccagtagcagcaggctacctgtggccatgccagacaagacagcaaagatcttccaggcctgcctgctgagccactcagccctgtgctttcggcccactgccaggataccatgggtgagctcagggaatctacctggaagggctcccagtttaggagagggcttaactcagatactttgcccaaggtccaacctccctttccccagggtcctaattgttgtctggaagcagggaaggccttgggagatgacttaggtcacaaaaaaaaatgggtctctacttacgtgtaggcctcaaagtccccattgttgatggcttcaatcagctgttctgtaatcttaatgatctcctgttttcgcactgtgggggagaaaaatccatcaatttacctactggggaacctcccaagttacagagagccctccccagtcctcaggagtcccctgtgatcgcttatgaca

SEQ ID NO: 54385 - DNA, 1062 bp, Homo sapiens
ctcccctcatcccaggccatgtttttccacccacacttctcatatttctttgggccccagactcaggggcccctgcctggtctcaacagcacctccagtctaccccccacccccagcagaggccatgctcccagagcttactaccacgggcaggtgggtgggactgacagctgtggtgggggtccctgaggggcttcaggacgagccagggagacggaagccagaatgtgcctccctcacacttactggctgaggagcagagagaaggctggggctgcatgcctgcagagggggctgttctgtcccgggagctccgtccttcaggcaccgagctgccattcccagtgcggagcggggcagctagccagccagggcagggcagggcagggcaaggcagagcagccaaaacaaacagaacaaggcaggtgagcgagcaagccagacaggccccgagcccatggcgctgcagagccggggcaaggggacgcctcgcctcaggctgctgtggacactggacgacatcccacgccgccgcctctgccagagaggcctcccagctgagggcaccaggcaggtgcccagacctgggctgtggcttccagacgagccttacaacagcctgtccaaggacccctgatcccggggaagatgttccagggggccaggccacagggtccagagcccagcagtgacagcgcctcctatgttgccagcagtgccggaatcaaaactgatctgacctcactcacaggggcctggagctactatgattcacttcctcgcagctttctgctattttttttggttccaaaaggtttggtgcccccttgccacccagggcatgctctcccagctctgtcctagagtgttcctctgtcttttctgatgtcctggcccaaggtcacttactgaattcaggcaaagggagcaattccaggaggcccaatcaaagagcaggacagagattcccgggggtccagcctgccatgccctcccaccgccctggcactctagccaggcccaagcttaggctagtggtccttacgggcccaccaggacatg

SEQ ID NO: 54386 - DNA, 946 bp, Homo sapiens
gtagccgagagaggcagcattctcagtctgtgtgtcacagtgtgctgaggtgaaaggtgcccaagaaataaaccctgagaaagaaaacaaaggctgctgaagcaatacactctggaggccccgattcgctgttagccaaactgctagagtccaggataagccacatctcctattggaggtcaactcaaaaaacagccctagagaaacacacaggtgcccttccttcttgattgcatccatagacacctctttctgcagaagcttccggacagactctgtcctcacctgtcccagagtcagggcagaagaggccatcctggaatgcttgcaacattgtttgtctcctctgacccaaggcaaagtgagctcaaaggccagtctaggtctggccaataagaacaggaggctctacagggatgaataaaatgctttgtcctaacacccgatttcctgaaaccaggatgccagtttcctgaaatggagggggaggctgatgtggaggcccggggctgcaagacagggcccttgctattgactggctgggctaaaagagaagcagcagactgtcttcacatttcttcaactcagaggggagagaggacagagcttcgctctaggggcaacaccgaaacgcccttcaatgtcctctggaaaggctcgtagacccaaaaagtagaagctgcgtcattaaagcacaagaagcaagtgtgggactacagttgcaactccaccggaggcagccagccacgcttccctgttcccatctgcgagaggtggagccacaccacagtatgcccgtcgtgggtacccatgacacaagatcaagccccaaaccagggtcaaaggagaaggcctagggcagggcaccaccagccccgggctcactatccagccctggccttccggagctccatggctctcaggctacaccacgaagccctaggct

SEQ ID NO: 54387 - DNA, 920 bp, Homo sapiens
tgtgaatccagtgctacctgactccaaagactgtggtctacaccactgcttcccttaagaaatgtggggcagcccccatattcaggcaacaaagccctggcatccaaaagaaagaccacttacaaatgtccctaaagcagcatcgcagacaggtccgggagggtgccactggaagaagactcgggcgatgcaccagctgcgagaaaaagctggcaggcggaatccctccctgctccccgcctccaaagctcttgggtaaaaaaccaacctgaagtcttctgaggtctcctcttcaagtttctgcccacaaagccacctctgggttaaatgccaacccctgagcatcattctaatgcagaaacgactccgctttggctgactgtcctgtccctcccctcacgtgaactctcttgatggggaacttctgttccaaaggcctccctcggtttgacctttgctccaagccttggcagttacaggtgcacctcatggagcacttcaggaatggcctgacaccaaactaaccagttcagtgctaggagacaaagaaatggccatgtctcttcctgggtgggccctggctgcttccatttccagtgtcacacgtttcctcagggctgaggtgcttccctatgtcccctccccacgaagcaagatcattcagaaagcaaagtatacaacccagccggcacagtcccgaggcactgaaccaccactatagcccccttgttctcctcccttgatgactgaggactccgaagcctgccagggccggagccagggcctcaagactgtttccgcatcccattacctacactatttgatctaatctagtgactcaaccccaaaaatcccatcccaatctcagtatttctgggaacgggatcaaaggcaggtgatacttccaatatccctcccat

SEQ ID NO: 54388 - DNA, 1514 bp, Homo sapiens
gggctgcagtggccgggctcggcgccgcgggtgggggtggggggccggggctgctgcagcggccagctcagtgcggaggggagggggatgctgaggctgcggcgcggctcccgggaccactgcaggggtggggggaggggacgggggtgccgcagcactgcccagccgcggggctgggagcctggagcggcacccgcggggggcggggccgggcgccaaacagcccccccacgcccgggctccgcagcagagctagggctgcagggctggggagggtcctgagtgcgaggcgcgtgggacctgggttcagggtgcggagtgagcaaccgggcagcgttgggaggtggtcgggaggggggcgcctgaagggtgcggaggggcggggctggagggcacccgggagcggtccggggtctgcggtgtccgcggcggcgcgtggggagcagcggccccgccagttgctgcagggcgcggagggggatgcggggcagtgcgcggggggcgcggggaccgaaggcggcgggcgggaaaggcgggggtggggcggccgagggggagccgcagcggccggtgcagggccggggggcggggcgagaagccgcatagctcccgggcggcagggcaggcaggggaccgcggcgggcgggccgtacttgccaagctcctcgaagagctggtagtcgtcggtgaaacgggtgcaggtggcggtggtggccatgctggcgggcgggcggacgcggcggtgcagcccgcgccgacgtcggtgcacagtcaccgccgcccggccgagggagcaagaggaggagacggggctgagcccggcagcaccgcgagactttaccggggagagcgagggagggagggacacccccgcgccgcccgccccgccccgcccccaggccccgccagtccccccccccgcccggcccccggcccgcccccggggaggggcctcccgccgccggccccgccccgccccggagccgccctcgctgggccaggcgcgcggggcagccgaggggagggggtccccgctccgggccacctgtctgggcagacggagctggaaggttcgcgacttatgggcttgtcccggggcggaccccgcgcgggctcgggaacgtgcatgcgagggtgcatgtgttaggagtgtaggagtctggaccactgacctctctggacgggtcctacacgcgggtcccgagcccccaaccgggctcctagcacgtggggagagagccaaggtcaaggagcctgtgccaggctgcacgcccgggaggcgcccccagcctgcgcagagccagctgccagccgccttccctctgggagctgacagtctagacttgcgcaagcaccagggccattattagaaagaaacccttcaggcgcgggttgatcagggagaccaggccaggggcaaggatacaggtaggactctgccttcctgcaccataactgcagagatgaaagagtattctctatccggccagaaatgaaaggggtgaagtaggaag

SEQ ID NO: 54389 - DNA, 784 bp, Homo sapiens
ctggacaagggtctcagaggccccagtgctccacattcctgagaagcagcttctgagtcagagccccagaaacagctgaggcggcttcaggctggagtcttggctctgttttcctccattctgtccaaaagcaactccctccgtagctatttggatgtgaccagaaacccaagcagggccctggggtgggagcctggctcagccaaagtctataaaatggatttgttccctgcattccctccagggctgcagccgtcaggtaaaggtgggtgcccagtgacacctgtgccagaaagcccaaggggcaggggagactcaccctgtgcctacaagttacagcccccaatgcagctattattgggttgcctccgggaagggggtcgtaattaggatttggcttaagttaagacagcagcattccctgggcaatctgccagcacctcctcactgcctgggcgtggggcccaggacatgccagggcaatgccagagagctgactcagggggcggcattaggggaacagaaaaacccttcccacccgccagccaagagaggagatgaagctgcctgggggcccgctgtgatggccctgcatgcccagaccactagcaggctgtgtatggggtcacttctcaggccacagagccatgaagccccatatttcctggggccatcagcagaaggccagggctccccattcattctctgagttcctttcttcctgcaaagacctctagctatgcaggtctaggttccccaaacccctttctacattgatgcaggc

SEQ ID NO: 54390 - DNA, 2461 bp, Homo sapiens
tgaagggaaaagttgaggaggggacgtgggagaccccttggtctcatcaaactctagcgccgcttgaggtgaggagaccccgccccgctgaggtgattctgcagaggggcggagccccccagatccgaggcgggaggcggcccgggggcgggaccagccggctccagcggcccgctccgctcccaccatgcccttataaggagcgcccggcgttagggctcgggaatccggtagcaatcccggcggctcagccccaatcccaggcccctcccttaggaatgggggaggggcggggtttggcggcgcggtggctggggcggagcatctcgaaaagggaccagtaggagtggcggcccaggtctgagctgcgctgccattgggcgcggcgacgagagggggcggggagcccgtgaggctggttacgccgagggaagccccgactccgtagtcgctgcacagtctgtctcttcgccggttcccggccccgtggatcctacttctctgtcgcccgcggttcgccgccccgctcgccgccgcgatgccagtgtttcatacgcgcacgatcgagagcatcctggagccggtggcacagcagatctcccacctggtgataatgcacgaggagggcgaggtggacggcaaagccattcctgacctcaccgcgcccgtggccgccgtgcaggcggccgtcagcaacctcgtccgggtgagcgcgcagggcctggcgcgggagcgggcgcgggaggtatccccggggccccggcccgcgtcgcggctgcctgtggccggctcgctggccgtggctttccgcgtgggttccggagccaggcgccgagggttcgaatggcctcttctccgccctgtgaccttgagcgagtcctgagcctctccgggcctcagtgtcctcatctataaaatgggagcagtcatgaaaaaggctgccttgcgggcttgtcgtgaagatatggcgaggtattattcgtggagtgcctcgcgcggcgtgtggcccacagcagacacccaataaatgagagttgctgggatgtccgagggtccctgccccgcgcaggcttcgcccccacgttgacttcctcgctctcagcgccttttaggcctcctcgatctggctgtgcgggggagggagagcgggccttcccacggatcccttgccttctcttctagggatccttatttgagccacgttgtcctcctttctaatacttctgcccctcaccctgagacccgcctcgcccacccccgctccccagagctccctgtattccgcccttttattcacttgcctcactctctgtcgcctcctcctccctcctgggcattttacttatgctcactcctctggcactctcacacctttatgcagtcattcgtgaccacaagcccggtttttccttccgctcagccctgctgcccttcctttcattccctcctgtggacattttcacctggcgttacctgctgtcaaacggcctcctcccactggggcctttctagactcgggggccctccttggcccctcctcctggcaggaagcaagatggagctgttgggagaggcctgtggaatctgggatctgccgcccctgccggagagaaggctggggcatccgctccccatccacaactttcctggtggctctgcagacccctgtaacccacagctgtgactcataaccgaggtgattcctggaggaggtggagcccacgtctgaaatgggaaaaaagaggtgctgagaccagtctcccaagactcccctggctaatgtcacacttttctttcccaccctgggtgggtgactcagactggtcctgcttgtgaggaacaattttggaaaaagttcatactgctcccccactgagctgtgtaaatagtgtgtgtcagggcagttgggcggcaactgtgggtctgtctgggtggggcttgggttacttttctgatttgagcactttagtgcacttagaggctctttagcagctgaaagtcttcctcagtcttcaggggtccctggactgtctcaagcaatttaggagactggtagctaggaagacagggtgacaccaccgaccaaattcctgatctttcttctctatagctttagtaagaatctattcattcagtaagaatgctgtattcattcacaatgtctacttgtacattgttcttctttttataactaatttgaacagaacactccagagtacattcttatgtagtgttgtctaacatggctgcattccaggcctccatttttcaacaaataggaaacaatgtaaagagacaaggtaatagtgtctctccatgtagtacttcaggaaatgaaatcttaaaaccacatgttgcacttggaacagagctagtgtagtctaggggttgatatctggttaggctatttagagaaaagttatttatgggcttccatgccatgaattaataagcattgaat

SEQ ID NO: 54391 - DNA, 497 bp, Homo sapiens
atgtgtattattttattttattttatagaatggggttttaccatgttgctcaggctggtcttgaactcctgggctcatgtgatctacctgccttggcctcccaaagtgctaggattacaggtgtaagccaccgtgcccagctggaatgtaagcttctgacggacttgggctaggactgtgaacttagcctctgatgccaaggagcaaacatggaatgaaagcaggccaaaggcccttttgcataatatggcagtaaggcaggaagggaagttcattccactttagagaggcagtgtttgaagcatgaggaagtttgccagccagagaaaatgggaataccttctgtgcagagtgaatacaaagatacaagggtgtgaatgtgcagttagggaatggggaagctttagtaatgagactgttaaggtggattgtgtcccttgtgaagggactcagacgacataaatcagttaaaaaaaacaaaactaacttcagttttt

SEQ ID NO: 54392 - DNA, 838 bp, Homo sapiens
tgctaaatgaaaaataattttttttttgaaggagaaaactgaaatcacaaacgaatattgcaatggcagagaaggaaaaagggactaatgtttatttagcccttgttatctaccaggccctattctaggtgatttacatatgtattacatcatttatctctgagagagatgttactttttccattttactgataaggagactgaggctcaaagagattaagtaacttgccagaggacacagatctggtaacagcacagtgaggtgagattcagattgctgcattccaaagccccagttctttttccactattccattaccttccaagatgaggagtaggacctcattttcctaacatgaaaatgggttgcatttcaaaaattcgtttacaagttggttgtttggagttacttttccatggagacaatgttacatggttacatgcccaggcttatctgcaaaagctataatgtaactgaaattctgcacatttgtgaactgaaactattaaggaaaaaaatgcatttgcagttctagctataagcagaaaagaaaaaataaggatgcattttaaattctgtggaatgagaaaagcacgttcggttagagggcagtgagggagaagatggggactgtttttattctggtggggctctgggatactttcatggtattcacacatatttccttttaaaaaataattacatatgcaagagataggacaggtggtagcgttgacctaatttctgttggcaatatttagctttccgttttaaatatatttacccatttttttttttttgtaatgacatgtgggagcccagctagtcaccctcata

SEQ ID NO: 54393 - DNA, 1400 bp, Homo sapiens
aggttttaaaggatttaaagattgtgacttatacacatctttaaaataaactacttaccaagacttgaggaacatatagcttgggcagctgtaacgtttgttcctctcccattctttcccaacatgctgcttccccttcagttatcaattgacttggacagagtcctgttttatttgaagtcaaaactggctgcataccctcctaatctcaataatctgaaataagagaatttagtgagcctgtgggttttgtgtgtgtgtgtgctcatgatgggtgtgtgtgtgtgtttaggctttgttatctagtatacatcctctagcaaagggtttggtgtttcccttgaaatgttttgaatgttttcaatatgactcattgtgggttattttttaaaattcagttttccccttagctttattgagatataattgacaaatggaaattgtatatatttaagctgcatccttgtggttttatttttagttttgggtgtactcatgcagtgtcctgtactatcactgtttggccttgataagaacaagaagtccactttgcattatgttgtactttaagagagttgggacagggaaaggaatactttgtggatgaggtctgtaggatctttaaatgtaggagtacagggttggaacagcatgtattaatattatcacacagtgtacacccgtgtgagttggtgctgcatacttgctacttgaattagattaaagcttgtcattgtactctgtgttcctgactccctcctaaaaactgtaactatgcttgtggccttcagtcaggtgtctaggtgactaatggctgaggatccttgacctttctcaaaatggcaactccaggagcaaagcatatcagctattactgatatgccacagaatgcgtccatctctactgttttaaagtacaatctgtgccaaatgcttcatattaacatagaaaagaaatttcttcacctatctcctgagtcttttgaaatcttcacatatattattttctaaattattattatttaaaattttcttaaagatggagtcttgctctgtctcccaggctggatagagtacagtggcatgatcttagctcactgtaacctcagacttctgggatcaaacaattctcccctcagcctcctgaatagctggggctacaggtacatgccatcatgcatggctaattttttaaaatttttcgtagagatagggtctcgctacgtagtctaggctgttctcaaactcctgggctcaagcaatcctcccacctcagcctcccaaagcgctgggattataggtgtgagtcaccatccctggctctatttttattatttaaaaaaaaattatatgtatatataaattccagtgaattgatagaggcagtacttcctatttga

SEQ ID NO: 54394 - DNA, 2833 bp, Homo sapiens
actttctaattataaaatccaacgacctattctgatttcagcttcctcctctgaccattgcagcattttatgtcattgataactttctcctaaacaaaaatacttcttacccttttatatgaaacttcatctgttttgggtctcaccttgaaagtctttcgggcttaattctcataattttttttaaagtctttctacaatctccatgtaaaccactgtttcaaattcgataaaactcaaactccataaaatacctcctcctgtcactggcaccatcttcttaatcacacataaggctgtaagtttcaggttcaaacaaatctaccaaatacaaacagccacatcgcccgtcactcttccacactcactgccacctgctcagcttagaaccccgttacctctctcctgaagaactgcaacacccttctcactgcattcctcaccccaggctcttccaggcaccacccgctaacaggacgtctgctcaggtccgtttggggttttgtcctccaaagcagaaacctgggactgagattcctgccgtctgtactccagctcactatagagggggaacccagtaagcttgacctccggggctcaggcgcctgagaacactgggctgcaggtggaccgctcccttctggccttgctggcgagaaagcccggaaggccgggagtgggggggaagcgaggcccgggccaacagcaccaaagacgctcctagagcccagatcggagtcgggggccccagctattcagcctactcccgggttttggagctgtccccagtccacagatttcccgcccctcacactcaccccaacacctgtgccagtcagtgattcggcgccggatcctctcctaccgaagctggagaagccgagaaggccgcgaggacccgcagctggagtgcccaggaaattgcctgattaacagcttcaaagacaccgactctgtctaccgtattagaaattttaaatatgcaggaagaccgtaaatgagaggaaagacgtctcttgaggcttagtatctaaatcttctacataatccagggcctagaaaaatggtgggtttctctccatctagattcaggcggtcatctgctgcctaacgcagtctggggtccctcatggtaggggaggcggggtcaggaatgggcggggcattcgctgttggtgccgacggatagagccaatgattgtggatgacagcggcacagaatgggcggagtctggaggggcgggatttggagaagagaaagcggtgatgcgaagagggggcgggaccagagagtggatggcagaggtgggctgtagagccaaagtggggtgggagcgcgaagatggcagctgctgaggaggagccgaagcccaaaaagctgaaggtggaggcgccgcaagcgctgaggtgagcgctgccggacttggggaggagggtgacggcgctgcaagcaagccagggcccacgtggggttgcacggccccgacgctgggtggtgtctctcactgccagcttggggccaacacgcaggacctcccccagctgcccgcttggccgcgaccccttgccagacgttctctccgtttggctgagtccccgcctgtctggtgcagctccggctccagcagcccttcgccagtcgtggcccgcagggggaccgagctggctgaccgcgccacctgcgagcaagcccaggctgggctggtgcgaccccggagggtcggaccggagcagcgtctgtaggcggccgccttctcttcccgggggatggcgggaaagaggctcggcaactgctgtacactggggcaaagtcagaattcttggggatttttcagagtgttgcggaagggcacgttgaccttccttttcgtgcacattctgaaagcccgtacctttgaggaccctctaccagggacccagacccctccgatgctttgcaggggcagcatttggatgaatggataggaaaggttgatttctcttttttatttacactttttggcagcaacggggacagtgctgcccctaacacctgcctcacatgtgattgatgttgcaacttttacttatgaagagtcatttgttaaaatatcccttcctaataagtataaagtgaagcaggcagtctttgatgatttggaaatgttcgctgaaaggcagcgatttttttttccatcttaaaatagacatatcaaactgatttaaaactattaggacactcctgattaaacaggacatatcccatttcttccagtatcactcttcttcacctccaaaggaaggaatcactcacaattgaaaagaaaaggacacttaggggcctggtggtgtgttcatgctgctttgaatggagggtgaacaaatccttgccagttcctttaatgtattcctactaccctcaaagggttagtgtgcctaccttataccaagaacataaactttaaaataaaaaccctcaggatattctatttttattttaaatattccaactatatgcagaataaaaagcaacggcttttgaatcagacctacctgagttcaaggcatgtgctttccctactctgccctttattagagtatttccttataaggcacctccttcgccaaactggaagacagatgcaacttttccctaccatcctactgaacatataacccttagatttccttagatttttccttaataaaaattattatatataatgctgatccattttcactgtgttttcctatttattatcttgttggacagttctgtgatcaaaggaaggcaagaattatgcctattttacaattgaagatattgaagcccaaataaaacaattagtacagg

SEQ ID NO: 54395 - DNA, 2520 bp, Homo sapiens
caccatcctagatggtcagtaagttaatgccacaggatattgtagtctattaataacattgtagaacagggcccagtcgttcacacctatattcccagtgctttgggaggccaaggtgggagggttgcttgaggctaggagttcaagaccagcctgggcaacatagtgagaccctgtctctacaaaaataaaaaaatgaaaattaaaaaaattattgcacagagaataaaggaataaaagcaatttggatcataaagcatttactgattccccccttttcatagttggagttaattttccttttattggttcacaatttcttaactcttcaactgcattaaactgtaagattagagccaggagttagggtgccatccacttttcccctctatggtcttagattcttttttttttatagcccgcatgcttctttggaaagtgaggtaattgtgtcaaataggatagccttgagtggggcccagaggttgtaaaattttatgtctgtacctgattcacctggtaacttgctaaaaataccgatgtccaggcctacctttctagattcggatacataaagtgacactttccatattaaataagctgctctaagtgtttctgaagttcaggaacgtttgggaccatcagatccagcaattgactctcaaaggctgcggactggaattagtacgtcgtgctgccgttgccaggcattttatattttcctaggctgaggcttcccaggctgttgctttttttccccccacctttgcagatggattttgcaggctgttaaatcccactcccgaagacctgccctgacagcgcctctttcctaagtgctgttacagggagctgagcttgccgaggtagacagtggccacgtgactgctaaaccggttgccagaggcgcggccatttttggggcgggcacccaatctctcgccctgtaaactgcggggtgacgggacgctgttactaggactcaagatggccaccgcgcccgctagtcatctcgctagcccgcgcgccagtgagctggcacgagacacgcggtggcccacggcgtctggggacgatctccagcccttcgcacggggcggagcgcccgccttccctccaatcagcacgccgggccggctagccaggggccgcccgcgcgcggggtgtgtgaggacgcgctcccagtcgctgagtgcctgagccgggaagcagttgctgtggtacctgctgctgcccgagcggacgtagagcatcggacgcgggcgccgtggcgctgggcaggagggcgaagccatgacgtcagtcaggtaacgagcgggcggctgccttgactgctccgagctgggcgttagcctcccgagcgcgtgagcactgtcgctccttctcgcgggtggtctggagcctgcctccgcctctggtccccctcgtgttgggggttccctccgcacttttcatttgggcatttctgctttcctcagaagttttcgggtctgtggcacattgcggagttctgtgtgtcgctgcttggtcgaggtgaccctcgcccaaattccagggttgcaagcgttcttgggtgtgtagtggatttcccatgaaaaatgtgccccacccgcgcccccgggggcggcccagggccggagggagcgtggcgtgcacagtgtgtgtcatgcctgcgtgtcatgccctctgacagaacttcattgttggccgggagcagacctgcaaagttggcccttctctgatgcaggtatattgccctcaagttgtgaaattgtgtgtctctaaaatgtttgctcatgactggaattaggaccctggttcccgaaggtaccatcttgtttctttactccttttatctcagagtcacaagtgaaatgagttgagagatactgggcatgtagcgaaatccatgaaactggagactttcccccaattgctcttccagtttggaaggttctttttttgttaatgaggacaggataatgggcttgtccactttctcccagtagccttgactgaatgtttaatttacgctagttcaactatttataaaaagagataaattgccttatatacccagtgttctgactggcctttttaaaagcagaacttgggctttgttgtcccagagaaagggaggccccagcacaaaaatgtgaagagaaataaaataagctcatttttggtctatgagctttccaggctccacccgtcctggtgatttgagggcttctcaatgccaatttttactacattgtgtttaagagacagcttgggaacctaaccctcagtaagatctaactgtgctgaactcggacatagtctgtctcttaaattgcataattatatatatatatatatatatatttttttttttttgagacagagtttcgctcttgttgcccaggctggagtgcaatggcgcgctctctgctcactgcaatctccgcctcccgggttcaaacgattctcctgcctcagccatccaagtagctggaattataggcgccagccaccaca

SEQ ID NO: 54396 - DNA, 1316 bp, Homo sapiens
cagttactcttcatgtctccctaacctctaacccctggcaaccactaatctaccttgtccctacaaatttgcctattctgaacatttcctaagtggaatcatataatatttggccttttgtagctggcttttttttttaactaagtatgttttcaaagttcatacatgttgtagcgtgtatcagtatttcattctttcttatgactgaaataatatttcattgtatagatatgccccaatttatccatttatcacttgagagatatatgggttattttcacttttgggctgctatgaataatggtgctataaacattcatctacaagtttttgtggtgttctatttttctatttcccctaagggtagaattgctggggcatgtggtaattttatgtttactttttgagcaactgccaaactattttccaaagcggctgaatcactttataatttgcaacagcaatgtatgaagattccagtttctccacattcttgtcaatacttgttactgttctagtcttcgctgagaggctctgtgtgcttgttggagcacactttcagcactcaaccaggctttcagttcatccatagccttgacttcctgttttgccgagcttcatgctcagtcagtggtgattgcttagggccttctcaggtctttcttgagtatgcccataggcctgggcacactgttttcatcttccagggtcttaggaatttcagaacttttcaaaactccctatggacatctcattctcctacttttccttttgtgttttttggttagcttgtttgccccagctgcttcagggagctgaaatgttaagcaattgtagctgattgtttttgacaaataaataccttgggggaaaagcctgttagcaatgggcaagctctgaatcaggttaaatattaggaagtcttgggagtggggtttttcagggaattgctagtcagctcaaataataactgtactctgaaaatgggactttgaaggaactctagccctgttctgtcacctccactggctgctaggctccaggattccacagattgtggtttgctgcttttcagggctagcctggagctgggaagaggggcatgggaataaggcatgttaaaatgccacaaagcttgctattcttactgagatgcagccatctttttttgaataaatgctccttggattgttgcaaactttttggttaatattcagagttctgaaaaaggctatttttgactttttttttttttttttgagatgcagtcttgcattgtcgcccaggctgaagtgcaatggtgtaattttggctca

SEQ ID NO: 54397 - DNA, 889 bp, Homo sapiens
atatctgaaacttaaatatgactgagcatcatgtattttatctggcaaccctaccagtggtttgagtattcgggaagacttcatggtagagataaagagagggaataaagaagatgttttacacaaaaggaatggttgagattacctccaaaacaagagtgaacatagtttatgtgaaatagtctccataaagataaagactttgtgtctcattcactgctgtatccccgatcccttaaacaatctgtacactgtagtcactcaataaatatttgttgaacgagtaaatgaatttgcactataaataaagccaggcaacttgggacaaagattacctgttgtaactaagtagataaagataaaatttccatgaaagtggaaaacctggcagaagaatttggacttcctgccttcccttatttattttataatgattcattaagtgactgttatgtgccacatgcacaggatactttggagaacaaaaacagacatggcttctaccctcatggattttatagtctgtattagaggcagacattcaatttataattcaattattcatttaatagtcaataaatttcaattcaattatagcgtacaacttataaaattgaatttttaatcattcaatttataaatatgagtactgtaagggaaaagtatataatacttacattctgaaatcacacacagtgagggggtattcttgaaagaacctgatcaagataaatgtacatggtgttgtgtcttagggatagatccaatcttttctttgaaatcttcattcattcactaattttccctcgaatttatagaacactctttggactattacacttatacatcttttaaaatctttttatatgtgcaatttagtttacttact

SEQ ID NO: 54398 - DNA, 2373 bp, Homo sapiens
atcctggggggcagcttccccctccagcccgcgtctgacatccccactcccacacaaggatgccgccgccgtgccctgtccgcagtcgctgaatgtcactgctccctcttcctcccgatcagggtagacacagctcccgaggcgtcccccaccccaaaactgccgcgatcgcccgaaggcgcaaagcctgggcgaaggacgaagtttggggcccacagcgacgggagtggggacgcgttggcgaggaccgcacctcagtcccagccctggcgggcacactccccgccccaaacggcccaggcgtccccatcctcccgcggacaccagcgtctccgccctcccccgagggcggcgagaggagccccccggggcggaggcaggtacccccggggcggagactggggcgggcggggtccgggctgcgcccccggccaggccgggcgggctggcgggcggcgcggggggagcggggctgggcggcgctgcctcgggctctgtgcgctgcagcccggagccgaggaggaggaggcggaggaggagaaggaggcggcggcggtgggtcccgggcggggggagcgcggcgctgcggacccgggcggctggcaaaggacgaggcggaggctgaggaaggcagcggggagacccaggctgcagcaacaaagggcagcgagcgattggccgggctgcaggcgaggttagccggggacccgggtggccggaggcagcggcgagcggtgcacgtgcttgcagacacgggcgagtgtggagccggggggtgcacgcccggtgggtaggggcttgctcccccgaggcatgggatggcgaggaggctgcagcgacatcgttctgcctgcacccggcctggggctggcagggtaggggtgtgttggggggggaaggatgcgagccagggggcgggcgagtagtcgcccgggacgggacgggacgggagagagggtggaggagggggcgggatggaacgctccgggcggcgcgcccgtccgcacactccaccgaaggagctggcgactgagaacctcgaattttaacttcgcgtgcccgcccgcgcgcgcccgcccgcgcccacccctaaatcctgcggccgccgccagcgatcagctctcacacaaactttagctgcgggctagggggtttggggttgagtgggggaggggagagggaaaaggcctcctgattggcgtcgtctgcagccaataaggctacgctcctctgctgcgagtagacccaatcctttcctagaggtggagggggcgggtaggtggaagtagaggtggcgcggtatctaggagagagaaaaagggctggaccaataggtgcccggaagaggcggacccagcggtctgttgattggtattggcagtggaccctcccccggggtggtgccggagggggggatgatgggtcgaggggtgtgtttatgtggaagcgagatgaccggcaggaacctgccccaatgggctgcagagtggttagtgagtgggtgacagacagacccgtaggccaacgggtggccttaagtgtctttggtctcctccaatggagcagcggcggggcgggaccgcgactcgggtttaatgagactccattgggctgtaatcagtgtcatgtcggattcatgtcaacgacaacaacagggggacacaaaatggcggcggcttagctcctacccctggcggcggcggcagcggtggcggaggcgacggcacctcctccaggcggcagccgcagtttctcaggcagcggcagcgcccccggcaggcgcggtggcggtggcgcgcagccaggtctgtcacccaccccgcgcgttcccagggggaggagactgggcgggaggggggaacagacggggggggattcaggggcttgcgacgcccctcccacaggcctctgcgcgagggtcaccgcggggccgctcggggtcaggctgcccctgagcgtgacggtagggggcgggggaaaggggaggagggacaggccccgcccctcggcagggctctagggcaagggggcggggctcgagggcggaggggggcggggcgggatcgggtgggggcggggttcggggagtcggaaggcgggggctgagagggaatttctgagtgggagtgaactggtaggagcggtggggggccggcgagggtgtgaggaagactagtgagggttgggtgggaggagaagctgaaggtgtagaagcaggtgcagagggagagttagggagggatgcaatttgagagaagtggaaggcggaccgaggggtgtgtgagggcaggtgagatgataccgaaggcgagattgcagttgtctgggcgcagagtaggtgggtttgggtgtggtggatgtggagtagagttg

SEQ ID NO: 54399 - DNA, 863 bp, Homo sapiens
gttaggaataggaatagggtcgaagttatggggtggcagatttttgcttctctgagcaagaaatttagctagagctgtgcaacagtggggtgagctgcctcaaaaagtgacaaattatcaatcactggaagtattttaaaaatgtaaagactcattgcccatctatttgggatattgggcagggatcttttattggataactagaggttggactggatgaccttcagccccaagtttctgaatctgaggggagaatgagtagagtgaatttacagcttactgatcacagggacaatcttgtttaaattgcctcctttaaggtggcattttgggttggcatttaaaactgtactgtttgaacaagtatagttcaatgacccagctgtttttcagcaacattccaggatctctgagagcaaatactatattcttcagtatgtctggctaaagtttttaaggaaagatattattttcttctcttaggtatagtctgtctaaataaataaccagagataactttaattttgtattttgttataaaaatttcaaagtatatagatgttgcatttgatgaaagtgataactatatattgaatattagataatgtgtttatttaatcctctcagtagtcctgtaagggatataccagtattgcctacaagtaaagtgatggaagcttaagttatccagggttcctccactggacattgtggtagggctggggttcagacccaggttggtctctttgcagaggcagaactagctagagcaggcagttgtggctcaggtgagaacagtgatggacttagttggattttagaattggctgggcacagtggcttacacctataatcctagcact

SEQ ID NO: 54400 - DNA, 1402 bp, Homo sapiens
gtgggaggattgcttgagcctgggaagtggaggctgcagtgaactgagatcacaccactgccctttggcctgggtgacaggccgagaccctgtctcaaaaaacctgaacacttctttgttatgtttctacaatttgacacaataattcaagtcagccaagcactttaaaaattattttgaaataattttagatttataggaaagttgtcaaaatagggtagagttaattatatataaccttatgcagtttccctgataaccacttatataaccatagcacagttataaaaaaattatcaggaaattcactggtataataccattaactaaactgtggccctttttgactttcaccggtttttcacctcctgtatttttctctgttccaggatcccatccaggatcccacattaccttcagttgttgtttctcctttatttcctgcaatctattaaagattctaatcctttctttgtctttcatgacttcagcaaacagttttagttggatgcttagtatataccagtcactgagattggtgcttgagggaagggagataaatgaatggatgagacatggcccttacctaatgaggtgagccaacacatagacaagtaatgctaaaacaatgtagtgcctttaaaaggcctttgtactatctccctagagaagagagagttgctgactcactgaataacagtgttgaggcagcattttcagaagaaatgacattgatctgggtcttaaagaatggggaaacttttccttgtggagaaatggagtggaagaggagttcatcatggacaggcaggggcatttggcatgaaagtgtgaaagactggcttgtttgcagactggcaaatcacttgataggaatggagcatagggtatgtgaagaacacagtgaggcatgaaactagaagagtagttacaaagctaccttttttcattactttttattaataaatatatcctcatatttgtagggtaagttttggcttaaattttttttaaatctcattattcatacttaatgagcatttaattgtaatcagtgtttctagttttaaactgcacaacattaagattgttactgtacttttggaaagaaaaagagaacaaataattatgcttagctgttgcaatagcatctaatagcatttaaattctgttaataaagaatatgaatttattctgtaatgcctattgggcacctattatatggcaggcactgtttgaggtgagagagatatagcagcaaagaaaagagaaaaactcctgctcttgttctaatatattctagtggtcctagttgcaatatgtttgaactaacatggtagttcagtcaacaagtcaaatgttaactgcctagcatgttatctagatgctcagcagattttta

SEQ ID NO: 54401 - DNA, 1957 bp, Homo sapiens
agtaagggaattaaggagtgatgggatggggaggcattgcttttttaaatagtttgatgaggaaagacctctctaagaaagtgacatttaacttgacttctgagggaagtgagggagcattccaggcatggagaaggagtgttctagatggagggaacagcaagtgcaaagagcccttgacatgtctgagaaacagataagaggccagtgtggctggcgtggagagagaggggagagtcgtcaagtagtaagaggtgagagcagatgggaggaaggtctcagcacaggtcaggcctctggctttgctgagagtgatggatgcctttgcagggttttgaacagaggaggcacatgatttgacttaacgttttaacaagctgtttcctgctgctgtgttgagaataagctgtaggcggcaccaaggtggcagctgggagggtattgccacaaaacaagcaagagatatgatggtttaggccagtggtaatggtggagagtgtgagaagaggacagattctggatgtattttgaagtagagcccgcagaatttgttgatgaacttgatgcagagtgttagaaaaagagaagacttcaaggttattggcctgaataactggaaggatggagttatctatcactgagataaacagaggtaacagaagtaaaggggagagatggccatggtagaaggtggattacacctttaaatttttaaaacatatttttatttaaaatagccctcactccctggcccagtgcacacaaaggacctgatttgcttttaccctgagtttgtcactgtagatatcctggaatacttcgttaaaaactataaataaagtggccataatacggctcattttgttcagattctaaaaaaaaattccttcataagcagttggcttccaaatagcaatgcatgctgtcagtttggtgactaattgggttagaggttaatagcaaggcagtcctataaacatcaacgggagtggtgtatccaaatgaaagcttgcattaggcaacaattcaaagaatgagaatgactaaataccatgttacaagccaagtgaattatattaagagttttaactttgagagaaagggacgttacccctgaaataactatcttagttggatcttccctacttaatactcatagttgggttgtaaaaatgtaaaggttaccatcaaaacagcacttcttaaccatgaaattgactaactttgtaaaattagaaattctgttacttacttcctactatgctgattggacattccttcttttgccaaaagaacagaaagttggattttgtgccttctagccaagagaaccacacacctctctctctgtagaccagctaaatgcttcctactgctcggtgatgaaatcagatcatggaatcagtcagtttgctatactgaattttttttttttcagctgtgttctaattgaacctttggggaataaactaattcttaacatctgaaagtttaaaggtctgatactagaatttatggggtggtagaggagaccttttagtctctgtatccaaaccaaaatgtaaatttacttttatttattttttattttttgagaaggagtctcgcttaggctggagtgcagtgacatgatctcggctcactgcaacctctgcctcccgggttcaagcaattctccctacctcagcctcccaattagctgggattacaggtgctcttcaccacgtctggctaatttttgtattatttagtagagacagggttttgccatgttggccaggctggtcttgaactcctgacctcacgtgatccgcccacctcagcctccaaaagtgctgggattacaggcgtgagccactgagcctggccaatttctttttttattgtgggataatcattccatacttctccctcctctctagtccccacccccacccccctttttccccccacaagt

SEQ ID NO: 54402 - DNA, 790 bp, Homo sapiens
attaaaatataaagtgacccctcagatggggaccccctcaccagggaaggggagcttgacagacggaaggattaaacctgatcaggatgatggtaagcaaaaggtcaaagctccaaccaaacctgcgtcccgtccctttctccccaaccctgaaaaaaatcaaccaatcaattcctatttgtcacataggtcttagctatttctcttgttctcacttcactttcatacagaagcagtgaaactttgacctttttctaatgctgactaaacctccaaaatgttgtttttccaactaatactctcccaccttttattatttatttccattcgtagtgacactaggacccccagatgccttcatagcattgcttatggctttgtagtcccgcatgagtagccactgccatgcttctgccatgctctcccccatgtcacctctgcagccacagcgctgttcagttgtgtgctgtcagtgcttccaacagggggtgtttcagctcttccctctgctccattgctttctcatgacaaagttcatcctgcttccgtctcagcaaagcctgatctgtgactctgtgatgtgtgcttttggatgtgagtgtgtctgtgtgtgtatccaccttagggagaaaacggatttcataatttcattgaacaaattggcccattacatttgctaccctttatcaaacaaaaaccgaaactgtgtcatttggacaaagtggtagaatttattatctcaaaagtgataatgggaatgctataactagacatcgataaaacttctaat

SEQ ID NO: 54403 - DNA, 1824 bp, Homo sapiens
ggtctcgaactcctgacctcaggtgatcccgcctcagcctcccaaagtgctgggattacagacgtgagcctccgctcccggccttagcacaaggattaaatgagatgtttatatggcgtttggcatagacactgtcaaagagtaaatgggcaataaattataacaatgatcattgggggctggctattggagaagagctggctctctccagaggaattcggattacctccttctaggccctaaccccatttactgatcccacaggccccgccccggctccgctagccccgcttcctcctgtcgctttggcctccggcatgacgcatgcgccctcgggctcctccgcggcagcatctcggttctcctctcgggcccatctggagcctcgcgtcttttccagtgtgggccccgccccctgccggtagaaccccgtccccggccggtagggccccgcctcccgaagcagttccggttcggctccgagcagctgccggcgcggcggtgacggcggccgggacgatgcctgcgcgcagtcgccaccgcccccgcctccactccggctccccgccccgggctccgcccccgccgcttgaggcgcttcactccggcgaggcggggagggccccggactccgacggcggctcggacgccgactcggaggtgggtccggggagcccgactcggaccgcggaggtgagcgggagctgaggctgaggagaggggagcttggggggcgcctgctgccaagggtgagtggggagtctgggatggagccgggggctgccgagggaccgcgacctggaggggccccggggagacggttgagggaaccgggatagtcagctctggaatggaatctgaagcaaatggaggttgtcgaactgagggcctgaaggctgagggataagtggaggccgaggaacgagagggagagagcgagagggggaggcttgaagagcccagagcttgggggcttttgaaagctgcgcagtgggggaaaaagatcgaaggtcctgcgggaatgtggacccggaagaagagatgctctgggtttggcagcggggatgaggagtcagaggagcaagacctgggccggtgttcccttcccagggcgagggagggcgatcggggctgggactggagccctctcatggggttctcctcttacggagccctcttatccgcctcccaccccgggtggggctggtggtgatggagggcaggatttaggtttgactagaaggaggagggctgttggatgggaaatcgtctggcctcaaggggtgagggaggcactgaaaaagagaagtgtggtcaagaaagaaaaggagcccttggggatctaattttgggctttggcatttttacaggtgccttttaaaacatcaaagatcactagggcaatgtacttggatcgtggggctttctcgttcgtgcacagtggatcattttaagaatcttgggtggaaggggcggtgtgaatcactgatttgcctaaaggactgggggaagtagtggagaggaagtgatgtttgaagaaggtagtggaagacgtgattctgaaaatgaagatatcatttggatttattgacagtaatggtgtcctttttttcattgtaattttttcgtagctaagtttaaataccagacatgttaagatcctaaaaatttactatattacctttaagttttaaaaacttgaaacaagactttggatactcagattttaaaaattaaacttgaaacaagaatttggacacttggattttacagatactcaacatggactggttccactttcaaagttttaagttgacacatgta

SEQ ID NO: 54404 - DNA, 1055 bp, Homo sapiens
ggctgaggcaggagaattgcttgaacccgggaggcggagcttgcagcgagccaagatcgtgccactgcactccagcctgggtgacagagtgagactccgtctcaaaaaaaaaaaaaagaaagaaaattctgacatacactacaacacagatgaaccttgaagcctaagtgaaatgagacacaaaagaacaaatattgcatgattctacttatgtgaaatatctagaatagggaaattcataacaacagaatatagattagagaataccagggactgagcatgagggggatagtgagttattgcttaataggttacagggtttttgcttggagtgatgatgaagttctgaagttggatggtggtaattgtggcacaacattgtgaatgtatttaaggaaacagaactataacacttaaaatggtaaaaatggtaaattttatgtatagttaaccacacacacagaaaagagcatgtatctgttatgcaggtattaggaaaccactactacttgccccacaactgcagctgcttcatgacccttacaaagttagtgactgaaacctggagaattatgtgcatgtggtcagcatttccataatccttgtggatagccaaaacttcagtaaaacaactcccatttcaccatctgttttccatatctcatgagcatctcatgagcatctagttggctgaacctgattcacatttgaatcctagtagcaagggaccctgaggaataatgattagcttttcagactgtgtagtaggaggaaacgactagagggagactagaaaggatactgagtgctgcttcatcatatctgccacaggcactgagtcagaggtgattcgtagatggcagtgctccttttagtcaggtcaccatttccagtagtattgagaatgtcctgcagctgataagttggagaggtagggtggggacaaagtcattatctctttttgcagttaatgggctgattgtgctatggtatttgcagttttaatgtggtagaacacatttggattatttaaattattgtaaagagatttgggt

SEQ ID NO: 54405 - DNA, 814 bp, Homo sapiens
gaattcataaatgccaccaactaagcacctgtttcaaataaagcatcagtattcagcttgcaaaataatttctttataattaagcaaacagtgccaaaagacccacgtcatttgcttctttcttcctggagaagtgggcaggaatactgcatcctagtggactctctgtgttcaatcaagtcctgagttgagttttgtttccctttcgagatgactataaaatcacctaaaggtcaaggaaaatggtcttcctatgataaggaagttttgctttagtgtagatgaccactctcctgtgtaaggtagggagggagaatgttccgttcctttcctctgctacatatcttctttcttcttctgcatgagatgaaaaaattactctgccttcagtccagcagatgcactcggctccccagaggtcagcgcaccccaagcccagaggccggctggcctcggcacgtctcactccactatcttccctcctccctgaactctgtttacacaaggctggtcttggctctgaggctgctagattttaaatgcaatctcactggtgactcactggtgcatcgtcatttggctttgcctggaattaagtggagcaatgcaaatgatttttacatttttcaattgagaaatcacaatttttttttttttgagacagggacttggtctgtcacccaggctggagtacagtggtgcaatcatggctcactgcagcctcaacttcctgggatcaagcaatcttcccacctcggcctcctgagtaactggggatacaggtgcacacaaccacacacagctaattttttta

SEQ ID NO: 54406 - DNA, 3264 bp, Homo sapiens
atggagttttgccatgttgcccaggctggcctcaaactcctgaggtcaagtgatctgcccgcctcagcatcccaaagttttggaattacaggcatgagccactgagcctggctggaaagtccctttttttttttttcttttttaattgagaccgagtctggctcttgttgcccaggctggagtgcagtggcatgatcttggctcacttggctcacgatcttggaggatcaacctccacctcctgggttcaagcaattctcctgcctcagcctcccaagtagctgggattacaggcatgcgccaccacgcccagctaatttttgtattttcagtagagatggggtttcaccatgttggtcagactgctctcgaacccctgacctcaagtgatctgcccacctcggcttcccaaagtgctggtattacaggcgtgagccaccgcacccggcgggaaagtccttttatatcaaactttatatcaactctgaatggttaaactgggatatcagttgagaggagctgcatgaagcttgtacttaacttgtgtcctgactgttgagctataactccattatctgctttaataatcacattgtatattaaagactaaatcgggcagattaaccctgaatgtgatctggaaagccgcagaatgctcctcctttctcccagtcactcctaggatttgatagacagtctagatcagtggttttcatgttttagtgtggctaaaaatggcagcccgaggttgtatacccaaaaccaggcacactgtcctttatgcatgatttaatggattttcacaggcactggcttgacttttgagcccactgaaccctagcatgccccgcacctctggccgttggccctaactccccaaaatatgagttcatctgttcatttctgctcttcctagttttatcccagtcttgtctgcacttccttctccttggtttgaacttctactgttgccctcctcaccccatcccattgtgcccctctagaagcctgtgctgttgttaacaaactaccctaagttctcagctgcaccactgaatgctctttcactctcctcacctttccccgtggatactggagcccagggaagactcccttccacaccccacgactggactggggctgggagggggccacttacttcgctcgtcacctcctataagatcacctgcttcgaggttcatgccatcagctctgccatcctttacttcctgccatcctttatggccagcttcctggtcacacctccatgtcccctgaagactttggtacctgactcatcgttgtcctcctcatctcttatcctggcaacaccctggtgacatcagtacctctgtcaataacctgtgccgaccccaccactgtttgctgggtgtgtgtggggggggtgcatagcttcaacatcttagcctcagctacagccctgatcacctcagctccactgggcttcacttcactccacgcttctacagctgctcaccaccttgaatgtgccatggcgaaatcttgcctccctgtgtctcacattctaaccataaccccagcttgcagtcctctctctctctctctctcatttcatcctaacatgtttcaatcacaggaagattctcagtccctagccccagtattgcccttcaacctaggaagaggggcccctcccctggccctcatgttttggagggccccccctgggtctcatgttttggagggcccctgccttgagtctcaggctttggagggcccccctgggtctcatgctttggaaggccccaccagaacccttctcaggttgtgcccattcctatgaggtgaggagcctgcagggcccagtgaacatgcccaccagagcccatgcccaccctctccatatctagaccaaactctgcatacaggagacctcagaattcctatttgaagccatcctgagcctgcttctggggcctgcatggactttccctcagagtccctccttcagaagatggactgaactgccagtgacatacccctaagccgttggggtggtcaagcagggtatgtatgtgatggggagagagcttggatgtgcaggctagggtgtgcccctcccagtgtgggacagaggccaggggcaggaagaggagtgtgtgtctagggctggctctccctgcatgacctcatctggcacaggcaggaggaggactgagtcctaataagggaacctccaagtttgcctggctggatttcagaatctctgtggacctgtgacttctgggtacctcctgtttccccctttttgaacaggggtgtctgtagcagttatgctgtgcctatcccaccattgtgtgttgatatctctttagttcacaggtcttcagatggagaggaactgctgtactcaaggaactacacccaaggagcctcatgtggctaccgtgaaggctgggatctcggggaggttttgggagggagtgagtatgttttccatgtgggaggaatgaaagtaaatgtgaccatggcataggctgtgaggatttaaagaatatccacaaattgacactcctttcaaaagataggctgtgggggcctggtgcagtggctcactcctgtaatcccagcactttgggaggctgaggtggttggatcacgaggtcaggagttcaagacgagcctggccaagatggtgaaaccctgtctctactaaaaatacaaaaaattagtcgggcgtggtggccgacgcctgtaatcccagctactcaagaggctgaggcggagaattgcttgaacccaggaggcagaggttgcagtgagatcgtgccactgcactccaggctgggcaacagggcgagactccaactcaaaaaaaaaaaaaaaaaaggctgtggggatttaaagaatatccacaaattttttgatactcctttcaaaagctagagcctaacttccccctcttgagtgtgatctggtcttactaactcacttctaacaaacagaataaggcagaaatgatagtgcgatttctgaggctggatcatataagacattgtggcttcagtgtctctctcggatcacttgctctgagagaagccagcggccatgtcacaaggacacccaggcggccacatggagaagctcacatggcaaggaactaaggcctcctgccaaaagccacatgagggtgccatcctgaaagcaggtccttgagtgccgttaacccttcagatgattgcagccccagctagcatctcaactgcaaccccctgaggggcc

SEQ ID NO: 54407 - DNA, 3104 bp, Homo sapiens
gtaaaggttaaagaacacgggacttcttcatgccagctaaaactgacctgtttggggatttttgttttgagacagggtcttactccagcgggcaggctggagtgcagtagtggcaccatctaagcttactacagcctcaacctcccaggctcaagcgatcctccctcctcagcctcccaattagctgggactacaggcgccagccaccacgcccggctattttttttttttttttttttttttttggtagaggcagggtattactatgcctaggctggtccggaactcctgagctcaggcgatccgcccacctcggcatccaaaagtgctggtattacaggtgtgagccaccgcgcccagcctgtttggggatctggctagcatctgtttctctcctgatttcttggaaggtcagataaagatcctagctttggcgtggtagtgtgaaacttcagcatgagtaaccccattttggtttggtctgatgggcctaatgcaggaggtcagtctaaactaacggtctcccatatacattttatctaatagctctgtcacccttcctgcacacccggggaactcgggtgcggcattctaacgcctgctcagcatgattccacattttctccaggcccataatccagaggaggttgggcccggagcaggcttgcctcgccaagctccggctccgtgcgtgtgtgaagcagtgccatgcctgagtggggaggagccgcggaagagaaagcgtaaggcggcgtggaaatgggtggggcacgctaggacccgctcacatttgttcagggagaggcagtcccaaaaagcctctcaggcacacaacccagcacagcaaggcagtcacaccaaggtgggaaaagagggcagaagagcgcgaggggctggaggtggcgcccctgtgtcccactcgttctccctgggctgggaaagagaagcggtccctcagaagcgcaggctgcgctagcttaggatggacgtgggtaacgctcagctgactccccgcaggcaccctatgcagggctttgtttcgggggggaacccgcaccagcgcgtaaggggagtaggagagatctacgtgaccctggtgcgcagccgcgccctatcgccccggccacgcgccgacgccccgccccgtccgtgacgcgttcgcgcggggcctccgccccatccccctcccaggcggtccccagcgcgctgcctccgccgttccccgccccctcgcctctgaggctgcccggatagctgcctgatccaaggcccagcagcttctgccttccggatccccaccgacggacggaggcagcccacctgcaggaccggggcgctgtcggtccacgtggccgctctggagcaggttggagttggcagcgggctgcgctgcagggacaggcgcggcggacagccccgggggcagcggcggggtcctgtctgggagaggacagggttgcggcgggcggaacggtgtctccttcacttcgccctccagctgctggagctgcagcccgaccgcgagcgtgccaagcggcttcagcagctagcggagcggtggcggcggcccccctcaggacaccaccaggtaccgccgcgcccgcctcacgccgacccaggggcctaggccgcggcggccaagccggaggcccgcgccggactcggagtcggccctggcttcctaagatggccgcgctgccccgcggcccctcgcccctctctgcccgggatctccctttggccctttgaccccagcttaccgcacttcttgtccctcccgcagattcccctcttcccgcggcctcgccatggcgacccacggacagacttgcgcgcgtcgtaagtaaagctgggatctctgcgggatggggcggcggagagtcgaagcctgtcgaccagaaacccagtttgtttccccctatctttccaagaacttggaaattcggctgcttttggtggtcgccccaccgtctgaccacctcctctgcggaggaggggctgggctgctggatttcaaatggggaacaaggcccggggagttggtctgtggccgcatggacttttcagcctttgtacatgtctttgacgtatagaagtaaaaagttgttaattggggattctgcctttggaggatcggatcaatcacttttctagaggaagtagcagtccctcttgtgagagcgcaaggtcattacttgtgctcctaagggcgtggacgtgctttgtggaatgaatgagctggtgtaatgagctcagattgcctgcccttaagcagcacagcattggccgaggacttgagagtcacattagtaagtttgaagcgctatttgatatttagttgatgtagacatttgagtgaaacacacatggcagtattttttccaagtttcaatatttaaattcccagtattaaattctcttcccactccagggtgttggttttcccctcagcgaagatattaaaggacgtatcagggtaaagggcctagtcttaggtttcggttttatctaatttagttaaatcagctcatctcagtgaattttggcagatacataaatatccatacacacaaatacttgtttgattctttgtacttgtccagtcctaggaagtgaggctgtaggtaatagactgtttttccgttttgaaacgaattccccaagtttgtataatcatggttatctgttttagaaataattcgttggtggtatctcctttatgggtcgttatagttctattgtagctcctgaccgcataaaaaacattccaacaaatgggattgcttgaattttaatatcagcagtgggtcatgctcttgttcttggatagaaggtgggagaatagagacattaacactggaatgttttttttctaccagcaatgtgtattcctccatcatatgctgaccttggcaaagctgccagagatattttcaacaaaggatttggtaagaaccttatttttaaaacgttttagataaagagtgaaaatgtatgtttgggttgcttagcgaaatcagatcaatcattgcaaattgtaaatatcttgctgctttaaatttagagttacttatttttttgagacagggtctccctctgttgcc

SEQ ID NO: 54408 - DNA, 2221 bp, Homo sapiens
aaggcgggggactgggagggaggtgcccgggcgggaggcggggtcttggagggaggtgcccagacggaaggcggggtctcggagggaggtgtctgggcgggaggcggggcctcggagggaggtgcccgggcaggaggtgaccagagctggagacagaaccaaagcggaggaaagcctgggtaccggggccggagccccggagggggtgtagcctacgtgactggactgggtggggctttggggtataagaggagtcaagggaaaagatggggacccggcccgacagggtgctttctcctcccccgcagtggatcccttactctgaggacggcgaggatgcctccgggtcgcagcagctgcaggcagcgctcgtagtaggcggagcagttctccttgtccgcatccaccacggccacgtcgaaggtgccggcctcgcccgccgccagcagctcgtcttgcggggggagggagggcaggtgcggctgagtccgcggccccggcggccctgaggcccctcccaggccggcccgggctctgtgacaaccggccctgcccttaacctgcccggcaggcccagtcacagctcggccacacagcagcctcgtttgcaatgaatggcttcaaagcccttcccgcttcggtgctcacccagggtctccaaggcgggcttcagccggaggtcgatcttgtgctccgcctcggcctgcggagggagcgggtcagccgttgcgcccccgcctggggctgcagagctaggcgcgggcgctcacctgcctccacaggggccgtcccagctccgggggctgcgcgtccacctcgcaggtcaccacgcgcccgtccgcgggcagcgccagggccagggccagggcggagtagcccgtgaaggtgcctgggaccaggacacagacgggctcagcccagagtgggggtcggcccggaaacctcggccctccgggatcccggccgcgtgcccctacccaggtccagcgccttcttggcctggatgagccgcgccaggttggccaagagctgggcctgctcgcaggtcatcatagaatccccctgcggctgctccagggtcagctgcgtgaaaggagagggtggcaccagccatgcaggtcacccaccttcgccctgggggtcccaagccccaggggcgcggttctgggcgtggcctgggggactggcccttcggaacgcccaccgcacccggcccagggaagccggaagcccagggagggccagggcccagcccaaggtcacacagccacgtgggacccgcaggggtcgagagggacgcccgtttccgtcccgcgccctgctgaccagcctcaggcttcgcagcgccgggtgctcccgcatggagcggctcagaagatactgccacaggcggctgtcctcggggggaagcaggcactgctctcgccggcctcgccatggggggcaccgcctccctgacggggagagggtgttggattaacctgagccacgccgcgccctactctgcgcccgcccacccgcccgccgggaccaggtcctgctcacccaggaagaggccagtggcgaaggcggcgcccagtgcggctgagcccagggccagcgcggcgggcacggagagccggggcaccggctgggtcatggcgcgggcaggaggcggcgggaggcagtgacaggtcacgtgagctggagctcctgggacaggtctcggactcgcgggcccgccgggctccaccttgtcggggcactacccgcggagccgcggtctcgggcatcatctggcggccacacagccttactgcaagccccgcccgagagagccgggcgcgatctggtggccgcgccgggaactgcgcccctgcggggagcaggccaagcgcctagatctgaattttcccgcctgtgcccgcagtccaggtgcctgcctccattcccctcctgccaatgcttttttctcctcgccaccatttattctgaggccccttgggggcatatgtgaattgtgtatggagggcgccagtgtaagttacaagatagtcacaagtacaagagatagagattaaagggggaaggcctcctggacaagatgccccaaagcatcaggctgaaggagtgagggaactggtttgagggcatgcagcctcgaattggggttcaggagccctggggtgggcctgtggaactgagaccatattcttagctgttaaaatcctgcttttggggg

SEQ ID NO: 54409 - DNA, 1157 bp, Homo sapiens
tgaaaagtcacaaattattaacgctgaatttcaaagactgcagtcttctcactctggggtggcatctcttcactgttcaggcacgggcagcctcacagaacggacgtggcccagacctcacttgacctctgagaggccctgaaggcagtcgcccaagggcaggggcaggggacagggcggagggggaggacactgagcggagcggggaaggaagagagaggaggggtggggaaggagaggaggggcggcggggagcccggagagaaagaagggagaccccggagaggaagagggggaggcccgggagggcgcgcggagggggtgtcagcgaggggccgcctgtcagggttctatctgcgcgatgattgatgcgggcccgggtttttctgtcagcctgtcacggcgcaggaatgtttaatgttctcattattggttacgctgttgtgtatatttctctgtcagcaccgcggacccagctgaactggcagagcacttcaaaggcctacgggtcattcatcatccccatgacgctccggcaaatgctcagcttcagccccgcgccagggatttgttatgacttgcgagccgcctgacagacagggctgcggcggccgggaggggacgcgcgggaggcgggctccgggcccttcctgtcacgccgggcccgcgactccgactcggggggcaggcggcacggcgcggggcgggcccgcctgggcgacccccgggaggggtggcaggaggaggcaggggcgcgccccctcatgggccccggggcgccctcacacctctccctgcagtcccgccctcctcctcctggcgggcggcggcctctcccaaagttgtgccgcagacccagaggttgagggggggaaaagcgaaacttgcaaccgtccagggccagggaggggcgggagctgggagcgagagcaggagagtatcggagctttgtttcctttcccaggccgtgacatgattaatcgttttcttctgatctaattttggaacatgaaaaacagcacatttgtcttgaagaaaaatgatgtgccgaactgcgcagatggaaatttcgagcaatgagaaagattaaagtgaaaccccactccttagacctaatcatgagttgtagattattctgtcggcccagccagatggta

SEQ ID NO: 54410 - DNA, 1257 bp, Homo sapiens
gggccgcggcgtccgaagacgctgcgggccaggggtcctcctcggcgccagctccgtttcctggggtctcgcgacgtccggacatcagggtcgggggtgtggagacggcggcggagccagagtccccaccaagtcagttccaggaggcggcccgcgcgcttcccgcagtgtccgggaggtcgctgggggtggctttgcgtgcaacccgggtaaaggccctgcagccgtgaggctggcgctgggaggagggtggaaaatctcaaagtcaccaatcccggtgcaaatggcggcaggggccgcgggctgtcggacgcaggcgagaggccaaaggctgacttcgcgcggccgtgagtccccagaggcaacaggggtacctgagcgccgaggggatcccgagactcggagaaaccggaagagcctgaccccagggagcggagagtttggggtgcgctctcagagctgtgactccacggtcccggaatccttggaaagggcgctctgggctcagagctcccaactagccggaggacctgggctagcgcccaggcctggagcgtctgggagggggcgctgggtctcggcccccctccccccaaaagggactgagacttttttctgcgtgcttccttcggcgcttcgggcagctctgtcctgcggcccaagctggggagaagacagcggcccgcgccacagggagctgcgcccggacccagactcccgccgcgcttctgcagagcggagccctaggtgcccacctggtagccccagaaaggccggacctgggcgccgggacgctcgcggggccgcacttggaggggctttccgggtcctggccgggcgggctctcctgcggcgcggaatggaatagagcgccggctgcagagccacccggacggggaaaagcagcggtggcgccggccagccccgggtcccgactctggagggaggaaggagcgggcgggtgggggtgggggtgagggcgagggttgcggggagcgtttagaaggccctgggcagccagaagaagaaaagaggacgcactctcccctagggaccagagggtccctgcgtactccccccaggcccgggacacaggttcccccagcgcccctccgcctcccagtctattcggcttgccccagcgcgctgccccacgtccccgaggccccggcccaggcccagccggcgagtcccggcctgctccactctgcacaaaacgaaacccaaatgcccaaaaagctcaggagggaaatttaa

SEQ ID NO: 54411 - DNA, 4542 bp, Homo sapiens
ccgccgcagtccgagcccagagccttgcctcccgggcccccatccggatgctggttcacatccacattaatcccgccgccgcagctaatccggccgtgtgccagccccgtgggtcccccttcggccgaggcgcccccggtgcccttgccaccgccgcccacgtcggtgtctttcttgtcgtccttgccctccggggcacccccggccgaggacagcatacctcccggcgagcaggccgaggcgctggagctcgggctgcctgtcctgggcgtgaatggctggcaggtggcgctcggtacccggaatcccgacttctccgacgaaacacccccgccgccgcccccgccaccgccaccgcctccaccgccgcctcccggctccttcttatccgagccgggtttggagtacggcttgaaactcgacttgtcctccacgccgatgtcgctcagcttcagggggcccgatttggtgtccttgtcgcccgcagcaccgccgccggcaccgcccgcgccgcccccgttggaggcaaccgaggagagtttggaggagggcgaggggtcgggcttcccgatctgcgaacatgtttgcgccaacagcgccagcgggctcttcttggcatcgagctgcggggtcagacgatggggggggagcgtcacacagagaaagaagtggaaaccctttagaatcctggcttctggggttcaaatgcctctccgcaacagcccacgaagatcctcccagccccaaggcgcaattctaggcggcaccccctcttcaacacccactcacaaacattctcgccgttgggaaaggcagcagattgctccccccgcccaaccaccacccccagcagcatctttcctgccctctctgagcgctaactagatttttaaagagcaaaatgttttggttttcggttcctagacccagaactgtaccccctccccacaaacactccttaattcttcagagtaagggctcgggcggctggcgcctcagaggctgtgtgcacacactggcttctgcggatacgaaggacggcgactttggaaccgtatttcagacctccgcctgccttcggtgccgagtgaaggggcctgggtcggggtaggggctttcatatcgaaaggagaaacaagtattggcagccttgctccctagcatgcacgccccattccacttcctcccccttttccgccctagttttgaggtacggaagcagtagcctcttcccccattcgggagctgaatcactccgacccccccacctccgcccagatcccgagaaaaagaaagccctagggtggcagccagggtagtggtcccagtgcgatccagagagagggtccttacctcgatggggctgaccggcgtggaaggcaggggctgcaggtactcggggtgcaaaatgtggccagttcgtgccgtcagcatcttcagcaccttgattggcaggcggttggcctggcgcagggggtcagaggggggcacggcgtgcacaaaaggcttggtgctgccggccggggacgagcctgggccggggccggagctatttccagagagcgcgctggtccaggcagggtctgcaccgccgcctccgcctccgccgccgccgccgccgctgtgcttactgcttcttagggcagaaagcgagggcgctgtgctcatgacccacccgcgcgcatgggagcagcgggggggagggctccgggaggcgcggggcgggctcggggctgcgcgctcgccccgggagcaggagcagcgggaggaggaggagctggcgcggcggccacgggcgcccagcgcgccttctcggcgcctggagccagacgcgagtaatcctgggtggcccgcagcggagccgtggccgggctagaggagccggctggactgcgggagtgccgggcggctcgcggtgtccgcctcgggctgctcccctgcgctgcgttctcgcggccccgcgccggcgctgcgctctgcgatgcgagccgctgcgtgtccagccggggctctggcgaggaaactcacttcaaaagcagctgcaccaagggggagattaaagcctttgccgccttccaatcaaatgggagcccgaggtgattggagggtcaaggggatgtgacgcgtcccgcgccgccgccgccgccgctgccaggactctcagtgccggttttaatgggcagctccctcttcgccgcccccctgtgtgtcccctccctcgatttcgctgggaggacgagatggacatttattctacgtttgccatccgccgcctccctcttttttcctcctcgtcgttcttcctttccccagctcgaaaataaactgaaaccttcttttgaaggggggtgcgcgtgaggaacagactgcggggggtgtccagaaggagcaccggtgggagtgtggacaccggccggactgtcaactccaggggcgaagggaacctgcacacccagtgttttttccttcgcagtaatcgagatcccgcgcggcgcagcgcagccaccagggtaagaaggcaaggtggggagccggagctggaagaagcccgcccgcccgctctaatttcctcagattccgcggcggagaaaccagaagctagatgggcagtcgcagcggcggcggctcaacaccgcgaggagcgctgggctctccgcccttcccggccacgtgacgcccggggacgcgtagattggggcagcagcgggggtcacatgtttcctctgtttcaccctcagtctgtcccccaaccccccattcttactctcccaccctgttttcctccctcccccccttctttgggcatctccacccctccatcaattgtcaatgttcctcgaccgcaatcaatcagttatttgtcagctcttgtcaatcctcccgtgatttatgtcagcttttgttgctgattacaaggcgggtgcgacttgaagggaaaaagagagagggagagagagacggagaggaaggaggagattgagagggaactggaggaggggaaaagaggagcggcctcctgggatgggggtggggtgggggctctaagaaaaagaatgaaagaggcgcacggtgtcaggaaaatgaatagcgagagtaaagtgcgcaggtgcgcccagggcgccgagaggggcgcgcaggcctggagtgtgcgcctgccctctcggtgtcggagagacgcccttccacctctgggagcctcggtctgttggggtcgcggagttcgggcgcggctccgggtacccgagaccagcggcggcaacttctaacacgggagatttcccgccaccccaccccgccgccgcgagtcctcgcggggcgtgttgcgtgcggaggtcaggctgccaccctctgtagttccctaaccccaaactcggagacttctaagagccacaccaccaaggaacttctagtcctggaggtcaatggtggggcaaacctcgcctcaattctttgaccccctcgggtcgtaagcagggctaagaggctgcgaagaagaggcctggccatgggtgtatgggggaagaaacatctcaggctcactcatgccccctccccgaccttctcccacctgccgccatccccgcaggctggggagccagggtaactcggggctgctctctcgaatttattggaacgccgagtcggaatgagctgcgctaggagagccgagggaaggagcgagagagggagggggcggctgcctgtgggaacgcgggttcttccagggaagcggagcgggactgccgcgttcccctcgatttgcaccgtcactcgggttgtttgggaagaaaaggggaggcgctgtgcgtgccaccgggtacctggacctggatgcccagtgtgtatgcatgcctgtggcgctgcgtgagttatcggggctctgatagcgtccggagcgggttcgagggtctcctccaggaactcgcagaaattagagggggtggggaggaggacacacccccttcctcggaacgacttagaagactttgaatctcccctcctccgcttttccgccccggctcttcttttgttgtcaagtccttttgataaatggtggggctgggagctctgggagtcgggagccagtctgtgcccgcgtggggggcgggggccgagcctggagacccggtttcgaccggcgcgcacctggggctgagccgggtgcgcgcgggggtcgggtctggaactgcccttggtatgctcgccctctcctcttggcccatctcactcccctcccccacctgactcccctccccggcttctttctctgtctcccactccgcacgggtaccgagaactttccggggtgagttttagaatttgctcctaggcattctttttctgcgtttggattttatcccttgattctttgggttggtaaactttatgaaatggtaacttgactgaagctcatttggagagaagaggggagtgaggcggtgtgtgcttggggctggtgtttgtcagtgtgagcgtgtaagagcacacctgcattcaagggggtttgtagtgtccgtgcgacatctgagggaggtgagtcgg

SEQ ID NO: 54412 - DNA, 1418 bp, Homo sapiens
ctatatttcaccagccctgacatatttatgaatcgctccctgcatgcaaatatcattacttaaagcgccggggagagcgcgggggaggggaggaggcgcggttcccggggcgtgggggtggtgaaccggggaaatatcggtggaggggggccatctccctaaagggcagagggtgaggtgcggtgaatagccgtatccggaaaccgagcgtgccccgggcttctttcccgccgccagaccccgcacagccgccctgggacgtttttcgaggcttgggacctaagacgggtccccggaccctgctgggaaaccagggggcgtttttcgtccctctctgaggccattatccaagctgaaaccaccttttataagaaaaaagtttaaagaaaaaaaatttaacaaacacaaataataataataacccaacatgtttcgcgttctttgccactgcatcgattttattgattttcattctgcaaacctgggaatgtgcgcgctcgggaggggaggctgtcaaaacccagtcatcgcggggactggatgggggacaattctccgacgccgcggcctggacccgcccccacccaaccggcgcaccacctcccaggcaccacggagcctgcgcaagctgcggggccgtaaaggaaccggcccccaatctccggggcttcagtcccgcccctctctccccccagtgccctgcagcgctcccagggtccgtgtctgccctccccaagcccccactgtcaatacaatccctgttaaaaaaaaaaaatctttttagagccaggcacgtgccgtcggcctctcccctgcccgcctggcccaggaggcgcccacacctgcgccctcacttgccgagacttttacctgtgcagtccccggcggcgcctgcagccgcgcaggtaaccgagaaatggaagggagggctggggagtgagaaggacagagagcaccgcccgacacaaccagacgcgcggacccggggcctcctctctggaccggtgctggggccctggtagaaccagctccgggagccgaaattgagccatgaagagtgggccgagggaggggcgaggggaacgggcctcaggagggaggggcgggcccggcggcacttccgttgggggtggggctgcgggctgccgcgccggtcccgcccctccgccgcgcgggcccgcccgctccaggccaggctccgcccccaccgactcggagctggatctcaggccacggcgcccccccagtcgcgcccccaaccccggaggcctcgggctgaaccgggtttcgcaggagggcacagggcggctcccttttcctcacctgggggtactctctttttaagtcataggaacagaagcatctgcagactaggatcccaggcccaaacttgcacgtgagatttgttgaaacttagg

SEQ ID NO: 54413 - DNA, 1645 bp, Homo sapiens
aatctcttgccctctgaggagcaggagaagagaagcctgaaatttggggtcaccagccaattatccttccccagggtttattattgtcaactcttagaggccacagggaaagggtggggtggtcttcaccaagccagcgttttatttatagggaaattcaacccccccaatccccctcccctcctacaaatggaaactgggccgcaccaggagtccttcaaccttctaactttccctctccccagctttgatgaggaggggcgttcagccaagaggcccctcctcgctgcagttgaggtccattatgtaacccagcttgcgaaatgcaggaaaggcccggctggctacagcccggctaacggctcagaaagggcgcccctgataggaatacccccacctcaggcgtggcccagacaaacgcgataaagctgtgggcatggagttttgggcattgggacatccgggggagggaggggcgcgggcagtcggggtcaggccgccgtcggggcgcggggcgctgcgggccacctgttgcagcgggcggccagggctcacctgcgcggagaccgggccgaggggcggcggcggcgagcggcggagctgaggtccccgaggctagcccgcgcctccggcttccgccgggtcagctgactgcccagtgcggaactgtgcgcccgccgcgctcccctgccgcgctccccgctgctgccgccgcgcccccgcgctccgtcccgcgcgcccgcagcgtcctggccgccatggccgggctcgtggtgcgtggaactcaagtaagtcccggccagccccgcctccgcccggggcgcagtccgcgtggggagggacagcggggcacagaggctccccagggcctagacacccctgtccccgcctcagggggctgcgtctgcagggggtgagcttcaggtgctcaggctcgccctagtggggctaggacagacctcgtttcgggcctggcacacccccttgatgtgcgggaagaacacccgcaaggtctcccgttctccccacttccttctgcccttagcgcctcactgagcaggcccagcggacacagtgctgacggcccccgctgcttttgggggcccacagaaaatgttccaatttcataatctgaattttaaaaacttttggtcaaagaatccattttgataaatcacattgatatagtcatctttataccaatgcagttgtaatatacaaatttacttatttgtaaatggaggaaggggtttatgaaggcaaaagtgtctagggtacccaaagtcccagcacatccctggagatgagggtgctggtgggccctgcgctgaatgggctacgccatagccaaaggctgatggaaggccaccgacctccagttctctttccacactcgatttcttgaacaggagtctgtgatgaatggcaacacgccagtttcaatcctgggtgccagacacccagtctcacatgctttgagctctgtagtgaagcctcaggtgttcattgttggagggatgaacccagccactctgggaccaggtgtctttcttacctgctggaaaagccagttctctgtctttaacctcttctctgctctgatgaagccagagccctcttacttcccacctttccctgcacaccc

SEQ ID NO: 54414 - DNA, 652 bp, Homo sapiens
gattagtcttcatcatgttaactgcaccaggaaaggggagctgttggtggagtccttggagcccccaaagctgatttgatcagggaaacagtcacaagtgtggcctttttgtgtgtgagaaacatgtgtttcaagttgcagaagcaatcattggatcagtaatttcagggttgggagcagctgggtgatttccatttgccacattgtttctgttccatttaatttccaggtgtcctacataggccaggactgcagagaaattccagagcaccttggcagggactgtggacatttcgcaaagaggcttgatctgagctttaaccttctgaggtatgtaaccttcacaagatgtaggccaggcctgggaggcccagtcctcctgggtactttagggccaagcagataaaagtcaaatgttccaactccacatgggttgtccttttattcagcagaaggctctgagatgcgtggaatcacaccccaaaggtttcactgtgtccggtgattccttggctgcctttttttgtgctgctgaagaggcaggcagcatattgagcctcatccatttcacacgagttcctatgagagagccgtcatattttcactgtgttcttttcatttctcacggatacctgtgcagacaggtcagaat

SEQ ID NO: 54415 - DNA, 951 bp, Homo sapiens
accaccaagcagcactgggcagctctaccgtcgtcgggcataacgggtttcctcgcggagccgcgtctgacgcggcagccccccaggcttcggctcagctctcctgttcctcagtctcggtaaaatggctgtcaatctattttaagcgaggaaaattgaggatggtttttcagtgctattgctggcttagttatgtcaagcgatttcttcaaagagtaataataggtgctgtcttcagaaatagtttagtcacagatgcctagttttaaagtctacttgcttccctcctgtccttttcttcagtcttatctcctatgcctggagtcgagtttcttccagagatttcctctcatggagactagcaggctgcatttcatttctggtttccttccataatcatctccaccccctcctcctctctgctgaacacccatgccaaaggttctgtcaagccggccagttgagcactttgaaacacattgtcaaaaaacggaatgatgtcatgcggaaaagagtcaacctgggggcagcgatgttaataagttagctcattccctcccccatcccaacgttggataatttattttttaaccagtttttaccaaccaaatgttaacacatatgcctgattgttaacctcctctgggcaccaaacctgttttttcttgagtgcaataagtgattatccaactcatgctgctccgaaaaagaggttttgttttaataagcagtttgcagtttggcacacaatgctgaggaaagcaacattatctccagcagtaaactctgcagtcattgcaaagcttgacaagaaaatgattgagtctgtttgttatacctttgtggggctgccactgctgctgctgatggaaatgttgctgtttattcagcaatgcaataacactttctgtaatttatggatgcacattccccagattactaaaggtaata

SEQ ID NO: 54416 - DNA, 1297 bp, Homo sapiens
gcctcctggactcagatgctcttcctaccttgggctcccaagtagctgtaactacaggtgtgcaccaccatgctcagctaatttttgtattttttgcagagatggggtttcatcatattgcccaggctggtcttgaactcctgggctcaagtgatccacccgcctcagcctcccaaagtgctaggattacaggcatgagccactgcgcctggccaaccctgttttctaatggtaagataagtaaagttcactgctggtaactccttctcttaaacccaaccaaactgaggccagtcttaacatgtgctcttgcatgggtatgtctgtgttaagtgtgcgagaaggtagaatattaactctcttaccatgtagctgaatttcttctctgttgattcagaaatggaaagaaaatgtcagaactcctgtaatgcctttaaaacaaaggtgcagtgaaggtattgaaaccagaaatgaaaataagtgggctatttttagaaccgaggttctattttctcactgactcccagtttctagttaagggcagagtccattccgggctacatgggctctattggtgcccttccagaagcctgcatttccactgcacctttctatttcaaatgttaaaggactggggacatttataggaggtgatggtctcttggcacagaagactatgtctcccagagctgccgcagtgttttttcatccctttcttctcacttcttttctgtttacctttggcttgagtaagtcgattggcatgtctctttatattgggaaaattcactgtttgccacaagcaagagagaaggcagaaagcatggatacaaacagatctgagggtatttttatgtctgtatctctatttctgggggcaagggacagtgttgccatccattaaacatttattgtattagcaacctctggccatccctgctaatggagggaaaggatgttatgataatccaaaatagcacaaagttcccagttttaacaatttgatttggcagtgcattacaataaaatcccatgaattcaacctaattaggaaggaggccagtttggattagtgaagcccaaatgatattttatggaaaattgattttgtagcttccaaatttatgcagccacttgaattagatatcaaagtctacaatagaaattcccggaacagttttaatgactagttaaaaatacttggcattttattacaaaatgttagagaaatggttacttccaaagtgatcaagacatttcagaacagtcctcttgagttttaactatcttctgaaag

SEQ ID NO: 54417 - DNA, 1974 bp, Homo sapiens
tatatggaagtcctctgtctagcaaaggattctctgattaccaatgtctaatttaaccagtctgaggtgggagcctgggaaatctgtagtttctaaagcttcccaagtcattctaatgttcatccagggttgagaaccccaatataaggcctcgagtgtgttcttatcttggtccatttcattctccagcttctgcagatctccagaactctctcagttcagactgttatgttgaagccctggagataaagggatgacctgagcagggtgtctgcctttcagatacccacagtctacagagaagggttatctgtagcaccagctcaccctctctggttctgacttggccttcattgtccagtctttgggctttttgtcctggttcttttctgttacttggtctgccatctagcacttgcctgagcttcctaatgtgtgtattccctatgtagatctaactctgggcttagtttagacccctattcccaacagcatggtgttataggaatcctaaaatggatgggttccatggcgaggactgctggggagccccacgtcaaacaaaattcaacacttgtcttgactatagggctccttagaatatactcaggggcccatgtgtgtctttaagaggagagtagggtatacagtctttcctatctgtctcttctcaggaactctatcagggaccctcctgtggatatcgaatagtccgtaaagtttactttggccagtactgttctaacctctgggaattggtccagcctccactctagaaaatgtagctgtttttatccttggtctagatcgctgactcatgtgttctgtctctgggctgactggctcctctttctcaaccagtcctgcctgtctctccctggaatccaaaactgtgtgccacttacctttcatacaatgacaaacccaagtgacagaaatctctccatttccttccttgcagagtcaggcagtggcatcatttatctattcacaatccctgtattaggtagtagagaggaaatgaattcagttctgcaagaatttatattgactaccaactgtatgccaggcaatgggcttggtgccagggatacaaagttgggtgatagtctgactttgcctggattaactcatgttctaaaagagcacacagtgatcctgagcccatattatactgtgttctatgatggaggaagaggagtcaggagggaaggggtttaggagtctctaggagctcctgctaagggcactaacccagctggagggcatcagggaagtctacatgaaaaggtgattcctaagctggagtttggaggaagagttggaaaagatgggagaaggaagtttgttcagggtgaaggaatacaatgattaaaggcaaaaatgcctgaaacactgtggcaggatgaaaaagattgaaggcatggtatctgattgtgaagaaacaggatgtacacattgaaatctacctgaatatctggaaaaagtaattcaaccataaatgcttagagtgtccactgcatatagaatttttgaggagagatgtgataaaggaaccactagaagagaaagtaaggaaatggagaagccagacagacccagcacctgttggggatttagatactattttcaatctccagatgtggaaattgagactcagaagaggttcagtgactttccctggcccatccaactactacttactggagctgggatttgaactttggtctggatttattaaagaagcctccatagaagaaataatttttgcactggagtttgacagaggggaggagcctgcagatttttatctggcacctgatgaaatagtttcttcacatgccacatcatcgtcccttagctttctgttgtcagcggtagaattctggccttttagaatttgaagtgacttttcagatctctttacagatgaggaaactgaagcctagagcagacaggcgatttcccccactg

SEQ ID NO: 54418 - DNA, 885 bp, Homo sapiens
tgcatgaagggaaaggtatattaaccttttgttgatttgaagtcattttaccttatgctcaggagcccaattaacattattgatttgagtcatactcatcaagatcaacttattttgtgttaatttccttcaatgcagagagagctgaaaccaagaagagaggagttaagacagaatgattgatttggctatgaggagcatgttttgtaccataatctcattttaatgcttcagtagttaagttgtgccaaattgcttttgaggaggaagtcattttctggttgagattctgcttagtccttatattggtcagctatttccacaataatgctacataagaaactacctcatttattctcttgctgaggcatttgcaggttgacggtggtttggctcatctaggccgggtggctctgctccagggtgcaggacagccagccttgatgccaggctgtgtgttggcttcaggtgtccaccatgtgtgtttgttctggggcacaggctgacccttcagggacagaggtcgcatggagcatgctcttctcatggtggatcagtggagtaccagagccacgccaaatagcacaagcacacttagggcctctgcgcacattacacagcgaaatttcgttgtcctgagcaagtctcatggcctagaccagtatcagtggagcagggaggtaaactctgcccacagtaggaggggaaacgagtgactgtttgctgaacaatatgggccttctggccctgtaactcttaggtcagggtgctgagttatttatctcatcatcatcatgttatcaagccaatttcttgacctaaaccgggagaaagcgcttttgaatttttcccaggattaaacttgtgatctgactcagcctcttg

SEQ ID NO: 54419 - DNA, 672 bp, Homo sapiens
cagtggtctccaatttcagtgtaagaatgtctcaggggtggatgaaaatgaatatgtgggctatgtaatgatgaactgcttgtgtcccatgtgttagtatgacagccatgcccaggcctctgccaagtttccaacatcaaagagaacatgcatagaaggcacttagcacagtggtgagctctgcatcattggtggctcccattattgtgattactattattctgaattgattcctgtgttttaccatccaagaaaggccagttaggttgggtaattttctgtggtttgagtgagaatagggaaggagttcgtatggttcatatttgccactgtcatatttgtcatgcttatctgtctgcaaaaggtaaactgttctccttctgtaaacatgccctttatctccttgccctaacttcatgagcaaactctctggcctttctgtatgagtgccacaggttgacttttttttcccacacagagcaaacaaaaatgagtgggactttttattgagatgataatgtggcctgttatggaggcagaatgagaggtcatgtgttcatttcttaccttgaagtttgctgcttcttgccgtgccattgctggaagggaaaggaaggggaagggaaccctctcctcaggagttagcagagagaagggaagcagttttccctc

SEQ ID NO: 54420 - DNA, 563 bp, Homo sapiens
ggcaacatgcattctaatgaggaaagagacaaaggtataaacaagacaagtatcagatggtgatgagtgctataccaagagttaaggtaaggtgatctgctgtgctatgacttgggaatcagggaagtctctgagaagataatgtttaagctgagatctgagtgacaagaaggagccagtcaacagaagatcaaagagcagcaagattcaggccaagaaagcaagcaatgcaaaggtcctaggctgacgcaaccttggagtgtacatggtgcaacatcgcggcagcggcatcaaaagctagccaggctgtgcagtggggagcaggcagctgtggtgtgcaatggggtcagcgacgtgcctggggccagaccagctgggaccttatgctacaaataaaatccatattcctccacttgctttgcagtgggaagctttggagggttttaagtggggctatggcttacattctaaatgtactggtctggctggcatgtggagaatggattgtagaggagcaagagtggaaactgtggtgatatgtactagatgtttctttgcttctc

SEQ ID NO: 54421 - DNA, 3808 bp, Homo sapiens
cgccttgccactggaggggctggaaataagacttgacacaaagcatgagaaaatggatgatagggaactgtccctgggggttggtgtggtgaccttaatcaggctcttccctgcctagctctggattcactgattcagtctcaaatgatccaagggagagaaacaattgcttggaaaatggccgtaggggataatggctattgacagcagatattggctcactctacacaggttcactccctccctccttccctccttccttccatccatgcattttttttttttatctagtcatccatttagccaagagttctttaacacctactaagtatatgtagattattgagggcactttacataggctagtaagaaaagtcattgcaagagaggacatttatgctgaggcgcgtgaatcagaatggaaagacctggggaggaacattcccgagagagggcactgcccttgccagtgctgcaaagtgtgaaaaagcctggcgagtttgaggaccagaggaggtcagtgtggctggtgagtgagaggggtgatgaggctgaaagagctttaaggtgaggttgaagtcaggaagcaggagccaggttggtcagggcctggtgggctctgcttaggagttggaattttgctctgagagagatgagatttgagtatggatcttggatggccttctgtttctgctttcagactttccttataccttccagttcctactttttgagaatcaggtgtggcagtcagacagaggtgggggggttttgtgaagaagggtgtggcacagggcttgaatcaccaggtgtgggaaaggcaggttgggcaagaagctgagactgggagagggattcagcccgtcttgcagctctgtggttgcttcaggtggtcagagttttcagggggaggcccatggtaggaaggcaattagtactggaaaagatcagctaaagcaaagcaacttacatggaaagcagtatgtaatagtaaatctagaaaaaaaaagtttggaatttaatcttgcaagctgaaacccaaaaggataaaaatatttggtatcaaaaacattttcagttgtagctgcagctatgctctaattctcagaaaagcaattcaactattaatttaatttttctccataagtgttaatgacagaattacacgctggcaccatatatcttttacttcatgtttgcttttattgtgcaatcattaaagttgtttatttttgtaaaattaggactttatcaattttatgagggcctttcttaatccttcagtatttaagtcagtcttataaaatgttgttattgacttgatttttgctttttcagttggcctaagggcataggatcaatggttttgggtgtaatttgagcatttctctgtcacttcagttgagttcgtgaaacgccacatcttttgcagaagtttcggtttcattttgcagttgctttgcaccagaggcttatgtaacatttgaccatcagatgggcctaaattgttgatacaaggatcagggatgaatgctacttggaagagaagtttgagtgggaaccggtcaattcgctaatgaatagttatgatgactttgtttccttatgcaaattcaaaactgaaagtgctcgaatagcaaatatttgggtaatgaggttcttccctattaaaatgtaagtacctaaagtgcgtcttgctgtggaagggcccaaaaggtacaaaatgtactggctttcaatatcctgtcatttctagttaggtttaggtatatattggtcatttgcaggactagagcacatttcatagccagagtgccctgcccctcagggcactattcttattttttggggggggtgggatgggggggggcagattaatcagggatgtatggatcatcccagcttgccctgggaagcttcttggaatttgggtgtacaccttctgaaagtgaatggatttgagtaaaatttaagaaaaatacaaaagaaaaaggaaagctctccatcttgttaaaataaatttgttcagaaaagtatcgtgaatgtctatattcattccactgcgaccttgccactgttgacattttaggtagaaaattgtttgttatgggggactgtctcatatgttgaaggatgtatcacagcatccctagcttctactcactaggtaccagtaacacatcctttgtgacaattaaaaatgtctccagacattgccaaatgtccctctgggtcaaagtcacccctggttgagaaccactgatctcaggttagcacagagaggctgcaatggaaagattgtagtatgttaactaggtgaagggattgaccactcccagttctgagcaatttgatgggttcttaaagaaagcacagcccttggagctggggaaggaagtttgtgactcatggtggtgaatctagggggttcctgtgtgggtccagtggagcaggtctggtgagaggggacactgggagccccagaactccgagcccctgggggacgccaatgaagctgtctatgagaaacatgtgggaagagggagacagatgaatgatgaatgttttccacgtccttgagttgtgggtcacctgaggtctaggcctgcggtgaggccactcactcatttcagctcacacttcgcccagtgagtaatatttgttccagcctttgggtcactgtttactctgcctcccctcttgtcagttccctctggccttctttatatctttctgaatatgagtcagtcttcaagatccagctgaaattctagctcctaatggagcttcctcaactatcctggcccacgttgagttcttcctgctctaatgctcacattacttaccagagcttttatttgggcatttaatcaaaggtagttgtgtttcattatattcacatcttgtgtgtttctcatgtcctcactgagtctgtaagttcctttaaggcttagtctgtatcattcttttaatccgccatgatacacagcatagtatgagtacatggtaggtgttcagtacatgctaagtgaatcagagtaaatggaagtcagtcttcttgctcatcctctcagtgtcatttatgtcttccagatcctctccacacactccagccctatttctttaaatagtttaaggagacagcacattgtttgacagttctgcaaacataaaaaataatttatctcacacttaatttttatctgaagacaagtttaatattttcaagcattacatttttatttttaagttcttacatcctttttgtttctcttaatgtcattttggcttcaaagggtataattttgaaattatgagtactgtaggacttgttagtatttcttctttgtgtgtataatgtttcaagaactgttgatggctaaatgtcatttttatactttttggattcataacagttcagttaaattcaaaaataattaataatattatgtatcttagaaatagctgtcatgtatctggtggatatgacatattgttagatattttaagttaaaagttctgtatgcaggccaagttgagaacgatgaggagcagactgttttatagacaagcagaaggatatagtagatttatgacaaagcatattaccataatgtaaccatgcttggaaaactgtgtggcttctcaactcaaaaaataaactagtgatcagtagcctatctcaaacacttttttttttgctttatttatatctggtttcattctgaaaacagcaagacaactgacaagttaaataagatattaccactaaataacaacgtacccacggcagttttcccagatcctt

SEQ ID NO: 54422 - DNA, 2034 bp, Homo sapiens
gaccatcctggctaacacggtgaaactccgtttctactaaaaatacaaaaaattagctgggcatggtggtgggcacctgtagtcccagctacttgggaggctgaggcaggagaatggcgtgaacccaggaggaggagcttgcagtgagctgagatcacgccactgcactccagcctgggcgacagagtgagactccgtctcaaaaacaaaaacaaaaacaaaaattagctggacgtggtggtgggtgcatgtaatcctagctacttgggaggctgaggcaggagaattacttgaacccaggaggcggaggttgcagtgagctgagattgtgccaccgcactgcagcctggcaacagagcgagactctgtctcagaaacaagaaaatcaaaataacagtggcttaaaatgggagttttagtttcttttacaaaaaggaacagattcagcctcttgtgttagcttcctgaggtcaacagagacaaggcttctcctgtctttctgtatcaacatctttagctgtggctttcattttctaagacacttcatgatataaggctggagttccagtcatatcatccaagttttaagcaggaaggaagaagaaggggagaggaaaagaaaaagcacatgctagctagttgtccgtcccatttttatgcagggacttatttgtttacattgctcagcactagccagtcatgtgctaaagccagctcaccctaggttatgaatgccaattgttacatttgccagagtttttgcaagccgattgtcttgagtttggtagcttgaaattggccatagtttttacacaagagaaaatggtgtaagagagagctgtttgttaaccatttacgagacacagctgttcctggctgtaggacaggcgaggaaatgtaatttttaacttggtgcattgccacacagaataaaatcacagtccttttactaaagaagaagggaaagtgataatgaataagaaaacactctttgctacattctccccactttgtattccacagactggatctgcttcccctgtttaggttgttaactcttgtctccttttcaagttatgcaacagtcaacatagttttacatttgtgtttctgcacatgaaccagcatttgtggacaatagcttctttgaggtagatttgctaggtcaaagggtatgtgccctctgcttaactctttataaagaacactcaccagatgtctggtctgtttcctcctaatgtagtgtagtggtgatgagcatggattttggaatcacacatacagggtgtgaacactcattcagacacttctagctgtgtgactttggccagcttacttaacctctgtaagtgtcaatgtttttttccatgtaaaatgggagtgggggataccatctgaccctgcagggttttgtgacgatgaaatgagattgtgactacatagcacttacagcagagcctggcaggttgtaaacccacagtaaatagttagcaggggcttctgctcatggaaagatacacatgtgtgcaacatacagtgagaagaatgaaaacatgaaactgggccttgaacattacatgtagggtcgatatgagttgtagagatgaccagattcagataggaaagcaatggatgtttaatgttcaaactggaaaattattcatttcactgcccctaggggtaggtgtgtaagctaattgatggttagaaaaatcccagagtaaaccaggaatgtctctaattcataagtgtatattataaatatatttaaaatcatctttatgacaattcagttatgtttctttagcatatcagatcctttagttgtggaacttgacagaaatcaacataaatgttctttttctctcccaactatattgaacattgcacagatgtgtagttatttatcatgaacatgcaaatattgatgtccccaaggcccattctttgaatttcaaactgctgttgctatatttggatgttgattaatacgagtctttgctctgacacatagcatgtctgatttcaggacct

SEQ ID NO: 54423 - DNA, 330 bp, Homo sapiens
tgcttggatgccaggaccaggtccctggtgcagcaagcctgctgcaacattgccaagtgtgggagagggaccgggttttgggcagcaccaccttggccttcctccttcttgtgtgagaagctagggatgaatgtgtgaaagcttggagcctagcataccacatgtataagtcagagccatcagtccctactgtggtgactcatccccttcaagaatcagatcaaagctgtggactcttcatactggaagcaaagcacacatatgcacatgtgcgcgcacgtgcatgcacacacacacacacacacatacttctgtatataataacttcaa

SEQ ID NO: 54424 - DNA, 3423 bp, Homo sapiens
ttccaaagtcttagctcacaaaaccaggacttgaaaacagagctcatgactcaatggagtggtcttatgctgtgtgtttaccaactagatttgcgtttggcctcattgagttgacaagatattcctcatcagaacaacacattccctatgaaaacaccacactggcttcctgctgccatgagcagcagtcagataaccagagaggcagacacagaggaaatagccttggttcagtgctgggaaaaactctttttctctatgctgcacaactggaaacagttgatctcgtctctgtccctaacattgttaggtgctagtacacagggcccaggacatgccatgagaggatctggaaagcaaagctcaccaaattattctttgagaggttttgtgaaccatagagctagagctattctggaagaaagaaaatggctccggtagcaagccacttttggaggtcaccatatctcctggggccttctttcctgctggagacataaagctatcttgtagtctgggacagaaaacgtgttttcacctttttcagccaattaagacctcacagaatcaacagttggcacgtttttactggctttcctggcctgagtccattccaggggggccctgcccgtggggagctggtctttgggcaagtatttgattaggggcccttggggtccctggggctttgagatccagccgtgtaaatgtctccttttctggttggcttgcaatgagtagacaccatctgttgaattaaaaattccctttatggagggtggtgaaaggcttgtgtagaagagacactgttatctttcaagcaaacagttcatgaggttgaagagcagcgttcttggcccaacatatgtttgcccaatggctgtgggcgcctcccccaccaggctctgcattccgccccatggcgaggtgcacgcataccatggctgcggtacaccgtgtccactctcacatctccctagcaaagaaaacccccatttatagaacccgccaaacaaactcactctttagactcttaaaaacaaacaagatcccgaggccacaggctccatgcgtgcatgtgtggttttgtaaaatctcaagccgtgaatcaaaataatttcagagacatagtcaaagcccaggccaaaccctgtcaccagggtgggaaaaagacaggaaagattcgctttgaggagggaggatagcccagagaaggagaatgatgggagcaaaacatggaggctgtccttcatctagtatgttcctggagagacacctgctccttgtctctgtccttagggacttgctataataccttcaggacaagcataggagggatgggccaaaaacagaaagggcttactacagccctcattgctttcctctcaacttccagagctcatcttatccatgctgcttactgatacgctgtcctgtatggtgtccccttattccaagcccagcgtctctgtctccttcatagatggtaagagcattgagagcagattccatgacttgtgcatcatttgtatccccagatgcatgtgctcactgaattcctgtcatgttggaaatggataccacaccacatgctttttggtagcaaatcagctttctggactgtagcttacttgagtgccaggatcaagttatctcttttccttatgttccctcaccaccaaatgtggaataaggtatcagcagatgctcaaaagattagaattcatttgcattgagacttagctcaagcccatctccttcaccagccccagccccttctcagagtagcactaatcatcccaatctattaccctgcattatctggtaactgcttccctgtctatacctactacttaatagtaggggactattgcacagtcatccttgtagctccagagactagcaaagtactaagcacagagttggcactcaatacatttttataaatgaatgaatgaacaagctatagaggtgtaccccaaggggatcattagcagataaatctcaagccagtcccacctaatgcatacttaacttcaaaggaaaaaaaaaatctaagaactagctctttgggagattcttctaggagcatccatggagtacagagtgaaaggaaaaagaactcgaaaaccatttaggttcatcattatattaataattgaggacgtacaatgaatgggttacaaagctacacacagtgtttggataaaggatgtggcgatggtgaatttccatttctggaccacagctagaaagtatgtagaggtagtttaacatagttggggagcactgcactttatgtacacaggttctaaatgtggcctggtgactcatgtgtgttttcaggtaggccactttacctctctggacattagtcatcttctgtgaagtagggggagagtggaacagcctaaaattcctctaggattcaaagtctatgagtctataagaagactataatagggcatattttacacaaatagagctgtagctctaatatgtagtttactttctataagaggtcagggtgcaaacatgtgcctttttattatgggcacatgttacacccttcccatagttaggaaaatattaaagaagccttgcacagtcccagctagaagaatgaggcatagagtttagtgtgctggaactctgctaccctcttcctaccagactgactcttaagggaccctttggcaaagcagaactgacttaacagcccttataaactatagttataaaggaaggagctccagtcagataaccatagtatctggatagaatattagaagccatcgaatctgatctctatgaagaaattccctctaaacattctccatgattttagcctctgttcaaataagtatagtggctctgagggcagctcatcctttagtgaacagcttctccattttgacaagtttcaaaaaattgattcaagacatttcctcccagcttacataattttctatttgtttttgattctgcattctggaaccctgtaggctgaggactttgaaatgactaagacttctctgctcctggttaagcaactttaggactgtctcaatcactgtttcttacacccttcacctcctggtggttgtccttggatggtgtttctgaatgcaaatccacctttgaatctggcacctggaattcaaacaaagctccaggcacaggcacttaggggccaggagagtagtagagtggattgggatcagatttgcttctgtggtggtcactggcgattcatactaagtcctcttcccagacactgctctttttctaaagcttctacatgttatgtatgtggaattgtcttgttttatttaaaaggaatattaactgtggtttttcctgattataaaatgtatattcatgatagaaaatttagtagctagagaaaactatttgaaaatg

SEQ ID NO: 54425 - DNA, 1992 bp, Homo sapiens
aggtttccagaacaatccaggcctggatgatctccctccagctggctgtgcctaggtcctgggtgaaccttgctctctcctatcagcccccagcccatacctcagacatcgcactactccaggaagctggtgagtgatgctggactgacagttggcgtctccaccggggatctggttttggggtgcattttgctgtccatacacaaggtgatagcagacaaattgtcattttatttaacagcacatatttgcaggcacctggcatataggggaatgaactcaaagatctacacacatattttttctcctattcctccctagaaaacagcagtaaaaataacagtaaaaaaaaaataaataaagggtaaagccacctcattctaggtgtatgtgtattgtcgtccacgtgtcagctgggacccccaaaacctatcttccccagtactcccatttactatgctctctgccccctgacttctgtgccccagccctcagctctggatctagatgattaaatccccaggagcacaccacactgataacatgaaaacaaggatttattcattagcaatcacccatgtaatatggttctctttttactgagcagctaataacgtcacatagcaaaaagagtctcaaaaccagacaggtgacaggggatttgagactgatcttaccagctcttctgggaagtctcactctggcgtggatttctgccccatagcccaccctgaggggaagaaaggctggctggatggaggtgggcgcttccttggtgctcctgggctctccccatcttcatgctgtgtcgttttgctttatgcctccctggagcactcttggaaaggagctttcttctgcttgccagttgccaaccatttgctgattctcatcagaagaatctaatatttgcataacgtaactcaggaacaatgtgtatttggatgctgcctttgagcggagtccaactgatgtttgtgcacaaaggaattattaaccacccgtaaggctccctaaggggaagtggcctcacctcccctagtggtaaacgggcccagtcctgagaagccttttggcacatcactccctaacccctagtggaggaagggacttcagaagagcccgaaagtcccctgcacaagcctgacttgctgcacgcctcctctgtgggtttgttcatgggcccgtcccctgcattccaaacacacccccagggtcagggcgtctggaaacaaaacagtgaataaaaggaggaaggaaaagaaaaaaaaaacagcgtatgctagtaaccagttagccgtccttcacttattctcgacaagatcctatgagctggaaggaacacagaacaggagagttcagatgggctattgacaggcccaaattcacacaacaggaaatagaggagcggaggcaaagtcccaaaccttcctgcctagatgtgcgtacattgtgggtttttaaattttttttttgtttgtattttttgtgggtacataagaggtgtagatatttatgggtcacatgacatattttgatacaggcaggcaatgtgtaatcatcacatcaggataaatgggatatccagcccttcaagcatttatcctcacaagttgtgttttgcctctcggaaccaagaggaaaaagagaaaggaggaggaaatgaaacacgatgacctctggacccctactccaaaatgtgtcccccctcggtggggctggcagtgttggttggaggagcaggcgtgctctgggagtcgagtcctgagtgggaccaccccgaggtctggcaggaatggaacatgccggcagagctctgggcccagtggtatctacagatttaattacttacaacacatttttatacctcgtaagtattgactccctattttggagtcctcttggcagcgatcccacaagggagctatggatgccttgggaaagatctggtgctgaagttcacactcacagcagatgtgcagacattgcaca

SEQ ID NO: 54426 - DNA, 2147 bp, Homo sapiens
gcctttgtcattgcaggtcactggaaggactgagcgcattcaggagcctggaggaactcatcttggacaacaatcagctgggggacgaccttgtgttgccagggttacccagactgcataccttaaccctcaacaagaaccgaatatcctttcctctgcccgctgcccccactccccacccagccccacagtcgtcccccaaccccaccctgcacaaatacctgcaaaatgtcaaatgagttttacgtgtcagctaaattaaagtatgtgaaatacagttcgtgggcagacaaagcattctgtcttctggcactcgggacacttcagagtaatttattataggtcattcataaatgaaacgcaccattatatcttcctgttgctccattttagtgtagagatctaagttatggctgtgaagaaatctttttaatagataaaaatagagaaagaaaataatgtcaccgctgcagaggcagcgaagcccagtctgtttgcttgggcttgtgtgggagggcgacctctggtgggaagtcccgggtaatgccgccaagcaaacttcctctcctgggaggtttctggaaggctctggggcaggcttggggaaccgttttggtgagggaaaggagctaaggtggcagagacatgtgaagcccaggcctggctatgccctcactgggggataccatgctctggtgatgagaggcctaggggacccacgacagtgtatggcctcctctatggaggcaaggacctagtcagcctagggtgagacttacgggcactaactgctctggattctgtagtggggatggaaacagggaacccttgctgcaacctaaggcccgtagctcctgcattgttagtgtagtggattacccggcactagaatgccagctcgatgggacagggagtttccttggttttgttaactcctctgttcttcacactaagaatagtgcctggcaccaagtacaagctcaataaatatttgagggatgaatgcatcattatcattagctattccttattgagcactcctaggaatgaggcatggtgctgggttctttatgtgtgttgttattcatccttaccaagccctgtgagaagggtgtgtcttttccatttacctagacatagaaagaggtgaggtgtaggcacacagccagacactagcaagatgctaggtcctggatgattcagtgtcaactgtgttgtgtccaaagtccaatgtctgcattctactgtgttgcttcagactcagtggtccaatggctttgttttattggatggaacatttgagacctggagtagttaaaccacttgttcacattcatacaataagttagaaatagaaaaggagacaaggcattttcctctagagtataaaataaaatcagatatacatgtaaggcttggcacatatgcatatgccagcatttaagaatgatttgcagaagtatttgttagctactgtttatacttcaagccataagttaatgttttctttattctctcagatattgtctcagtcagctcttgctgctacagcacagtaccgtacatgaggtggcttaaacaacaaacatttatttctcacagtctggaggctggaggtttgagatcaggatgccagcagggttggtttcttggtgaagatactttctcactgtatcatcacatagcagagagagaggaagcaagctttttcaagtctctccttataggggcactgatcccatcagagagatctacccttatgacctaatcacctcccaaaggcctcatctccacataccatcattttggggattagaatttcaacatatgaatttgagggaagaacaaacattcagaccatagtattataaatatgctccttgtggtcattattgtcactttgatagaagtagaaggggagggcctacatgtaaattcacagtctttgtcataatgaaattttggtggaattttcccttcttatgtctgttagtcaaccaagtttcccaatcactctttgaaaaactttgtagtcttatggctttctaggctgtcttagatgatcagttggccaatattctcaaataaatcaaggacagaaggatttttagacatgtcctgtgtcccaggtctccgtagaatattag

SEQ ID NO: 54427 - DNA, 1117 bp, Homo sapiens
caggatttgggcaggaagagaacagcagtgcaagacttggccggagagaccaccatgctactgagaaaccactttagtgccccttgtggatttcaacgctagccaaaataacaaatcaatatgggaaagttgggtgcccagaatggtctatttcttgtcttcccttgccattgctttttttgtttttgctacagaaagaacaatggacttgaaggttaacagtagacaagtctggacttcacctttcaaataagggagttggtctcatggtcttttagctcttcctctgtcactgaaccctctgtcgttcatcccctcctgccactccagtctctggttggccttgctttactccctcctccctgtagggccttctgtattccttacaactttcaattatttaaaacgtgacaccctttctttgttcccctgcatggagcagccctggggcctgcccagtgtctgcagcactcagccaaagggaaggagggagggaccctccgccgtctggtcgctctgggctgccaccatttcccagacgaataggagctgtaaaacttgtggcttacataacccagtgagcattctccagctaatctacaatctgggctttgaagatcacaagaaagcaaaggtcacgacccagagatcaaagtgacagaagcccacagagtaattgccggttactctctgtagagggccttggtctgtcctgtgggtgtattgtttgcacagagacttcaaacatgctgccggtgaactgtgaggaaaatcagctggcctctgccagttgtcaggcattcatgaatgctgtaggtgagctcacctcggctcattagagtgagattgttgtcatctctctgagcatctgcagttattccactcacactgtttgttcattactctgtggtctttattgactttctcacagtcgtcatttacttggaggtgttgggggtggttatataaggaaattggaataacaagaaaggacgacatggacatttttattgtaagtcaactttgagccacgtagagttcaagcaaggtaacatttgaaagaggcttagacatcatttggcccatccccttcacagcatagatagaaaaactgagg

SEQ ID NO: 54428 - DNA, 1413 bp, Homo sapiens
cttttgaaaatggagccaggggtgcaagacagggaacacaggcagccactaggagctgggaaaggcaaggaaacgtgttctcccctcacctcaattttgcctctatagggcctttttcagacatctgacctccagaactctaagacaatgaacttgtgttgtttgaagctgctaagttcatgtgaacttgttacagcagcactgggaaactgattctgtcttgcaaattccaaccagcttgacagagagtttaaccctgattttgaaatcttgggttttttttgtattatttgtttaagatagggactgatatggtttgactgtgtcccacccaaatctcatcttgaattgtggctcccataatccccaggtgttgtggtagggacccagcgggaggtaattgaatcttgagggtggatttttcccatattgttctcatgatagtgaataactctcatgagatctgctggttttataaagggcagttcccctgcacatgctttcttgcctgccaccatgtaagacatgcctttgctcctccttcaccttccaccatgattgtgaggcctccccatccatgtggaaatgtgagtccatcaaacctctttttctttataaattacccagtctcaagtatgtctttgttagcagtatgagaatagataatacagggatgctttttgatttccatgtttccccattctcccctcttttgtagccataagggaagtgatcatgtctgtttcattcactcatgaatctctgatgcctagtatggtatatggtatgcagtaggcactcattaaatatttgttaaatgagtcaaggagattacttcatcctatttccaggatatagttggccaatctgtctggaattcagttttttccacaactcaaccagcaaatgtcatagcttgctctttatgaagtcacaaagggagtagtcaggcactctacttacagttgtctgcaaacttggatatctcagtggagggagggggcagtaaggccttaggaaagccgaggctggctgaagaatctctaataagtcaatgtgagtggctaattgtgctaaatattaaaaaaaaaaaaatagatgtaaccctttatcctgatagcaggaaggtaggagggtttaataaaaagcatattgtctctgagaccctcacatgttttcatgcccgcattggctttttgtcttttatgtgataggtaggtagggagtgttttctacctatgtattattccaggttttatgcccctgagggtcttttagctggagacttataggcatagtccactccactgagtacagatgttaaagttgccaatgaagctctttatgagggatggagacaggccagtatctttggcctggattctagagacctggtttgaaaatcctgggaaa

SEQ ID NO: 54429 - DNA, 718 bp, Homo sapiens
cctttcctatggtgacttcattctgccaagtctttcatgccactgggctcatggaagtcagccctggttttccccatttatcctgggggcagagcttaacctcttcactagtatccaaagaaatctgctcatagccagcctttactttgtgggaattactgggtgaaggcctgatagaaatctaagcctttaacttttcctgtcttctgcctctctctttttcctcctccctcctttcatttcagcacataaactgcccccttttcttagagctattccatatgtactgaggcccctcaaagctttggatcttacccaacacttaccagaatattatctcaacaaaaacagctcttgcttcctaagaagtatcttggtgaataatattttctccaagctcagatcccaaggagacaggtctggtaaatgagggtatttggtatttggtgtttggtgttgcttcatgttgactttgcttttgtcacacaggcttctagtgaggacgttgccagctccccggagcgccactacacgcccttgccttctgcttccagggaactcaccagtcaccaaggttggaactcagctttttattgctctcagtgggtgcagggagggacacttggctgtgcagagctctggctcattactgctgcctcggcactttagaaagaacacagtgctttttaagtccttgatgagaaaaccatacctgtca

SEQ ID NO: 54430 - DNA, 686 bp, Homo sapiens
agcatatctttggaatgaggaggacatgggaatgtgtcagtaatctcagttgttccctcgtggcaatctacatattgtatccttggctgtgtccatgttatgaggagcgctaaaatatctgttggagaaatgtccctttaaatatattacgagtacaggacatgccccagcgtgccaggtattgccgttctttatctggtagctcttagaagtagaattcacatttgtacagggcattatgtcttttggggaaaacatttctatttagaatgtaaactatatcatcctcagggtaaccctgtaaagtgaggagtgcaaatatttttcccatttaacagagggagacatcaagaattgctggggatgatggagcaactcaacaacaggcaagggaaacaaaatcaaagccctgtgcccttaattctcaggtccccctgacctttgtcctttacccagtgcgtatgaagcaagtgtaggtaggactaactgtggccttgagctggaaggaagagtcaaaaaagtagagggagaggcatggcctggaaatgttcaccactgccatgcgtttccaaagcctgtgctaaggctgctaggagctacagcatcccacttgcctgcctctgtcaaaagaattgcattactcctgccctgccattctgtatttttaaattacagaacaataaaat

SEQ ID NO: 54431 - DNA, 1149 bp, Homo sapiens
gaattccaacagggaggagggcataatgaggcatgtccaacccacccccgactttccatcatagcctgaatcagtttttcaggttaactttggagtgccctggccaacaggagggagtctattaagatagttgagggaggcttagaattttatttttggtttacagaaggatgagtattgttttgaactagggtgtggattggcaagggagatagagaaatcaccattccccaaggccttttactgaaggacatgctcatctctctttgaggtagcctgaaggaagtgaaatgaaacttaaacaattttcaaatcctgactggatgtaatcctgggttctctatgtcagtgctggttcagctttttcataaaatgaaatcagggtttcaccttgaccctcctggacttgtgcaagcacagggagatacaggatcatgctggacggagcataacttcagttgccagaggagttcttagtcctcagctctttattattcttgtgcatctgtttccttaaatactctctgcagaagcattagcatgaaaataaaagagtacagcaacttggaattttccatttgtagcttccttagtctgtggggtcaaagttctgtcctcagggatgctaatgcaaactctgtgtgctgttccagggcaaatgtttctcaactaaatgacaagagggggtggggagccagggaaataatgcagtgctaattcccaaacacagactgcccagaggtcccaatttaaattgctgcttccccaactctattcccaccctcccccaaaggaaaaaaaaatatcctgtgttgttaggacagacatctgtgtgagagcaataaaacagtcttctcccttgtggattagctctttattcctttatttatcttgctatacctcatcagtttatcctaaatcaaggagagtcaaagaggataagatgcagtcccttttttgtttttgattaaggaaacccatacaaccatcctcctacacaaatttcttttctcaagagatagctttccttgttatgtctaatttctccccacccccctttttttaatctgcctccttggaaactctctggaacttttatttcatataatgttcaaatcagaaaatgaaactcctccagagacaggttag

SEQ ID NO: 54432 - DNA, 1117 bp, Homo sapiens
agaatgtgatgcaacaacaagggagtgataattttattttaatttaaaaaggcattctcagaaactgaagtttaaataaaccatttgtttaatggctttaatgtggacactagaaggcacaaaggtctgggctattgggattccagtccattttctggaatctttgccttcagagggcataaggtaatcaagtacgtgggaggtaagagtccaaatgttctgtattactctcatctttctgtgaatgaccaaattcttctgcttttcactggcaatcatatattttgtcaacttgtgaaaaaatactctacaaagatgaaaattgaccttataaagattcttcacatgtatcacatttgagaaggttgtgttcctgactgaagaatcttgccttggtttgttgactctggggttacactgtgtccagttatggctccttggatgaaggccctgtgttgtttttgagtcagctcactcagctttctggagggcagttgattccatgaaaatacttgtctatgtgatcaagcagtgggggctgaatgtgtggctcttcacaacagaatgcaaggcggattactactattcctacagtgctactgttattattaattttaaaaacatacaatgtcattatcaaccttgatctgctctgcttttgtattttagtaattgattggatgagaatgtgcccaggcatgctttaatcactggaagggcaccagggtttaatcttccaaaggggtttttcccattgttatttcctgaaacatgcttgccattactcaagtggcatacaaaataaaattcaaatcaaaacagcaaaagagatgtgatccctctcttttgtgccttcttttaggcttaattctcataagtagaacatatctaagaagagtaggcttttgagttccaggcatactacttctaaactcttcacttaaagctagcacattcacctgaccttgaaaaggtgaatagatacacactgctgagattaaataaggcaccacagaagaataactacaggaggagcaagtaagtgcaataccctcttgtatgaagtgtgaccaacctgaattaaaccatatttctagtcctccctcagctccaaact

SEQ ID NO: 54433 - DNA, 2098 bp, Homo sapiens
tgttcacatgatagcgaataagtttcacaagattttatggctttaaaaaacgggaatttccctgtacaagctcccttctcttgtctgctgccatgtgagacatgcctttcaccttctgccatgattgtgaggcctccccagccacgtgaaactgtaagtccaataaacctctttattttgtaaattgtccagtctcaggtatgtctttatcagcagtgtgaaaatggactaatacagatcctaaatatagcaagtgtactggtgcttaatttccctttgtaaaacttgagtcctggctgattatctccaaactttcccttgacttctttccctgtattttagttccagtgtgtataaaagtgaaagctgaactttctgaaatgtcgtgggtgtgggcctgggggtgctgctggtgtggtgctcctttactggctctgtcttgccatagatctccacagagccctgagctgtagggctgttgatgacaaaaagagaacataaaatgctagaggaaagatcattctaacacggtgcaaatccccaaaccttccctacaatttctctgtctcccatgcctcacccaaagcaacatttggcctagaagggaactttgagatgatctggccccatgcctttcacactgagctatgcggaattctagcattccaatgagacttgtcagaggtgcagggggaacaagtggtgacccatcagggtggagctaacagggctcccaaagctggcttccaaatccatttttatccattcaatacactggggtctaaaggaaaatatcatttaatgaaaaaattttattgtctaatgtaacaacagaaggttcaagcatcagtgatctagtccatcttgttcattttacagatgaggcgcagaataggcttatcactggctcatgtcactgccagttagtcatggaccctagccttgaaattgctctttggaaaccccactgtttccagtattgtgtctgcatagtggcttccacgggccgagggctcacctcattgccccctccccacatgccctagctggtctcttgaatgactatagcactagcatgtggtggccatgtgtgccaccagtgccaccaccctaatggcagctgtgattatcagcacagaggcccaggaagaaggacagaatggactgctggcggatgaattgggaggggagggaatgggcagaagtggagccacattgaactcagaagtataagtgaagaacccactataatgttgcatggggccttgttcagcaaaggaagattgctgtctcccagtccagtgcagctgaattaagtgatctggccagggtggcagtggggcctgtgttccttctcacaggtatctgtgttaatgggcacccctgcctggagccgccagtgtagctgcttggatttcttattcttttatttccatcctgtctccttgttttctgtcactgtgtcatgtcaaatcattgtcaggtggcagacaccacaccccccaagtacaaaggtatcaggtttcaggacacaggctgaaatgaatataataatgggagccagaacgaggcacagaccacttagcaggcaaggaaacagctaataagtgttgttagtggtttccatggggaggacctggcgtgcatttcttggacaggcaggtggagcacggcctgtcctggggtccagctacagacaggcttgtgcgattagtattgatgcctgtcactttgtggctgccaagctgttgattctgtgaaagaccaaagactctggttatctggtaatcaacactgctctcaggaacgcactggggaaacagaaataggctttcctgagtattgactgaagccatggatcatgttgctggtttgtgttttcctctagccccagccctgagattgctccagcctgttcttcacctgcagtgccaggtaaccattcttatttgtcatgggatcaaattctaaccctcttagagtgagcccatccaaatgctctgactcagctgaacactgatgtaaccagggtgacttgggcgacagcataggaaataagaatgcatttgcatgtcaaggtggaaattcagtctctcac

SEQ ID NO: 54434 - DNA, 1201 bp, Homo sapiens
tctctgactgtatatttctaaatggcctgtcttcaatctcactgattctttcttctgcttatcagctctgctgataggagactctgatgcattcttccttatgtcaattgcatttttcaactccagaatttctgcttgtttcttttaaagtacttgaatctctttgttaaatttatctgataaaattctgaattccttctcttcgttatcttgaatttctttgagcttcctcgaaacagctattttgaattctctgtctgaaaggtcacatagctctgtttctccagaattggtccctggtggttttttaagttcactttgtgaggtcatgttttcctggattgtctcaatgcttgtgggtgttagtcactgtctgggcattcaagtagtagatatttattatagtcttcatagtctgggcttgttggtacccatccttcttggatagtctttccaagtgtttgatgagatttgagtgttgtaatctaagccatatctacattaaggaacacgccaaacccataacactatgcttcttgcagactcatagagataccaccttggtggtcttcagtaagagctggaagaattttctggtttactaggcaaagactcttgttctcttcccttactttctcccaaacaaatggagtttccctctgtgtgctgagctgccatcaaaactgggactctgttgggttagaccttgtattaattcgttttcatactgctatgaagaaatacctgagactgggtaatttacaaaggaaagaggtttaattgactcacagttctgcatggctggggaggcctcaggaaacttacaatcatggcagaaggtgcctcttcacagggcagaaggagagagaatgagtgctgacgaagaaggaagccctttataaaaccatcagatctcctgagaactaattcactatcatgagacacagcatgggggaaaccacctccatgattcaattcttcaatcatgattcaagggtcctgccttgacatgtgggaattattacaattcaaggtgagatttggatggggacacagagccaaaccatatcagacctgaagccagcacagcactgagtctcacccaaggtccactgtaaccactacctggttaccacatgtgattgttcaaggccccagggctctacaatcagcaggtataaatccagccagactcgtgttc

SEQ ID NO: 54435 - DNA, 1128 bp, Homo sapiens
gattggcctgggtagttcccggggtcccaggccctaaatctaggtccacacccaataggccctgtttaatacacaggaaaccccaggtgggatggatgcctggctgtctcctgctgcttgctgacaaggacttgctctgaattttgagttgcatggggacgcccacgttctccctttcccatcctaaacagctcaatcttttatatgcttgcattcaagcagatgcagcattggatgctgtatttcatttccatctgaggattcctcaaggactcctcccgcatgtacgtgcaggctgattagttgtgtcactcagatgtctttaacttattaaaaattaaatgacaaattaatttccattcccatcttggctttggaaattatcagttttgcagagcaagtaataggggaaaagtcggtggggggatgggagaagggggcactcaaaatttctgaaataattattgtgattttaggaagagaacagatgaggtttcctttccctgattcctttctaaatgtatcaacagctaattcttttttctagagtgattgttttaatttttaagcaactttcttgataactcttcttttttaaaaaaaaaaaacttttgtttactgtatgaagcagaataaatgatactagcatgaaaggctaggcatggaattagtattttaaaatgacatcatcttgtttccccagagaaaaattctaatggggaaaatctttgctctgttcttccaaaattggtcacatttgggtccccattgtttaagcagcaattgaattgcaggctagtggtgaaagtccaaaatccaggctctgacaactgggcttcagtccagcctgtgctgccaacttccttgggcaaagcatttcatcattctataccttagtttgtttctgtaaaatgggggagttacagcagctctctcatgaggctgtcaggaggctcatacgaatgggatggtgcccagtaagcctggcccagcatctggatcatgccatgacttgataaataccagctgctgtcatgatctcccttctgacattaaatacctgtccacccattatagcatgaaaatacccagcttccctctgcctctcttggaaacactgaaggtctt

SEQ ID NO: 54436 - DNA, 749 bp, Homo sapiens
taagctgtgctctctactcaaccccacgacaaatggaatcccgagctaatgtgctctaataagacgagacgttacctttatgaatgacctcatggagaagaggttggcaagcatggtggagaggccttgagccaggcagctctgggctatgaagcccaacttcaactctgcgaggcagattgcgtcatcaccttctttccaattccagctcgggatgtttagcagatgggcctggggaaagaaaagcaggtatgagaccttgctctgttaaatgttcaattgtttaacatttcttctgggaaatgcagcattgcccaaccactcagggccatccagtcttgcccttcttttcccttgctgcggtctgatgtttgctgttttatgcaactcttctgctcatcacacttcagtctctctggactgttgcttctgcacccaccaagcccaagtcctcccctgggtttgtcatttagccaaatagagcccagagggaatttcctcttgtgacagacccaacagcctgggttactaggatgtctagctaaatcattaagttgagtcctctaatagaccgtaggagtgccaaatgcctgtatattttcagtttcttttttacctgcctttccaatactccagatcagtgactcccaggcatcaggagcgggcatcagaatcacctgtacagtttctgaaaacacagattgctggccccccaccagcatttctgattcagtagatctggggtaagg

SEQ ID NO: 54437 - DNA, 1206 bp, Homo sapiens
ggcagcctccggtttctaggtttcattaaggacataactggtactgcatcaaatggagaaaggtgccaccttccctcccctaaagctgtttttttggaagtttattgactggctgagagaaggagcactgcctttgaatgagacactggactctggtttactgagaagtaatcacagggaaacagcatagactctgacttttgtcttctttctaatcaatcccccactgtaagctataacacaaggaaaattcctttctctttaatctctggatagcttactattttcctgattcaactctgcaaattctcatctcgactctgggaatgtgtcccacattacactcttacagagcgcattatgcactcactagttcacctggtctcagatagagaaatcctatcactcacttgcctggagcattctacaccttaactgctaaatccccgaggacacaaaatagggcttctccttcactgatattcctgtgggtgtcagggagagtgctaatcacacagtatgtattcaataaatatttactgaataagtaaatgactgcagcacatacaaataaaagttgttgtaacttaagtatggatgggatccaagagtaaatcaatagttctgaacctcgggttccaatagacacttcccgaatgaatgaatcagtacatgaaggagcatccttccagtgaccaaatgcaaacacgttgtttggactaaagaaatgggccagaggcgtggtggctcatgcctgtaatcccagcactttgggaggccgaggcgggcagatcacctgaggttgggagttcgagaccatcctgaccaacatgcagaaaccccatctctactaaaagtacaaaatcagcctggcatggtggcgcatgcctgtaatcccagctactcaagaggcagaggcaggagaattgcttgaacttgggaggtggaggttgtggggagtcaagatcatgccattgcactccagcctgggcaacaagagcaagactccatcccaaaaaaaaagaaagaaagaaagaaatgtcccaggaagatttttaacaatcacacctctttacccaggtctttgagttgcgcacatgtgggcatgtgagagtgtgtgtgtgtgtgtgtgtgtgtgtgtgtgtgtgagcctgtataatgaggaagaagaggctggacctgtggatgggtcttcagacctggagc

SEQ ID NO: 54438 - DNA, 4344 bp, Homo sapiens
attatttaactatttattcatcttttgttatattgacttatgaaagactttgaactcttgttgtagaaaaggtatttggaattcccatatctataactagattaagctactctaggctgaaattgtgtcttacatttcacagtataccatgcacaacaagcagagtgctatgatccatatgtatctattgagtgaatcatttattaatctcaaattacatccccaaatcctgttctttccttcctttgcctttttttcctagatatcaagaagcacactgattctagttaagtagttattactttgagctcagttaaagatactaaatattggcactcttggtggcccccattccaagcatccttttatgtaaaagaactgtaatcctatgagcaaagacctgtaaaactgactgcagctaagggaattatgcccccatgcagataatgctgtggaccaaacagttccgataagcaaacaaaatctctcagacaattatgttcttgtttaaggccgtttgccttggaattcccaaaaggattctggaggattgcaaatttgctggggatgaagaaagaaagtactagctagagtttaatagattattggattaagacaggccagaaacagtcaaacaagaaaagtattatgcaaaaccttctaaggttctaatctcaccttatttctattttgattaatattttcctgggaaagaaaagatgggggtttttgttgttctctgactacaatccagagataacatctttgcctccagttttcatcaagataaagacctggaagacccgagccaaaaggaaggagctggaattttttttaaatctttctttctggtctttaaggaagttatctgaaaacccactggtactctccaatgggtaaagaatgagacagaactagcagaaagtgttaaagcattagacaggcaaattaacttagagacagtgggagaatgattccatctccattgattttccagtctgtaaatatgaaatgctggaaggatacttgtgacatttggaaagttttatctagaaatctccaattaattttagagtgcatagcatacatcaattaaacagactgcggggttcatatttcctacacggtcgtgactcatcctcggaagatctgacccatcaaggataatgatttcatcttgatattggtgactaatatttctgtttgtatgtccagtgtctgctacagagcctgacatagagtaagtaaatgctcaaacatatggataaatgaatcaattaaaaacctcataaaatctttaccctattaatcttcctcctatagcaggggttggtaaactacagcctgtgagacaaatctggccaccaccagttcttgcacaggacaccagctaaaaatgttttccccctacattttaaaacagctaaaaaaattagaatattttatggaatatgaaaattgtatgaaattcaaatttcagtgtcccgaatacaattttattgggacacagctatgtccactcttttacctattgcctatggctgctttcatgccacagaggcagagttgaatggtggtggtggagatcatacagcccctgaagccaaaaacattgactatcaggccctttatggaagaattttgctgacccttattctatagaatggaacttgggaacccttatcatttgtcattcattccattgttcactcagtggctatttactgagtatctcccatgcgtgcagtgctctgtcccattctggggataaaacagagagctgagaaagatccctgccttgatggaactcacagtctgggtctggagcagcagaaagaggctcatcaagtaaccttccaagcacctttgcaatcacaacagtgaggagagctaagaaatggtacatggggtaagcttccatgatgtactgatggttatgctaattactaaagactgtcaaatcaggacccaaattgtctagtgccaaggtggatgtctttgctccttcctttttctgccctgagacactcttcattctcagttgggtttcccttttagaatgacctgtgacatgtgtcttctcctcatgtgacactcttcctctttctaaccccagcacctagaacaaagcctgacacacgggagacactcagggcatcactgttgaacaaatgaaagaattaattcattaggagaagaaatgtaagcaaattcctgggcatccccaggccccagttttctcatcagtagaataagaaggatatgatgtactcaagcctcccagctcggcattctgcaatttgtcatgtcctgagagctggactcatctggctttctgattcactcctctctgtggacataaggcagactccctctgactcagcagcctgatgcatcttcctgagtgacacatgaactctgcccaaggcaaggcggccagccccaatccattccacggatcactgctgacagtgaatgggagtatacctgggggttttagccaaggtctgctcaaggtctttggcataaagggaggccaggttgaacacacaccagcaggaagagagatgaccttgacttcataaattggccataaattagagctaagaatcaggaagattctccttccatgcacatttctaaatggcagtttcaaggcaggtggctattttaaaacacagacacaaactcataattcaccctctttgtcccccaccctcctacatgccattgatctttcttttttttttttggaatcctgaaacatgatctttaagaaaagacaactggactccaggattacttcctagctcttcctcctctagaagccaccatttctcttcgctatctagaccccagggaagtggctttggcaaaagcacatttgcacccatggatcatttggttttcttgtcctgttaactgcctggttctgcagcacccagagccagataatagaggtgttccttcaccagccacagctactatcaggatccctcttagtccggaggtaacagaagcaactggttgaacgtgtttcctcctgggaaatcctaaatgttccatatggcaatagggaatctagagttgtgtttctccttgtattagggatattttccctctttcagtttcttcccattttttcccatctaaaatatgttttttccactttgctgagatgaagaccagccagagagtcaaaggaaatgacagacatgccataatagaaagaaaaaaatacagacttctgaagaatgagttgattcatgccatgaaaactcacgataaaaatattcactacttttttttggccacttgtcatagtgtgctgcctctgctaggcagctgaaagtgtctcatatgaaaagctctattatcctccacagaaatgacctttgggacccacccaacggtagtcaatggtaatattatactaacttgccccccaagaggaaagaatgaaataataatacttaaaatatgaatgcagagaagtcctcacttaaacacagtacttctggttcataaatcagttctgacacattgaagtacacatatgatgactagacgcaagtttattaacacattttctttctttttaggtctgagaaacatatctattcagaatccatacatttgttcattttttgaagctgacagcttgataggcaaaaagtaaagtgacagatcatttcaatatttcttttaaattcaaaaccaattcagtcaaaagaccgaaggaaaatattctacggagataaaatgataatgcaaacaattgaagacagtcctttattttagtgaaaacaggtaatgtctgtactctggagtcgggctgacttcctcctcttaacctgccctgcaagtccaattagaatggttttctgcggggagttgttttccatttatacttagcccgaacacgtatacctacttttcaaactcttagctattcacttgacatttgtcttcttcagtcttcactaaatagtctttggaccctttgggagtcttataagagttattttctgaaagttaaaaacgtaggaccttatttcggcagaggttaactaaaccaggcttcaaagaggattctgagggcgacagccactataatgtccattcctactttccttcactaggtggcagcacgtcacaacacatttttcagaacagtctggggaaaatgcagttgagctaaagtgaggttggggagtctctgcgggctatgggaggaggatacacattagggcaggtcagtgcatggaaaagctggcgacacttgtgtttcctataggtcccctttgttcccagtggagctggggcccttcgtctctaacaaac

SEQ ID NO: 54439 - DNA, 979 bp, Homo sapiens
cttaaccataagcaattttactgcctggaaaatattcagcattatcacatttgaagatgttacaaactaataaatgaatacaaaatgaataaatgggtgagtggatgcaaaagtaacattttaaaagactggggagaggccattttccaatcgtaaccccactgttgccttggcaattgtgcccttggatgagatgctctacaaaatttgtgctgccatttcctgctccttcctaacgtccatatccccaaaacagcagtgctgataccagaagccaagagcaaagactggcaaaatcagcaagtgcccccattgtgtgccagccattttggagcagataaagtcattaaggaaacatttaacaacgtataacctttcagctttactctgcaaacagcaggtagcttccctttcagagacaagagcctgcattgaagtcaccagtgagcaggacttgaccttcattttcagtatacgccacattaaatattcataatccgcgtaaccgtagcataagaagtagcagcgtttaaacatgaatcaaaggaataaatatcttcacacatgtgagtcatcctttcccagaatgcccctggtgaaaatgcaaatacccagagctctgggcctctgtctcttccaactttctcttgaaattctgaaagctacagggactgctgcattatgcaatccatgaatctcgctctcatgctgacactggtgggtctttgttttttttccttatctgttagataagaattgctgttcttgtgtcaaagggaggaaatagacaaggatggaagcagcaatggtgacattagcacccacagggcgtctgcaggcactcttgacttggttgtacaatttctaaaaaatctttgcttcacaaggatcagaatatgtgggaggacagggttggcgttggtgtcgggagacatcagaattaggaactaaagtgacgtgtgacataaattgggcagga

SEQ ID NO: 54440 - DNA, 766 bp, Homo sapiens
gcgtttaaaggactctccatctgagatgggtgagggcagcccagcctcgcatgtggggtgggctgaaggacctctgataggcttaaacttggctgattcccagagacaggttattaaaggagatatttgctttgttttccctgactgacattttggcctctccacccaaatgcacaaaatccttggccggtgaccagatggctctgagaaattctgagtttagctgtgcatgaaattaccaccatcccaagccacaggaaaggagcactaagctcagaattcaggcacaccagagtctgagccaacaggcacaccaagcaggtttcctagtatcaaagtctagtagccaaccatgccagggatagagtttaaagttcaaaacactcacacagtggacaataaaggcaacaagctcaaggccattgtcaccagagttgccaagttcacgccacaacagaaaatgagttagactccagcttgtttcccagatgccatcaacttcatgatttgcaatagtatagttggaacaaattatttcctcagggttggcacctgcaggaatcagggcagaactggctgcaacattgcagttctagtctgtgccctcttcatccttctgcaaggtctttatcatctgtcacccaggctcactctggagcaccagtccattcggctggcacccaaggagtctgcatgagtgtccactctagaagtcctcaaatggccagggcctccacctctgggggtcatgatgaactcctccatc

SEQ ID NO: 54441 - DNA, 640 bp, Homo sapiens
gagagaggtttcctggcatgggatggggagtgctgagcaccaagacacatgtgcaagctgaaagcacaccaagtgctcttctctgcatccagcacctcacacacattaactcaaagggctgacaagtccctggatcactcagcaggcaggcagcaaactctcagagcaaacagagttactgctgccttatcttgagctccactattaacacacttgtcatcactaagccaggttgttagtctctggaacaatttgatggaaagggcaaacaccagagaaaaacaagttgacccagatgggctggcagaggggatcaagtggcaataaactccgttatcactcctggttggcaaacaaaaagctctgcctacgcatgcattccagttaactatggacttcccctcatacatgcatggaaggccattatgcagagaaatgggcacagcaaatcacactaaacactgaaactctgctgaagtgactccagtgacttggagttgttgatctaaaaattgcttattcttgccttgacaataaaatcagagtccaagttaataaagatttctagttagcaaagtccccaagagcaaacagtttattcagatcaccagctttctgctttgcagtgtgaagagattaa

SEQ ID NO: 54442 - DNA, 2253 bp, Homo sapiens
ctactcgggaggctgaggcaggagaatggcgtgaacccgggaggcggagcttgcagtgagccgagattgcgccactgcagtccacagtccggcctgggcgacagagcgagactccgtctcaaaaaaaaaaaaaaaaaaaaaaaaaaaaaacagttttcagctctgggaaggaaaaatggggcattagaaactggggatgaagagatattttaaagtatatgatttcaaacaaattaacttttttttatttttacaagtacatacttaatctctttaaaagtaattttgtaaaagggcaaaatgcagtgctccctgaggctctggtaaataaaccgagaaatcactgactggaagttgtggtagataaaataatgaccctcaaagatgccagtatcttaatcccaagaacccatgaatatgtgaccttacatggcaaaaggggtttgctggtgtgattaagttaaggatcttgaaatggggagattgtccttgattatccaggtgggcccactgtaatcactaggtctttataaaagggaggtagagggtcagaatcagagaagaagatgtgccaacagaagcaaaagtaagaagtgatgtgaggaaggggccatggaccaaaaagtgtaggcagtctctagaggctagaaaaggaaaggaagcagagtcttcccagagccagcctccagtcctgctgacactttgactttagcccagtgagatgatttgggattctgaccccccaaatctgtaagacaataaatttatattgttgcagccactaagtttgtggtaatttgttacagcagcaacagggaactaatatggaggtaaaccttttaaaaccaactaattcatgtgtcagaagggggaccatcagccatgcttacccaagtggaggctcatcacccttgattgatcattctgctggggacaggacagattttccataacactatcagttccaatgaaagctgatgtatgaaaaacatctcccttagttggtctgatggtagcagtctcctggatagaactgccatcccagacccacactggggtgagcttggcagccatctggcctcatcactatgctcttcacagaatgctatctccactctagcatgtgtctgtctcatttatcaagctgatgacatggcggtatgaaaaaaacagatgagaggtcctacctgccgatctgctccaaagagattataaaatctaagaggaatgcctgggtgtgtgggcgggggggcggtgggggaatgtagagaagaacaaagttccttctggagctttgggaaagccgtttgtgagcctggacttcccccagcctttgaatcattaatctggttgtacccaagacatccaacagggtgcagacttgcctcattgctccagaagctgagaccacccccgtaacttgtgaggacggaggtcctaccccctgtgaagaaggctgagacacagagaaaactgagagattaaatttataatcataaccttcctctggcttccagagaactacaaaacaaggacacattcccactgtctcttgtcccaagagtagagccaaaccaaatagcctcaccatacccaacattatgcaacttgaagcccaatcaattggctccacccacatttcatctacaggacattgttgccaaacttcttaggtatcttcaatatgagatttttaaagagctaaagatataacagaaaaagcctcaatggaaattttacggctattttcttttgcggctcagggaacataagcttttatcattttccttcattcaagtaacagctttgccctagctccatggttgtcatgcatggtccatggtgctgctttgatgatttataaccagctgagtcatcatctcactaagtcaaaagagattagtatgtgaacctatttggtaaactgtaaggcactacacacgtctggtggcaaggcttgtaaagctctaaatacacgcataattaatgtgactactccccaagacagatggtataaaggagacgacctctacctatgaaaggaaggggagaagaaaagatcaaaaccacctccttctccagccaagctatgtttgctctcccattcctctccttactcccaagatctaaacatgacaggagtggagaagggaagatgtctttaatttcctggttaatttctcctgcctggattccaagatggagacccaaagggagacctgtgtgataactggccctcaaaggagtgcacac

SEQ ID NO: 54443 - DNA, 1207 bp, Homo sapiens
acattactataaacgagtcgcatgcttataattcaaaaataacatttgtgcctaaattcaaactaacacattttaatggaatggcaacatttttaggcctcaactcattctgggctcaaaataataactagaacttcatagcatttgcttgtggaacccatattccttgagcagtatctccctaggcaacagctccagtatatcctgcattagaggatatttcagatgagatgcacttgtgttgcctcagactactacggagtgactccgcagctgctgaagtgttgcctaattgaggatctactttagaaacgatgtgagtgtgatgggtaattggcacgttttcctgcttctgagagtaagctgtgcgctccttgggaggtgaaacccacttccttgtctcaccatggcttgaatgacataataggatttcagtatatgcaattgttgagtgaataaatgaataaagaaacatattagctgaattattgaaacaataagatcaagtaagcccacatagatttgttcaccttcttcacatgccccctgcctgccccaaccacacctcctttcctttgccttgtttgattttccaccaggctgcttattatactatcggacatgtaagcactttacttggaaatgtgtttattttcacatgctgtgtaaagtccaaagggcatggatttttatctcattcgctcaccgctctactcccaccacctagaactggtccctagcaagagttcactgagcattttgtgggggagttcattgtaagactctttaagaatcactctatctctaaacagaaatgatggaagatgtttttgttctgtgtatcaagggtctttatatatgtaaattaatcaaaaattaaggtgtatttgagggcgcttggtcttaaaaatgtaaccattccaccttgcactgttttcttacaaaaatctttgtaatttggccccaacataccatttgagctttattacatcatcttcttcattaccacaatcatcactaccatcactgttatcattcacaattacagaaaacatttaccaactgcctgctgagtacaaggcattttgaaaataggtgtttgggggccagaaaatgaatgggatgctgaggtctctgttctcaaactgcccatctaatgcaagcgttgagacatatttacacatgaaacatacactcagtgtcaaac

SEQ ID NO: 54444 - DNA, 1957 bp, Homo sapiens
ctgtcacccagcctggagtatagtggtacgatctcggcttggctcaccgcaacctctgcctcccaggctcaagcgattctcctgcttcagcctcccgagtagctgggactacaggcgcctgccaccacacccggctaatttttgtatttttaatagagatggggtttcaccatgttggccaggccagtcacaaactcctcacctcaggtgatccaccagccacggcctcccaaagtgctgggattataagcatgatccactgtgcccagcctacatgcccatttcataggcaagaatactgatgcatagggcacaccacactttacaggcacaagaatgaacaagtctttagagggtaactatttcttgtgcaagaatcaaatgcaactgctgacacttacagttttatcactggtgacagcatgagtggctgagtgagcaggatgaatcttgagcctggggtgtagaccagagcaggggcttccaggtgctcacacctctggaaagcaagaggaactggaacagttggagttcagaataggctaaaaaatctcctgccagtcttcacagcagaatctctgagtggagcacacagccattttgaagttggcctacttggatgccagggctcaaaaattctaatgtggccaaagaaaccttcagagaactacagcaaattcaactgataaatttgttctactctagaaaagacactgccaaaattccagtccctatctatcagggaccttggataagtcccttcccctgcatgcatatcatcacagaccatcctcatatgggggtggggagggtgtctctctcccctcttcagctgccttcctacctccaggggtgcaccaattcactgtgatgacctcacaatcatgcctggtgattatgaggacttagtgggatgatgctctgggcaaccacagggattgctcaccggtgactcagtggttgactcaaaggctagagggtggtttgggggtggaggcagaggtccagtgagctgggctccaccctttctctccctgcagtcccaactccatttttatctgtgctatatgttggagtctagccaagatgtcatttgaacaaagattctgaaagatcaaagaaaaaagtttgaaaaccaccaggacaatgctttcaggggactttatccaaaagactgcaacaatgtaaagagatacgattgcttttattactgtgatatgtttaaagtattataaattttttaagagctttgtaagtgacagaagtgaagacatgctcattttaatgttaccagtcaactctgagaagactaaaggtcaagggacaatgaaaatgtgacccttaccaacgacagaaactcccaggaagccacaattaactcaagaccaccaggatatttggggaagtttatccttctggaaaccagaatttctgatttgtggaaaattctatagatattctctgccagactccagcctatttggtaagctggccacagatgatttagaacacaatgaccctgatactcactagagctctgagtgtggctggataagcccatttcagcagcatgtcagcccctccctgaactaggctctgtcactcagatctcagatcttagggcagctgtagtctgccccttgctttcttattaccccagataaccaatgttatcctctgtttttccttcctcccagggggaaaagaattcagaaccctagtctgagtatatgaattagactctgcaaattgtttatatgagtcattctcaaaactaggtctggagggtccccaagagatccacaaatttcttgcaatattcatgtaacaatgttcatctctttagatctattaccattgagtaacccattgatatttaacaacaaaacaacagcaaacaccatcctgatagctttaaaagcaaccctgttcttctaattgtttctagtgcatgctt

SEQ ID NO: 54445 - DNA, 758 bp, Homo sapiens
ttgttcccatcgctgccactccccagggctaaacacagaacctgccacataacaaaagctcagcatatgcacattaaatggaaagtgccttactttttagtccctatatcttaacatctgcagttcaccaggctgaccatgcccttctcccttttcaccaacagatctacgggtcttggaaatcccagttcagtgttcctctctcaatctttttctcttcctttactcagccaagtcactcctctctctaggcgccgcagtcctttgctcttgcctgccacagccattgccaaatgttggtgcaattgtttgcccacacctgtttttcccttggatgccaaggtcttccggatccaggattgtgtgatcttcttccatgcgcttgcctggttccccaagtcataactggacataattagtctggtggagaaggcaagtattatggccctcatttttccaatgagaaaatggaagcaaggcaccaggctccctgcatgcagcagagagatggaagaggaagagaggagcagcttgggtgagaagacttggttctattagcaggggtcaagcaatggaatggaaatgtgtcatgtcctttcaaggtcatctgtggagcaatgtttaacagcctgcccaagaaatatttaattacctagaggaaagtaagtacctttgttgacttgatatttgctaccaactaaatagccagattatgtgaagttacacattaatgtgtaggattttgcctagtagaaata

SEQ ID NO: 54446 - DNA, 609 bp, Homo sapiens
tgaaatgcttcccttttcaaatgaggagtgggaacacttagattacagtgctaagttctttttgtctgtgaggtaaggagaagagcctgcgcctaggtgaccttggcctggtcagagatgctgggacagcctggacgtgggaaagaagggatctacgcaggtctgtccacagcacattccagggcagcttcctcccgggctgcttctgtgccagaacctgctggcctcaggagccccagctcacctttcactgaccttcagcccacaggagaacagcatttcctacctcccccacctgctgacaaggcctctctctttcccacgccaaggacaaagatgacctctgggggattccttttagctggctcataaaaggaagagagatgggccaaagagaaagagctgctgggtccttccccaactagaacatgggaaatgatgattttccagtagggaagtggtggccaggcaggcaggcgtcgactagatgggtccctctggggtgtggtggaaatgacctcaacttcaaagagacagacttccagagaaggctggcattagcatcctgatctgctctactgagaatcccaagggttttgcggaactctt

SEQ ID NO: 54447 - DNA, 887 bp, Homo sapiens
aaaagatgccagcaaattatgttcatcatttaaaactctggaattaattcccaaggcaaagccacactggggatcattgtgatttggagtaaggggaagaaccaaagacagtggtgaaaagctttgtctgcagtgacaaagggggcggggcagagggaggccaggcacgtgggaggcaggtggggagggtgcactggtgagtcatcctcttggggacttggccacggcaggcaggaagctggtcccgattcctgcttctctccctctggctgcctgtggctcagggaagctggggaagagaaaagtgggacctgcagccctggacgctaatattttctttccaaatgtgttaagccccacagagctacaatgatccaagaggaggcccaggagggggaggccactgggcagatgtatctgggggctgcctgctgacatgtgtgggacctgctgcccaagcctcccaggccagcctcagataggacctgttaggtcttgccctggtccctgagcctctgccctgtgagactctgaacaggagggtatttaggaggatggggaggccctgatacagggtcaaccatggtaactgaaggtgtagattcgggggaaaatccagctctgccaccgctgtgggacctcaataagatggggacagtactgccagcccctcaggcattgtcaggattaaacagtgtccaatagcacaaaacacaggttcaagcaattatcccagcaccccttgcttcttctcgtgcccctgacaccataaagcaatggttatcacaatgagcgggcatcataagcacaccagagggcttgttgaaacacagtgtgctgggcccatcccagaacctacattcgaaccaagatgtcaggcacttctg

SEQ ID NO: 54448 - DNA, 510 bp, Homo sapiens
ctcagatcagccagcccaatgtccctcctgaagacagtacatcaagggaccagtttcctatcattctaggtagaaaacatgcagtgactggtcattcagtctcttgatggtctctcttgccaaaagcaggcactggagaggccatagattggctcccattctcagattgcaaacaatagaactaatattgacagagaaactggatggtatgacattctacaattttgcatggggattgaaatgtaatcataccttgaggcctctggtattccaggaatcctctttcagccctgggaacagaacagtgtcctagggatttctctaatccttttatgacattctaagcagagtgtatggatgcaggaacagccaagagtctcagccagagggcagacctggggccccctcttggtttaccttggctccagccagtccaaagaatacacaggcagcttgcagaccactgagttgagactaagggctcagccctagggcagctgcaacacaaat

SEQ ID NO: 54449 - DNA, 906 bp, Homo sapiens
ggctggtcattcgttcctccagatctttgcagcactaagaagatgctgcctggtgacatttcctgaattgtttcccacgggtcttgtctttcaggctaggacaagttgtttaacctttcacgtgcgtctgtctctcttgcttccctcaattggactgttagctcctgagggggatgagggggtcctgctttataattccttgtgtgtcccacggagccaagcctggtgatgtcttcagtacttgacacttcagatctcagaaaatacctgctcatcgattattggattgaataggttaaggaggagaaccgtctcatgggcagacctggcctgcagccaagacagaagctggatgcgcctccctccggactcttgaccccaccaaatacgacgcccatatatgtcaactgtggcattggtgtttgtcccccacacccctaaaccacaagccaataaattgcagggcactcagacatcaggatgtgtccttcacttgccaccagacctgagctggctacaggccaatgacagcatagggctggccctgcccgcctcccatctggcagcaaggatccagttccagattgtgacctgtggttgagtctggcacagtgacccagggctccagcaggcaaatcccagtcataaaaccctggtctgaaccagccacgtgatggaccccagttatctcttcctaaattgcagcagagctgatcttcttccagctgagccaagggccatcagacagggacacgtttacttttactatcctattaaagcatcccagaaaaaaagaaacagtccccatatcctagagcaagaaataagcaaatcattatctacaatgatatcctttaagtctaagcttgcccagaaggtgctgcacatttggagaccaggctatgg

SEQ ID NO: 54450 - DNA, 1005 bp, Homo sapiens
ataaccatgggtgagactgggaccacactgtgtcccccaaggaccaatgtccttgcttgtcaaatgagatatagggtgaccaaccagtattgtggggcctcccagaatgccagagtttagtgccaaaactgaaacacactagaatgtttggtcaccctagctgtggaccaggtaccgggctctgggcaactataagtgtttatcagccctaccctgacctctgctgtaaggtatcctaggagagcctgagggagctggaggccattccctgctcactagggtgttgcaatcctaacaagatagagataatgataagccatgccaagtcaaatgtcaataccaggtcaaaacagaagctggaaagaggacataatgtaggctgccgtggccaggacagaccttcaggaggagggcagggtgcaggaggaggcagattaagcacacactgaagtattctttcctcaacctcacctcatctcctccctccccttccccaccaccaagtagagcaggaccgcagagaatgaacttaggctctggagtcttcctgtttgattccaaatctggtgctacacttttccttttggagtgatctcgggaccattactcaaactgcatagctgaggtattgttttctttaaaatggagccaattataccccactttccagggttgttctaaagattcaatgaagtaatgcacacagaacactttgaaattgtggctgagagcacaagctctataaatattggctgttcttaacctctcttgacccttttcaatctgttcgtgaatctaaggtattttcaaagaacagtgagctctccatgagaatgagctatcctgaatatttctgttattaatgatgggtacagccggcttagttctgcttctatctgtcactcctgaagccagggaggatgagagggtgtgtggagagaaagtcacagggaagccagccctggccccgggcaaagcccaagggtttctcctggccctgtgcat

SEQ ID NO: 54451 - DNA, 1247 bp, Homo sapiens
atgcctggaaaacctgccacagctcagcaaactaggaacaggtgccatcaatgtgccaaaaacctaaaggaatctgaaaaaaaaaaatcagttatgcagaaaaagagaaggcagggaggccccttgggcagctttgctccctgagaagcggcaggatggttgtgaaacaaggagtgaggcccttgaagaacctcacatcagagctgcctacatcagtagggctgaacagggaggtgagccaagtatcaggcaccgggactccctggtcactatggatcacagcagtgttcagcagcagcagcagctctgagaagccctgggaatcacatggcagatacatccagaagaaaactggccagggcaggggcttgtccctgacacagcaggtggcagctccaggaaggaggacaagtccaagcacagtttgtacctggcatgttggccaggttaaacagcaagccagatgcaaacagttggcacaaggtgcagtggctttaccaaacacagagaagaaatatcacaggattaagttccccttctggaactattcatggttccagctcactcacccagactcacaggtctctgcaaggcttcacttcatcatccagtgctctagtgcaagatccgagagtagcattctatgggcaatgaggtgcacagcagaggagcccaagagaattgaccctccctatttacaggcaaacactgactgcattcatggatgcaaaacacgaaaacctcccaccagaccttgaaaacattcttaactataaaaggtagagaatgcagcactcaaaataaataaatttgaaaaaaaaaaggactgggtgggaaagtgccattatcatcatggccaagagcacaggctctgctgtgaaactggctggacctgagtcctggcccccagtcagtacccagatgaggctgagtagggctcaaccctctggacatgcgtttccccaatctatataatgaggacaaacaaagcacatgccccttggagttgttctgaggtaatgcacacaaagtgcttagcacagtgcacagaggacagtctgtgctcagtaaacaactcgtgtgatattgtgataattgaacttggagaaaccatctattctatgtctgcagtaaaagtcaagagaacttatttctgaaacaagatgtgttatgaagggcacatttagaaagcactctcaaaatgaagaggaaaaaaatacagaagcagaaatactgtgaggtctaag

SEQ ID NO: 54452 - DNA, 1805 bp, Homo sapiens
tagtgcctcctcttggcatggccctgaggacaagatgagatcatgtggacacaggctcacagtgcctgcacggtgtgagcactcattgatggcttgctttggttcaggaatgcttggcagagctgtgcctccagccccactgctctcctgcctcccaacacccagaggtgttgagggtgaactcctctgcacccaatcctctgtgcatgtgcctgaggaggatggactgtcccctgacaatggatggatgccacctcatggctgatcactgctgcatgaggcagtgtcataaacccctccttgatgctctctggctggagcggccagttgagtgactcatggagcttgtcatctcagggcctccttccctgatgcacacggccctctatccctgccccccagcctgattcctcctccccctggcaagactgcagagctgagcagaggctgacccgatctgggcccctcgtctctgcagaagagagaaagccagcatgcagcggactcctgggcaagttccaggatgctgtcctcaagtaccacgtggccactgctacccatggtggggtgggagcaggggcaggcagaggccttgggccacagaacaaattctctctgtctgtgagcagaccagggtcaggtgtgtcctagttaaatcaaaatgtcctgtggggcaggaaacagtttttccactcataaagatgcagttcaaatttgagatgtgtcagggatttcactgtggctgactgtgtgtcatcatgattagatcatacactcgagcattttagagctgtaagtccctatggaaatcaccctgtgtatccccctcctctgccaggtgagacccatgaaggacagagaggccctaaggcagccccaaggtcacacaacataaaaatctaacagcaagaatggaaaagaaactgccttctaccacattgggttgccatgaaacctaacagctgggggcgcctgggaagagagaaaaagtcacgaagtttcttcctgacactcccactgacaatcgtgattctgacaccagaaatgccttttcttcatagcatttcccttacatggagaaatacacctcttgtcttgcttcattcacagttaaatatgcttaggaagacgaggagacggaggcccgtactcttgagccacccacctctgaatccacctgcctctggatccaccaaaatacctgcccttcctatttgcccgaatgctctcatgtttcagagccctctcctccaggaagccctccctgcaaacttcatcttaccatccccttttccatcctggatactctagagaaatcagagctcagattgaagctgagtcctcagactttcagttgcgtctgatttggaaggagaaagaagaacccccacatctctggcacccccatggacaccaagagaagaacttcagtccatctgacagcaaagcctgaactctttcttcactgagttcaaatttgcctctaccactcacccaccctttgtcatcaggcaagccacttacaactctccgagcctcaattttcccacctggaaaagggcaataataataataccttcctcctaggttggtgtgaggattaaataagattacatgtgcaaaagctccaagcacccacaatagataccgaactggaagtcactataataaaactgataatgacaacgatagtgatggtgataaatatcattagtgtataatccatacttggaccaatttgggttttttgttcaagaccgctcggtgagctgagtgtggcggcacatgcctgtaatcctagctgc

SEQ ID NO: 54453 - DNA, 1050 bp, Homo sapiens
ccgagacttggggaagcaagcgttcaaggtgacgcagccagaaagcaccacgcggggcttcaaacttgggtgtgcctgattctaagtcccaagtctttgccgctcttgtaagcatccagcttgtctacagcagatgggggtgaatgaaagtcaagagattgtaaataatgccaatgacctttatcacctattctacttaatcctgtcctaagaacttgacagcaagattttccacgataatctgaaatgagagtaattcatctatgcataaacaaagctgacagccagcatactgaaatggacagaaggagagcactgtatgagtccagaccagttagctccctgggcaggtgcccctcacccacgccagcaaggtcaaggtttattcccactccaggcaacgctgggttcaagctgtcccagttcagaggctgtaccaccgaccctgccagcgctcctgcaaatgcacagcttagtcacaagggactccggctgtgcatgtgcgtgactcagcacacatccctcagccctccaaggaaaacaatgacaagagcacatgggatcagcagtgtcatccgtgaacacagaaacacccggcccttcatgcataaacccaccaaagaaaagggcttccaacctagcctggaaaattcaagaactggaagggctggtgctcaaagtcatctggtctgacccctcacaagacagcaaggaaaaaccagagccaagaaagaggcaacaagggacttgcccacgggcactcagctgtgtcagtccagggctaaaaggaagtgcccctacagcttcctgcagagtcagcagccccaggcacagtacttctctctgcccacgtggcactgaggaaattgccaattacagagctatgccctaaattcaggaatcaataaagtgtaagtggagagcccagttacccatatgaattcaacaacaacaaagaaaaatgaagaggaaaactacccagctcattatctctctgaagtgttttccagtaacaactcaatacgaatcagaaataatctcctacgagaa

SEQ ID NO: 54454 - DNA, 1419 bp, Homo sapiens
aattattctataacttttattgaagactttctcccctgcaatagtagaagctctactattatgctgggaacataataaatgtttgaaaatatttgtagagtgaatgcatatgtatttctgacatatgaacactcgtgcattcaacaaaccagggctgaccatccagggcatgacagtgctttcatccctcagtgttgctaacatgcccagtgttgagacaccccaacaaggtcatactacacatgcaggggattcaacaaggtcagacacaaccagagccccaaggagcagagtctactgggcagactagccaacacacagaagcggctgcatgacacaggagaaagggcacccgtgaagctggagctccgggtctagtttcccttccctagtcaatgattacatgacttaggacaaatcatttaacttctctagaacttgtctgcttcatttgcaaacacaagccaaacaagaggaaggcaggcatcccgggaggaggaacagtaaatgttggaagtaaaagccctaaggatcctaatctccttgagtacagggaccagtctttcttcccgcatcccaccactcttccccagatttgtgtgccaggctctgcccctcccccacctccatcactgcccggcaagagtcaccaaactctgacagcattattcttccagccactgacctccaaatatccctctgataaaatcaaatcctaacaaaggaggatgaactccccctgcttaggctttgtgggagagaactgcctgttgctcattggtaactcagggcagaaatatcagaaggatgaactgtggggaggctataaatgtgtgactgttccttaccacctcatggccacctgtactgtctctatagagccaaagctctaaaaggtactcatttgtcttagctccatgcctgaatgttctactcctgattacagagggagaacccttccctctcttgctccatctatgccaaagctggcccactatgctgcttggtgctggcctctaggccagcagcccctgccaagggcacacttgagccaggcagccaggtaactccaggccaggcttccccctcagggcgttaccaggctcctccccagcttctccctagcctggcaaacatccagccctatgctcatcccagaaacctaaagataaaatcattaggaaaacttctagctcagagatgattattgctatgttatttataatagccaaacagcagaaacagcctaaatatcctacactagagaaattatggtgcagccataccaagtagaatgtagtcataaaaagggtttacataggagatgtttgttatagtaactgggaggcagaaggcagcatacaaaattggcagagggtacagtcagagctaaagaagttgaaataatttaaaaaattg

SEQ ID NO: 54455 - DNA, 1431 bp, Homo sapiens
caaccattacggcccattttctcaaactaggccctcctgggggtcttagggaaagggggcaacattacacaaggcaggtgaaggggatagccaatcacagaggggtgcaggttggcattgacctcttcctaacttttctcataatatgaaagtgacttctcttctcagaagaaccgttcataatgaaattcgagctgcctcaatcttccttgatcatctcttcactcttaccacatacacacacgcacgcacaccacaggaaaacgcatcagatgaagaacttccccagtccagtgcagatttaagaaagaggacactgacatagggaggtgggctggggagctggggagggggcagacaaacaagggcatgtgactgatacacttcagggcgggagtcagacggccccctcacaggccagggtgacatgtgacaaagtcacaaggccctgtggtatttcttgaaacttgatttcagcccaagtcaaactccatggatcaagggtcatttctggctattataggatgagagtatccaggactgaagacctcatggggcagaaagaaaaaaaacagaaaggtagctcttggagaaataacctaaagattagaatcaaggaagagccaacctctcttctaacagggaaaaaaaatttactaaaatgacacttcagcatcacctattttttcaagcttgtctttctgaacagaacttgaaaacacagttgtaaaactgttttactagttcagccgacttagaaaaacaaaaagagcttctcacagctttaaacagagtcctgtgctgaagtgttccaacactccagccccactctggggttaagaatgacagatgatgcaatgtaaaaacatcattttccactggacacagagaacatggtacaatactttggaggttaaacagatgagaagggaacagtacagagacccaaacttagctcctccatgcctctagcacacacatatgcctcatggaaggcatctggagaggttagtgctagagaggccagaaatcttgtttctggttctgtgctggaattaactaggtaaaccctggatgaactgttacatctttgatcgtcactacctgagaattaacttagacaaacattgacactctataaagcagcaattgcaaaatgtgggttttcaaaagcactctgagttcttttcaaagaggatggcataagaatcgacacagctgacatatggtgtggacagagagaaatagcttgggcttggatttccggtcagttcccctttctgccagttaccatcagaggaaccatgggcaaattacccaatctctctgagcctgtgtcttcacctttaaaaatggtattatagttctcaaagtaattgcgaggaattaaaagtcaattcagggtcaggcgcggtggctcatgctgtaatc

SEQ ID NO: 54456 - DNA, 1577 bp, Homo sapiens
cccacggcaagactccagtccctggtcccggctctgccacttatgaactgtgtgcccataagcaagtcgtctcttgctctgcagactggggcttatcacatttgtcccacctgtcccagagagctgttatgcaaagtaaggggaatcacagatgtgaacaggcttcagaatcagagctcaatataaatgtacctccttattattaggcacatggcacagtgccaggcagtgtggtatgttccttggggctaaagtccaagagatattggcaataaaagaaagtgaattataccgggcagaaaacaaggaacaaaaagagaagaacagagatgaggattcaccagcctccagagaagagtgaattcacagtgacagtgcaatcaataaaggcttcctgcaagaggaaggctttgtatgcagcctgaagtggctctcaccacgctgatcaaaggtgatttcatggccaggcatggtggctcatgcctgtaacacgagcactttgggaggccgaggcggacagatcacttgaggtcaggagttcaagaccagcctgggcaatatggtgaaaccccatctctactaaaaatacaaaaattagccaggtattttttttacaggtggcacatgcctgtaatcccaactactctggaggctgagacagaagaatcacttgaacctgggaggcaaagattgaagtgaaccaagatcacaccactgtactccagcctgggcaacagagcaagactctgtctcaaaaataaatttaaatttaaatgtaaaaaaggtgatttcatgcatgccccttcccaagaccaagcgctctttgagggcaggtgacatgtctttatgtctcagccttcgcagcttcctcctggcatctaggtgaaagaaagaatgaatggagccttgaactaaccaggaactcaactaagtggaaaagaggagagactcccagatagcagagggaagacaagctggggtcagagggcggactctttggcttaggagtagaggagttcagaagttcaggcttctgatcacaaagggaggtaaaaggagttcagaggagtcagtgacatcatgaaatcagtatttggggagcttaattgggcagctgcatgcaggatatgcagcagggggtgaaggaaagctggcagagtggccaggaggcaagggcaatgagtcaggcagacggtgagaagggaagccactgcctctcggccaaatcgccctctgggagcacccatctctgtcccagtggaagccccatcaagggccactctcagtgactgtcctctttaggctggaccttaagtgtcccctagtcctcctgccttgcacccagcactggcctcctgcaagtggttaccttccccttgtgaatccctccaggctcagggattccagggattccagggattccctcccattcccgttttagaggacaacgcggatggtaagcactcccttaaaggaagcacagtgatgcagcagcgggcggggaaacagggagagagcttttacttctgagcacattttcccaaattgctatcttttcaacacttttataaggtagt

SEQ ID NO: 54457 - DNA, 1043 bp, Homo sapiens
gccgggcgtggtggcgggcgcctgtagtcccagctacttgggaggctgaggcagaagaatggtgtgaacccaggaggtggagcttgcagtgagccgagatggcgccactgcactccagcctggacaacagagggagactccatctcaaaaaaaaaaaaaaaaagaaatgtctttattttcagaaatgcaaactaaaatctctagggatgaaatcctgtgatattggtaactgactttcaacatatttcagcaaataaaaaatgaacgcatcaaaaacagctccaatctctactgccttcctcctggcccatgacttgggaaatgcagggcagggtcagcctgccccaggatcccacacacacttctaggaggtaggtgtctctggatccatgtggcctgtgcatgtgatgaggggcctcttgctcctgcagaagagccatctgtgctttgcaaaagaggtcagagtcccaagccatagcagccaagggcagagaccaaagtccagacctgttcctgaagctaaaccactgttgcaggtacctttgctctccgtgatcttttgccaatgacccaaaaagaagctgtgaatttctgaccctgcactcataaatgctggtgtccatcaagcccttaccatgtggcccaatactttatatgcattattatctttcctaaacttcacaacaagcctatgggaaatatactattttctccactttgcagatgaggaaactgaggcttagagtacaacctgtgccatcatacaggtccccacacctgggaagaatccatgcttggcttaatgctctgctatcaccatcataaaattcttcatacattttataggaaccctacattcgcattctgcacaggaccctgcaagttacatagccaatctcactcaggtctcacggctcactggtggtgacatcaggggtaatgcaggcagtaggactccagcacctgcctgccatccatgacagtgttagaaatttcatgtaagtggctatttgattccaggctgctaaaagccaaagccagga

SEQ ID NO: 54458 - DNA, 803 bp, Homo sapiens
catccagggacatcagccacctttactatctccaccccaaagcctcatgagtgaaaaggacggacgatctctaagatgtcatgaaaacacggagatacaattgaacctatcttcaaacccaaatgtgtgccattgactaatgtgtgatgtccactctctaaatggtgaagtgaagaagcagtcagcataagattccgccaatcaagcacaaataacaccatcgccttagactcggaccatgtgatgacctttatacccgtggattacatattgactctcctttcataatctaggcaccaaaatatctgctggcagcttattcccatcagctgcaggacaaagtagcttctgcatttggttccaagacaggagtcagcaagacactggaggccacagtccaatcccaatggtctgtttattgtctgaggtcattaccatggtgtctcctctccccgggccctggtaagcaccaaggccactttatttgtcagtgactcaaccaggaaccacatggacttcaaggcaacctcctggccctcaaggacacagagtagctaagccaaggatacagcaaattttttggaccaagagccaaagcaggtggcgcagactctgctaatgatcagatccaggcagtacagagttctgagcaagggatatagcaggagtccagctccagctcccttgatttcgagaagagccacaccacctaagaaactcaccttgctcctcatcaaaactgccctattctaaatggcactgagaatgagactgtcctttatacttttcaccatcccagttgg

SEQ ID NO: 54459 - DNA, 906 bp, Homo sapiens
gaaagcccaccacatgcgttggccccggctgtcgcacggcacctccatggtcaccgggatgatgagcgcatccatcttgggctcgtggaccgaggacgaggaggaagaggaggaggaagaagaagaagaggaagaggaggaggaggaggaggaggacgcgtctaggctgagatggttcgcgtggatattgctactcattctaagactgctgcctccgccgccgccgccgccgccgctgctgccgccgccgccgccgccaccatttgccatagctagcaacgggcagccggcgcaggggctcgggggagctcctcccgccgccagcgccaccccaaacacccatcaacagccatattgctgctactgctgccgccgccgccgccgccgcggagcgcgggaggggggcggggaggcgcctgggctcggggcgctgtgcgcgacctggcggggtgcgccgagatatatacagcgagccgccgccgcccgcccgggggggagggggatggagtgcgcgggcagctccccctccccggcccgcgccccgctcgccccgggctgcgctggccccgagcgccgagagccagggggcgccgcgggccgcccgcgcccggggtctgcgccgcccccgggcccgccccggctccgcgcgcggtcccgggtgtcctcggcgccgcgccgcccgccgtgcgccacgggtgtgcgctgcgctcggccggtgacccccttccccgagcgcctcccgcgcggctaacgagccgctctccgcttattaggtggtaactcgttaataatggataatcggccccctccgcccgggcgcccctgcgccagccctcctcccccggctgcgctcggctccggctcgccgcgccagtgcgcgcccggccgcggcaggttcaccgcgtc

SEQ ID NO: 54460 - DNA, 1894 bp, Homo sapiens
agctgacgcttaggaaaatagaaaagaacctacgtgattatcagggcaggtcccccgatacaccatgttagccaggatggtctcaatctcctgacctcgtgatctgcccacctcagcctcccaaagtgctgggattacaggtgtgagccaccatgcccaggcttgttttgtgttttattttgcatttcatatcttacatttatccctgaacatgttttgtacttttttttgttgttaagaaaaggaattcttttgtgtatctatagatacttgcatgatctactgtagtcaacgttcggttcctcaaaaggtcttgctgctgtcaggtgttatgcactccatccataataactgtgtgaaacacatttcatatgtaaataaacgtgggacatttggcccatgtgcttctgtgagagagttattgattgtgagtctctgacatctttgtgaagtttgggaagtgactaattgcagggacaagctacaggatgttgcagaatccttcccactcagaagaatggcatgttctctctcattagtaatcagctattttgtcactttctcattgactccatcagtacatcggtacaatccaagggtgtgaatttcagcttgaaattccattgctattacttgttatgtttgtattgctctaagttgtattcatagcactttcatatgtttctgcatttgaaccttgcaataagcctgtgtggtaggccacataggtccaaataacctagttttacagttgaggaagctgagctcagattcagttctttgctgaagccctcatagctggtaagtggctttgcatattagaacccaaatattttgctctctaaatctaatgctcgctctatgtggttatgtacatattgacaaatattcatttattcaacaaataaaaagtatgtacaaagcatgaaaaaaataaaaaataaaaacaacaacaataaactatagcttctgatctgaacggaaaactaagctgatggaggaaagagagtttcttaaaaatggcagaggagattccaaaaaaaaagtaattctagtcactcaagagaccaaaagacctcatgatcacaaagccacttatgatactaaacactcaaggtaaggggcaaaatttgtagataaaagtctttgtgaagatcatgagacacatatattagaagcaaagaacaacaaagagtcaagtggcaatcagttacttgatattgttattccaccaggcacacaaattgagaaagagcaaattactgggcaagttgagaagaatgctaccaaccctaaaccccagttaagtcactcctctcgactgtcccctgacttaactagagacactgatgaagctgcttttgagccagattataatgaaagtgacagtggaagttatgtatctgtaaaagatgaggaaacttcaggaaacacttctaaggtcctgaaagataagataatggagaaagcaggagaaagcaaaagaaagcctggacacagttggccaggtaggcataggaggagccagagtccgagcagaagtcagagcccttctggaggccagacttgaggccatagcagcagggccagttctgcagaaagttagaatagcaggaagaataataaaaagtaggaaaaggaaaagcacaagaaacattaaaaaaaaaaaaaaaaaaaaccatacatgcaggtactgcaggggaattggaaaaaagccaaaaaacacagacataagaaaaggaagtcaaagaagagcaaaagataaagagaaagataacaaaaaatgaaatctgtcaccatgtaaaaggacagattttttaaatggacttaatggctaagtctgtattcaattttgttattatgtaaagagattcaggtcttgtaaataatgaca

SEQ ID NO: 54461 - DNA, 585 bp, Homo sapiens
gaagagactagtactgtctctggaacaagctagataaatatctccatcctgggtctttagaaggcagcaagaaatggagtgggccaatggagtttcaggaagctgtttatgattctgatgcttagaccaaatgcaaaagaactgtaaaggtgtccctcccccactgtcccttcgtgccacaccatcccataatggcatgttccattaatctcagctcaaggtaagctgagtcatcagccagagaaaatgatggctctgggaactgcccaagtcacatggcatgagctgggcattaggcaaggacatggcatcccaggcttcacaggtcggggacattctgtccacaaaggccaaagagggcaactacaaaggaaaagtcttatctaagacatcagcaaacgggtgctgtttctgccccctctttcttcaatgtcatctacactgccctcctcatctacttcgtgggctgcattgagaatcactgaccaccaaggcaactcagcctgggtctgtagtagcagcaactagggctcctgaggtcatggagaaccccttgcccaccacaatattcctgctgagtttgaa

SEQ ID NO: 54462 - DNA, 1092 bp, Homo sapiens
acttcacttttcttggagaaggagagagaaaaagggaagcaaatcctgaattgctcgtaggatttaaaaacctctccacagaggggagctggggacaaggtaggggagacagtgctagcagcacaatctgaggacgggtcccctgccagccctccgggcacacagggagcaaaaggagaggcagaggcacatgggagcaggggctgggagatgctgcatggcgcaggctgtgggcttggctattaaagccagaaaaggcctgcctcctcctgccaatagagttatcttttaatccgaaccccaatgacaccacctggcaccagcgcaggagcagctcctgacggcacacgagtcacgcggctgggccccgcgtctatcccttcaggtcagggcttgccctgagtgctcctgaggaagtgggcccctgccccctccatggcctggctcctgacaggcctgtgcatgcctgagagggccaggcaggcggtaaggaagtagaggaagctccgtgctgtgcaaggtcaccaaatgctagatgcaaagacccagaaagggagggcactcacccaaagtcacccacgccgggacggggcagcaatcccaggattctcctcctacccagatgcggcaaagaggtttgcagcccaggacagctgttatcaactagccagtgctggaaaacagcaggtagcaccccagacctgccactctccacgtactcagacaactcatggcccaatctgaagatggctttcctctgaattctcccacatctgtgccctcctgcagggcttggtttctgaggtcccatccgccttgaagttggcaagggctagggtagcatgtaacctatctccctagtaaggatggcactgactctgctgtggcagcatccaggccaggcagccatccaggccctcccagactgggggagctcagcacctccagaggcagccacctcaccacagaccaacacaccctgctgcagcgttcttccttgtgggcaatggaaatctgccagcaggaactggtagcagaaaactccccaaagcctgctccaattctccaccccagtacaatgggcgtgccctc

SEQ ID NO: 54463 - DNA, 638 bp, Homo sapiens
cactcgtatgctggtattagcacattagactccccaaggccactcccactttacagaggaacaaagtgacacccagagccaagtccctaaactgagctcctctcactcgctgccaccgagctgcactcacaccacagctctcccttagagggaacagacaggtgtggtctctgtctcccttccaggacaggcttggacactgaggagatgccgtgcctatttcccaaacaccgagtaaaaggaacccctggggtccagcccacacccaggttctgattcacagacctagggtgaggccaaggggtttaatctttcagaagcttccccagtgactctgaaaaagccaatccaaagactgcacccggggaaccccaagcgtgaacccaggactgctgtttcagcccagcaatttgtatcaacagccgttcaaagtccacaccctttgacccaacagcaccacttctaggaattcatcctgagaaaataaagaagcatacaaagatctatagcatgaggtgatgcaccgcagcattgtaagtacagaaaaaatgggaaatctctacatctccaatcaagaagaactggtgacataaatctcaatcaggcaagactgtgctcccattaaaaacgagccattg

SEQ ID NO: 54464 - DNA, 4280 bp, Homo sapiens
aacacaacacctaccacctacacagcatacaaccacccatgtgtggccatgaacctgcagcagccacctacctttcacacaagccacaagagggcgagggagtcacggatcccactgcagaggtgaggacatgaggcctggaaagcagaggtaccctcagccccctctctccttagccatgctcttctcctccccaaagagacagccacaacacaggaacatgtcccacactccccagaggacacaccaactctatttccaaacatccccactgtaactctcagagttgaaactggggagaacgctggctttccaatcctcctagcaactcacagacagccagtcagacacctcaggggatcctgggaaggccagccagtctacatcctcacctacccacctgcggccaccgggtcctccttcacacatcacagaccacccatcagcctcccacccaatgccaacccaacccattcccctctccagccccagcagcctcacaagagaaccagcccagagagaatgactggaaggacagcagaggctggttggcctggcctcatttttccagcacctgctgagcgaatgctccaatcagaagccctgaattaccagacaaacccgccagtcacagaatggattctctcccaagtcctgctctgtgctctcccctcgccaggtctacctccctccttccagccgcctgcctatgcccagctcaccatacaccctccttccttaggcactgaaacttcaagcagcctcacctgtctggcactatctgtactactagatacccacttgttcaagttttccaacaagacaataaactcctggggggtggggggagagaagccatcttctttgttgcccttctgagaatctgatggatttttagacacaaaaacacttgccatgtgctataaagcacaaaatggaaggtgagaaggaggaagtcagtataagctaggctgattattttctggtatttctaaaagctccacaatagagcaattaaaaaggaaaacctttgaaacacaacagcaggatatatatgttccagctaaaagaacgaatccaggttggaatattgttcatggtagatatctttccatctttgcatgctcagcacttagccgagcctggtaaagagtagtgaccaggtacttgctggagagatagacagataaactcttgtcagaatctgggctccaccctaaagcttgtgttatctcatgcaaggagaagacactgtgaccagctccactgagttctcatgagaagcctgaagatgagggaggttacagaaaaccaaatactgcatgttctcactcctaagtgagagttgaacaatgagaacacatggacacaaggaggggaacatcacacaccagggcctgtcaggggtgggggtctaggagagggatagcaacagaagaaatacctaatgtagatgacgggttgatgggtgcagcaaaccaccatggcacgtgtatacctatgtaacaagcctgcgtgttctgcacatgtaccccagaacttaaaggtattaaaaaaaaaatgagggtggctgaggacaaaagatcaagactacatgaaatttcacaacttcccacagaaacaaggacagctggtcaccgttttgttctctctccctgggctcacaaaatcgggggaaatgcaacaagatacagaaaggtggtttgccattttctagcaaaaatgagtggggggatacataggcgcatatatactcacacccacagcccctaaactctaaaccgccatgggtttagctccgtttttttcaggagaaggactcaaaaccagcacattttggttttgtttactttcctgctttttcttggatccagctcctactgagattggctatcagggtgggtcccaactcagtgtccacggggccttatcctcttatctttataaaaggcttttttccctgggacaagaggcccggtggcctcattttcctgcctgaactctgccctgtgactaagcaagaagaagccacggcagccagcacccagagtttctgctgtgtcacaaaaaggagtcatgggtctccctgccagcatcagacccattccccgactcagcactcaatttagatatcacgtcctacgtctacatccagaaagcccccagtgtgacagatgctcagaacacatctgctgaatgaatggacgaatgctgtgacgaagagaggtggagaggtaggcaaggctcagaccacagaaatggtcacagggtggcctgcagtaccgagtaaaggtagtcattatcaaaaaactgacaaggactccagggcttgcctagcctctcagcagctgatggccctgagcaggctaccaaactctactggccgagtgtgcccatctgtaaaagataaatatcaattgcagaggctgataaaagatttttttcattgatcaggaattaaaggctgtagctcaagtccagaaactgggatgctgtgtcacttgctcaccctcactgtaaaggctggtgcccacaaagccaggagaatgtcaggaaaaactagccacggatctgagacttcccacccagcctgctcctggtaaagaagtcttggaaggaaccccagcctgggaagagacctgtttctcatttgtaaaataaggagtttgggcaaagtggtttctaagatcccttccagccatggcattcaacaatcataggctccttaagaaatgtaggccgggcgtcgtggttcacatctgtaatcccagcactttggggggccaaggcaggtggatcacctgaagtcagagtttgagatcagcccgaccaacatgataaaacgccgtctctactaaaaataccaaaaattacctgggtgtgatggcacacgcctgtaatcccagctactggggaggctgagacacaagaatctcttgaacctggaagtcagaggttgcagtgagctgagactgcaccactgcactctagtctggagtgcagcctgtgtgacagagcgagattctgtctgaaggaaaaaaaaaaaaaaaaaaaaaacataaacaggaaaagaagttctggtcagatgagaagaaaggttacttggaatgagaatagaggttaccatgaatactgaaaaggccactatatattttttttaagaattaaagtgttttattgattgattgattgattgagacagggtcttactgtccacccaggttggagtgcactggcccaatctcagctcatgcaacctctacctgtcaggttcaagggatcctcccacctcagtctcccaagcaactgggaccacaggcatgcgccacagctaatttttgtattttttgtacagatggggtctccctatgttgctcaggctggtctcgaactcctgggctcaagcaatccgcctgcctcccaaagtgctggaattacaggtgtaagctaccacacctagccagaattaaagtattttaaagtattacttcttacgttaaaatatgtaaatagaattagattttgtttcctttgttttgctatcaccttcctcaatattggctggaaagatctttactacatttggatagcagattggcaatggtcaaatatgtgcagatttaatttggggactcaggggtcatcttagagccagggaggtaccattcagacaagcaaactggggtggactctgaagaagaggtttgagaggcatgccacatctataaaaatcctgttggcagggaaaacacaccctggcttgaggtggccaccagggcagcagctctgagtcagagatggccatctctaatggcaccgctttccacacgggcagccctgcagcccccacggcaggctgcatgttagcaggagcttgtttacgcataaaaacgaacagttctcttatgcaatagaggggtaaggcaaacaagtgataacattttcttaaaaaaaaaaaaaaacaggctgggtgtggcaactcatgcctgtgatcccaacactttgggaggctgaggagggaggatcacttaaggccaggagttcaagaccagcctgggcaacacagcgagaccccatctctatgaatttttttttttaattagctcagcatgatggtgggtacctgttgtcctagctactcagggaggctgaggcaggaggatcgcctgagcccaggagttcaagattacattgagctaggatcatgccatcaatcatgacagcatgggcaacagggtaagaccctgtctctttaaaaaaaaaaaaaaaaaaaggttaat

SEQ ID NO: 54465 - DNA, 833 bp, Homo sapiens
tggggttccactgctgggcacagtgccaaagctgagccagtcttagtcctctagccctggccacagtgaccgggcctcatgtggacacataacactggccagaccaatcagaatcctaccatgaggtttgtctgcctgggctgattggatagagctccctttcttccctggtcaggggctgtgaacctgaacagaggggcctgaggtcatgttcagacccgtgggaaaagcccacagcatcgatccaagaggtcaaacgtcccaaaggccagtttccaccatccatccaaaggttgtggaatattctaagtcaatacatttctctttttctacctaagatgatctgagctaagtttctgtcattttgcaataaaggtaccctgaaatgatacacagataaaatctgcccttcacttaaaaacctcttctcaaccattaatttcaaatgactctgccacttcctcttaaataacacaattaaaaccacctaaattagccatgcagggtggcatgcgcctgtaatcttagctactaaggaggctgaggcaggaggatggcttgagcccaggagtttgaggctgcagtgagctatgattgcaccactgcactccactgtctctaaaaaataagtaaataaacaaacaaaagaaccaaaagaaaaaccacaacagctggagcttttacttatgtcccttgccctgctgaccctccagggcagaggggatgaagaaaaggtggctggtacccgaaggaagtggagagagaacaaaaggccaggcaacctctgctgaataataaataacccacacctgacaatcagcacccatctgcat

SEQ ID NO: 54466 - DNA, 2167 bp, Homo sapiens
acacacttacaaatcagtcatccccaagaccaaagacacaggggttccaaaaggcaccctcaagggaaccagtcaccagccttcctcgttaagcagctctgtgctctcagggagagaacttagccccagcagccactactaggattttcccatggtgcaatgcaacttccccaacttttccgggcccagtttccaaagaaacccaggcaggcgttgtgcacaatcagccaccagtctgggagagactgggctctgagcagagaaaaaggagctgggacagccagaaaatgaaaaagcagttgtggccccggcacaggatggcagcgaccaaaacttaagagtaggggtcctggcccaagtcccattcttctggacggtacccttggttaaaggctagcacagggtgccaaagctagcggacggtgaggagcctcagaaaagggactgatggacatcctccgaggtaccccctacccgctactggacctggtggcccccggggaccctgtcgtcgaggcacctgagagtgaaggccttcagcggggggcattgttcacagcgaacggcgggactgggggaggcggcgggacttcgggatccgcgcaccgccgcctccccaactgggccagaggagcgagtccaccgaggccatcgccaggtggagcggcggccccggcgaggtaccctcggccagcaggagggagaagcggagggcgcgtcccagaggcgggggccaagggtctgccactcacccgcgccttcggcgggctgcggcggcccgacgacgccgttcaggtagagaatgggcagcaggtgaggctgcgtcttctccagcgccgcccgcaggtcctggaagtggtcccgctccttggccaagagcagcttgagcagcagctccgccttggcgcctcccgcctcctcgtccagctgccgccgctcgccgggactgagcgctcccgcggcctcgagcagcccgagcacggcttccacctccgtcatggcctgggccaggctctgctgacactgggcgagcagctcccggcgctggggctccatggtggcgggccgcgccgccccgccccgccggacgcctcccgggccccccgaggccggcgggcgggcaggcgagcacctcggcagcagccctagggcgccgggagccgtgaggcggcgggagccatgggccggggcctgggcgggctgggggcccggggcggcgggcggcgctcagcagcggccgcctcccgggctccggagcgcagccatgttggctgccgcggcggcgggactggaagaggaggaggaggagacggaggaggagaaggaggaggcggaggtggggacggcggccggggcgcgccccgaggccgggctccagccgggcatgctccccctccccctcagcctccgcgcgcgccgcccgccccgcgagaaaactcgccccgaaagccgggccgcgcgccgcccccagagcaagactacaactcccgggagaaagtcgcctgggccgtgtttcccaggctcccgacagctccggcccggctcggaggccgcctcggcccccgtgcaccccggcccggctcaccggggccccgcggccgccacccgctcccccgtggccacagccccgccgccgccggcccgtccctcctctctcccctccccaggccgtccctccgggaggcggcagcaggggaggaggggacgggcggaggggaggggtccccggcccgcccgctaggcggggacgcggcgccggctggttcccggtcccccgaggcccaggcgcagccgggggtgggggacacggagtcaggcctggcacgcggccagcccacaagctgctggagaccccctcatacaaatcttgcccccagtccagagggtcctaatctgagaactccaaaatacagcctggagacaaatggtggggagggtttcccctaaatttggacatctccagattaagacctccgccgaatccgtgaggctttccctctccaaggagctcctaagagaatttcccagtaaaatcgcctcaactgcggtaaataggctgttccccgcgccagcatttgagaagagctggtccccagagtgtaaaggagttaggatgttggcaggaggaaggatgtgtcgccggatgaggaaaagaaaggtgggtgtc

SEQ ID NO: 54467 - DNA, 854 bp, Homo sapiens
gccggcttaggcactgggaatgacatagctcagctttcaccccaatggacacatttcccgtgggtttgctgaatgactttccctacacaaaggttctggaaattaggtttaaaaataaaaaaagaaaaacagctcactttttggaaatgaaaactgaaacaatctgctaaaaattcacactgagtcaacccatgcatactagagggaacgaactcacaacatggctattggcaggcaattcatcacacgattaaccagaagttagtgtctcatgctccacagcaggcctatgagcacgggcattctcctctggcagggacctgggctcaatgccactcaggagtgcctctgtcacctcagctctgatacgggctagggctggagaacatttcacgggctcagacacatctgttctggccagtggattttggaccctctcagcaaatctgagctcatcggattgtgagctgccggtggcaaggacatgtttagtcatccttgcatccccaggatctgtggactgtgtgacatatggtgagggctaaaccagtgctcactgaataaacaaatgctgccgggtaggaggtcacctgtgttaaaccttttcaagggcaagaaaggaaccagtccaaagcaaagcagtgtttgccagaaccgggacagaaacctgctctctctggcgctggcaaatgctggggtgctgctggagtgggccctttctgttggcgttcacagcatgctaagtacgttacctcgttatagctttcataacctgtctcagttaaggtctttgaggacaaacagataaatacgtaaacatgagcgtgaagaaaaaccaaattacaactctaatt

SEQ ID NO: 54468 - DNA, 1911 bp, Homo sapiens
tgtcactcagggtggaatgcaggaggttgcccactgcaacctctgcctcccaggctcaagtgatttttcggcctcagcctcccgagtagctgggaccacaagggcgcgccaccacgcctgctaatttttgtatttttgatagagacggggtttcgccacgttgcccaggctagtctcaaactcctgagctcaggagattcacccgcttcggcctcctaaagtgctgggattacaggagtaagccaccgcgcccggctggattcactttcttaccgagaactctaagaaggagccaccgcctaataacgtatttctgaaggcaaaagtccggatagcagctttatttctgacactgccatccgtcggcctgtggtacagctttctagtgggcaaccccatccttttggtaagcaactactgcctccgtgtcagacgctctgcggctgacagaattagagacagtccccgccccagattgctcccctcgctgcagcaggggatagttcgctgaagaacagggatcattgtatgacttcaggagaatgcgagctttggcccagggtgcacaaatcattaaggctcaggccactccgacttctccgcccaagtccagggacctctcgaggtgctgaaatcccctcagcctgaccaatgctctttgaccaacgctggtagttctgggcgctggtcacacctatggactactggccctccccttcccattgcaccccatctctgaccctgcaagacccgggaccgctgacctcggaccccttgccctatttctcagccctttggccactcttactccgtcttacattttcttggccacatccgtctcccggaactgctccttcaccatgatgaccgctgccgggacgcctccttggcactcgggaggccagattagagaaacgatgcccccagcacctcctggggctgcttctggactcgccgctaacacatctgcggcatcctctcggccaccgtagagtgtcccacgtgtccgcttcctcttccgctactcgcccgcgcgtctgtctgtcaagagagacttccggcatgccttttttttttttttttttccctttccccgcaccgtcacctggtggcgcttactggaagccgcaccgaggcgtgtgctgtattttaaaaatcccatttctggtcaatttctccacgtaatcagacacccgcagagaaactgcatataactctttgcctcaaggcttttagacaagcagagggccaaaacttgcataaaatggaaaatcatcatcattaacatcagtaccatctaaattaagagcttctaattgttttaagggaaggtggaagctaaaatgaaccggcccatccaacagagggcactatctgtggaggaccaacaaaggaaaacagagcggaaaatatgggcgcacatgtgcctccagttcatgaagttatttggagggaggggggaagaattaaacttacattattgattacaaaaacagttgaaaatctgttagagtgaaaacagccatggtaatctacagaagaaaagggagaatggaaagtaaagatcattcatgtcttgaaataagttgtctacagtctgtgagaacttgtgggaggtgatcctagtgtgatatattagtgcatgagcctagcaaggaaatcacatcaccacagggcttagcgcttagaattagaactaagtcctcattatttgtgagaaactcaaaacagaacttaacaaaagtgtttaacaactttcaatttttaagaagggacgctatctcattttcagacgccatggatcctcactagcaaaacacaatgtcacagacaaacgaggcatatcaggtttttctaactcatttcggtactccatcacttaatcatgaaataatgttgactatatatata

SEQ ID NO: 54469 - DNA, 1926 bp, Homo sapiens
atttttcaaaatctaattttgcataatgaccaagatttgcagaaaaatacaaattaaagagatcttttaaagtaaagattcgtcataaaagtcacagaaataatactcatgaataataaattagaatgggcaatgttaagtacttgaaataacaaaggttttagagtcagggtttctgcagtttccctagccatataacgaggagactgttagagaggatatcctaaaatgctttccaagtttacccacctctaactcggaagaaggcaatttaaactaatttggtttaccggaattcaaatacgtacaattcaacataatgaattgaactgaaattgaacacctgcttgcgtaaacctagtcggctcgagttgttctggttctggattggtcagtctagagttccaggggtgtggccaaaagtctgtgaggcggggccgtaggcagcctaaatcaggcatcggcgcggtcagcctcgtggcgcgcccacgcccccacgccggctcttcccggggtccttccgtgcgcgttgatatgattggccggcgaatcgtggttctcttttcctccttggctgtctgaagatagatcgccatcatggtgagtctccctgggcccgtgcagtcatctgccgcgtatccgagccatccgtggtccctgggtcccagtacttgagctataggcacgcgaagcccggttgctcttctctggccgtttctgtcagaggatggttgtcgaggggctcggggctgttggcagggcgtccgggctggcgggctgcgctgtagacccggacacgctgggcttcgggctccagcgcctgggcagtgcaggagctgttgcgcttgttgacttcgtggagcacggtggatgggggtagggggcgggcgggatagatggacactgggaggcacatctcgtctgcagttcctcattgggctaggtaggcggcttgcaggtgatggcagtacaagaggtgaagaaggtgcgggcagcgcctgggcgagttgcggcaagtgaaaccattcccacgtgtaagctagaaaacttgtcagctggatggatcttcatgtttcatagtggggaaacaggccctggaaagagatgttataaaaaggtagtcctgccctaagtcatgcgttattagctcctccagcatccgtttttaactttaccagcaatcttttttttttctccttacctttgatccgttactttcaagaattgagtaccactgacgtggatttaatttggtgtggtttctcaaagtaaaatggagaaagtctaggaagttatttgctgccatgaaagtctcttgcgcctcctttttggtaaaattgttagcataaattgcttaatgcccacattttttgttaggtattaagtaaaggtgcagttcagtccttcagaagggaatatcgttttctctgatctctgctatggccattctagaaggatagattacatgtaggtagtgagtacaaggtttggggcacatttgtgcaagacatgataaacacagttcattgagtgacctttatatgagccacagcagtttttaccccagagaagtgattctcaacccggagtgatttttctcctaagggaacagttggctaagtctggagacatttttgattgtcacaactgggaaaggtgggaagtgcttccggcatctagtggttagagggctgggatttttatagttattctaaaacatacagtccccacaacatatccatatggaattatccatatggaaatatcagtagtgctgaggttgagaaaccctgccccagagatacacataacctagtgaagtaagttgtacagattcatgtgtaaaaccattgtgttttcctggtattttatgtattccttaggtgtatcctgtgagtttggccttgcccagtgggttttatttac

SEQ ID NO: 54470 - DNA, 581 bp, Homo sapiens
attataggtgtgagccaccgcgtccagccagaacctgtgttttgataagctctccaggtgattcagatgcatgctaaagtttgagaaccactgagcttagggaaggggaggatattccagagggggacagctgtggagacccggtaggacagtgctgtagactgccccatccctgccttttcacttggtgaaataaagacgtgtgatgcactatgcagactcccacaagggggcactgtgggcacagacgtggaagcggtctgctttgttgtcaagaccgctacccttgtggaagcatgaaaaaagcttgatgccagatcaactggagaggtcactctttcttctcagagaaggtctaatgggggtggtaatcttgtttataggattcggccctcgtagggaagctgaacctggagggctttctgctgttcatatgtgcatggtgatgtctacccatccgtgctgcgaggtctctgcagatcctgtgcaaacagcattcccccttttgtagctgcccagccaggcagcttgcggtttctattgggggaggtgggggccgaaggctgggaaccccagcagcc

SEQ ID NO: 54471 - DNA, 762 bp, Homo sapiens
catttggtgagagggttaagaacttgctgatgtaagcattgtttcctggccatgtccaaatgcttcccaggtagagggcaatgggtatagtgaccatgcagcctaggtgcttggatacatttctaatccccaatacctcttctcaccatccctactggtatctataagttcagatcaagttatatgccacaattctaggaaagaaaatacagtttttatgtatggaggacagaaatatgtacatcggaaataggatccctgttaaatcagaaagaagcccctgccttctgcaggttgcaggtgccagaccttgaaattcattggctggaagaagacagagaaggagcatcatgcaatttgaagctggcaagtctcagagttggtgaaaatcaatactgggagtggccaacaaaacaaacacagttttagtggttgatgccttgtgaactgagcagatctgccgtggatatccaggtcagagagaagtcagaggggacatctgatgttctgcctgctgcgctgccatcttctggcaatgatgtttccgttttcctttgggaattcatcactttcctgctctcaggcagtggggttggactgggctggcttctgtcctctgccttgaggagtggatgtagaactcaagcctggcccaatagcatctcatggattggttgtgaaatgagcctacttgggacaaaaaggatgtgacttggggcttttgctggaactctcttcaagtaaggaggcttctaagcaggg

SEQ ID NO: 54472 - DNA, 4903 bp, Homo sapiens
cccctacagacctgctttatcagaaacttcctttctcctttgccctgaatgacccccacctgtgcctctttctgatactgaccttattctggcaaacccagctccttcttgctgtaatttttaatgggaataagactgctgggagaagccctctcccatctctttcagttttccatgttttcttccttaacaaacaccccactcataaaacctttggggtcttttctactgagggttgaagcctgtagatgctagcagagcagctgcactgtaaagagggaggtgggttcctagggggtggtcctgggcccagaaggtttctgaccatcatcgctctccccttggacctaaacagggctctttgcttgttacaatagtaggcatccattgcctgcccaacattcacctcccttttctggcagcagaacaccttttttctcaggaatttactccatccccactttgagtccaggtggattgggtggattaactccaggatggacatggacccaggcctggcaaatcagtgcatcggattccccttggccacagtaattggttcagggttgggtctatgggcaaagtccatgctgggtcttatatggggttgtacagaggaaagaactctctttctggacttgctgtcaaactggagtttttggagtccaagtggggagagtgtgctgagagtgagtgtagtacaggggaaaaacaaagccaagatgtgcaccagagagaggatcaaagagtgagagagagaaaacaggtccagaggatggggtttgagcctctggatccagccggacctgaagccagaagacctacatgcagacttgtctactatatgaaatcttacattctctttctggattaagccagcttaagctgcaactcagagtcttgactgatagttgacttggtgctgggaagatgagtctctccacagggatgcctgagccacagggagactgccgtagtcagctgtgagctctttcttgtcctatcagcacagcccagatgagttctcaccaggaacaggtacacaacagtcataaactgacagggttagtcataggcccgttgtgctctgaaagctttgtcagaacagacacacatcatttgtccccttccacaccccgctagcagctctcagcatggtcctcagtgaatgtgctgtttgtccagctgattgaggggcagcacagccttcctcaccactcaacaactgcctgcacactctcctgccatcctggtcttgtcagtatcaccccaccgacccagtttccaagttagaagccgtcgtcctctgcctctttgatgtaatccagcctcttactgcttttccatctccaccaccacctgcttagctcagacctcagcctttcttaggaggaagccatttggctctggaactgacacctacccaggttggcctctgttccttacctgtgaaacggggatggagcactacacttgaaatgtgaaatgtctccaaggatttggatgtcaggggaatgtaatggccctttgagccattatattcaaaaggagcagaagaaagacacaaagtcacctgcaagaggcagtggcccagaaagcttagacatcacctcctgaatgtacatgaaggccatgtccatcagaagggagccttggcagccaataggagcacagaaaatgaggcagcccagaggcacgctttcctgtggaatatctggactgcattatgggcttctgtcagttgtgaacaagaacacactagagcctgatgccactggctcctccagcaatgtccgaaagcgttgacttcctgtgtttgctagccaacagggaaagaatgtgctggtcaggcagtgcaaccgtttgcaatgagtaagctggcatttgggctttgttcatcgtccttgtgagctatgagtcagcatcttggagactgtgaagtctggccatcaatgacactgcatttctggtttgcagggcttggtcaggccctgaccccaggttctcaaggtcaggagtgtatcagtgtgatctaagggctctacgccctgagattctgattgatgaggtcaagtgggaccaggcccttctactgaacagctcctcaaggaggcctggtgcacagccagactgagactcagggcctgtgcatggttaccgcacctcccctggctgcctgtggacccccttttctgcctcctttgagccttttcgcttggtgttgctgattgactttcatgttcacttgagtaatttacatggagcctgctttaattctcctgagaccccctgtaggctttcatgaaattaaaccctcaacaacgacattagagaaggaaaaagggcctctttatttggaagttgtgaacaaaaagagaacagaactgctggcagttgttcttcatctgaatcttctgcttctggctctgtagttggatcttgtaccaccggggctttgcttccaggatggggtgacttagggtggatgtaattgtcatgaccttctgggggccaggatttggccggaatgaccaccattccaattacttggctttttgctactggaaaggctgtgagttggctctctaaggatttctaaatgactaaggctgagcacagaagcagcaccccaaaatcctgtgcaccaaggttggggatgaatcctcctctgatccttctcccaagacttctggatcaagagtgggtttcattcatttggcccctctgaggagacaagtggagaaaggaagttctatttactacagggtctgtgactttatgcgacttagaagggtacaagtatgataattgtagaaagcagaacatcactctggctaggctctgttgacttggacaaaatcatctctaatctatgatacatcctgagccaaactatactcactgttggaattggggacatcattcgcatggcctcacttctgttgcttgttttgccctctaaatctctgctatcaccttcacctcgttgactttgcagttaacttctcttgctgctttgcagagaaaatagaagatgttagatggggacaccaaccttttgctacaaaagtctgaatgtaaaaacattgtctgcctccttgtcctggtttcactggcttctgactgaccaaggctaatggaatcacatgctccttaagggtctaaagggtcccactcattgctctatcttcaaagccattcccatcaggatttaggtatgtctgcatcttgtccacatttacaatggagttctttcttcccttccctttgcagcttacccactagcttctgccttatcactgtcttcccaactcacagtcaaacttattgagagaatgagctatactcctcccacacagtcctgcatctatttcaacagggtttctgcctatactcctcccaaatggatctgaccatgttaccattgccctccacgttcccacacccagggatacttcagtccttactttacttaaacctgcagaaacgtttgacaccctcaacagttccttcctgcaaacatctttccttggttttcatgacactgaattattctgattttattatccctcctcttccctttcagtcagggaatattctccctctgcctgttccttacctcagtgatttctgaggtgtctaaaaatcatccagggtggttgctagaatgcaggtcagatctcagccccaacacctcatacaggtgcatcatgacttctcttgactgcttagagtaaaatgtgggaagagagaagcaaattaaatatagaatttatactcaaaagggaagcagaactcaaagagttggagaattctcagcctgtaacacctgaaaaaatgtgttcaggagacagcatctacaatgtggctaagcgactgtttgatcagattagtagggacagaaagaagccagatgctttccatcaggacactggaagaacggccctaaaggtattttggagatcttcagggctgccacatccatcacaggcccagagtgccagggccttgagggtggtagaactgtttcaagggaggggctcagtgtgcctgtgggaccttgggcttgctgcccagagccacctccaatttttgcttcatacttctggtgcagtgctctttagccaccccagctgaggctcaagtgtggctcaagagggccctggtacagcttgggctgccacttcagagggcacaggctgtcaaccttggtagcgaacctcagaggcccaacccctgactcgttgtgtccagaaggcaggacatggagtcaaaaaatattcttctcaagcttcaagatgtaacactgtttgccttgctgggttttggacttacttgggatctgttactcctttcttttttccagttgctcccttttggaatgggaacatctatcctatgcctgtcccaccattgtattttggaagcacgtaacttgttcagtttcacaggctcacaggtagagggcagtttgcctcaggatgaatcacacctttgagtctcacccatatctgatttagatgatatttagatgagacttaggactttagacttttgagttgatgctggaacgagttaagaattttggggctattgggatggaatggatgtattttgcatgtgagaagaacatgaattttgaggggtcaggggtagaatgttaaggtttgaatgtctgtgttcccctaaaatttgtgtgttgaaacttaagacccaatgtgatagggttaagaggtggggcctttagaaggtggtaagtcatgagagctccaccctcatgaatgggattagtgtccttttaaaaggacttgagggaagcatctgggccccttttgccttttgtccttctgctatgtgaggatgaagcagcaagccaccctcttgcaagcagagttgatcagct

SEQ ID NO: 54473 - DNA, 1328 bp, Homo sapiens
ctcaaagattatgtggcagaaatatacatggctgggcaaagcctaacatatttacttcctggccttttagagaaaaagttgacgactcctagcttagggtcctgaggtccaaggaggaactcctggtcctgcacatcttcatcctccacatttggtggtcccaatgctgcatgcgagctgtggctgtggactcaaagcactgtggtgggggacattttaaaaatgagctgtaaaaatctgccacacttagggcactcattttcccacttatattttggggggatatctgtacccagggaaaagctcagtgatccttgttggatttctagggtgaagggcttttatctcagcatggggtcaagtgcagctatgtgtgggtggcaatgaacttcaacatctagcgtgattcccctgcaaattggaaggcaccagtgccaccccaggcaccagccttgagtgtcaggcatagtgccaggtgcacaagaagaaagcaaggtccctgcggatctcatacagcccagtctggggaagcaggggagcccctcttgggtatccgagttggaagaagaggctatgagaatgggaggaggggcagggaggacagccaggaaatgcaggcggtgacacctgcgctgtgccctgagagatgaggcgttacgcggacttgggggaagggacgtggggaagttggtgctggccaggcgcggcggcgggaaaggccctgggcaaaggggcccagaggggcggcggaaagtggagcggggctgtaggtgtcagcagagacgcggctttggggccggcacggcccgcccctcggcccgcgcggccattgtctgcgccaggcgccgccttggcagcagaaggtgacatctggtgactaatggccgcggctgcgcgccgcgctcctccctcccgcagcgcccggggcgcagctgccgcgccgcctcctccccactcttctcccctccccttccctccgctctgtgggccagcgcgggggcgcggggcgggcaggatcgatgccctggtttccgaagggcagaggccgcccgacctccagccggccgggccgccccgccccgccccaccatcgcgcatgcgcgtcctccagagcgctcccttggcagccagcccgcgaggacgcggctccccgccaggggcagtgcagggaacagtcatgcctccctgcccccggacggcctcactagcggctgcaaacaccggcccataccggagcctatatgcatgtgcattaactcgcaggtgcacgaacccacggtcacacgtgctgtcatgcattgtacacctgtgcttgttcatgcgtgttc

SEQ ID NO: 54474 - DNA, 503 bp, Homo sapiens
atgaagcctgggcacgtctgcaggaatccagaatgtgttgccacccgggcctgtcttctgcatttccctacaaaagtgaccagcactgaagtcaaatggacagctagagaggggaaagggacccagctctgtccctttccaggttgtggcatggtgcatggggcttgactctgtgggcatcatctgcctatctgtgaaatgaggacatgactcttacctcctaggaccactggtgagcattagtcattcatcaaacaactactgatgggtattgattgcctaagttccagccactattcctggaactggacaacatcagagagctaggcaggggctctgtgcacacgcttctccctctctagcgaggcaggcagccatgtgacaagcaaaagagaaacacgcaggatcatttcacattgagataataataaacagtgcagtgtgagggcaagtgaatggtgtgcgttgggctgggagctgtttgaggatgagagggaggcagg

SEQ ID NO: 54475 - DNA, 2094 bp, Homo sapiens
aaggaggagaaggagaagggaggaggaggagggtgaagaggaagagttccagtggcatgagaaagcagggctgagtctgggagttggattccctcttgtcctgccctgtgatgtggtggcattaccttctctggagtctccaatcctaagacactagcctgaacatgtctcagcaatttttcccccatggatttgcccatataccttgatggatcttacgatatttgccataaaattcagggtcaatggtcatcaccattctagagcgagtacccatccaacctggagcaggatgggcagagccagggcatggggctgaggcctggtactcaacctggggagcagaggatgcagaaggaaaggagccgatgggctccaggcaatctcctctctccacctggtctcccaccagagggacagagtgtggcctgggaggctggaggtctgggtttggcccctccgaagagacccatttcatatgtggctttgggctagcctctctgttcttaggctccccatctcctaaatgagggagttggaccagatgagttcatcaaagccactgggtaccagccaccaggtgccagcctcaggtgctgaagatgcacaaagacacaaagacaagcccatagccctcccggagccaggtagcctgctacaagccaggcttgttcacttgctcatttttcctgcctgaaatacatttatttttttctcatgatgaaagctactcatgcttattatttaaaatatatatacagaaaacatggccaaggaaaacaaagacagaaaaatgatccccataaatctcacccactcagagacaaccatgtttagtgcttggattttcttccagaccatttcctatgactagggacactcatacttaaatataggaacaaaacaggatcatagtgcttattttttctgagtcctcacgatcattctatgagtcagttagtagtagtatttttactttatatatgcagaaacagagactcaaagaggctgagtaactttctcaaggtgacaggactgtgactcaatgccaaattcagctgacgtcaagtcgaaagctctttctcaacacccttgtccatgagggagccaggtaggtaaatgacggattgttccagcattaaccaaacctcacagaagctggagacccatgcacttgttttaggatagctgagtaaaggtcacaagcaagtcagcctttgaacggtgttcttggaaacaaggggggctttgtcaggtggagaagcagcaaggaaggtgcttcaggcagatggaagaaacaaacaagtcaaaagagtgaaggtcaatcaagttcatggctccctcagtacaagaaagcagccagggaaattggatatgcatagacaggagtgtgtgtgtgtgtgtgtgtgtgtgtgtgtgtgtgtcaggggaggcaaggggatgtggcaggaggtgagcttgctggagttaggctgaggaaggccataaaatatgctgagcagttcaagctctcttcttaaggtgatgagagctattaagggttcttgatgggatatgaatggatcttttagggggacactctggaggccctgtggagggcggattggggtaaggggagtcaatcatctgattctttgatcctctttccaacctcaattagcatccccaggaaagggaggcagaaagagtggggagtgaggtcccatgagtcttgggaagatggctggatgcccaaatactccatcttataaaaggctcacctcatgggctgatgaggagggaaatgaagccagaggtgtgtggtggaactgtgaatgagcccaccccttagagggaggaagaggggaatgagggactgatttaatggtattgattcctgctgtgtcttatttctgaaactctgctcggctgtctgtgccaacatctgtttgttccatctccagcatgaggcagggcccctttctttccaggactgggttggcattgcttaagtttgcacttgggtggtttttttctgggaggattgatgtcctgcactccaatcagctgggtcaggcatgcactccaccttctacatagtcccatagacatcag

SEQ ID NO: 54476 - DNA, 4248 bp, Homo sapiens
taaccccagctactcaggaggctgaggcaggagaatcgcttgaacctgggaggagcaggttgcagtgagtgaagatcatgccactgcactccagcctgggctacagagtgagacttcatctcaaaaacaaaaaacaaaaaaacaacaaaaaaatgggggggtggatggtggggaatttggacagggagaccgacaagcagagagggagacaacttggagatgagtggggagcagccagctgtgggactggagcacgcatctctgagccgggagattgaatgggccagaaagatcatcccctgggcccgttaggggaagcgcggccctgcccacaccctgacttaggacttctggtctctagaactgtgagccaacaaattcaattgtcttaagcctctgagtctgtagggtttgttcggcagctctaggaaatgaatgcatccaccttcgtcctgctttccccggggccaggcaaagtgaggagctggagaaaagcagaccctctctttttggatggccactgctgccacctcagttcaaggagaggctttcaaagtctctgtcaaggcaggtaccccagtgctgggtgttctgtggaccctcctctgtgacccccggggtgggtccccatcacagtgccagaaactgctcgccttctatggcctcttttcagccctggagaagctcacattctctttccagggcaaaggcgggcctgcaggctgctgcagctgcccttggcctcaccccactccggccagcctcctgtcctgagttctaaggtgggacaggttcagttcctactctaagtccccacccccttcccccacaacccaggggacatgtgataaactcttctggaaatttctgtgcctcatggtgggcttggagtttctgcagtgcaatgggcctccaactggggaaggaagcatgagtcttctctctgtacaggcaccccaatctctgcaagaggttctctggagcccctgctagtagcttacaggagtgcacggagcagccgagtcacagtattttacgtaaagtttcctccacattcacatcaattctctttcttctgcttaagcagggtggatgtggactgaggaggtgaggagcaggcagtgtagaagcctcttaacaaatccaggaggaaggaacctggtagctataccccttggatggtaggggcatttgacacccattgtcctgggctttggggtttcagtggaaggagtcccactcctatccagtcccttaggagaacaagtcctagatgtaagagattggaaactccctgagcacaaggggcatgggctctgttttcctctcccttcacgtacagctactaggccagagagagcccaggctctggagtcctgtggacccaagttcaagttcctgctcagttacttacccagctgtgcatctcagggaagtgacccagccttttccagtctctttcctctgccggcttttacgtgggagtggaaggcaaggaaaaaagtgcctgctgcagagtcaggtccagggacacaccagcccttgcccccacagcattttggggctggccccatcctctgaggatgctggaagcatgcgggtgacactctggtgaaggctgtgggtttctcctccagcgaagtttgttataggattcaggttaagaatctctgtctgaactctcagtggcttatcaccgaattacacgaaattgtttggtaaaggaacagcagaaagagagccaaaagatattggtagctgattggggtccctgagtcatctgagatggtgactaagtaacccagcactttgaaaagcctggacctaaattcccaggggaattttttccccacatgcccttcccacaacatactgggctggatccaatcccacctagtactgttcaaatgcaatccctcttgtgcattgagcagtgtgctgtggcgcagtctcagtgattcctaaagttgactaaaacatgccttctaaagggaaagctatcattgcagacccccagtgttgataagaattattttgatcatattgttacttaaatatatacaaacataaaagtaagtataaatctcttatgcttttagctcttacacagctgtaaaaccaaaacacaattacaaattaaatgcaaataaagctacaaaaccattaaaattcaaattaatggcattaatttaatgtgacagatgatgttttgctgaaagtaaaacaaccaacgttgggtttaataatagaaggatacattcccatttaagttccgcttgttatcaactagatcattttgatgtttggacatgctagaccatcattagagttattatcaatattattatatttttcatgtattacaatgaacacacttctaaacacagacctagaattttgatgaagcgatcaacttaatagagcacttcaaaatataataatttaaaatatatagaaatatgtaccatttagtaagactatataccatttaccatttccagctgctagtgttgtcttgcaagttgttgcaaaccaaggtggcattcactcaggcacctgcttgcaaaacagtgactacaattctaccagcttcaatgcagagcagcttatttgtggcatgtctgtgtcccctgttctgtttgatgactcaatcctccctccacttatctctgtttgaacaattgctaaacctttgtttgtacagcagtccatgaagtcatttggccttcattttgcaaaaacatgatagtaaacccaaatgcaaatgtgaactctgcattcctgaagcattagttggtgataatatgatcatccacacacaaccccaatagggtctcactgatatttttcaatttttaaaatgaaaatatcagaataaaaaaagactctcatatcactcaagggcccctgacagtacatctgtggatcccactttgaaatccctggtgcagtgaaaggaggtctggcctgggaacccaagactcgagttttcgttctaagtccctcattgacccactgtgttctgtggaccaatttccccctttctagacttcatctgctcatgatcagtaattgtcttgcattttggtcatcatcacatttatctcacctgatccctccctgaggtcggtatgactgtcctcaatgacagatgggggaaattgagacccaggtacacatctggtgagtgaggggatggggttaggaggcagagctggctgactccaaaggcaccacatggcggtgattcacaaaactgaggcgcccccagagccctgccagatctctcaggctgccctggagagcttcagtctctgatgacccatgtcttgggacccatgcctcctctcagccacacatacacatatggtcccaggcacagccctggagaaagtgggagaacagccttgattcatcctcatcatcctccgatgaccccaccagcccagtgttcagctctgagacaacatccaccaccccagtgacaggggaaatttccccagctaaatatcagacacaggtcctgacaactgaagttttctgatgggtaaattcatgtttgtttatttattttgatgaaaagacaggtctaagtctataattcaaatcccattttatacacatgcatatgtatgtatgtatgcatgcacacatatataaacatatatacatacatgtgtgtatatacatgtgtatgtgtatagactttccttggtgaaagagaatgaaatttgcttgaattggagctgtgctggacacaagatttgtggttgcctttttgagctgaggtatagctccactagggaagagtcttcagagagcagctgcctccctgggtcctcaatcactaacctctctaatctttggtgccagtgagactgtagcttgggttcctccccttggaaaccagaaagactcctcatcttatctcagaaggccctgcaggcaccatcactcttggaatcctccctctttcagaattgatgtgtgtgtgtctgcagccttgacatgtagagtgatgtccagggctttctggaattctggttccagtgggaaattcaacttggttctaggaaatgatgccattggattcattctattcacaggcaaggaagcaatctttagggaggacctgctttaacaacccatctttcctccttatggatcttaagtttttaaaagattatttcttctagagggagttaagtgataatgaactcattctttcatttttatgaaacaaagaca

SEQ ID NO: 54477 - DNA, 565 bp, Homo sapiens
ccagtggctctccatcctaatggcatattagaattgcctgggaagcataaaaaaaagacctgacacccacaaaatagactccccagagagtcttttcaagtcttctggaaaggggtcttggaatcagagattgtatcaaaagtacactgggtgatactaatgtgcaggcagatttgaaagctgatgggttaaatagtaggtgagacacagctgaaagaacagtgatgtttaatttggcaaatgtaagtgtcaacacctgactcaacacataccaactgcccccaacccaggctgggagatgcagtgtgggaacagttcccgtgaagacaactctgagatctgggtggacccaggatcctttgtgtggtcagggttctgcagctctaaagaatgcttaggagagagaggtgagagtcctgccctgcattcctgagagagagctgcattctggaacctctactctaagagctacgtggacagtgggaggtgtctaggccagtgcttcccacacttcatgtggccaggaaacatttggggatcttgtttttgttgttgttgttgttgt

SEQ ID NO: 54478 - DNA, 1006 bp, Homo sapiens
tgaatcaagatgttaatttttgcaaacctggcttagtcctccagtcagctcctgattattctttctttccttggcaggaagtcacggggtgactccaagcagggccccctttgcattcagcctgcccttctctcagcccaggtaagttcacgttagtcaagaattccagcattctctttctaacacacactgctcggacctgacacccctgcactgcatttccttgttgtttggtctgcgtaccatctataccagagtagattcagcaaacagctgctctcctttcgtttcatttcgacaagtctttattgatcgcgcattatttgctcatcaaacagatctgccgtttcaaacacttacagtcctggagttggctccacgtttgcctgttaaatctgtatttgcacacgttggagttggcagttcagctcaataaagacaaaaaggtctacgtgctggaagtaggtgtcttggtgagagtttccaaagcatggggattttttagactggctgaggcggccttacctaccaaagcctccctaaaccatgtttatccatcatttagatattttattactagatgtatcatttcatccaggatttgggctattgtgctgcagcatccagtcagttgagtgctaaatgacaattgggtaaattagactttcagcaaggagagttgtatgttctgtgaaacatacaggaagagaaattatattgtgttctgtcctctttgtatgtctcaccgaagctccaggaaagaagctgccagccggcactcaccttttaattttgaaacagcccttgactcaccatcattcattggcacatctcattcacacacacttgcccttctgattggaaaagtccctcctgttttcacaatggaaaacaagcacttgagacctactaataatagggaaaatgaaatatctgcctcatgcttcactgtttataaaacccttccaagtaggttatttcatgccatcctcacaatagacttgcc

SEQ ID NO: 54479 - DNA, 1078 bp, Homo sapiens
tcagagtttacaaagcgctttcagacgtgttgtatttctcctccatgtcctggcttatgccaggctctccagctcccctttcaacccaccctccctgttcctgctccatgctttctgtacctggaatgccaaactgccagatgtctcatcccctagctgtgccatgtgcacaggtgcctacctacacaggaatctgcactgctgcttctcagccccatgcctgggttgcctccgtcatgccttcctcacctttaagacttccatcacctctggtgccgcctcctgcagccttccctgagtgctcccagccttgcctggccacccttcttccctgttctcccatgccctctgtatctctcagtccatgcagtcaccaggatctgaatgttgaccttgctcctctcttggctgagtgtcccctgtagagcagggaacagcttcttcctaggcagacactggacccagcaaagagcgtggcttagagtctgtacccaagaattaccgggcaaatgaatcccctgagggtgtcattgtccctattatatccaccaagaagctgagggtcctgagggctgggtgatatgttttgtgtccccagtgagttagaggtggtgcctaggctaaagtccaagttgggtaattcctggcattcctgtttgctatggaacacgaattagatgcctcgtggaacacagagactggggtgtatttgaggttatgcgtgttggtgctggggcttccttcccctcttagaagcagagttgtcttgaagttaaaaaaccatgtgatgtggccccattgcccagtattctctgtattggagcggaagtacaggataagagtctccactttatcaatgcttatggacttcagagtgaagagatcaaccaggaccagattaaaggaaatacagttaaaggaataaagttatgtcaactcctttaattaatgtgtacatttatagtctcaagtatacagacactttctatttaaaaaataagatgaaattatgaaagggataaaataaaagtcaaaagacatgcttcaaggaggaactaaataaaatagtaagagctgc

SEQ ID NO: 54480 - DNA, 462 bp, Homo sapiens
aacttaaaagctgattttaccaatttcatttcactgtaaggcctcccaaaggattaacatgttagtgtgcaccccctctcgcaccagcacacttgcccacaaaaccgcctcccattgtttgaagggaaacctacaagtggatccctgcccccacccccacagcactttctaattcaaatcatctgccattcactggctttctgccctggggcaaatcctccaccttcagtcctactttgatcctctagcccaggccgctttcatttcacagttgaagtaacaaaggttaaaacagatgacaactatttctagagagctgggttttttgccccctcaactacgcaccgtggtgaggcgccgaggaggccacatcacaaggctggagaaccctgggagcttggtagtgttggtgagcgagggtttgttcttctctagcccactatcctaaaggctgacttccct

SEQ ID NO: 54481 - DNA, 1592 bp, Homo sapiens
agtcacttaatgtttgctgagagaatggatgactgttatggagatttctgatttgtttacttaaggggagttctccttatggaatcataatggccacgattagtaagatcaagaggaatatgcagactaaggctttgattttaaatcacaaggaaatacacaagcacatgataaaattttcatattagcaggccagtttgaactcaacgtagccaagctattctcaatgccacctgtgtttagtgtgacttcgaggtcacagccagtccaagatcatttctctgagtcaagctcttatatcaccagtgaaagggctcttgtctgaacgcagctcatgactcacctcttaactttcaaactgagagcatgaaaattctcaaatgagctagaggaggttatctagggatagtcagagagagggaagaaaaggagtgcctatctagttgctgatggaaacagactgattaatccagatacaaaaaagacatttccttaaacatttctgaattcagaattgtttgctatcaattaaaatgttgagatgatctctttttttctaagtggtggcttcaccctctcctgaaccatttcccttccagaaaatcaagaccttctaccacattcactccgcctcccagttcatgattcagaaaatgaagtttgaaaaagcacctaaaaatggaagaggagtgaggagctctgcagggtgaggcccaacatctcgccacattaaccctgcgaactcagccccagtaaacgaggctgggagccattaatgcctaatgatgttgcattgtcttccaataacaaaccatctcaccagttggttttatagaggaccagctgttgttaattggggaagatgagcatgaaatggcagctttcacacctgaccaagagagagctgcagcatcagggggcaggctgagcctctcctgcatgcaggggggctgcttagatctgccttggtgaaggggagatgcagacagtaccctggggttcccgctcctctcacatccttagggggcagaaagaataggagagctcaagttcctttagcatctcaccatctccttcccaagcccagtgacatcccacataccatgctgtggcatctttgtgtacctgtgggagtccctctagcaaagtgaggggcaactcaaagctaggggcccaacattgcaccccgagagcctggcccagaatctgacatagtccagactctgcagaggaggcatggccaggttctttaccactgaccctagtctctgctccctggacacaggtgactggcccaggaatagacagcagtttataggctaccaacaaccagtgacatgagggcctggctctcacataggagctgggtcgatcacattttctcccttggcatttcatcaaagagacacaaaaagagatggtcacctagcagtaggctcaaatcaaagggagtagggaccacatctgtgatatagagaggttagggcagccatggaaggagtcaggattaagccagctggtccatagggacaggaaactggtgtgcacacttgagaagggacagaggtgtcagagggagacttcaagaaagt

SEQ ID NO: 54482 - DNA, 1407 bp, Homo sapiens
aacccacagaagccatgcagaagccaggcctttctcccccgcttccccttcctctgcctccgcctctgctctccctggctctgagtgccgcggaccctcctgcccctcctgccttctgcttgctggcctggcctggctctgccaggccctctttcagcacctgcacccctgcagctttcaactgttggccaagtgttgtgctgtcaccaagttcgaaacgtggctacactattttctctggttctttctctttgggctgagccaaaaataaaaagcagtcacacccaaggttcaagttaaacgcatgtacttacttcccagtttccttctccttgacatacatggtatgaggaagagggccagagtgcaccccaatctcacccaccctgcaggagaccacacaagccaactgagggggcctgccacccaggtagaattgcaggacagcttcttctggcccagggagagccacctgctctgtcatcgggcccaggagcaggagtagtacagctgactgacttcccacatgtccaggataggagacatgcactcccttttcttatgagctaaccagactcagtgtagctgcagtttctgttggtgccaccagatatactcggctactttttctccacttcttcccaagaaatcacacttactcaagttttagccaagagagccattatcataacacaaatattttagaatgataagcctagaaagttctactaaaagttttgacgatgggtgcccatctgaaaggattgtcattatgtgacacattgagtctggaatccctggcccaataaggtgagacctgggccgttccccagctgaccactatccaaagtccaacttccacagcttggcgtggctccgatggacagtagcgtgaagagggtggattgaaaatttcgtgcggagcaactgactggaaaacgtacttagtgtctcttttttcgtggtgatggctacagatgtgccggaaagtgctggaaacattcttccctttctctgccttcaccaaggaggaaacggtgcagtgtttcttaaaactgaagaacttctccccaggggatttaatttttttttttttttatgtttctgagaaagatagtataattttctagcccctaaagaaggctttttagtttacaggaggaggactatcaggaaggtgagtgcaggtgatgtgggggaacatgcaggtggagactttgaggcagaagagaggaggagcagggaccctaggctgagctgggcaaatgccaccagcactagaggctggggtggggtgaacggctccccggtatctgaggctgtcgacaagccttgcattctaaagacgttagcaacagggcatgccccaccagcaaggagcatcttccctgtatctgaggctgtcga

SEQ ID NO: 54483 - DNA, 1044 bp, Homo sapiens
ctactccccaaacatttactgccctcacgaaccttctagtccaaaatgagacacagtcaaggagagaactgacatttacaccaccagaattaggcaaatgccaccaccaagacctgcaccaagagctaagagggccctggccatgtgggataagctccccagagaaaggggcatttgggctgggccttgaaggctgagcaagagtctgttgggcagaggggacttgcaggaagacacacagtgtctctagctgacgacggcgctaggtcctgacgttgttcagtgctcctccttgccatccctgctttcacagccttctcatcttaggaaaggcccagagcgttctgggtctagatgtcactctgcagccaaggtggcttcctggcacaaccactccttgactatcagctccgtaaggccagggtcagggcctgtctgtgtttgtgcccttgcacctggcacagagcagggcacagtctgtatttgctgaacaaataaacatttagtctttcaggaattgtttcccaagcagcagcagcaaaataaacaaggaacatttgttgagtgttatgcgccaggcagtgtgctaagtccttttcatgcatcatcttatttaatccacccaaagccacactctgagcgaagaactattatgttccctccttgacacatgaggttaaataacttgtccaaggtcacacagctagcaagtggtagagcccggattcatgcccaggcctgtggaacttcaaagcccatgctcttaacccctctgccaccagcgtctctttgttgtggcctcagcacccctctttgttccccagggggaagggctgttttgcaagcaggcctgagatgccacaaaccttccagcacatcctgccccttggcctctgacatctgtttgccatttcccctactccagagcggccaggccctgcctcctgccttgccgtaattcagatgtcagggaggatggaagccagtgcctggtgtctgagcatctgaactggcagagactaaggacagcctggtgcacactca

SEQ ID NO: 54484 - DNA, 1377 bp, Homo sapiens
taggctgtagaaattttgtgattggttctggaattctgcgttgggttccagaattcatggatgggtctagaacacagacagactttttctgtaaagactcagatcataaatattttgggatttgagggccatgctgtgactactcaagttttctggagataagaaatgaatgggcatggctgggttccaataaaactttatttacaaaaacagaaagtgaaccagatttgacctgtgagctgtactttgccagcccgggtctacagtgatctgtgtaggaaagcagttttgtgagaatgctactcctctcctcagaatttaactctccctctttgacaccctcctatcctcccatctcccacccactcacatccatacctctttctttacccagccaactcaaccttccaaaaccagttagagtcagctgctccacgagcaaattgcagtcacttttggcccttgcctgcctccctcacagactgtgagatccttccagcaaccagctatgttacccaaggccctagcccttagtcaatgtttggtcaatgtttgtagaatagatggtatgaaaaaacaacaacaaacaaacaaacaaaacaaaaaacagaaaacaaaaaaacatcccagggagccaggacattgtcattctcaggaaatctgtgagctgggatcgtttccaaaatctcaggtctgggcaccaatcctctagttataagctactccgtcagggcttctagaaccatcagtaggcagcatctttatagatgcaggccaacttgtgtgtccacaacccaagcctggggccaacctgttgtctacataggcgtggtggtgccctgtggcagcaggccagatgggcaggagcaggtcagcggaaggctataaccttagcgagaaggtgacagccacagcacccctccctctgagggaaggcgccccatgtgatcaagcacatgtgttcctgctcatgacagcgcagcagcctcctcatgccaccctcggggagcctcagcctcctccaggctgatgatgtggaaacttccagaagtgcagcagcctctcagctttcccatttgctagcttcccccatcctcctcctgggcacagcagacaggcagaaccaagttgtgtaactcacctctgagtcacacttcccctgtttcccccagcacggcatctgctttctgcctgacagagccaggcttcctcgggacagccagacaggcggctattgttcaaaagtcagggccggtttgatgggctctcccgcccccagtagatgagctaggaagatgtcacttttaattacaacggtgagggaataggtataggtgtgtgcgtgtgtgtgtatggagcagggttccacaggcttgt

SEQ ID NO: 54485 - DNA, 1534 bp, Homo sapiens
gaatggtgtgaacccgggcggtggagcttgcagtgagccgagatcgtgtcactgcactccagcctgggcgacagagtgagactccatctaaaaaaaaaaaaaaaagaaagaaaaaaagaaaaaagaaagaaaatcggagacattgggaggtaaagtgacttgcccaaagtcccaagtcccagaaagcccaaaggttggaccagagcctagtattgcctaagtcccctcccctttctttgcctgctggctccatttcgccacatcctgagagtagccaacgtgtggggacaaggatatcactcggcatgcatggacctttcccaggcagtgtttgggccctgactctcatatcttagagaaaactcaggccttggtatctctagagcagcctgtgtgaccctggtaagcccctcctaatttgcagacctcattctcccagttttcaaaggatagggagtggtgcctcccaccgaacgaatggctgaatggagaatctgcctgaagtgcttgctactcaggagacctgacccctgctggttctcatagcaggacctctgactcctctccagcttccccgtgggctgtggctcatttacagtcctgtaaacagccccatggagagcatcctgacaatcggtagaaggggaggagagtggagacttcacacgggcccacccccaccaccatgggattctgccaatcccaccaccagcatgaaaacattcctgtccctgaggccacagagtgtggtcaggccaggcccaggctgttctgtcccaaggtccaaggtcagagccctctcctgcctgcctggcgactcaaaccatagcctctgccccttaagcctcagctggtggcacctgccccatgccgcgtcacctggcgggagaaagctggatgagataacgtctggcctgggatccggctgtagtgaaagaaaagctctttgcacacacggctgagccttcacttatttatttatttttgtttgcagctctcagcccgactcggcaaaccaggtcatgaaggggagaagctcatgtctgtcttgcagcctgatttcccacggaaaggccccatgtttacagttctggggtttcccagcaaagagtaacactccagttggaagctcatgtggccaaagaatgtctccggatcagagaaaggcaacacaccacccaagaacacagctctgtggggggtcccaggaacagggttgaaaaagcaaagggaaaaaatatatagcattaatttagcatctactgtgtgctaggtagtatgctagagatttcatctcagctcatttatccttaaaacaatcatactgggtgggcaattctcaatcctatctgtacagaaaatttgtaaacatcatcagtggttctggcttcatttttctgggtgggccctgggcatagtatttttaaaagcatcccaggagattctaatgggcagccaggggtgagaaatgtggccttaagcagtgtttctcaaacttctgtgtgcatagcaacaaatctcttggatcttatta

SEQ ID NO: 54486 - DNA, 1482 bp, Homo sapiens
gtgctgggtagaccttcgctgttacccgggatcagaggacagagggacctgatgagcccaagagagcatggcaggcttctctcaccaggaggacagatgggagctgggtgagaggatggggtcaatcagatttccagggtcagagctggagggcaggatactctgggcagagcaaacccctcatgccaaagcacactggttaaaagattatgccaggagaggaaggagtcgggtgcaaggcagccccatccctgaccacatttcccacccgcaaatccatccaggaatggtgccccctgtagcggctcccttgcactttccccattgagtcaccgactctgattttacagatgaacaagctggggccacggtgagaaggaaagtacccaaggttgtctggctaactggggtcaaaccagttccaaaaaattgccccctgggtcttgccttggttgtgtgattttattgtccctgtgaaggcaactggtgactgtgcgagtagggatgcatttgccagtgttcagaggaaatgattaacttctgacctgctgaccttggctacctgattgccagagtgttaggcagctgcttgtcacctggaccagggagggcttgagaaagggtcagagacttccacccctgcccaagcaagctgctttcaccctgcacctgggaccatggactgtctaaactgggaagcctaatagagcacctatcccttgctcaaaaaggacaccgagtcccagagagggacagcaaccagcctgaggtcacccagctacagggacacatgcacagatgcccccagacaactgggcataccacaagttcttgaggacagaagagatgactcatgcgccaagcagccctggctgggagcaggctctgcccagcctgcaccctgcctggcatggcgaggaggggctgcagggcatgggatgctgtgatgcactgagcactaaccactccagattattaggctggattttcatacctgaccctcttcattcctcaactatagccctgagaggcaggcattgtcatgcccattttacagacgacaaaactgaggctcaaaattatacagaaagtttatgggttttaaaaatgatacagccaggattccagtgaggtccatctgactgaagtttgtatttcctctccttctccctccccaggtagtccctgccctgtcagctaatgttttagcaagggtgacccacactctaaggacagtgtggagccttcatctgtgtcccaagctgggcccaatgagagatgagggtgtcagggtcaggaagcccagtacttgggcagccaggtgggctcagagaggagggaactctatttaggtcccaaggatgagtaggatttggcaaggccccttgaggacagcacacgggaacatatttccaaaaattatccacgctgtgtgctcagaggctcaaggagagagttgagggtttggttgggaattatctg

SEQ ID NO: 54487 - DNA, 1249 bp, Homo sapiens
gatgataataaacacaatctcatagcaatggctatggctggctctgaaagctcagcaggtagtgcactgtcatagcttctaagagaaacagcaagattacatagccccttcctaaccaccccagccctcactcatggcacaattttgatgtcttcactgggttcaacttactaatggcttcttcaaatcctgcccattttttgaggctgtactcaaggctatctctatgaatcagtcagaacattaactacagagatttctccttccttttaatttctgaaacaacttttccccatcactgttctccatgtgttatctccttggactcacctcagatctgtgaggaaggtggcaggtatatttatgatttccattgcatagagtagaatctacccaaggtcacattgctaggaaattacagagccaggactaaagtttttctgactcataggtatcagtgaagtgcctagccaagaggcttgcacatagcaaataattaaccaatgtttgttaggaagagagaaagaacgatgtgcataaaaggatgagtaagtgaaaaatttgcagaatgaagtatttaaaattcctcaatatgatgatgaccttctctctttattatgatctattcaacagtcagtctaccaatgaacctgtaaagtgtttgtttttggaggaactgaccacacattgacaagcccccactgagtctaaacctaaacataggcccatccatgtggcttaagggaagatgtacccaggctgtctaccagcccacagggcacctttctaataactagagaaaggcaccaaactccccaacataagcaggcttagtgagcctagctagagttcatcctcttggcctggtgtcaaccaatacaaccacacgtggtggctctggatttattaaagacttcagactattaaaaggctgagcaataccatctcccccagagttccatgtcactctttctccttatgatagcactaggcagagactgcttcctaggagagggtgggggtgtatatgtgcacatgtgagtgcatgctcttcctgactaggagattctccataccagacaccaagggatttaggacaaatactggtttctgtaccctgactcagatggaaaaatgacattcttcaatcacacatgcaggaaacaaaccacaatattggtgatacttgaaaatttgtcacccatagaaagcatagtcattttcctattccattaaagttgttgcagtt

SEQ ID NO: 54488 - DNA, 3987 bp, Homo sapiens
atttgtctgcaagcctgggcaacatagtgagaccccatctccacaaaaaaaaaaaaaagaaaaattagctgggcattgtggcacatgcctatagtcccagttgcttgggaggctgaggtgggaggttctcttgagcccaggaggtcaaggttgcagtgaactgagattgcatccctgcactccatcaagactctgtctcaaaaaaaaaaaattgtcctcaaatggagaccagcccaggtacagccagagtatgacctgaggggtggaggcttctccccacaaggaaagatccagaaagatgctgtcacagctgtccttcctagaccagcttacctctaatggacagcccagaccccatgcttccctgggactcagagacccctatgtaccgtgtaggactgcttctgagttttcaaatcccagccaaggtccacaggatccagcacttccctgggtcatggaccaacaggcttggacaggcaaaattctgggccttgagatcagggttcaaggcagggctgggggtagacagagagtacactgtcctttcctgagcccctattccatgacaagtacattccatgacatatactcagggctcataggcattctctctttaacttttgcaacctctccatggagtaagggtcactatgcacattttaaagtagaggaaaaaggggttcaaagaggttatgtgactttccccaggtcataaagctagcagatgaaggagccaggctgtgaccccacatgcacctgcctcccagcctatgtagatcctaatcttcccaactacctgcccccccgaaggatgggaaagactgggaagtggccagggttggcctgctgtggccctggagcctgcctccctgatcagggtcacaaccaaggctacgattccagtgccaggggaccaagtccagcaagcaagccctggctgggggggctgcaggagtgagcaatcctggggaaggagcaaatgtgtgccctgcttcagcctcaggggggtctgtccctgcatgcaaatctccaacctggaactgggaagctttggcagctgggccagcccatagagagggagcagggccagagctgggaaggttctagacccagccaagcagcaggggcctgagctgtagcttgagtcacagccttgccttggtcacactagcctttccgaaggcccagccgtcagcactggccctggggtggacccctgtgaggctgtgtggttgccagggaagccagaagaaatgacttactcctgcccctgcctctaatgtcatgcggtcacaagtccccagaaggtctgggctggcctgggcccttgccctccccacggtgggggctcacccagcctgggcgcgctggtcacactcagctctggccaggcatgagtcagcactgtcagcctgcgtgtggccacagctggctggacgctgaggccagccaggccgggccctggaggtctgctggggccctggggcctcactaaaggggagaggtggccccaaatgacccacaggatcacacaagagagaagaaaaaggactaaatagagaaaagccaagtacaaagtaagaatctcaaaacttaaagtggcagacgcaaattcagagtcaggaaaattggccacacaacacaaacagacacacacacacgggtcactagcacacgtgtaacccccactccagacaaacaccatatgcagaagacacacatgccatatatacacatcctcgcagtgtccctgtgtcacgcggaaaaagccacgcctacacaactcagcagacacacactggcattcccagaggatgagcccacacaggcgccgcaagcccgccgcaggtcccgcatgcactgcctgtctgtgacagatggcttctgtccaacccaagggtccggcccacagccctcggctcacacggccatacaagtctggggacatcatgtcacgctcgcttactctaagggccctgaggcttgtgagggctgtggtcaaagacaggcctgggaactggggtcctgagcaccctagcccagcccagtcccgccccgcggaggggcccgactgagctgggccgcgcgccccagcagccccagcagccgccgcccacctcggccagcctggcttctgcgccccgccaggaggtcgcggagcggagcgcggccaggaagtgagctgagagtgacagctccccccacgctgtttgtttattcatgactcattctctccacacactggctcttctttctttcgggaggaggggagaaaggagcgggagggcgggcgggcaggggagaggcaggctccacaataaacaatgaggcagctgagccggtggggagggaggagcccgcgcggggcgcagggccggggctggggccggggcgcggtgtttccaggccggccggcccgaggcttgcgctcccgatccccgatccccgatccccgatccccgctcctcccggccccgcccggcccagcccggcccggcccgcccgccgccacctcccggcgaccgggcagtagcagccgtaattggatcctcgctgcctcctcccagctccccgcccccaatcggggagcgggtaaatgccgggtaccttggcaaaacagtcggatccaaacctattatttgactaatgggcttccctcgtgcggctccgcaacgccctgcagactcgcccctcccccctgccccctccccagagatggctcccctcagcggcgcggctccggataactggaggaagcgcgggttccgaggcttcaagggcctcattgttctgcctggaggggcacattgaaaatgctccagggtttacttcctgtgaaaacagcctgggagggagggggcgatccacggtggaaagacattatcctcctggaagccgcccagattacacagggagaaaaaggttgttttgattgttgctggctctttctttcttccttcctttttctttctttttcctttttttccccttccctcctctcttttgctaccctccccgggccaaagatgaatctttactgctgtggagcaagttggaaatgtggggctgttttctgcataaataaggctggtgaatggcagagccagatataaagtctgattcagagaaattcaaaagaatgcaggggcgatgaggtgggcaaatccaagaaactcatttccccagcatgcccctctgagtcacgtcttgcaccatgaggggaaaacacatcacgccacaatatgtcacatgcctgccgcaaaggagcaggcccggtgggagtcacacagctccttcctccccagcctggctctgcaagtccagaaccacagagagcaaagtgtcagccgggaagaggcgagggtcggtcccaccaggctccaggtcaaagccttctcctaagtgagctggggcaggaatagtactatagcagcagcgcacccttgcacagcgcccactaggtgcaggggcctgttctgcgtgctttccatatattccctcatttaatcctcaccacgaccctgcaaagcaggtgcttttactctcctcttttccaggttaggaagctgagcccagaaaggttaaggaattgccgaaagccacacagctggtgagcagggaagccaacccagcaggctggctgcggggtccacgagcttggccactgcactgacacttcccagcttcctcagacttgttattggaaagtggagacagtgacaccagcctcaatgggagctcaggagggtgcattaggaaaatccaggcaaactgttcaggacagcactaagcattagctcatgttgatggtgctattgttttcaaataaactggacccataagaacaattccttcctaactcacagggttgtcttgagggttaggagagaccaattcaagaggccgtccccagggcaatgcctggccctcggcaggtgcccgtggatattggttttcttctgctttctctgcctccttttccca

SEQ ID NO: 54489 - DNA, 2163 bp, Homo sapiens
gcacccttctccagggaccctctagcctactcaagtccagcccccaatcccaggccaccactcgaaactgcttttcctcttccatcttaaccccaacatctcttctttccctctgaccacattctccaactgctccaatggtttggtcatcagaatgaccctctcaccagcacccctgatttcttagtacccccatccttcccttcatccgcccagccagacttaacaggggccaacccaaccacactctttacacggcaagcttaggctggcaagggcccacagcatgaagatttggcgccagtgtcaacatgaggtctccagtctcaactgcaccgtggacatgaacccaaagtcctctgcctgcttgccggcctcccatttccctcatgggttctttgtctcactgaccttcacccttctccctctgccaacctcaattcccagagacacttggcttcgtcaaaatatgaaggccctttggtgggacctgctgcccctgccctgcctccaaacacagccccacacccatcctgagtatcctctgtccagaatcagagggtaaggaaggtctctcttcagcctgccagcccacccttgcagtgaggtgctgggcaggcccgctctggaacctcgcccatctctccctggcctacagcatgtccctctctaccaagacttcctgctctcaccaggcctctgcatgtgctcacatctctcccatcctaaggagatcttccctaatctctgcctctccctggcaggccacttgctgtcctcttcttgtgggatactttactgcattcagtgcagtcccccacatcctcacacttaacagctgtgtcctccccgggaccacgtgacatcaccatttctgctagcctcctacctctctgaccatccctcctctcctgcgggtgccccttcctccacccactcactagaggccaaggatggcagggagagatcccttcttccctctgtgggtcttcctggaccgtctcaccacccctgtggttcccccactgctgtgggcttatcctttccagacgtacacgtctggctcagcctctcctgccctccagaccctgggtttccagctgcctcctggggttctgtggccaccttaacacctcataggcacctcagactcaccatgtctcaacctgagattggccttgagtttccaagtcggctccactcccggaattcctcagggctgggttgcaccactgctcagccccaggacaaggccaccttgactcctccctctcatcccacacacatcccatcagtctctgggtcccaacaacttgacctcctaaatgtttctcaacccgtccctctccctgtcccgctaccacagcccaaggtcaagccctcatcatctcctgtctgggttattgcaacagcctcccctgcctcatgcctctgctcactgagtcagctgccacactgctgccagggtcaccacttaaaatgcaaatccaaacaagccgctctccagctttagaacctgtaagatgaaatcaaactgctaagggtggcccaccggcagacccagtgccccactgagcctccagaatcctctccctccaccctgggctggggtgtgtgttatcacagcacaaggcaataatcacttcacacagcttcatgcctccctggttttgttcacgctgtttcatctgctgacagcactctgccccattttcagtctgcttaattctctcgtctttcaagactgatctcaggcgcctcctcttccagaaagcctccactgactacccctcctcccacctgaggctgatgctgtgctaggggataagatcattctgttcaaagtacttgtttaggccagtgcggtggctcacgcctgtaatcccagcactttgggaggctgaggcaggtggatcacctgaggtcaggaattcaagaccagcctggccaacatggtgaaaccgcatctctactaaaaatacaaaaaattagcctgtaatcccagctactcaggaggctgaggcaggagaattgcttgaacccaggaggtggaggttgcagtgagccgagatcctgccactgcactccagcctgggaaacaagagcgaaactccatctcaaaaaaaaaaaaaaaaaacagtgcttgtcgagatgggtgtcttc

SEQ ID NO: 54490 - DNA, 980 bp, Homo sapiens
gggtaatgaagctagagttcccacaggcaaaccagctcccctgactttcctggcaaagaaggcccaaggcctattcgaatccactattttaagaggaagggagtggagcaagaatcgctgtgtgtgacatacccctgaagtgccaggaatgtgcccagggcccttctcctttcctcctgacaagatttcacaggtgaagaaaggaaggcccaggaagatgaagcaatccccccaaggtcacacagccaagtgagcccaggtctgtgtgattccaaagcctccaaagacactgtctccctgcccctccatgccactacccagctcacaccccctttagcaactcttagcatctgccaggtgaaatcccaaggctgcaggacaagcagacagggcagccacagtggggtgcagcccccgagggtgcacgagggggctgtagaatagaccagctcagtctctcacccactgtgtcttcctcgttccagtgagctgaggctgctgccaggccactgacagttcaggcacaagtgaaagagaaagtccctggtaaactgtaaagtctgtgtccataagagccaggatgattatgggggctcacaggccctgggggccagaaggagcactgagggctatcagagtgcaccccaggagtgcactcacctcccttcccacaattcagcaagtcctgaaaaccaggcctctccacgtggctctacaccttcgtgagggtggaggggaattgccacatctgtttgtttatcagggaagctgcaatcctcacagtttcatcatctctcccaaaagtcaagaggaaatcagaaagtggcaggtttggtggggggcacggatgctaaaagggcacaacatgggcattcctgaagcatcactgcccaatccagcagcccccgggagaggagcagagacctcagagcaggtctgattgtcccagcctgtgggaacaggagacctgaaagctggcc

SEQ ID NO: 54491 - DNA, 1634 bp, Homo sapiens
agccatactattcaatagctaaggctttgaggtggattttcttggattcaaatctcagctctctcactcactagctgtgtgaccttgggcttgttacctaacccctctgtgcctcagattgctcatctgttaatgggaataatgcttccaatgccacaaggttgtgagaatgaatgagctaacatatgtaagctcttaccttatgtatggtattgctgtgtaagtgttggtcattgttattaatattgttatgttattattaccaggaggctacagagaagtattgcacacaatctctgtccccaagaggatgggagtccagacaggagcaggaaatggggttgacatttctaatcctaccagttgctcaaaaccacattggaagtagttatcaccatccccactttacagataaggaaactgaggctcccaaaggtgttgtgagctccccgagggctcacagctctgagtcgcagggttgggattgagggccaggtcatgcggctccaaagtccacgctctttcaacaggcccacgttgcctctcagtctggcagggagataagccgtgtacacaaatagctgcaatcccaggtagaaagtgataagtgccaaacaggggcgataaaggctctgggaggggaggagactgcccactgcgggaggggctagggtgggggtcaggacaggcttcacagagtgggcagcatctctgcgcaagctaagacatgggtcgctgaatccacagtatctagcagtgtctgacattgtcacaggggcccaggaaatatttgtgaaagaaagagaggaaggaagggaggtgaagagggagagagaaaggcagaatgggagggtggctatgctctgaccccatttggcccaggaacttgctcctctcacaggaagacatagtcaagagctgccaccaattagagaaggccttcatggggtccccattgtcctgtgacaccccagagaagtagttcaggactttcaggccagagttcctgacaatcagatgttttgctcaataccagaaagaacttcccaatgagtaaagctagacaagacttctctgcggggcaggggaaatggtgtgttggagcctgttcatatggctcacaagggccgattgttaaattttcaggaactgcgcgagctggttgatggaaccaaccagctgtgccagctggctctggtcggcagcttgaaactggccatggtgggggtatttacaccgtagacatcggcaaatactacaaaccaggttctccccactttggggagccagctgttaaacatttaccagcacaccactggcagaggtctgctatgtgagggagcaagcagcccgtccctggaagagtacaagcaaagacagtctcctcctggcaggaacgaggctaaggggttctttcttagtgaagggctcagagcaaatgatctcagaagccctgttctggctctaagagcctaggaaaagtcgggtttaagaaaaaaaactaaatcaggataattcatgccgggaaatcatgaaccactagacccagagactgggagtagggaagagacctgagaaaatgtgtgaggggccacatgcttggatttctcaggtggaaaactcggtccaaggtg

SEQ ID NO: 54492 - DNA, 5783 bp, Homo sapiens
agaaactctcttttgggattttggacctgggtatggggtggctgctgccactgctgcaatgctgtggattgctgggagtgggacagctgtggctgcagccaccgttctgcaagcttaattcctaccttcggaggtttctcaggtggccctggtgtacctacctgtgaacttaggccacccacaggctgaggaggggctcaatcacacagcaatgtgctgggaccatgactccctggtgtccctagaggtctggaagtgctttcataccacccaccctctccagggatgctcagctgccacctacagggagggcgggggtggaagagcagcagtcatcacagtccatgtccatgtgacaggtaggaagactgaggccccaaaggagtgccttttcttgcacccaatggcatagggaggcagaatttcccctggggaaaataaaataacgcccccactccgccgcctgcgcccccacacaccccgtcccccacgcccgggtggacctaagcagcagttttctgagctttcaggaattccagactgagttcactggctgtgagactagcggagccttgagaatgaattcaaagctggcaaattcattttgcctcctctccctcggtggtggaaggagtgatctctccggctctgaaggagttcaagccgaggtcagcgaagccctcagaaggatgttctaaaatgggggtggggggtagtgctccggcctgcttccccggttggcccaaggtccgcgctgatcaccgcccaagaggcccaggagacccgcaaatctgtgctgcacgtccgcactcccatgcgggcctcgtcaatcaggaggcggctccggccaggcctggacatcttcggcccgccccaggccccgggggagacccccgcctgggccgcctccgggtgcccgccccccggcggtgtcattgttctctgacgtcacgcctcagccccgcccctctccccccacccttcctcccccacctccggctccccgcgcccccgaccctgcagcctccgaagccccggccgtgcaaggctccccccgcagcccggccggggctgcgcccccttgcgctctccccaacttgcctttgttattccagctcccttcctcgcctcgcctccgacacggtggcagcctgcaaaacgtggagcgcggagtcactgccacacctggaatccgaagcgggctccgccggctcccggccgaagccgcccccgcctgccggggaggggagcgcgtgcgtgggcggcgcgtgtgtgtccaaagagggctgcgcgggcgccaattatgattgggactgggggtgccgaaaatcaggggtggggggcctcgaggaaggggtatggaagaggaagtgggagaggagggcgtgtgtttgtgtgtgtacgttaacgtgaggatttagtgcccaggggaacgtttcgtgttttgttttttgattgtatgtggggttgtgtacagcgatgtgtgtgtgtaactgcgtgtctctgagcgtgcctgctgtggccgtgtaagcgggcatctttgtgagggaaagtaagcgagtgtgtgggggcgcgtttgtggtttgggggggagcgtgtttgcaatgctgagggagcgaacgtgtgtgccgttcttgtaggagtttccgtgagagtggcagtggacgtgagccaaagtgggcgcgtagttggatgctctcggggggggggggtgggtcggctaggggaactcccgcgagtgggtgcacccaactgcgcctcgtgagtaccttagctctccgctatctctggcagtgcccagtccggggcagagggccaggccccagcctagcagctcccacgcagcccgcgcgcacagcgccccgggcgctccgcgccgggcctaggggaatccacgcgtctctggactgtgctaggtgccgcggatcaactgtggccaccacacccccgctcccccacagctgtcggggggccgcgctctagtctccctcaaagtcacccttggtggtggtggtcctcttcccaccccaaccaccagtccccgggctgtaggaacaattccaaagtcaaccccaggggaaggctttggaggtccagttaccaactcgcttaccccaattcgggtacctgacagcgcccggggccacgagtgcactccaggcgggggcgtgccagcgcggggcaggggctctcgggtgagcagtgtgattttggcttcctccccaaggtggtccctacctaggctcagcatttgttcccctctccaaacttactggggctggggcctgcaggggggctgggggctgcagggggcgtcagggagtagcggagggagtagggcaaggagagaggtgagtggactggtggcgtagcggggaaccaggagccaggagaagaaaagctgggagagcgccgagaccgaggagcgaggaagagaggaagagaaaggaaaggaaaggcgagggagagaacgaggagaggcgaaaaggaaaggggaaagagagcgcagagcgcgagccaagccgagcgccggcagcggcggcggcgcggcgcggcgctccactccggcctgactccgcaccggcttttgcgggcggccggcggcgcggggccctttggaaatagaatagccaatgtaatctgacacttcaacttgctcggctccgggcgagttgattcacttactcaccccctaacgccgagttccttttcactgtctgtggacattaaaaaagcgagcggcggcggcgggcgccggggagagcgggcggccgggcggcaggcgggcgagcagcgatcgggcggccgagcgagcgagcaacgccggcgcagcgcggtgaccccagccccagccggcgcggagcaggagccggagccgagcggatctcggcgccctcgctgcgctcctcccggcccgagcctgccctacccggcggtggcggcggcgcgtcctccagcggcggcagcggcgctcgcagcgcccggtaagtttggggccagagccaggcgcccgctggctccggggctacctcccgctccccggggactctcggggtgcaagcgtggggattgggtgctggggtttttcccttaaagtgtcccccggagcggggcgaccggccggcggcgcgggctccgctccgctctccttggcggccgggggccgaggcccggcggccggcgagctcccggctgcgcggagccggcttgggctgcgcgtgggggccgggtttgtcagggtgtgcggggcgtaagtgtggtcgtgcgcgcgcggacccggtgcccgcctcctgccggcgcgcctccagccctcgctccctacacccgggggccgggcaggaccgggaatcggaggagggagggaaggaccgcctcggtctccttcgcctcctctggggagatgcgaagttgtgcgcctgtgtgtgtacaggaaccgctggggaaagcgctggatttcaggatggcaaggggtggtggtgttaacttgtgcgtctgaatttccagggaaaacatacacttttgtaaatgggaggtgggggcgcggttaagttgtttgtgtgggaattgcccggggaaagctggcgcgcggtacaaacgagaaacgcggaggtgtgtgtgcagggttttctcccagggcttcgcaagccagaggggcgctcaggccagtgcctggacggggctgccccggccaggaggggagcccagggggaagatgtgcgtgtgtgtgcgcgcgcgcgttgcaaatacgaaagtaatttccccgtgttctttcttcctctccgtctccggcggcggtggccccgggggagtgggaggccagccggggcggaggttggggggccggggctggagccggggtcgggggggggaggcgggttctggaagcttgcttcacattcctggcgtctgggctggggaaaaaacagtggggagcgcggcctcggcgtctagggcgcgggcagcgggcgcgcgtcgccccctcgctggggacatctgtccaggaagccggccgggcggggatagggcgcggtgcggagggcaggctccccgccctggagcggtgggggcgcgggcgaggggcggccgccttcccggccattgtgcgccagcagattttcacgggagactgccccggagccgccggagaaggccgggagccggcctcagccccgggtttaaaagacactccaggaatgtaaacaacccgggcgggagggcgggcggacgggagcgcgccagggcagccggtccgggccccccacccctccccggggacagccggtcggcactgccgcccagccctacccctctacctgcagcaaactttttccttctctgccttcccttcccacctcgtccctccagcaggtcacagagcgagggccgctcccaggtgggccaagggtgcttggtacccttgcctgaccggggaggcctgacggccgggtccctgcttcggtgcccggagccccggctgcgcctgcccgggagccgtcagcttcctgggtaggcagtgcccgagtaactggggctttgagcctgcccgcctgcctccctccctccctccctcccgctgctccttcccccgcgcgctctcccccttctcctctcccctgactgcttttccaatgccctgacatgagggaggaagatttaacttggcagcccaaacaaatgttctctcagaggtcctccaagaagctggcggctgggctggcggggtgagggcacggctcggccagcctttccctcctctctgctctgccacggacatttggagccctctgggtggacagcccagggcatgggagagtagggcccagccccaaagatttaaaagggcagtgggcggccgcctgtggaagcccctggctccgcgccgggtgcagagccgctccgagctgcctcctggtgccaagggttttctgaaggattttcttgagcaacagtttgtctccctgctgcaacctgggaaccgggcctggtagaccagagggttaaccagtgccgactcctcctccctggtgggtgtgaggacaggctggttacacagggcagggcaggaggccagaggctgttcccagaggtgcctgggtttgcttattactgtttttgaaggtacagataaagaggcaggcgccggggctggagagccgggcagcttggcgctggtgaattccagcctgcgttcgctggcgcttgtacggtcccgggagtgtgaagctgctgttgagctatcggggaagttgagatgagagagcaagctctttcttagccttctcagccccggctgctttgtgagggggtccagagtgggggaaattcctggcccctcacttgctggctcctggccccagtgcaggggccgggtgggtttgtgaataccccaagccttgggctgacctttccctcttcaagtcgaggatgttgaaacatcagcatcaaacaaaagacacattgaaagccctatctgctacagagcacgtgtgagttgggggcccagggaatgcatttggagggagatggtgttttcttctgagctttatgattttcggttgggttttgttttcccccaaaggacagaagcgtctccttgtcccaaatcacgaggttttgaaacgctgttttcacatgtaaatctcaaaagtttagacttctgagagttggtggcagtgactgggggtgggggctgggtggggggaggagaagggagcagtagggagtggattcaagaggtggatttggcattttgggtagggcttactgagaagagttgggaataa

SEQ ID NO: 54493 - DNA, 473 bp, Homo sapiens
gggtatgagaaggaagggggtgcgtgatgagggctggggttgggtcgggcccggcatgggtgccacaggtgttgactgtgagtgtccaccctgtggataaagactgtgtcctgggagagaccagaactgtggaagacagttcctgttcctcaggagcccacagtccagtgccggcaggaagatcagtccaaataaataattaaccgctaccagctggctgcctgccacgggcgcgtgatgacagtaataaccacagcccctctcctttgtatggtacttggtggatttagaagctttttccatctttgtttatccccaataacaacagtgtaagctagttactatttggaattatccccatttaacagagcagaaaaccaaggttcagagcggtcaaacaactggtggcaaagttaggactgaacctcaggccttaccgataccaacccctgcgctgcctcctttccagtcca

SEQ ID NO: 54494 - DNA, 1407 bp, Homo sapiens
tagcgtgatctcagctcactgcaatcctgcctcctgggttcaagcgattctccggcctcagcctcccgagtaactgggattacaggcgcctgccaccatgcctgggtaatttttgtatttttagtagagatggggtttcaccatgttggccaggctggtcttgaactcctgacctcaagtgatccacccactttggcctcccaaagtgctaggatgagaggtgtgagccaccacgcctggcctgtatcccagttttacacacatgcgtacgtgatgtgctcagagtgattagggccacagagccagaaggcgttttaggcaggatttgaatgcaggcctgtgagtttagatcctggctcccactaccctatgcacaccctcccatgcccttgcgtgcctcttcagggcctctctctgggccatccctgccgcaagcactctgcagacagacagtcttcctctttctaggaggtgtgggtgcagaggactttgtgtattggggagataaaagagcccgtttgggatgatttttatcagctcgagcaagtcggtttgacttacaggaagaagccaatttgcattttgggaaagagctgagtgtaaaggccgcagtgagcactgggtggatttataaataaacagtcgaccgagggcattgtatgtccccagctgtacaatgctgggttcatattgacaccacagacctgttccacacgtcacagctgccctttggacagaaagggcctaattgagtaagagagcgctgctgctggaaatgccaaggaacccttcctccgacctggcttcctcggcacaagcgagccgggtgagtccggctgcagccgggcctgtttaccgaggctgctggcattgcatgccaggtgcagagcccacgggcgactcagaaggccacgaacgctggggccaaggcggcctctgctctccctgcaacccggagggagctggagccagagccagatctcaggaaactggggtcattgcatagaggctgccagacagtctgcagagctcagcggcctgggttcaaaccttctcgcacactgccactgtcggttactttggctttctagagccagattccttggccatgaaatgggtactgcttacttcccaggttattttgagaatgaagtgagatgaagtcaacagtagatgtatctgtccgttgtccctgccctgctgtgggatgacagagtgattttggacaagaccaaggcctcgctgggcatcactgtcttcttcagaaagcaatggggctaggccaggtgcacagtggctcacgcctctaatccctgcactttgggaggccaaggtgagcggatcgcttgagctcaggagttcgagactagcctgggcaacacagtgaaaccctgtctttaccagaaa

SEQ ID NO: 54495 - DNA, 779 bp, Homo sapiens
cacttgcccccgggtcgccagcagtgctgccagcctgctgtgggcatgggctcaggtgtggacatgcctgtatctgctggggggtcccacatggtgctggctccctgcctcagccaagaggcacatgacacatgacatcactggctatttctgcctcccaccggccacctccatctttgcagcatgaagggaggcctggcctgagcccttaactggtcccctggcttggctgtctgccactgaatatcacctgctatttcagtgaccatcctgctgtcatagagggcagaggaggctgaggggtgcaagggctgtcaccaggggtccccggacaagcccaggttcttccgcctagggtcagccctggccctgcaacctttgtttatttactttgggccttgctcaaaactagtagcaagctgcctggaatgcaatgtgacgaactcgagataataataaaatcaattggactgtttccccagtaattctagagactgatgcatcattaatgttggtaatacagtgcctgtcagatcacaaacttctcaataaatgtgcagctggcaagctctgatagaaattggaggcaagcagagaatgagatttggggcctttgatatatggggtgtcagtggcgcagtgaagtttttatcaatttctgtcactttgggcttttgtgctcacagcatatgtggtcttcatggcacctctctgtgggctgcttggatgctaactgcacccccccacccaacagtgtgaggaagaggagttcctggaga

SEQ ID NO: 54496 - DNA, 2803 bp, Homo sapiens
agctcactggaagggatggcattccagaaggacagaagtgtgtgggcaaaagtttggaatcattcccggggaaaggtgtaccctctcccataagaagtttggcctgccctggaccaaagagcagagtctttcctctcgatggctagtggctgtggggtgaagcagatggccagggggtgtgggtgacgggggaggcgcaccctcaggcctgagccaagggaaaccaagtgggcccacacaggccagagcctgagaccttggcaccagctactcggagatcttgactcaagagttaatgattcatttgtggccaattttctgctggctttgcctggaaattcccaagcttgccccttccctcaccttagggagctccaagaatacagtctcacttacacttggctgagaacgtctcacccactatccagggaatggtttttaaaattacagcaggtgtgatgtaggttagccattaggaaaagctgatcgggggctataggctgggagctggggtggtttgtttgagtgtttggaacaaatgtgaatagaattcagtctagtgtaaagtgttgtgacagttacaaattgggagctacagcttgacccagagtaggacttggttgggctaaaaaagtaatggcataggcaaaggccctggggcatgaacatccagggaacgctgagtgattgtggtgtggctggagtgtagagggtgtgagagacttctagaagtgtggacacaactcccaagtgaaggactctcaggacttgaagatttggcagtgggacgtgctggcagtggggagtcagggctggtacctgagtaggggacaggtgtgtttgatttgggttgtagggtcgcttgcccatccctgtcttgattctgctggtcagcagaccttccttgacagcctgctctgtgccaggtcggacccacgctctgcacgggtcctgcacctgtgtggaggctgaactaaagggagggggttacatgtagcaattcaggtgggagcatgggtgtgtgcaggagcaggggaatggctgatgacttcagacccactcggctccatcaccgaaagtccttgggtgagcgtagcagaggtgttggggtaggcttcaggaaccccatgttcctggcaggctctgtggacacgccgcctggaaaccacttctgccctgtaatatcagcatggctgaaggggcctggaatgtgtatctgtccttgtacagaggaggggagcagacgaggcccagagaggggaaggttgatggcagagcccaggcagaactcagggcccagtctcccaatcctggctgattgcacatatatcccaccacccacccgttcctgcagatctaaggacatttccccgaaaccaggcaaaatagagcagcctgattgtccatgtcaaaatgtctgggcatttggggagggagggttcctttatatctttcacaacttagcaaatttaatttcttctgattatttcttgacggtcccaggcgttggtggtaaacaaccacactccccagaatgtttccctgtgacagcagctttctctggcgagggtgctatcaacacttggcagggcctcctcctggctcctggctcccagctcctgagatcgtgagctcctgagctcctgggctcttgagcaaggcagcaagtgagggcttctcaacagctttcagcatgcagagcttgccctgtgtaccagggcaaggacaggcctagcctctttgttccccgcagcagcctggcctgccttcggagcctcaggtggcctctggttgtggatggtccccatgcagcgaggctgggtggtatcagatgtctgctggctcccacagctctggtgccgaggtccttggcatggctcagtggcaggagggagcctgtcttctgagcagctctgccaggactgtctgtggccgagagaccggcagcatcctgggcctgcagcctccatggtctgcgtcatactggcttaggtgtcctgagtcagagccaggaaatggatctgccatgcgggggtggaggtgctgctgcccgggcagctagggtgaaccccaacctcctgcccgtccacacctggagggtcctggccttgtgcttccttcccctggcctggcctgaatgtgactggtgcctggaggagaggctgaagttccagcctgctccacactccactttatgtgcccaggcccccaccccacaggctgttgttggcagggtgggtgctgagacacaggcaccacgctatgctgtgcttttgcctgagttattctattccctttttctagaatgccctttccaactcgttgtctgtgtgattttctgctccccctccaagaatttacacaagaatgacttttttggtgaaggcttccctggcacccctactctggccaaggctgcccccctttcctctgagccccctctccattgatggctcctatcacagtgtagtatattcacgtttggagcccgttcacctgtgtaggtgccttgaggcttttttctttgtgggtcctacaggcctgatgtgtagtatcagctcaataaaagcaggctggatttaattaagggggttcctgaaggcggtgctggagtctccctttgttaatggtgtggtgaagaggaggcgggagtttgcaaatggagagaggctgacttgcctgccggactcctacccccgatcccctctgagggcagtgctgcccctctgactgctggggactggggtggccccctccatttctatccagcggcagacttccctgcccggcaggagctggctcc

SEQ ID NO: 54497 - DNA, 667 bp, Homo sapiens
cccactacagactaaggacctgggtcccaggataaaatgagagatgcgcctcccttctctttgctgtgaccaactccttctttcctccttctgcctccttccctcctgctggggacagggaggggacaatatttattccttcccaaggctgcagctgactgataccctgatgcagaggaaatgccatgccagtgccaggcatgctgccggcgctctgggtgcctggtgccctctccaggtgtggctcctccccatagccctgggctcggccggtctgtgtttgcagagcctccactgacctgcagcggcctctctctcatgcctctcctatcagcagagcgccagccatgggctccttggactacaagtccccgggattgcgcaaattcccccagcagtttgcacagcagccagctcaggccccgtcagatggcccaggttcctgctcgggaagcccattcttttctggaataataaagcagccaccccacagcagggggtggcaagcttctcttatcctcacaacccctgactcatgtcaccctcataatatcaagtgggctggggcggggtggggaggtgggtggcgttttccagagggggaactggagtcagagaagagaaggcatgagacttgaccagggtcacacggcccagccaggactcc

SEQ ID NO: 54498 - DNA, 3239 bp, Homo sapiens
gtttccaattgagtccctcccgggctttcctccctgcaggcagagcatcaagctgggtctgtacgtggccccgccagggcctgtttgattggggtaatctggacaagtcatcagtggcctgcgctggcagccagggtgtggctaaagtcagttcctgcctaagctgggctgacccaccttctcaccactcaggagctcccggagccaggagggactgctgtgagtttgccttcatgaggaggcccttgggctgcctttggtacaggcaggagacctggatccctgctctgtccctatctctgtccctgtccctggggtaatctcgagcaaggctgggccccaggcaggcccacaccccctcccatctgtgttcatccccagcactaagccaagaggcttttgtccctggtgggctgtcggccagctggaagagtcctccttgctctctggcctatttgctttctgagtccctctgccctgggagagcatgaatgggcaggagaggggactggagagggctgagggcctctgttcagatctctgccctcactgggtcgggctgccaacctctgcactcccaccatacccccaacctgtggacaggtgagcctccagttcctgaggccacagggaatgggctggattcacctggaggccatgggtagccttgcagcccctgggccaagctcccctcccacccagactcctccagacacttcaggggttcaggcatgccaagtcagggtggggtgaaggggtctttctctaggcgctgtgcctgtggttgacatcacgttgtcctcatgtggggctgcgtggccccgtggggtggcacgccttctgcaagagctcgccctccaggaagttctgcattcgaagcctgaacttggccttggttcactcttcctctcatcctggtctcttgggcatgacttctcccaggggacactgctgtctgctgacttggaaaggcagggattcaatcaggggcccccgctcagctgtgtctgaagtgtgccctcctgggaagaaaacccagcagcacttttgtcgaggcctcacactggaaaatgaacggtgggaggcctagaggtaagaggccaaaggccactaagcaggccagcgtggcctgcccactccagcccccagaaagcattggtgcttctgaggaggcttgctcggccctccctctcccctgggctgggtggggccagtgggacaggaagccagggcggggctggaggatggggctcagggtggcctgggcctgagccagggatgaggcgaaacccaaccctggcctggccccgggccgcagccgtgcaggtcactaggcctcggcgagtggccacccgcccacccaacaggaagccctgcccagacaccacctttgccccaccccgtattctctacggctggcacttctcctatttcccatgagagctgctgccaggaatcctgccctcttgagaaaggaagcccgacctcgggccgccctgcctctggcctgcgctgaccccctccctgggcctccccgtggtggcagctctgggcccacgcccgtcctgcaccccccacacatgctaatgacttatctcctctcagacaaagcctgtgacccttggggacctagcaggagaaacctcacagtgggactaggcctgggagccaggaggctggggctcttggtctgggatcctccaccaacctgctggtgcacctgggcaagtcactcagccactctgggtctcatctgtagaaaaacagggagaggcagacgctctgcccagcaatgagcatcccatgggataaagggtttggggtgggttgaatgtgtgccctgtgaagacagccaggcttggggggtgataacacaaaacctccccatccacccctgtctgcctggaaaggagccccttctctcatctcccagaagccgggcgacggagcatgcctccgtctctcagctctgctcagggagctgggccagaagcagggatggggctgtgctgaggggcaggctgtcccaccaccctcccaaccccatcctcttcctccctcctggtgggtgctctctgacccatgacccacctccccaagtaagcccaagcccacctcagtatcagcaggggtagcagcttagggaatcaactgtgtcttaaagggggccaagcagaggggtcagggcaccacggggaaagaccagagtcgttgtgacattggatgggttaagacagatccgggggccaccttgagctcctgggcgagctgaaagcttgtcagcagcagggaagaccaggcacctgagcagccaagcccctgccatggggtggccacagctcagactctggtggccttggacacattgctgctctgagcctcagtgtctgcatctggcaagtggacctttcagagccagtgtcttagggtgctgtgagaagtccttaagatttggggacacagtgctgggccccctgcggcccttccctttgaatcagccttttccctgtgagggaaacattacaggtcaggattaggactagatttcgtaggcagtggggagccactgaaagttcttagaggagtagtgagttcatggggagaggaaccggcagcagagaagcctggcacactcatccggtgttggagccctgattcaagaggggtcatggggcaaagaaagttagcccaagtgggtgtcagcaccagctgggcttgggaggcctcagttttcctcctgtagctgggtgcctgtccgcaaggctggagaggcgctgctcagagccagcactgagggtggcaccaccacccctccttcttcctctggtgcccctgagtcccaccggcgtggggttgtctgggtttgccactcaggcccgggtgggccccactgcctctccctccctccatggctttctagctctgaatgggagtggactctggaggctgcagtgggctgcgggatgtgagccagggtgggggcattggcggtgggtggagtcacgggctgggtggccatgagtcaggaattgctgggcctgtgtgtcatctggctgcgtgctgtgctggctcctcccgcctgtctgcctcatctcgcccgccgccatctgggccccctgggctgctccaccaggtgatggtgctctgctctgtttataagagttcaaaacgtaggatggagtagtcaggggaccgggctctagggcccaggctcccccaacaccagaggtgaccttggg

SEQ ID NO: 54499 - DNA, 525 bp, Homo sapiens
ggtgcagggacttggctaaggccatgtggcttgtgagccggccaggatttcatccaggcctgggtgaggttagagcctgtgcccagacccgccaccacccgctagcaagaacaggactttcctttgtccggcatttttaactctgggtcttggccatcacttcagactggcctggcccacgtgtggccagaatcccaaagggatgcctgtttgggaagcgtgaccgccagggggctggcacctggcccaggaagggggtcatcgagaacactcagtgctcagtggtttgtgtgtgccaccgacagtgcctgtgcccttcagtgccacgaccttcctgtgccaatcatgggtatgatgtcagttcatctaatccttgagctgcagttagccccagatgaggaaacagactggagggataagtgactttcttgtgggccaatattggaccccctgggtcctcagttggacctccaacaccagaatggacctgggttccattctggtccacaaaccccctttgggttt

SEQ ID NO: 54500 - DNA, 4122 bp, Homo sapiens
ggcagtcgggacagctttccccctccctttcccagttccaggtctgatgcaaactcaaaggaaagggaagccagtccctgactgggcctgagtcatttgtttctgaatcctagtttgaatcctagttcccgtttttatcatggtgtgatcttggctgggcccttccctctctctggtctcagtttgtctctgttcaagtccagcaccaagggactaggttggcaggggccggaggccagacaagccacgcatgtgcaccaccagccagggcacggctgaggcaggacgggcagaagtcattcctggggcctgggcgatgctgcatgagctcttcctccaagaggaagtgtccctccagcttggccctgagagcacagtagatcaggactggacagggagcaaggccttggagaggcccccagggatgtgtgcatgtgcctctgccccacgaatgcagctgcgccctgctcactgatgccctctgcagctctctcttcagcccaaagctcttctccctaaaagcctctgggcctttgcccagggagaggtaccctcctgcctgaaagactgcccgagggacggtggctctgccccccattttgcttccaggccgagctgggctggcccgccagcactctgtgcacatgcccctagttatctgaggattacccatctcctgtgtcttccccactggtgtcacacagtgtgtgagcaccctggggaagcacaaaggctgggcaagtgctgacctttggccccgtccccacccctcccacccctactctttacctcttctccttcttttccttctctgccagatagcaggcattgtcatcagttgtttttaaataaagaaatgaatgaatgaaatgaacaacttctagaagtcactttatagccccatttttgaaatgaggaaaccaagtcgcagggatgttaggtgggtggggagggtagttcagagacccccccgctgctcttccccagttctcactctttgggtccccacggtgccaggttggggaccctaggtttgcgtggcatgtcctctggccacaggaacttcccacacatggaggcgtcctgagggcccagcagcaggtaccagccacgacttcccacgatctcagcttgccaggcctgcacttttctcacctggtgttcctgccttcccagcaggtcagcccagagctgcctgtccgcccttccctggccactttcgagccttccccatgggagagagaaaggtgagggagccgaggggcatgtggcaaggagcggaaagcaggcccagcaggcaggctgggcttccagggctgggcttcggaagacagtgcctactgtctgctggagggcatcctggagcctcctcacaggaggtaaagatcgacaggatgattgaaccaagcgtacctcgggactcttgggcagccccgcccaggacttcccgcagaccccaaactaccagcttcctaggtcctcattcatttctgttccttgaggccaactgtagttactgctcttcggtgaaaagattgagaggatatgcagttctcccagagcaccaagtccctgggttcagctctgctgtgcctggaatgaggactaccaggtccctgtccttatgggcctcgaggctgaagagataaacaggcacctaattttaattatgcaagcgaaaagaaacaccagcatgtctggaagttcagggagggtaccttggaggtggctctcagagaaggcagcatggaggaggtggctctttgagcattgaaggatggatagggttccaaaggacagtgacgagacgtagagctgcacaaggcgccatgtaggggactgcggctcctgttctgccactgtgtgatgtgtggcctttgctctctgctgagcgatttcttcctctgtaaagtgggaccttacagctccctggtgacaggattgtgctgaggatggagtgatggagtggggcagtgagagctaccagggttattgaggaaggagcctggcaggtgggagaatctaccacgtttgagcaggttgaatggttctctctgcaggcataaggggtgtgtgtgtgtgtgtgtgtgtgtgtgtgtgtgtggtcagttggcagcaagtgtgaacagctgaggcctaatgacaggagctctgaggtggcattggtgccacagaaccctggggcagtgtgaccctctccccttgttgtccatggggaggtccttgctccggccaatgtccagctcaatgtccagagcaccctggagcctcctctggtgggtgcatggctggaggggtgatttagggctgcttcatccttctggcccgtgggccttggcctgcaccctggcccaggctgggtctggctcttccctgtgtctggatccccacccccagcttggtgaggtcagggaacaggtatttcaggaatgcaggaggcggggcagccagccccatttggataaccatggggtaaatatttgccttgctcctggagccagcactggcccgccaggggaggacaggggcctgtccctggggtcatgtaaggggatgtgtgtggcggtggggttctccaagttggggaatcccctgtcaccccaagagtctgcctgttgcctgaccagcagctgtttggcacatctgtaaaatgacagtagaacagctcaggcgcctgaggatcagtgtagcgggagctggttccgccagcttggccaggggagcggcgggttggaccagatgtgggtggacacccttgtgaccaccgttctgatccccacttggccacttataaccttgagcaattaccctgatttggatgggcaccatgggctgagcttttaactccttggtgtctgcatctgcacaccccgtatcttgttaaggcctcacagctatcagggccaaggcacgtgtgtggtcagcagcaagcatgaagagctgaggcctggtgatggaagccctgaactccaggttgagggtgccctggtgtaacccctgcccagcacagcacccagggccatctgccccctcccccagtgcaacctggagccttctctggtgagagccaatggagggcggtcggcccctgcttagagaggagctgggggcttagagaagcctagtgacttgctcaaggtcacccagcaagtgttcaaacccaattctacccactcttgccctaacccttgaggccagggccagggcttcagccccaagtgtggactcccaagccttagcagctgtagagagcaactggctacttagccgcagccctggagccacccctggtcctaaatttcgggcaccactgccctccaggcatcctggattgactgatcctgcatctctctgggtcagactcagccccgggtcaacatgaccgagtgcctccaccccagcccacacccaggtcctcccagggatccctggaggtggggctgggaaggtagatatgatggggggaacccctcttagtcccaggacagtccctacccccaagtgacatctgccttgtctgagactcagccttgtcactttccagctggacacctctggcagccccatccttctcagtgtcatgttctgcaaagcaggagtgagtcctggcctcccctcccccgggagcttcagatgcactgtgagagtgaggggtgtttcaggctgctgtcggcacgctgccctttctggcctcgcagtgagaagctgccgtgtggtcagggtctcacacaccccagaagtgagagtgctgtgctgagggtgcctgggagagctatctgagcattggggtccctgcctcatggggagattgggtgggcttccactggccttgaggctcaggctgcactcactccgtggcaccaaggcctttccacaaaagagcgctcccctccagcccctcgtggtttatccttgcggtctgaccaggctgggagcaaacggggctacacctcgtctcctgccctctcttctccctgaactccccaggaggccaagcccacacaggctgtgggcctcggctaaggcaccagcagagctgtggtgggtgtgcacagcatggcacaggctcctggttcctgagcccccctttcgcagcatgaggggtgcccggcgccgtctggc

SEQ ID NO: 54501 - DNA, 923 bp, Homo sapiens
gggagaggggcaggtctggccacctggtcttggcacagcagccctgtctgcaccactctaaaccctgtggagtatgggcagccccaccaaaggaggcctgggtgagcaggagcatgtcggctgaaatgggtgcagggctacccaccccttctgcccactctcacaaacatgccgagatggatacactgggctctggggtcagaccacctggattcaaatcctgactggcatgcatggttactctgtgcctctgtttacccatctatcaaatgggaatgagatggcggtgcctgctccactctcgcagtgaggagactacacacctggcacacagcaaggactagggacatgtcagtccttttcctcaagggtgctaggacccacctttctccccacacacctcagtttccaccaccctgctccccctgaggacccaccagtgccaggatggacacgaactggaccccccgcctgataaggggggcagggcaccttgaggagcaactgagagcagctggggccagcaggtcctaaggtcggggccagcaggtcctgaggtcaagcccagctctgtcccgtgccccagcatttctcatcatggggtggcatttcagggttgatctcacttggccctgtgcccgagggtgacctgtgtaatccctgtttacttggcaactctcaacctagagatgagagacttcacaaaaatccttacttggcccagagccctttgtcccaaggcgtcgtggtgctggggcagcccgggaggggggagtcttcgccctggtgtggagctgtctcctaacatcccctgctgccctcagcgtccctcctggagcttagcgcttccaggggcctaggggcagggccaggcgagcctcagtcaagctccgacattggagagccaggctccatctccgttc

SEQ ID NO: 54502 - DNA, 1168 bp, Homo sapiens
ccctaacagggtcccagaaccatccagaatgaaggatgcaaggctgggagacggtatccccatggttggagaaagagtgtgttacatgggttacgagcgtgagctctgaagtctgcctggttgggttcaaacattggcactgtgagttactagcaatgcccttggctgtgttgctttcaatgctgtgtctcagttttcccatctgtgcaaaggagctaattatatcgtgtactatgtgggatggttgaaagaataaaacaaatcaatatttgcagagtgcttcaagcagggcagaggacatagtgagttcaggaaggcacggctgttatcctatcatcatcatcatcaccagttaagggctgggttttggggtcagaccagggctggaatcccagctgtgccccttattagctctgtgaacttggacatactcatgacactctcttagcctccagtgccttctcaataaaagggactattcctgtctacttcatagggttgtttaaaggagatgaagggtgcaatatcagaccctcaggaaacgtcggccagcgttgcctcggtgccttgaggtgggatactggacagggcctctggttcagagcctccaggtggctctgctccgtggcctgtcttcctgtgggaggacagtgtgcagaatgtttagaagaaaaggggaggttctggggaggtgagcagaggggaggattccaggaacctctgtcttccttccaccatcagggacagaaagcgctggccagagtggctctccctgcccctgcctctccttccacccctctcccgatgtgcacacacagcattgtgagctgtgagcgtgagaataggccttggagactggcaggtgtgactcatggctctgccatgcacttactgcgtggccttgggcaggtcacttaacccctcaattccctctattgagggataattgtgcctgccccacctggcagctggagaactaattaaatgagataatgtgtgtggagcacttagcacagctcccagaggcgcccggataagtgccctgcaaatgcaatcacccgccccctctctgcctcctctcctccctctgatcctcactcacctctctctgccttcccacacctgatccatggactgtgtctttccaggccagacctttcaatctttc

SEQ ID NO: 54503 - DNA, 3119 bp, Homo sapiens
gcctggctccaacaggagcaagaccttgatgccagtgggctccctgaaggcagggaccacgtgtttctcatcaccgtatgccccagtgccaactgtggtgcctggcggatggtgggtgcccagtggctgctgaatgatgatggcacgagtggaaggctggttgggtgtgttttccccattggagttgggacggggtcggggggcagagggattgaaagagcacttccagatctcagtctgcattggttgagcacccagtccatgcagtccctgggaactctgagatgagtccctagtctggagtcaggcagctagagggagaaaggtgcttccacagaggttctgcggaagtcctgcccggggcttcctgaatgttgccccagggagtaaggagtgactgagctgggtctaagatgacgccattcagtacagtagccactggccacatgtggctgtttgtgaatttcaattaattaaagggatgagttaagcttatccttggcactaaccacattcaagcactcagtagccaccgaaggctggtagccgccttgttgggcagctcagactctagaacatgtccaccacaacaggaagctccatggacgacagacagcgctgtccaggaggatagacttaagacagaggtgcagtgaggacactagctcagagcccacaagtgtaacagtgcaggcgagtctgttagataaagagacctcctgtttctctagcatttgttttgtggcagcctgctgcggggaaggagtagaccagccaggcattcccatttaacacaggagaaaactgaggttcacttttgcccaaggtcatccagcaagagggtggcatgagtcccaggtctccaaccccttggccagcactctgtcatccagcagaggtcagccagggggcacgagtgggcagcggtcccaggagcagcctcagacctccctgagggacagtcttggtgccagtaggcgtcagtccctgtgaagtcatccattgatcgggcgggagcgccagctcagcctcgggtcctcaggaacagagagttctgtgctggcagagctggaaggagcgggcgcgaggctctctgggcaagggaggtgtttaccttgagcgatgcggcatgggtccctcgggagaggctggctcctccatggggaaggaactcctcagtggggcctgtggctgggatccttagcaccacctcagagagaggggtacaggcccgaacccagcagggagaaggatttcgggacctttgactggtacagagtgcacctcacccttgctcttgccccgccacaccgtgtcacagagcatctgctgggcctccctcgccctccttccccaagcctcggctgcaggaggaaactctcccagggcctggcagagcagcagctgcctcacgagggagcctgcaaagggaaaaacaaggcctccaccctcgaagcacttccagcttcccagggagctccctggccagacaccacaggcagggaaggaaggccagcccactggccggagggccgaagggacttcctgccccaaggtcacatggcaggagaggccatggatggagccaatgccctctcccagcccactgcaaatcccagtctcccagtgggaacgtgtggtttatgatttcattgtgcctgctgcctggtttcctgctccagccctgaggtgagggttagcttcctgtggccttgtccctgtgtcctgaggtgcccactcccccagcagcaggccttgctgccgcctccagctcccatggccctgacctgactgaagtgggaggtctgaaaatgcggtggctttctgcagggacccccgcacaccagaaagagggttcttcaaggcccatcagggcagcttgagggatgcgaggacctttggcgacactctcaggtttccagtcctctagagggagaaaatggtcaggggcggggcactgatgaggcctttccggggagcccttccaggacccatagtgagtccctcggggaagctcacagtgtccttgttccccaggatctgatgggctgtgtgcctttccaaactgatgcacagagctgggagctacccccatcacccagagtactgggcgtgaggacccctgggtgggccaagcaggcagtctgctgtccccctgcctggccaggctcaggaagtatgacccttttcctccctctcagtagccccagccatggccctgacttctccttagagccaccctggggcttctctaagccgcagagaccctgctgggttccccaactgctcccaccccccgtagggtgaggccaggccttagaagtgcctggcctggggcagtggtgctgctttgtgtgtactgggtgaatggagaacaggggatttagccaggacactcacattttctgagactgaggctcccaaaccaccctggagagttgttgggtctgaggggaggcccggcccctgtgatttggcttgtaaagctccccagataattctgatgctattggtagaatcatggctcccaacactagccctgaagtgattgtatctgtagtctggtgccaaattagtgtgtgacctttggcaagtcacttcccctctgggggcctgagtgtctcatctctgcctcatctttatctcatctctaaaaggtagactccactccagggcctcaataccagccctgtgccagagaggtggggagagaggaaagtgagaaagaagcttgggccatgtctttgggtgccaccacccgcatctgggtgtgcagtgggaaatattagggtgcagcacggcaagagagaattagatgaacagaggcctatgctctacaccccaagagctatagaaggaagaggggaaaatggtgactttcaggctggagcggcctgaaacacttcccaggtgaaacttgattttggaaatgggcaggatgagaaaggactgttgggtgggaggactagtagctgcgaaggcttggaaaccaggagaggtatggcgcttgatgagaaaggaggatgtccctccagatggcaggggggaggttagcaggagctcgaggagaggttgagtgaggctgctgcaacaccttcagggcagtggggagccatcaa

SEQ ID NO: 54504 - DNA, 958 bp, Homo sapiens
cccgcctcagcctcccaaactgctgtgattacaggtgtgagccatcacgcccagcccctgcttcttggtttctgacaggcagaaggcctccccatgttgacaccccagattggaaggggcccaaaaagtttgcagggtggagctacaattcctctccacgccccttggcaggctttggagtatctcactgccaattgcttagccccttggagggtggccgtgggtctaatggcattcattgacagctgtgcaagtgatgtgtacgtgggcctcccgccgtgggagcaccaggcaggaggccaatcgtcacccgtctgtgggagagaggcagtcacatgtactggccaaggctgtcctgggcccaagcgagctgcattttatgaagggggaaagggacattgggtcctagctgccattttaatttgaaaattggggacctctgtgtaaaaaggggcctttggggccagctctcttaaccactggtaagtggggcccacaggacaagggacaggctggccatgttggttgcttaggcagtagaaggcactcttgaccctgcctgcagcacagaggggctcaggtcaggactgacactgccctcccattgcctggtatgctctgcgcacaccacaccaggtcctcccgtctctcccactcaccctgggactgtttttgccattctagcaagtgcacagaccaaaggcacgcaggtcaaagaagcatgcaggccagccccgcctaattagagcagacagacttcccagtccagatgtgtgagtgactggccaggcgcacccagacacccgcccagctggtgtcactctgtctgtccttgcgtaatcccctgcctgcctctgtctgtccctgtcagccctcctggttctctcgacagtgcccagactctctttttggctgcgaattcccgggtgttgtcattaacccacgtttgcctcagaac

SEQ ID NO: 54505 - DNA, 2638 bp, Homo sapiens
atgggtaagggtctccacaggcacctgacacaggagctcagtggtgagacccagatgaagggtggggaggcccttcccagggctgtcttctgagcaggacagagatctgcgagagagaagagtttccctggaggaggctctcctcccgaggggcatggctccaggcccctgggatgagtgcggtgtatgtccatagccatggccccttctgtctccgtaatcccataactcgtgcgtgtcttttctttccctccagcctcccaggccggttcctgtggcaaattacccccactcacctgttccagggaaccccacaccccccatgacccctgggagcagcatccctccatacctgtcccccagccaagacgtcaaaccacccttcccgcctgacatcaagccaaatatgagcgctctgccaccacccccaggtgagggccctccctccctctcttggcagctccacctgggccccccagtgggccgggagcaggggcttcgcagtcaggctgcctggggagtgggcatcagaaggggcagagagttgagagcaggtgagatacccaggggcacactcaaggcggggtaggcagctcacagacagcctttcttactgctgcctgggcgcctggaggctgggaggaaaatctatacgcagccatggaaggatgcaaggaggcgggtggaagaagaggggatgagtcgctggggcggggccgtgtagaatcgaagaagccatgactcactggtgtgcccttggactggctatgtctctggccctgtttacacacccctgccttcctctgagcatgcagcccagggtgagcaagtcccacctacagccccagaacccatggcagctgaggcttgtggctcacccacctcctctcctcgccccagccaaccacaatgacgagctgcggctcacattccctgtgcgggatggcgtggtgctggagcccttccgcctggagcacaacctggcggtcagcaaccatgtgttccacctgcggcccacggtccaccagacgctgatgtggaggtgcgtgtcagggcaggggcgccagcccaggcgggatgaaggaggtcccctgggatggcttccttgggcccgagtggggccctgggcagggggtagcagcatcttctgacaccttcacgtgttcagcatcattgactgggccctgtcctgcggttgtcatgggaagtctgcaggtgcacaggtagatgagcagtcaaggtgtcgtggcccaagggcagggagcagctgtcactcaccccagaggaaaaggtggctggctcagacctaggctgggaagctgtgtatcccatctgagaccgtgagctgacaagagggaacgcagtcaagaattcgagtgtgactcatgtggccagagccaggaatgcagagatgaggctggtgcaagggccaggccggggtcaggcaggccccatctattgcagggggctgaccattgggcagggctgctgctcagacacttaggcacgtgctggaacacaaggtccggaggttccctgctgagccaggcccatgctcagcaccttccacgtgtgacccactttgatcttggaaatgggcaacactttcccttttgacagaggaggaagctgaggctagagaagtgaattggcttgtgtgagttctcacagctagccaggggcggagctgagacttgggcccaggtctccaggatgccagaaccaaccctgggggtgtccacccttcagtccttcatcctcagtcaagactcacagtctcactgtgcttgtgactcagacccccttgactgcccagtgagcatctccagcgcaagagctgggtctgtgcctggcacatgcacacacacccctgctgttttcttgaccatgctgagcaggctgggtgaggtggccacagatagctggtgtgggcgttcagaacacaggagctgcaacgctcaggcaggaggacagaggtccctggcacgggacaaaccactgtgctgcctgcctgcaccctgctcacccacgctccttagctgggagtgtcctggcctgggaggcctcctcttcctggcttgcttgtcacacatatatggtcactgctggttcctgacactcctcagtgctgcgtccttggggggcctccttggggagtgctcagaaccagaaatggccgtggcctgggaggacagctcccagcaggtctagagatggggttggctggcctcacagcaggtcttgtcaaatgagtgcctgttcatttgcccctctgtctctgtcctggggatccaggagttgacccctacagggaggacattccagggagatgggagctagagctgtggggtgtgatgggaatgattggtgtgcgggggtcttgggggcagtttgggtgtagagggagtatccagaatgggagaggagaactcaggctgggggaatcattggggtcagggatggggtcctgaggatctcggaggttgtggtgtgtttagaggtgtgtgacctggctcggggtcacggaggccatggacagccccctggcagagctgccctgagcaccctcgttccccacctaggtctgacctggagctgcagttcaagtgctaccaccacgaggaccggcagatgaaca

SEQ ID NO: 54506 - DNA, 2086 bp, Homo sapiens
taaatgtcaccaatgcattgaagaaaggaaattacagttacaaatatcttaactggcaatttagagtgtgcgcatcagaggaaacttcttggcaggaagcattggaaagcgcttaccttctgcagccagagggcagatggagtgacaatcaggcagaggactcattggaaaagcagcagaacttgagtaaaggctgaattctccatcaagggaggtctcctatatccaaatcaggcccctggtagggaaggagacaccaagacttgggatgaggactgtcataccaatgcctctcacaaaaaatgtttattatgaccagctgacagagaagggaaattcttgagtttgggtcacagatgggttgacttggcctgtgggtgtaagccaaaaatggactgagcctgcactacagtgccatccaagggtggccctgaaagatgttggtgagagaaaatccctccaataggcagagattttgccaaagcacctggtcatctcacggcaagagaagagacctgaaataaggatatactcgtattcatgggcagtggtgaatggcttagctctttattggtcaggggcctgggaaaaacaagtctggactatcagagacaaaaaggactgggaaagaggcctgtggatctctgagagtggcaaaaagtacgaagataacgtatcacatttcaatactcaccaaagagcatccattgcagaagcaacaccaaacaaccaagtgggcaggatgactcggccagtggacgtcagccagtctctgtcctcactcgtcatcctccaaccagtccttgcaccatatgggctcatgaacagagtgccatggtgacaatgacgaagttatatataaccctaacagccttggcttcctctccccaaggctgatctagctactgtcactgctgaatgcccaacctgtcatcaacagagacccaagctgagcccgtgatacaataacattccaggatgaaaccaactagccacttggtgacaagttgattatgtaggaccccttccctcatgggaagggcagtgatttgcccagacaggatggatgcatattctaggtatgaattcacttctccttccaatggagcctcaggccattggcactatggctcaccaagagtctgattcactgacataggccctcagttgacatcattgcagactaagagagctgagtcaccatgattgctgcatggcagtgggcacacgactgtgaaatccactggtccttacacatttcacaacatctagaatctgccagtctataggggatagagttgcctcttaaagacacagctgaggtaccaactgggaggcaatacctcatcagtgtgaaggatatggggtgctatccttcaggttgtcctatacatcctaaatcaatgacccccattcccaacaataggcagataaaataaacttaatgtgagaagtgactggatctgagcagtgcaaggggtgggctgtagtagacgctgtggcaccctgcccaaatcccttctgcagggcaaggcacccctcccctggctgccgtgagtgttggctcttcacagcttacagcccacagccccctttctctggagaattgccctgaggtgaccagagctgtctcacctgggaagttccaccctctggatgtggcccacaaaaaatggctaatctagagtacaaagtgcctgccctcttgccttaaggatctggcttatgctccaaagtctttgctccatgatccagccaagggcagcctttctccaagcccctctcattgttcatctcttccccctccttactctgcttctctcactcttacagattgtttctggatagcagtacctttagtgaataaatcaacttcacctggctgcaaaaaaagtatttctctgctcaacaaaacagaaccaaaagctgctgctgagtgctaatgatgcaagggcacaagtatgggcaggtagctgagagaagcagagagtgtgacaactagagagcactgattgtgaccaaggggcatctgcttctctgggtgtttgttgccaggtgagaatgcagacccagctgttgctagact

SEQ ID NO: 54507 - DNA, 2108 bp, Homo sapiens
aaatctggaaacagtctagttgtccatcaacatgagaatgaataaacaaattgagtcatgtttataaaatggaaacttatccaacaataaaagtcacaaaagatggatgaagacgaaaagcacagtgggtgaaagaatccagacataaaggagcattaatgtataattactaaaaaattctattttatgtgaagcttaagaacccacaaagctcatttctggggggtagaagtcagcacagagggttttttgggtgtaggctgggtgactggaggcaggggtagagaaaactttccaaggtaattgaagtattctatgccttgacatgactgggtattggtcgcacaggagtatgcatttatcaaaactctttaaacttcattcttaagatccatgcattgtattgaatgtcaattatgcctgaataaaggagggggaaaatgttccacctggaagaatgaaggagactggactttggggctaggattggagggcagggaggggcctactgcagtctctaaggtagggggccgcagaatggggaggaaggatggacccgagggatgccaaggaggtatagaggaaagggtggatgcctgattggcaggagtggggtcagtgggagagagagggggcaagggtgactcaggttcctctcttggcacctgtgatgggttagtcctcagcctggtccagctccatcccgtgggcttcctggctgagtgaagccaggccccggctgactcacttctgaccatgaggtgtgccctgccctggtcagccggcctcacaggctcacctgtgtcagcctcctgtgatgctccctgactcgcgggaggagaagcccagatgacttgggctttgtgcagtcagctgacagagccctctagctctccagatgtgcttggcaagccagttgggctcatgggtggcttggggtgcccagggaaccttcagaacctgcattgagaatggccttggaagtgtagcacaatctttctgtattacagaggagaagactgaggcccaggagggcaggaagtagctccaggtccccctcttcccacctcctccctattcccctctgatttcagctctgcagctggtacagtggcccacactggagacagaggaggggcagtggtgggaagcccccaggagtcatgacccctcagagtacagcacactagggtgcggaggcatagacacccttggccagcgctctctgagtgcctcagcagctcaagtgtgcggtggccttgggaagagctggtgggaaagtcccaggcatgtgtcatcctgttgtcatctatcccaccccggggacttccccatatgagcatcttctcctcgtcatctagcccagcccccttgcctcagacaaggacttctcaattcccgtgagatgtattatgctgtgttctgagaaccaagcctcttggaaggggaggagagataatgcaccttctgggctctgcttccacgccagcacactgaactcttctggaataaaggaattgtgtttgtgttttaaaaatgctttattgaagtataacaaaaatataatgagtacacagatcatcaatgtagagtttggtaaatatacacatatgtacaccatgcagatcaagatttagaacacttccaggactccagaaggctggctcccttgtacccacttccagtgaccccctcccccaaagtagcccctattctgacttatctcaccatagattagtttcacctactcttgtactttccataatcatatagcatatcctcaagatttttgtagcctctagtcccagctacttgggaggctgaggtgggagggtcgcttgagcccatgagatggaggctgcagtgagctgtgtttacaccactgtactacatcctggatgacagaatgagaccttgtctcaagggaacaaaaaaggactcaaattaaaaatttttaaaaattagtgtgccacagatgccgaggtcttcggccatgccaattgtcacttgagcttctaaactgtccccattagagtcagggctcatcctctgaaggggccgtgcttccaatcttccctggtgcagtgattttaaaacatgcaatttct

SEQ ID NO: 54508 - DNA, 1663 bp, Homo sapiens
agctgagtgatgacaggtattaagagactgagatggtggaggagctactgagatgaacaagacctccaaggagcttataatctgatgggaaaagcacaatatacgcaaatcctcgacagatttttatctaccctcatgttgttccgaagtctgtagctttcattcattactctccggaacctccatccatttgtccttgttctgtgacactccttccaatatttggagattgtctgatttccacaggcctgagctgcaaatagaatacccgacctcccttgttacagagacttggcctttattgatgtggcctgagatggttgccagccctgacccatcaatggcttaaattctgcttgtgagcagcctgtattcagagaagtgtgacccagtggggggaccacttctcccagggctgactgaccagctgtgggggtttgaaggctggctctgtgggactggcaggtggcccagtctggcagcagagaggcaggcagtgggcctcagcaggagtttcaacaggctgacggagtgggcagagaggaaaatgggggtgggtataagctgtcacactaaagggtagactccttcctggcttgaaaatagggtggattctggctcttttttgccgggtctcaggtcaagctggggcctagggtcttgaggtggggcatggggatagtggcagggaggtcagtaggcctctactcctcctgagaggcccccatctggactctagccatgaactgggctaaagtaccgcagctccccagccctagcctctgcctgcctctctcaccttgacctcttcctaggggcagtggctcaaaaccaacaaaaacaacaaagatcccgccagccctgtcctcaacatagccaggccctggtcactcctctgagaactgactgcccagaactccccagcaggcctggctgtggtcccgcctggcagcacctgccctctcgaggacactgaccctttgttggaggagatggcttgtggggacagccttgaggaggggctgagctgagcgggtcaggctggcgccaggcgagaccaggagcctcagcacacaaggcctcctatacagtggcctagccggggcaagaccgggccctgagcaacagtccaactgcagagtctgatggggctggagccggggtcaggaccagggagggtgagcagggcctctacactggacacgcagagtccttcctctctccctcccacctctctcccctgagcttagcccctctccctacggtgaccctgccagctccagcccaggggaaccacacccacacctgccaggggtgactggacccacctttcttgtccctccaccagacagagaacctcagagtggcctctctgctacctctttcctctgaacttaggggtaacaaaggcaccctggctggaagtcagcccttcctggcctcagtgcctgagctgaccagaggcaggtctgggcctaaaggaggtcatttctggccttgctctgtggcagcctaacactaagtgttttccctgtggcatctcattggaccacacagcaatctctggaggaggtaccgatattagcagcataaatcagtggggagcccaggtgtgagcccagactgtctgatccctggatagtccgcacagcatggggaggtg

SEQ ID NO: 54509 - DNA, 2580 bp, Homo sapiens
ttttgctattatattcaaattgcaacgtatagatgctcatattttggaattaattacgttttagcagtttttctttttttaaaaaaatctgctggtaccttaataaacatggaaccagcaaccttttgccaggtgtctgttctccgggtctctgggcctggaggcgggagtgtttcaaagcacttcacgctccgcggccccaccggctggctgcgctgcccgctgcggccggcaggggtagtccacggacaggcctggaggaggcgggacgggggcagggccgggaacctgggcaagccaataaaggctgcggcgcgcggctgcgcgggactcggccttctgggcgcgcgcgacgtcagtttgagttctgtgttctccccgcccgtgtcccgcccgacccgcgcccgcgatgctggcgctgcgctgcggctcccgctggctcggcctgctctccgtcccgcgctccgtgccgctgcgcctccccgcggcccgcgcctgcagcaagggctccggcgacccgtcctcttcctcctcctccgggaacccgctcgtgtacctggacgtggacgccaacgggaagccgctcggccgcgtggtgctggaggtgagaccgctcgcagggccggcctgggcgcgggacacgggcccggggagagccctgggccccgggcggcgcggtgccgggcgcgctgggtgaccttgggcctccccatgccgagctctgggcctcagtttccccatttctgagaatgggcgtcagaatgatttcttccggcctccctcggagcactggagcgggggagacgggagggagggcacgtgtggaggagaaagctcaaggtcagatcgcagagagggagggctcagcacctctgggccggcccgggcacgagggaggggctccaggagccttctggggctgagcctagatccggagctccgaggtgggtgtcgggggtcttggggtgagcgtcgtggcccagcgggtgctcacgtggcggcccttgcacaacacggagcgcttcctggctccggccccgcccctgcggtcgggctcacactgggggtgctgggaaatggagcgagaggtggtttccagcagtagtgcgggcccagtaggcctcaggccccggccacctggtggaccccagaatgcccctcctgcgagtcgggacacactcagagacagtgtgcccggcgcctcaacccctgccactgtccttgggggccacactgagcacctcccctaactctgtttttgggtcttttctaaagcaaagtaagaaacagtcaccagggtagctttagagggaaagccctagtggagccttcaggtcggccacacattgacagcaggggtctgtttgtgttgactggcccgtatcccagggagcccttagtatttcttcttcattctcagtttcttctggaaaatagggacacccttcctgcttccatttggttccagggtgggtcttgcagcttcgagggtagaggctggctgggatggggcttcagccttccctccccacaccctcatgcctctccctgggcctcagtttcccaaccccgaatggaggagctggtctggcttctaccttagacacactctcttgtccctgaatttctgatgctttgggcccagctgtgggagcactgccagctgtgtccacagaagtaggccaagatagcattgtcatctcttctgacagattaggaaaccaaggccacctcctccagccttgggttcaggaaacggctcccagaaatgatagagctgcctcccatgggggttggcaataatgggaatggaatgtccacgtgcttcttccttagcctccttggccactgtgggggtgggtgggtgctgagagacacccaccttcacctgcctctccaatgaccatcctcttttgtccttcttctcccccaacagctgaaggcagatgtcgtcccaaagacagctggtaagacagggcctggggccttctgagatgggtctagagggaagggggccaggcagggcaaggtgggtggcgtgatgagaagagtcggggctcagagacccctgacagatgggagctccatgtgtggctcagccattgggtgctctggggcagccctgccatccctctctgggcctcaacgttggctctgccctcctctctcatagtagctgggagcctcagagccagtggaaggcacatgtaaatttcccggagacttccccactcctggtgcccagtgaggcagggtgatgggcacacagcccttgagtccgtgccctgctggccagcacagccatgagcctgtactcttgtcacagtgctcaggtactgaggacagggaaggggagtgacttgtccagttacatagcgagttgggcagagcagacccaagaggtgggccagagtctttatccccctgttcactgctggggatgtagcagggattttggctggaacgggtatgaccctggaattggggcctggccctgttgacctgtgtttctcttcgaccctcagagaacttcagagccctgtgcactggtgagaagggcttcggctacaaaggctccac

SEQ ID NO: 54510 - DNA, 4565 bp, Homo sapiens
agatgtatgggtgcacgtgtgagatgtgtgtgaatgtacgtgtggatgtgtgagtgtgcgcatgaaatgtgtgtgggtgcgtgtgagatgtgtgtgtgcgtgtgagatgtgtgagggtgcccgtgtgagatgtgtgtgtgtgagatgtgtgagggtgtgggtgtgagatgtgtgagtgtgtgtgtgagatgtgcgaaggtgcgcgtgtgagatgtgtgaggatgcgtgtgtgtgtgggcagggggaagcaagtggccctgacatctcagttgggatccagcctcagaacaaacggcagggaaagtgtcgagagtggcctttatacccaagcgcagcccgttcttggctccctccagttctctgggggagtagcaaggacacctgactttggagagatggcaagcccacctcggccctcattcccttcatctggggtattccctgccccttctccccacttccaaacacctgggcaggagccgggcacaggctgcacaggaggcagcccctggaagggtggcattcagatgcctagccctgggtttaccaggctgtagggaggaggaccagggtctctgaggagggcaggtgggggcttgactccccagcagactatgggtcccaggcttagctcagagctctgggccaggtcccaggacacactgacagacagctgtttgctgaaggaaggactggacaggctggtgggaatccgctcggtggccctggtcaggatcggaaacagcgcagacagtggaggttgaagggtgtggtggaggtccctgcttgtcaatctggggcagcagggcttccccaggcctcagtttatgcacccgacatactgacatgttgttctctgccctggcttctgccaggactgttaggaggatgcatgaggccagaaaaccgggaggaactccagcctatggccggagtccagcgcagaagccggctggtagcctgagcctgggagcttcagcaccacagtgggggctggtgggagagaggtggccaccccagggctgtgtgcgggagctgcccaggtgtctcctgccactcagtgtgtcctgattgcccccagcttacagataaggacatgaggctctgtgtcacacattccaagtagagccttgtcagggtcctgccagggggggccctgggctcccgatgggctctggtgctcaggcggttgagctcccgctgtctctccccaggccaggtctcccctctctgtgtctggagcagatgccaagggggctcctcacaacctggcaaccatcaccacttggcaccaacctaccccacctcccttcctcctgcctggtctcttgccctttgagaccacccagccctggaccctcactcctggtctgacctttgcaactctgtgtctgtcccagctctgccctgatacgctgcactgggaggtgagaactccaagttcaatcaaatcctggctctgccacctgcctgctgggtgagtgtgctaggtgagacctttcccggtggggcctcagctttagcccagagcagggccaccctctctggatcccttgccggccatttctttggtggactctgctctctcctgggtcctcagcagccagctgcctctggatatgggcactgagtccaaccggaaatccttcctgtccagggagttactggtttccacggctccaggagatgttgaaatgcaggctgtttgccttgggtttgtgttctttccacagaaaacaaaacaaaacaaacacacaggcgcatgcacactgccacacactcaaagacaagggcatgtcatcaaataacagccctgaagccccagcctcaacatgcatgggtgcccagtcaatgcttactgggtgcgcaaaagcacctggggccctgggttcgaggcctggctccctgcggaatccctggtgtgatcactggtcggatgcttctgcctgagccacagacagtgggaacaggagacccacactccccgggcccctcctgggtgcaagcagtgcgctttgtcttgtgttcagtgggttgtcttatccacacaacaccccggggagagctggggcttggagagggggaaagccacccagtgtcacacagctggggtggcagggctggcctggtggcagtgctgaaggggacaggaggaccctgagacagacaccggctctgtttcctcagatctgcccaagaagagcaatagccccacccaggctgctggaggacttgagctggcagagggcatggtgtggaggagggggtccattctcctctcaccctggcggagatgggtcccctctccactcccttgctgggcccgactggcagccacctgctttcaggccagtgactctggccattccacacactgagggcaggcaccgcgcagggaattctctagatgcaaatcagcaggaaggggctttgttctgggatttgctctgtaccccaaataagacaggaggtctggccttggtggcctctgttcctgcctttccctcccccttcacatccatggtccctgaccccaaggactggcattttgttttctctgctccatctcagaggccacagtcaggggccgtgggatggcccatagggatgtgctttgacttctacactattcaaaaatccagttaactctttaactcgttgccaaaatttaaaacatggaaaatttcacataacaactgggatttccagtttttctcctgctgcccctccctccctccccaggcaacaacattcatagatagcaacagttggctggagctgaggaccgggcgcccccttgacaggactctctgccccctgcctcctccccatcaccgtgggtcccacaggaacactagggaccatctgaagtccagtgctgctcaactttggatgcacaatggactgagctggggggctttacaaactcagacaccctggaccacttccttggcctccctggggtgggaccaaggcatgatgttcttaaagccccgcaggtgactcaggtgagcagcaaggttgagaacagcaagagccgatgctgggctttgcaggtgggtggctgctgatagtcttgcttcgttgtggttccccatgaccctcagcaggagccccacctcatgacagcccaggctttggtcagaagaggggcccctgccccgtctcccctggactgatctgtttgctcactgtgtgatgctccctgtctgggcccatatcctgatcttggccgagtgtgccaagtgggagcggcccagggctgccgtctctgaggcagattcactcctatatatggtcacccgggagtccccccgctgagtgaacgcgtgacctcatctgccgacaatctcacccagtctggggccaacctggggagggccgttgccctggagagtgtacagttgggggcagagaggctgggaggaggcaaatcaatggcatggaggcagggcaatgacaagatgacccagacccaggggagctgaggccagccccaagtctctctgatgcctgccccgtctcctgcctctgaaagagtccagcctccctacatgcttgcgtgaacaaggaaacctgtgagcctcttttgcttttaaaagtccttttaatacagcatgaagaggctatatttctataggcgagccgtatacagattctccaggaataaggcacacaacggaatgccatcccaagggctgcacttcggagacgtcggagccttctccacgcaccttccgagctgggcccacgggttctgttttgtctttttagctggactcacacgtatggacagacacagacacggacggggtcaccgcatgggggcggaggaggtcggacggcaaggttggcaacagagaaggataagcccgctgccacagcccccaggggaccgcttggccatctcgctgaaggctggaacacccccatttcagggttagtcgttggactgagctacaatgtagtgaggttggattaaatattcgtttagagtagattcaagtctattagatgctggagggctggtgtaagggctccggttgacatttccaagttcaaggagcatggcctggaggaggcgtggctcagatggcaaagctcccgagcggcgaggccaggctttgccccacttcttcttccctcctggggccctgctgattgagagccctcccaccaagccaagacgctggtggaccacagaggggctggttagtcaaataagctgcttcttccccttgcccactccctgtccctctacaaaattaataaaaccgtaataacaagataagaagaagaaggtgcaagagaatggattacaatgctgtttgttatcctcagtggaagaggcacaaaggggtcaccattccctttttcactatgtatcgaattatagcttcccttaaaaaaggcaatactttccaaaatacacatatgtataaatacaggacaagaacatattaataagtctaaacacttgaataatatgctgtctacttaatactgatattttcatccagggaaaacaacacagaaaaacaacaatatggcttaaagaattgcaa

SEQ ID NO: 54511 - DNA, 1340 bp, Homo sapiens
gttccagagatgggagggaaacctgggagggatatctgggtagctctctatccctgggtaggaatggactggcaagcaaaagaagaaacagcattaggcatcttcgctttctagaattctcatggaaggaccacgctgcagaagctctggggacactgctggcagaggttgaggaaagaggaaagagaactggcatttgtgtggcaccacctgtgtgctgggctttatgcttaggactccacagcccgtcagacccccagccaactctcctggaatcctgtggggcaggggacattatcaacctattaacagatggtgaaactgaggcacagggaaggggtgggacttgccaaagtgcttccagtgcgtgaagggcagcaggctaggctcagcaggctcttccacaaggccacacttgacccacctcttctgtctgccacccccaaaattgcccccaccatgatggaggcttgtgttggtggggagagaccccctagcaggaattttataagaaaattcctagggcctcccctcagcccagtccagtgtcaggccttggcggtgacctcggtagaggtggcctacagggcaggggtaaaggcagtggatggaggagaagaaggactgtgggcagctcttagcagcaaggagccatttcctggaagggttcagtcccgacgttgtttatgcttacaaatgagggcagggccaaggggagaaggaatttctaacggaacaaaggcttctctactcaccacacacccccctgcctcctcccagaaaggcacggcctcttctcataaacttcagcatgaaacagacggtaactgctgacagcactgcaggggccaccacccgcccggctgggaaggaagccaggcctgaccaggctctcctgacccaggcccctgccacgtacccctctgggggatcacatctgccaggagcctgggcaaagctcactggagctcagaaaccactccttgtagcacagacaggccctttggggaccagagaggcaaggggactcactcaaggacacactcagtaaatctgactgagctcgggggagggaaggatcctctgacttccagagtgaggctgggatcctcacacgagggcagcctgggaagtgggaagctgtggccagtatgggggtgggaaggaggagccaagccaaggagcagagaaggcagcgctgcagggcggggaagtgggaggggccccccgggcaagccagcggcttcggaagagatgtggaggaggctcacactctctgggcacttcttcagaatggttcagtgttttcttcccatccctgcgtgaaatctcttgaggtt

SEQ ID NO: 54512 - DNA, 495 bp, Homo sapiens
tgaaggattctgcagctatatccaagctcgacaggcaagaatggtgtgattttcgtggtgcctgccctgccatggccgggggcagcaggcacacatgacttgagttggcattcctgacctagatgatccctaaagatccttccaatgcaaatagttccatgagtagacagcacacaggcttgagaagtggacagagtccaagtcctggccactgcttctgcacacctctgggcatgtaacagaggctagtttttgccaggcttgggccacttgggtgctgggctttcaaagcacaaccctggctgcggaagctctttagaactgtgactcttcctccagggagcctttcctaccagcacttctagcagacatctcccctgccctccagggaccccctgtaccttgtggatctctgtaggaagcacttaggatacacccctctcagctcatgtgtctgtcacctccttccctgccctctcctcagggacagagacc

SEQ ID NO: 54513 - DNA, 1039 bp, Homo sapiens
tatctgtggaccctaaaagtatcatgggcctaagcatgcatgctactaactactaactcctgctactccaggagaaggcagcccagtgcacactatgaaagcactcttctgtgttcttcatctgatctgatagttccctagttcccactgatttgtacttactgcctgacttcaccaactgcaacacaagctcctagacagagggagcctttcctgttttgctcattgtggtgtcctctaatgcttgctatgtgtctgacacacagtagatgttcaataaataactgcagagtggaaggcgagcctacctgtttatgcacgtgtatttgtatcccagttggcagctgatttgcccaggcagccaccgtaaagatctggtagccctccttgctgcctgctccctcttccctctcactgggcaccacggcccatagatggtacttttccattccagaatccattccctccccttcagcttctgctcaccgctgtcttgtgtccagtcatcagtccctatccatgttcaggggctggcttccttagcgttcttgcctccttcagcccagcctccaacctgccactagcaggatctttcaaaatgccaatctgagcatgtcacctaaaacccttctccctggcctccagataaagtccaagtttgcacagcctgtcacacaagcccttcatcacctgttccagccacacccccactcctcccccaggagcgcctgctgtggcccagggctcacagtgcccggaaagcatattcctgttatttacacgcttgcttggaagccttccccactccaaatccaagctcctcctctctgaggcctcccacgaagctccaggctgagctgggcctgcacagtaaacctcaccacagccctggtcccccagagtggccaatactctttctatctgtaccaccgaggacaggggaagggccttatccagcacaggcctggtgcacaagaaactctcaggaatggttgggtgatgggaacatgtctggagtcctgctctgtcctggacagac

SEQ ID NO: 54514 - DNA, 3720 bp, Homo sapiens
caccattcataccctctatcaccttgtctgtttactcatccgtggcccccactagcctgtggctgtgaatccccgggtcctgcccagagctcaacaaatgtttggtaagagaacaaacaactgaaaagacgcatgcaccaaagaaacaccccacaaacggtcctccagtcactggtcacctgaagccaattccctgaagaggcagaaaagtctcttacaagaaagaaagatccccagccaagaaccattcctcacgtggagagaatgctttacagtttacaaagagctttggcatagaaatgcttttgcctgacaccaaagggtgcactttcagactcatcttcctcctctgcacccagccccctcccacgcctgttctacccacccaggtcaacaggtcagcctgggtagtgttggccttgggccagcattttatatgtccatgcctcccctagtaaataatggcagagttgaactcaagggcgaccctctgcctccctctcttacccccagcacacccttgcgtacataggctttcctccccaacccattcaggactctgactctcctaaaactcaccggtgtgcccaggtctggaaggaaagtgacccccatgtgtgtcctcccccgaacacacctcttgcatctttgcagagaaaacccccacaaggggaggaagtgaaggccacagatgggtgtctgaaattcccaaatgaggcaggagtaaatggagggaggggaggagtccagcccacggaaaggagtggtatctgggcaggccctggagactcttcaaaaagggctgggaggtggtggcgatctgtgtatttatcttgctggcaaagaggcgctgcccagtcaactttgtaactgaatccaccaaacaggcagactttgcaacacagccggcccaggtttctgcagaaggcgctgggcagctggaacctctccccccccctttctagcccccctcccaagagctcaagaggatttccctttcatttccttcgaggctgggagggctggggacagcgcagtctgtggggtcaagccctcagaaaccacttcctatgtggctgggggagggcgagcagctggaggacgtatctggggtccccgagtgagaacagcaggagaagccctctgggcagtcactgctctccagggtgcctttcgggtcgggaaccgcagaggtcggagaaaagattttaggcccttccagaggagctccgagcagaatctgcactctcggtcccagcccgcggtggccaggacgaggataaggttgggcgtgagaaggacacttcgaaggggctccccgcccaggccgcaccccagctgtctgaagaaaatccggagacaacccctcctcaactccctcccccaacccctttggagcagggctgccctggcagggagagggggcgggagagctccgccccggcctgcattgctccagcccgggctcagccgggaggtgacgcgcacccggcaccccggggacttcgggcggcgagtttggcagagttgaacgaagccaagccaagccgggcccggcaatgcggagccgggccgcgccaggccaggaagagcgggtcagacagggaacggcccgccacggtggggcggtggggcggtggggcggtgggcgggggcgcgcgggggcacccacctctccgcgctgcagctggaagaagctgttgagatagctggagtgcaggggcgagcccagctgctcggggcggcccttgccgaaggccagctccgggggtgcggcgccggcggtcggctcgggccggaaggcatcgaaggcgctagcctggtgcgtgtcctgcagcgacaggtagacccagttgagcagctgggcgggctggtacaccgaggcggcgctcgtgtcgatggccgacagcaggctcattttgtggcggcggtgccggcccctccccggccgcccgctcgcggcccccctccgcagcggaggggcgggcaccggggagcctgtgcccactgcccgcctcccgagccccgacggtgatcgccccgcgccctgcgccccgcgcgctgcccgcagccgctgccgctgccgccgcctccccccgactgcggccccggcgcgcgcaggcggtggaaggaggcagcgaaagttgggcaggaaacttttggccccgcccctccgccccgcccactgcgtcccgccccgcccggcgatccgctatctgcctcgcggctgacccctccagcggcggctccgggggtggggtccacgatgccccgccgcccactccctgccccgcctggcactgtcctcgccctgcattggctgtctcgttgaatatgaaccgtcaggggtggggagagaggggagtgaggctcatctgcatatgcagcacggcgcgggcccgcccatgcgaggccccgcccaagccccacctcgtcccagcccggccaacccagctccccgagctgccgggagctcagtgcagccccggcctaatcaatttcgtctccctctgtcgtcagcgctcttgtctcgttctttccaaatcctctgcaattgtttttcactcacttttcctttcctattttccctcctttctcatactccttctttctctctctcttagactagtactagtctcctgtgtccgtcgtccttgtatgtggcgccctccgtgtgtgtgtgtgtgtgtgtgtgtgtgtgtatgtccttctctttctctcactcttcttgtctcctttcttctatttccgtctggtctgatgtttctccctgtctctcccgctcctctctcagacgcgtgtacacagacgcacacacttctaactccctcctctcgctatcaccatcggaccctccccctcctacttaattccttccatctgcagaatcactttgcgggccggctgcgccaaggggggcccgggttcctgccccaggaaagactccccgccccctccccccccccttctcctatttctgctctgggcccgcctcgcttctcgaccctcttcctccaccccggctccagccctagcccgccccggtgccttggcgagtcgccaggacaccagcctgggccgggggagctcgggaaagcggctgtcacccatctcgctgggacaactcagctagtccaagactgcctggagggagccccgcccccgcctccgcctccgcctgacgccccaggaagccccggggccttcaccgtctctttctccgggtggtctttgctgcgccagcaccggggacctagcccagaggaactcaccgcctggctgggaccgagtcacctctcccactttcagtctggctctggagccattccgcccagcgttggagtgccagcttggccaccgtccagcggaatgacctctgcatgacgcctaacctctgcgagcaagcctgttttctcctctgtaaaatgggagcagtcatcctcccgccgccggggacatttgtgtgcttcccagcttgggtttggtaagcggaagatattccataaaggacagctcttccccgccacccactccacgagttactcacatcacctgcagggcacctaaccacatctatggtcgctcgcaccacgaaggccttcagtgatgaccaaatgccaccctttttcaccaaccaagaggcccttggatctcagatctccatcttgtctatcaatttgcagttattaatacaaacgacagcatatgtatcaatcatgt

SEQ ID NO: 54515 - DNA, 501 bp, Homo sapiens
agacaggttaagtaacttgcccaagatctcacagaaagtatatggcagagtcagatgagaaccaggtggtccagctgcagatcccacactcctgacagctgctgactctttggagcctgagacaaggttaatgtcacagatgctggatgacgtgaattataggacaagacatttggattctgtcctgtaggtggtaaaagtttactggtgcaggtctggggacagtgagaacattgcataatccccgggtaatcggttacataactatggagtcatccttggaaccaggtttttaccccattgttcccatgggaacaaatcctccaatgtatttttcaaagaggaaaccagagagttgcgaggctgctgttgacccctgggagagaagagccaacaatgtaggaggaagatcgaaggttgaaataaacactaagagaaacttccgaggggctgtaagaccctaaaccgtgctctggtgaggcactgggaatcatccttccc

SEQ ID NO: 54516 - DNA, 955 bp, Homo sapiens
gcaggtgccaacatccacattcagctttggattgaagtcagctgcaaataccccttccccttgtgcctggccctgtgaggtgcccaaagaagacatttgacaaacattctaaatgagaaaagaggaaggaggtgactcagtgctaggggtatttagtctctccaccccagtcctgcaataaacaaaacacaaatggaagtagtccgatcaactgatacaaagatgtgtacacatgtgcgtgtttgtgtgcgtgtgtttgtatgtgtgtgtgtgtgtgtgcatgcgtttgtctggtggaaaatctatgcattcttctgaaaataaatatctgaagaaaactaccctgggaacctgtgactctggaagctcagaggcgctgagtcatagagatggatgcctgagagggggtagtagaggagggggttagggcactaatgtagagagccacccagtgctgtgctggagaccctgccagcagccctggagagctgcccaggacacagtagttctaaggatggttgattattaatctggggttgaaggccaatccagtgctgtccctggtcatcacactgattggattggacatcgctgaggcacctgccagaggcctaggctggagagccagcttccctgtcactaactccaggctctgaagaagccctagtaagtcatttctggaggaaagaggtgggggcctgggccaagagactggcctcttgactggatcctggtgaggtccaggtaggggtttaggggggtcatcaggtccacctggggcctctctttctttctggcccaagcaactgggaacttcctgtatctacttggccatcagcaaactaaagtgtggtctttgccaaagtgaagaatagaagtggcatgtgcacgctagcgacaggtacaagccttgactgtggcatcctatgccaattcagcgccaacaggagaggtt

SEQ ID NO: 54517 - DNA, 1278 bp, Homo sapiens
cccaggctagagtgcagtggctcgatctcagctcactgcaacctccgcctccaaggctcaagcgatcgttctgccttagcctccagagtagctgggaccacagggaccacaggcgcccgccaggacgcgggcttgcttttatttatttatttatttattgagagagagccgtagcctccctatgttgcccaggctggtcttgaactcctgggctcgagcgatcctcccgcctcggcctcccaaagggatgggattacaggcatgagccaccgcttccggccaaaagagggctttagggcacccccagaacgcgagatctccctcatctgtcatctttaaagaggaggaagtggactcccagtccagccatagtccattcgtccggagcacggtcactccggggtggccaggaccaaatgtgcctccttctggcttttgcaccgcaccaactaatccgcgccaggccgcacagctgctctggccttcggggaggactcctggagcgcggtgtacactgctccggagtccctccgcaggagttgaggcagcgagttccgagggcggggtggggcggaatccggaggcacgcggacccggtggaacgcactgcgcagacggcgccggcgcctgcactcagctgttgacgagtctttcttccagctctaccctgaaagtcctccaggcaccggtcttttttttctgccttttgtttccctcccggcgagtcggcgcgacagtgaatttccgtttcccgcggtgtccaagcggacctgaggagttgcagctgtgagcaggttcggtggtgccgcgggctggggtaggcggcggtggggtccctggctctggggcactgggaagatcgcgagtcgtgcgcgtgggaaggtcctccggctcatctttgctccccaggagcagcatatttcgcatctgccagaggtgtgcccgggggtcgttgggagagggacggggtgaatccctgcagagagccgggacggggagggaaggtgtcggggagacgtggtttcctggcgacgtggtcccggcaggcgacttagacctgagccgaatgtgttgaccccaaattgtgcttttcccaagaagaaaagggagagaaacattaggacaagttcggaactaaaatatagtagagaagcaacataatctctgaaatcacacagctattcggtttcaaagagttcctagtgcccagctctcctaactcccggctggtgttccttgacattatggtgatatataaagactttctatttccgctcg

SEQ ID NO: 54518 - DNA, 893 bp, Homo sapiens
aattatgtctgcagaagtagagacacagcaagtataatcacaatttgcctcctgtgtctgaatgaaaacagctaccaaagcctgtgacactcgaggctcaggctcctgcctgggtctgaatcctggaattgtagggccttgtgcctgcaggacactgttttctcagagtcctacagctctgctgcttcactttatccatgtccaagccagaagatggggaatggggtaccagctgagggcccagtgttcatatctttcaaatcttcttcctgctggtgccagccagcctcccttctctgtggctgtcagagggggaccagtgccaggggtcacagtcagtccctggacttgccctctgtgtcacagcagagcctctgacctggaaggctgtttgcttgtcattatgtaactggtctgtgcttttgagcctgccaaagctcagggtttttccattctggaaagggattggttgctatcagagggcctgggctggagatgccgggaagtagattttataaaacgatgttgtcctggtaaccctgagtggctgatgggctgctgggaagaggggaggagatcagggcagtgggccatctgggaaagggtgcttacaaccctggtggccactgtgtgaggaatagacagtgtccccaactatgaacctgtggtttgtccagcaaacacaggtgtatgtttcaaaaaagctgggggcaagcagccattcattaaccaagcaaatgccttgggtgaggctagccattgccaacccacagcccagcctgccctgccctggcttatgcttgtgccaccttgtacctctcttctgagtagtgaccagcagaattgactggaatgcttgacaaaatcataggctcttggcctcattctggacc

SEQ ID NO: 54519 - DNA, 1305 bp, Homo sapiens
tataggccgggcggcgtgagggctggggaacctcctccccgcctgggcaccccgaccttcgcggcccagatcctcccgccagcccagcccagggggagcgaggcgacggttgccgggaagcgcgcagcacccctccctcccattcttcgtcctcccctggcgcaccgcccgtttttcctctttctccgttaaaaacaactgggtggctgtgggaagagggaaggtggcgccggcggagtctgggcaggcgcctcccactcagccgccagcagccctgggagccggaggatggctgcggtagcagccacagccccagaggaggcggtgcccgacgcccggggcgcccagcgcgcccagaccggcagtggccttcatggcgcaccagaacctaaaccagaggcagccacacggacacctgagccgcctcttcctgctagagccagcgaggtgtgcccgcagccgagaccccttcctctccacgtctcctcgtctccttgtctcccgtgcccgcgtcaggccgccagcctcgcccacctccccaggaagagcgcgccgggcgccgacttcccctggggcggcggccctggacgtgcggggggtctctctgggccggctgctgcgccttggccctgccctctagctcccgcgctcgctcccgccctcctggctctccgggcgcgcctggcggggcagggcggacatgggcaccaagcagaggagccgcacgcgcacgtactggggctcggatctaccttccagtagcaacggaggagccaatgggaccgcgggcggcggcgggggcgctcgggccaccgcggggcggttcccggctcaggtgcccagtgggcaccagcccagcgcctcgggcggcgctgctgcgaaggccctggcagccccgcgcagccgctcccgcggcggggccgtggggagcgtggctttgggggcccgcgcagcgcagtcctccttcagcatgccgaacagtagcagcggcctatagggcttacaggactcggtgcacagcagcgctgaggaaggtggcgcggccggtccaggccggtgggcgggagccccgccatgcaatgcctggtgatcagcaccttccagctcacctcttgccgcccatgtttggaggtgctgagaaacatgtctgttcttcaagagccagctaatcatttttaccaagtatgataattagctgccctgattcagataccatttccttattgtgacataggggtgactactgtcagaaaaccctgaaaatgttttaaaacaagaactaatggagcttggcgattcttgcca

SEQ ID NO: 54520 - DNA, 1922 bp, Homo sapiens
tgcagtggcgtgatctgggcccactgcaacctgcacctctcaggttcaagagagtcttgtctcagcctctggagttgctgggactacaggcaggcaccaccgcgcccagcaaattttttgtatttttagtacagacggggtttcaccatgttgaccacgctggtctcaaactcctgacctcaagtgatctgcccgactcggcctcccaaattgctggaatttattccaacacctcattcattcattcattcattcgagacagagtctagctatgttacccgggctggtctcaaactcctgggctcaagggatctttctacctcagcctcccaacgtgctgagattacagggacacgccaccgcgccagcccgaacatctttatcttaaacccagaaaagtgacaggagtgtctcccctacaagatgatgaccagccctccagacctgagcccaggtgtgattccaaggcccctgtactggggccagacagggagactcgctctcagggacttcccaaccagcaccatcttctccctgcggggatggcgagggagcgcgggccggccccggccctgcctccgcgctcgcgctcgacggtgtcctgaagcgcgctcccggggaggtgttgcagccatggctacggcagccggcgcgacctactttcagcgaggcagtctgttctggttcacagtcatcaccctcagctttggctactacacagtaaggacagccgctggagcgctacggtctgacgaacgagcgagcgctcggttcaccccaggacctgggctcacaggccgcgggccgggggaagtcgtgcaagcacaatcccgactcccgcgcgctaggagcggaggggaggggaccagactccgcaatgagagcaagcatactggtccgccagggtcttgggcgggcgcccagggccctgagaaaccggctagccaggcttttcttatatgggggcggggacggctggggagctcccagccaactctgtgtctgggtttttcaagaggatggtgaagtcggaggccagcaatgcggctaccgcctatttccgtccagcaagacccttgccctctctggtcacagtcctggggctgggctacttcgcggtgaggcgtggggtggggcggggcgggcctctgttttggcccgccgggccctcgtagggcgaggggagctctgggaacggggcctgtgcgcacgcgcatctgacggttgtctcggttactcatgtaagcggaaattcggtgggctcttaggatagtttctgctttctagtgttcctgtctttgggtcctcacctctgcatggttactaacgggttatccgagcctaagcctctcacgaagcggaaagtcaagttaacagactgccataggcctgccaagtcagaatagggcttccgaagcagaatgtttgagccaataggaattgtttggaaaacggggataaatctaaaggatgggtaggatttaagtggtaagggaggataaagaggctataactgttctgacataggtgtggaagcaagaagaaagctgtacctagaaaaagagcgacgtttgtttggctgagaaataatctgtttaaaggataacgagaaagatgcgtggaaaagtaggttgggggctaaggtggtagttttgtgtttttttgagacggagtctcgctctgtcacccaggctggagtgcagtggggcgatctcggctcactgcaacctctgcttcccaggttcaagcgattctcatgtctttacctgtagctgggattacactatgcccagctatttttttgtgtttttagtagacatgggtattggtgaggctggcctcgaactcctaacgtcaagtgataaggtggtaaaattttgaaggaaggcgaagctatttgggtataccaatagatcctggag

SEQ ID NO: 54521 - DNA, 1629 bp, Homo sapiens
ccaaaccataccatatctctttcaggaagcccaccctgatctcctatccacaatgctcactcttcttggaactctcacagcacttgtcctaaaatgttttccatgttctctaatgttctaataagctctcctttttctaactcctaggatagatacatatattacatccctatatattacctcattaacctccacaatgctcctattggataggtattatcatcctcattttataagcaagggaacgaaggctgagctgactcttgacatgcaaaggtcacacacccaagtgccagagccagacactttttttctaggcctccccatgagagcatcagtgctacaggctgtaggacaggcctctcttcctgtcccccaccaccacctgccacagggctggcactgtgaggcccttgacacatactgaatactggcaggaaccccggtggactctgactcatttctttcactctctgggtggcacctgtttcggtagcctctattacgtaggccccaggaattctgggggcagggaggacacatctaggacattcccctctctcccccacctcaaggcaggaccttaagtgatgtgagtgggagtatgaacatctccagctctactgagaagggggtgggggccctgggcgtgcactccagagccccaatgtcctgcccttgctggtcacaggtgccattaagtcaccgaagccagccagccagcctcagggcagcactccaccaaccctgaccatattttcccaggcactaaacaaaaagcctacacaggtgctgttaagcattcaactccccacccacatgccaggaactaaaatagctgtagcgtatgttaatcattagccaggctgcacctcagacctcccctctgagggctggcacctggggcagctcagcctggagaaactccagacaaggcaggctgggagagtggcagcgtccggagcctcaccaaggggctgaacttgagcaagcaggttctgaaagacacttcttcaagataaagtcaattcccagtgcactagcatttggattacataagaatcctaaaatactggagctggaaagggccttcatgaaatcatttcattcaacctgtttattttatttgaggtgggagctgagacccagagagcagaaagactctgcctgaggtctcagagctggctgggggcaggacaatgactagaaccacatctctggatttccaggccagtgcattatgaaccaggctggtccccaaccactcaacgtatttctgggctccatcacaccttctcaggctggagaatggacttgagaaatacaaaggttaaaccccggaaagagaagaaagttactactgcctcccaaataatgtcccatataatcaagccactcagaaaagtaccagccactccataggagccttatgaccctgtttctctccagatcccctccctatgtgtgatgacaacagagaatgggggttggcaaccactgctctgatctctcaaggatattaccagccacggagaccgaacatcacccccacctcagttcagggttcaaatagcctctgccctcaaactctcctagaaacagtcacctaggtgtcatatttggggttga

SEQ ID NO: 54522 - DNA, 5550 bp, Homo sapiens
ggaggagaatcatttaaacccagggagcggaggttgcagtgagccaagattgcatcactgcactccagcctgggtgacagggcgaaatctgtctcaaaaaaaaaaaaaaaaaaaaagacagcagaagaagaggggtgaatccaggaggaaggagggggtgcaccagaaaggtcccaggacctctgatgttccagcattcagcatgcattttggttccacattcagctcctgcccacaccagtttcttttctctattctacaatttccaagaagaacccacactaacctattctgtctcaactcccactcctgtcatcccaagccacacatcacctccccaatcacgtgaactaggcatcactaatcgatcctggccttctagacacatccacccagggtgggccctttctatagtatcatgcataaaggcgtcaggtgaggcttccactcccacctcttagtcccaattcatctccatctcaccctccccacgtttctctatccaaacccagccttcaaggtcctatattttaaccacagggaaaccacttccctgtgctgtctctgttgttcaactaacgacaactaattttctgagcacctacattaggcaaggcccatcctgagtgctgccaccaagaggtaagtcagaaacagcccccaccctccagagtcagaggacagggcagcgataagccacaccgccacacaaatactatgcaaggcgagagatgagaaccgagtcagtgccagaagggctgagtgagctcagagcatatcccgtccctcctgctgggagcaggcacccggatggctcccaggagggtggagaatgctaggccagacaggggagggagggcattccagtaagacagagagcatgagcttagcatgagctaagccagaaagacggttcaggagaagtgcatttcaactttagctgaaccttccactgctactatttattgacccttacacctgattatttatgacccaggcctgcctcacacactttatggctaatgtgggtgacacccatctgggatacacaagtgtggtgcagcagtcaccacctgttctgactggtccgtacctgagctctgtattgttattaaataaatgaatgcactgaatctcacaagcctgtgaggcagggattactattacccccattttacagatgaaaaaccaaagcacagacaatagtcaaagaaaagatagcaaggtatgcaggagcctgaagtagtgggcacccaatgccagggcaacaaactgccctggcacctcacctggcctctcttatcagggaacaccttgcagcacaaagaatgccttgaggaaaggggccctgttaatcccctggaatccccaacaattgactgccgcataaaaggaatgaggaaagcaatgagagccagtgaagggtgagcataccaggccctgccctgcaaacctagtccctgttgcgtgggcagggcagggcagggcagggcaggggctcggcctcacagctccactccatgcccagcgcagagaacagaggggagagctaccacaaacgccgaatctctacagagaggtcaaggattggagggcagagacagaaatgccccgggctgactgtttccagcttgggctagcactggctggcttaacttttcccctccaaagtctctaggtaacaaacttcgcgtgtctcctttaaaccaacagaccattttacctaagtcttaagggcctggcctgcacccatgggagatacaagtccaggaatcccttcctgaaactggggatcaaggttggggaaggggcgaaggcacgcacagcacctgggatggctcccgcattccctcaaacactggggagagttccttacaaataaactgcaatggtagcagctcccaggaatgtgcgtgctcccagtttcggaggaaagttcctgaagatagccttctctgcttaatctccccaagcctcgcctagaagggcgcgcgcaccctggagggctccgcagggctgcggggccgggcctccggcacccctcccgccacccgttgcctcctgcgcccagggtcacggcccctggccctacccaggcccagactgagaccccgacccctgagcccggggggacggcgagtgcaccccgaccacacatgagggagcagccccagacgccgaggctgatctagggggctgccaggccgacacggcccgcccgcgacccgccgacgccctcccctgccccccacccccacgcctgtagtgcaaccaggaagccgcagggccgcgctgggctgggcgccaggcagccccgggcctcacccgcggcgccgcggtgcactgccgccgcctggtcccaggcccccagccggctcgggaccctcactcacctggccacggggactccggacgcgaggggcgaaatgggacgtgggcgggagtggctctctccgcgggcgtcccgggcgcggcgcctgggttctgcctaggggctgggtcccactcccgctcgcggggcccgcggggcactcggggcactggggagccgcgggcgcagcagccgtcagcgccgggcggaaaactccgcgggcgcggctgccccaggtgccagaggcagtgcaagggaggggcggggcctgagcgcggccccgcccccaagatgaggactgggcacggcgggcccgcgaggagcagcagccttccggctgcggagctgctccaggaagtctcgggctccggaggtccctctgccgcccctaacccctgcggcgcccagtgccgcgcagagccgcattcgccctcctgcaggggtgggcatttcctaagtcctctccagccccgtgtgcgtcggttagtgactctctttaaggtcgagaaaactttttacactgaaaaggtcaaacgcatttcctttatagcaacactcggtggtggtggaggggggaaggtcacgcacagtatgtgaggaagggagcggtcagtgactatcgtggagaaacctgacaaaccacccagccgtcaaggtgacctcgacaggggtaaatcatactgattgcatgcaccgcttgtggtcttcctcccaagaacacctaaccccactgtaatcatgaggaaaacatcacaaatcaattgaggcccttgccatatacatgaccagtactcctgaaaactagcaaggtcatcaaaaacaaggaaagtctaggacactgtcacagccaagaggaacccacggagatataaaaatgacttaagatgttaataataggaaaagcccgggtttatgagaattccctgtattcacactttttctgtaaatctaaagatgttctaaaaataaagcatatttttaaaaggtcacccaggtaatatatgcatatatggtaggtatacaatttttttttttaatgagtggtggctgacgcctgtaatctcagcactttggaaggccaagacaggaggatggcttgaagacagggcttccagactagcctgggcaacatagtgagacccagtctctaaaaaactaaaaataaaaaattcaaaaaatgagtaaaaattgagattcactcttccctccactcccccagcccactcttaggtgtgtccttccaaatatctctctttaacactgtgtgtgtgtgtttacataaacgtattgtttacaaaacgatattgcagtacttttctgcaacatgtttttttactcactatatcttggagggtctttccatacaagtgctcctgaacagacctggttcttcccatccactgcacactgcgcgccatcgtgcgcttcaccattcttcattacctagctccttactgaaggacatttaggttgttgcctatgtttggctgttacaaacaagctgctggttcgattttcctttttttttttttttttctgagacggagtctcgatctgtcgcccaggctggagtgcagtggcgcgatctcggctcactgcaacttccgcctcccgggttcaagcgattctcctgcctcggcctcctgagttgctggatctacagatgcccaccaccacgcccggctaattttcatttttagtagagacggggtttcactatgttggccaagctgttctcgaactcctaggctcaaatgatccgcccgcctcggcctcccaaagtgctgggattacaggcgtgagccaccgcgcccggcccgatttgcgttttaaagtcgctctgaacaataaaatccggaaggactggaggggaggctccgaccttctccctgtctgggcaggtgtgctggtgccgggcaggaacggtgccttgggacagcctggccccggcctcacaacgggccccgggcgctcagtcatattccgtggccgctccaacaccccctacccccaccagcaggcgcggctctctttcggggctggactgcattttttggacatgagtcggcgagtgagggtgaaactcaggccaaagtctccagagccgctcggagaaaacgctgcctggaacagaagagcagaggatcagaggcaccaccagagactctcagagtgggttattaccctggtgggggcgcctgctgcggcgtaggagatggcgggactgggggcgcgggtgtgaagcccccaagaaatctgtgtgaatttcctggggaggtaaggtctccaggcgctctctctgggcccggggattggtccgggaaggtctcctggcgcctacccagcccccactgcctggacgcctgcgcctgctctgccgccccacagcgaccgcgaaggccagcttcttcgaaaggcccatttttctccgtggctgagcgaatgctcctagaataccacgtttataataaatcatgtagggtggaattcctgctggatgtatacacctttctgcatcagagctcttcaaacccagaatggtgaatagctacccctgggcttacccttttataattttcaacaaacctgcgtttagccccggctaggtgccagcaagttgctagggactgaggaggctctgcagaggacccgagctgaggccctaatcctcaaggccaatggcaggggtcaccgcccaggcacccccagagaacgcggtgtgaaggaaaagacaccaaactcggtgttcaaatgtgtgggatctattctagttctgattctgacacttgcaagtcatgcatcctccgagcctcggctttctcacctataaaatcttcaacgtgacctataaaaatccataaaatcacccctgcttcattgtttcccagggctcatagaaacatcatacaaggtaagggaaggtgagtgcactgtaaaaaatggtgacgtgctatatagctctgagtagtatggtatataagcttcctttttaaaaattttaattttagggccagtgttgggattacgggtgtgagttaccgcacccggcctcttttgttgttttctaataagtatatatgactatcatttccctcaaaagtctgctttagctgaatatcacaagttttaatatgctatgcttttgttatcacttagttatacatatttggattttgttg

SEQ ID NO: 54523 - DNA, 385 bp, Homo sapiens
atgattgacatttacatctctgagcagctgagcctggcaagacctaccaaagggcaagcaggatccttatatcttgcagaatatcttgctaaggagagctcaggaggcagaacagatggacacacctcaaattcattctctgatatgacccgtgctacaccaagcacctactctgtgccaagccctgcattgaaggcaagtatgagacagcagacaaggccagatgaccttggaaagccccaagtcctatgggggcaacaggtataaataaacaagcattgacatccataaagaattccaacctttgagagtaactgtgtgtgatgatgtgttcataattttgattgtggaaattattacacagtatatacatatagcaaatcac

SEQ ID NO: 54524 - DNA, 2884 bp, Homo sapiens
accctttttggggcctcagggccccgcatgtaaaaatgggcttcctaagaatatccaccttggtgagatgtggtgaggaatgaacatggcagtggtgtggcttaacatagctgctagtaacaagaaaaacctagtccatgagacatctgctccacgtggacaggatggggtgaccccgaggggaggatactaacttcccccggtggtgggggtgggcaaccagggaatgctatacagagcaggtgtcatgtctctggggttttgcagagaataactaagcatagggtagttgctccttgagtttttattcattgttttagcaggaactattaacaaataaaggctttagtttcatacaaacaaactgacaaaaaagatcttatttctctagagggtagggaaagtataaaattctgaattttcatgtcgagtgtgagccaagttagaggaacttggccacctgcaaaccactccctccctccatgggaaggaatctgaggcttcctaggtgaccaggagccgggcttcttttgttgccttaatttcctttcacctgagagaaaatgaaagccagggtctttgtgctccaggccaaggcccagatgctggctgcctgctccccagatgagacttcctgggctgcctctcccagcaccatgtaccctagagagaggccaagtccccagtgttcccctggggcccatggaggcccctgcctgagcctgtggtcctgggagctggggagaaggtagagatgctgctgtcagaggtccaggctaaggacaagtggggcaggtagggcaggtgctgctggccatggatggaaaggcaggcaagttccaagaccttagcaggccaaggactgctcaggccccttgggagcagacccgctccccagacagtcacctggcaaaggcagaatctcctcatgacgtctcagaagcttgtccaacaccagaaggcaagccccgcctatttaacatgaggccataggaccagcctccctggatccgaaagggccactcactccctccaaatgcactcagcctgcaggggatacaagggaccagggaaagagaaagacttgagggcctctgtctaaggggctggccatctgtgctaggacaagttgctgcttctgctccaggaagcccagataggactggactggacttagaccacttaccccagaagtccaaaaacccaatctctgcatgtctctgagtggtcagggggctgggattctaaagctgctggtcagtccctaactccagcctaccctgatgggccaggtaagccaactcaccctcagtcatcttctgggacacatgaagcaaacaaaatagccctgtggttctgtcttcacttttcagacaattgcccacggctcaacaagagctagtgggttaatcccctaatttccagtaacctcaggccttcaggacagagtccatggcctcatttctgaatctgctttgtcattgtttgagcctgttactggcatgagacaacggtgggggagggggtatgtcacaggctcctgagtcaaagctcctagttatacatctaggtctaaacacgtggctgtgggaccctgtggaagttatccagactctctgtgctttgctttcccccatctataaatgggatataaaaggtactacctcatcatgttgcagtgaagaaaaaacgagatcagttattagctgggtccctcgcacattacaggtgcttaggagacatcagtcctgctctaacccctgccacatgcctggcctgggtggggctttctggagaccctggctcagggcactggctgcctgtgaaaggggggtccaggagcccaggcccacaaggagccctgaggcctgttgagatgtgctgacctcacctggcacaggcaaggggagggagggggagctggtcagggtccagctgttgggggagacgagtgagggaattcactcttgacgggggtgccttttccactaaattaacattgccccagtctgagggagcagcaggagaacaccatgcccatccttacatcaagatccaacctccagcaccaggaagcccctgcctccagctggccatgatgatgacaggacaggctaaatgagagggacctggctttgccctgagggttggtgggtggggaaggcgatcagcagccaggcgtctggggaagaggagcatggccaccaggtgcctccagggtgagaccaggcccagctccccctggctctaaaatacaagcttcctgggaacctcccatgggaactcgcttcttccgaaatggccgtagcatgctgtcttctggtagatgggcttcttcaagtccaaatccctgcatgtccagcagaaaggaagggcattggaagatggaacaggagcagggtttctttctccatttcaaggacaggagggagcaacgaactgtaacacagccctcctcgcatggcactacgcctccccaccgcagttgcgcgcacccatcctatctgtgccataccctggtctcgttttatagccccacggatgcttagaggttcagggaccaggatctaactccagccttccggtgcttttctcctcccactccacttacctggcccaggccaatgttgacaccactaagctctagaaacggaatagacttgctgacttgattcccagccatttgagctatttggccttatattaataattattttcctaagatccccgcctgcctcccagttgctcagagatggccccactggagttggtgttgactgggccagcaggaacctggggcagcctcctttaacctgacaaccaggctttctgcactggggatgcactgtgctgtaccaagagctcacagaccctcccacttctg

SEQ ID NO: 54525 - DNA, 3859 bp, Homo sapiens
tggtgtgtccacgttgattgggtgcctcctccatggagctttccactggcatgtgcaggggaaggacgtcatccctgacccccaacactctaggagggggagacaagcccaaacccagtgtcagcaaccacagccatccacagcacggccgtgaagctggggttcccaactcgctcctggctatcgtgctaggacaagaatccacccctcagtgtgattaacccactgctcatgaactttcccagccagctcaacacacagctcccacatgcagtgccgagctacctgatctcctgcccccacatcctcctcatttctgtccagatggacgcactgggcaatatctggggattgctgctccaaagccaccagcacgttgcaagtcttgaagtcaaagcctaggcggaagcaaagtgagcctaagtggggaacaggtcagaaggagggggccacaaacttcccaatggatggctcggttcctgacatgccatttggtgtcagcgtgggggttccctaactagccagggtctgtctaggcccacagctgaggcccaggatgggagaggccccgcaccttcccaccctatcatgtagaactctttggccaaccaaaattctccgtggtgcattttactgtgctcaattagaccttggttaacacacacacacacatcctacagagacctgcagattaaaacaaggtgatgccaaggctcctctggctgaggacggtggctgactcataccctgcccctcaggctctcccacaggtgcctcccagaatctagtttgagcatcactgcactaggagaaaatcaagagcccttttgatactgtcactcagaagcccagctgtatgcctgacacaactattaaacatactgaacaaatacagtgtacatgaactatccagacagactccccaagccagggtcctctgaccctgagaggtacacagagtctggggcaaatggaaaagccacctgccctttcccatctacaaagctgaggcacagggtgcaggcctgctacacctagcacgcgaggcactggtttggggaagtctggactagcagtagctcagccctgggagtcccatgaggaaactgctatgcaccgagaccgtgcgcacctcctcacagctgtgctgggctcagtcacagggactgtgagaataagggactgaatacatggacgcccccaccacaaggtcaagcatagtgacacactcactctccaaacccccacagccatcttccttcccatctattctcctacccacacagcctgaaagggcttacagagaaaacacacagatccaagctgctgtttctgtacaagcttcaggtggggatctactgccaaggaataaaactgaagcttttcagtctgacacagcccttgctcctgggactccttgagccaacatgaactcaagtttagccatcagcatgatatacttttccatctccactaggtccctgcctagaacgttctacctccagctcccaccccacatgcccaaaccccacgtccactctcagtgcatgtccctggacctgcctgcagttcattagacacaatgccaggaacttaccccagggcacctcatgttgcatcatataccctgggagtatcaggtcacctttgccctttacaccctcctgtttcctaatgaatgtttttgaatgcacaaatcaatgaacagtctttaaagaactgccaaaagctgtcctgttctgcactgaacatttcagtttacctaatcactgtctgtctaaataatgaatctccccagggctcaaaaatcaagcaagggctccaaggaatttggaaaaacagaacttaggggaccaagaggggaggtacaggacttggaaaggacaatgagcccagcaacaccgcagccaggagcaacgaggagccactggcctgagaccctgctaaggctgttcctgtccactgagcacaggtaaatggacaagcttgggcacagggaacctcagccagctgagctcaactcagccacggctgggctctcgctcatttctccctttctagggaacattgcctcctggaaaatttccctcctgcctaatgcagaaaaagttttgcacttgaataaggtctaaatgtacataaacaaattggctttttttttggtagaacaggctccgtgtggtaacgcctcaggaagctgcagctctgggacaatgtgtttcctctgtgaataccctcatgtcccgaccaggagaattaactggttcttactgcttctcttcccactgagtctcaaaatcactgtcatgcactcaaccaatattaattgctcatgagtgctttgggctgcaccaggccatggctggactgaacctctgcgagtctgcaccatcataccatgagtgggctctctcacttacaaacgggggtccagcaccctgacccacaggatgctacacatcaccctagacaacgattatgtgacacaggcagaaatgaacacctttaaagtcatgcttctctctgtgcatcttgattacaggtgtatagctaggcaggatgacctggaagtgggtctttttgccatggcgtgaggtcatcacatctctcacagtgatttcagagaattagggaaagagctaacagagacccaaaatgaatttttctttaaaaattagaattgcctgaacatctaatgccagagaccaacgtggagactctaagaattggggccagagccctgcccaggaagccagcatggacaaagggcccctgaagctcctgcagaatgtgatcgcatacaggccctccgcacctggtgtctgctctctgggtcctttgctgccctccaggctgtgccgctgcctggcctgctcagtctcagatgttggaatctgcttcaaagttctgctagggcctgtgccccttccctgggtggtggccccacactatgtagcactggtgctaacctggaccagcctcgcctgctgtcagcaccagttctggactgagtcatcttgctccatgtctatgattgcaagtaggtttagtggaagcacaggagtcctcagcctagtggctgcttaccctgtgatctcacacagactgtttacccctctaggcctccatttcctcgtctgcataagtacataaatgattaagacaacacaagagactatcaccagtgcctggcagcgagcatgtccccaaaggagggcagccccctttattcagtgcatctttctcttccaaagcctttggcagcgccaagaaggcaaggcctaaaacaagcccaatcaacaacagatgggcatgtgctgggcccactgggcatagtcgcctgttggccatccttatgccagagtctttgacccctggaacctgacagacaagtgtaggagtgttttcctcctggtagtattgatgctcccatcgggctgaaaggcacgggtttgactcagcactggggtctctatcagcagagagcaacagggatttcagacccggaggcctgccctcacccttggctgagtcatcgtagccgatgtgcttgatggtgtccctcaccacccgctggtagtccaccatggccattgaggtgatctcaccacacagcagcaccatgccggtcttgcacactgtctctgaaagggagcggggagcgaggagagttagcagccaagtgccagcaaagggaagctcacattcccagacctctcacagtgcagacagaaaagacacaggaggggccttacgaggaatggattccagaaggaaaatagaaacgccaataaaaagaaaaaatcccagcaccaagcactgagcatcttccaatgctgtcttggaaagagtcagtcat

SEQ ID NO: 54526 - DNA, 3788 bp, Homo sapiens
aatgctcttgggggttgtggggcaaaactgccaccagtcaaaaaccactggctaaagtatatggaaggagtagtgcactgaggtgtccaaagccaagttacaaggtaggaaagataaatatctttgaggaagaacaagagcaaggaagatggaaaaaggcagacttggcaataagttagcaaacactcgaatgaattttgaagagggacttaactatagaagtctgtacatctatcccccaggggtctccaagagcagtggttctcaccccagagcatcagcatctcctgggaacttgtcaaaaatgcaaattctcgagcctctcccaagacctactgaatcagaaactctggagggtggggcccagccctctgttgtcttgacaagccctctgggggattctgaagctccctgaagtttgagaaccactgtcctacacttgaggctctgaatgtcctggtcctagttctcaccgtcatcaaggaagcttctctcacttccgcacatcacagtctacctacttttcagggaccaaaatcaatgcctaaattttcttcctgtttagaaggtcttctattctgctcttagagaacgttactgagtccccagcacctagaggtctaccccagcagtgaccagggtgcaggctttcatgcctaagttgcacatgcttcacatgcaaaatttagtcacccatggtcttgtttcaggaacattccctgttgacttaaattggccatggataatagattaaagctttcctaaaaaaaaaatacatataaaaagttaagacctgatcatatattttgcatgtgtcatactcttagccagccagctgctactccctgtcttggacccactgtgctggcgtgctggtggtgggccacagcacggcttcatcaggagggactgttttatgaaactactccatgctgtttctctagagatcccttctggtaactcacacacattgctctgaagagctctggtaaaagtgactcctacaggtacgaagttacagtcagataggaggaatgagctctggcattccattgcgcagtagggtgactgaagggctagaagagggaattttgaatgttttcaccacaaagaagtagtcaatgtctgtggcaatgggtatgcccattatcctaatttgatcattaaatgttatactcatggatcaaaacaacacacggtaccccataaatatgcacaattattatgtgtcaaattaaaaccatttgtaagtgactccctcagtataggcttggaatgatcgttttccagtcagtccaagacagcctacttacccgggtgtccctctcccacagactccgatgtgaacatgaagactccttcacttagagagtggtcacacaagccatccaccggtccattcatcttctcacacttctccactcacgcttctttcagtgaacaattttgaggctgtgactttgcctgagtttttttttcttcttcttcttcttctttcaacccaacaggcttgtctttggcagagccacggggatcacttctgcctaactgcctgtgagcacgtgagaacaggcgaggactgctgagaagggagggagtggatggaacacgggatgtgtccctccctccagcttgccacagcttgctcctgagcgactcctatatatggaaaagcgaaagtgcctgaaaaatcatgtgagaaaattggaggagtccatttcctaagaggggggtcttcttacctggaggaatttcaattcttatccctgactttccaaactctaagcacctggtcaaggtaaggtaaagaaggctgtatagttctgcagaattgaagctcctttgggactctccttcagctcttagccaatcttggtagtgctccagagttcacaacccaccttggagagcaggggtctgtgatcacccagagatacaagcaggcaacaagaaactctttctcagagatatggtttaggctaagattgcaacagtgcctttgctgttgggtgtcccctcctcccctgcgtctcatctggattggtctcttcccattctatcttctcagggagagcaggagcacgcacctgtattctgagccagctgtgatgttacacaacagattcattttagaggaaaagctttgagtccacgtgtttctgctaacagaaaccacctaacctgtcaacttctctaaaaggctggcaggcattttaacaagcaagatctttaaaaagtatctatctggggaggttacagagaacaatgtgtgtgtgtgtgtgtgtgtgtgtgtgttttttttagaaaaaaatgcttttgagaaatggattcattacagggaaattatcaaagtccagtttcccaaagcttccggattataaacatctacatattcagttctatacatgtaataaacatcgtgttcacataactcttgcattattttttgctttgaccaaaaaaagtagtaaacaggattatatctttagttcatgtactaaatgacagcgtctcacactctcagatccagctgcatcctcagacccaaggaacaatggggaattgagaccacagaaaatgaggatgggtggagaaaccagttcccactagaatgcaataaaaagtaatcaaccataaccttgtgcatcaaagcttggactgtgggaagcaaaagttaggaagcaatagcctcacctaacaattctggtgaccaaacccccctctgagtttattatcaagcatttggaaaaattttttctggcacacattctggtgctccaaagcttgagttttgctaactgatgaccaaacatcatcccttcagggaattaaagcagtattaaggtgacctcttctggaataaagtaagggatgttacatatgcatagccaatcaacggcatttaacaaggagtgaactgaagtgcttaggcacaagactgttgaaagttcagagaggaaaaggccactgggaagggatggacaaacgaggaatcaaatagggactttagacaacatcgccttgtcattgccagcacacaggactcctctgtttgcacttaagctatttcaacattgctggcccttagtaaatttcttctgggtacattagttttaaacctagaggcaatatgagctaatgtttaatttgaactgtagaactaggtgaccttagcagttaaaattgtatgataacaattatggtccaaatttgatttaagaacaagatgatgtgtaagtagcaggtactcttcaaggttcctagagttatcaggaagacagaaaacaaagcagtagctgccttctgaattccataagtaacagcaccatggggtggaaggcgtcagggtggggagacgatctgttacacagatatgtgtgcagggggctttggcagcctggatgccaattgagggtgtgagggagggatctgagaggcacctcgttaaaaactcatctcaagtatgagtttcatttaagaccccaactaaatactaggatgccttatattcttctagcaagtaaatgttaagaagcagtacacggagcatggtggatggaagtgcaggcttctggactagggtccaacttttgcctgtaacctcccatgcagcatggagaaggcttcctaacctttctaatctgttgtttcttctgctgtaaagcgggttaaataattacctacctcctagtgttattttgagaactaaatgaggtcatttaggtatgatgagtattggacaaagtgctagcacacaatacaaatttaataaatatcagctaatatta

SEQ ID NO: 54527 - DNA, 572 bp, Homo sapiens
ccccttcagaaagaattggcagatcttagcaaagatgtaattactttgagagttgaacctacaaggacttcatggccctaatttaccatcataaacacaaattaagtcctcccttacgcacagcctgttcccatctctcttatgcttgaattgtcccaatggccactccaagccccaaactccacactggactgattacctaagtccaatgtgtcaaaggcacacagttgatctcactgacatgcagcagccttgaactctgaagcttcactgacaagcctctggagaaacttggctttcaaaataaatctctctttcagtcagatttaccccgatgaatctctgaatataaaacatccagtggaagactgtttccaataagcagtgcctgtaagtcccactgagcagtttagtgatggagcttcgagggcacctgaccctaggcagcaccacggggccgcaggggtggtggggaggccctgccagatggtaccctttgctggctctgcactgccatgcctgatggggaggccacagggaggaccctaggtgcagaggtggggggtgcaggt

SEQ ID NO: 54528 - DNA, 3718 bp, Homo sapiens
tccatgaatcaattcataaccatcaatgtattaatgtattaaatatgatatacatggtttctacatttcagagaattagctatcaccctgtctcaatcctaaaagctctttacatagaacactgctataatgtacttaaatttctatttgacatctgtcagcatcccgaaacacctacgtgtacacacaaagcttccattttgaaataaaaacaaaatggccatagccagtcagtgtaaatcccttttatttttaaaaactgaagattgtgtcatctgaaatgtttaaatgtgtagaaatttaaaatatcacctccttcgctctaagtcaactcaccctaaactcaacaccttgggtggtaaatctgggatatttacaggctctcagtccacactttcctcgtggggttaaacaattgactgaaggttgcacaatatagccaaaggctatgggagagacacaagcaagtcacctttttcccagaatacaatgtcttcactatacaaattcctatcccaaacaatgaaatagggagttagagcatttgaggggaaaattgtggagaaagaaaattcagccatgaagtactctggctttagttttctcttgatatttttgtctttcccttatttgctctaaaaaatatttttatataaatgattagtacactttgagtctgagtattttaagtgaaaggagaaactattacttagataacttaggccaaactgatcctctcacacaagctttcattctgaaaatacatacgatttggtcacaagtgtttcatgttctcaaatgtctacctaattatttcatctggggatttgacagcagattttaaaaacctttatgtggaaggcagcctctccatccctactctttccctgagaccagttttctgggagagtcttgcagtttacaaagcattcttacaggtgtcagctcatttgagtgtcacaatgactctgatgtggggagtgctgacctcatttaacagaggaggaagctgaggcccaaagagattaggtgatttattttggcttgtacaactggtaagtggcacaacacctaaactcagcccttctgactccaagtagtccccttttcctacgctgaactgcctactaaagttattttaatttttaccaattcaagataagtaattacctacaaattgtggctgcttatttatctgctgccagctactctaatgccttctgcgccatagcttagaaaaaagccttttacaccctcatttgcagaaagcttaacactgactgttccaaagctatacccaaagaatccttgaacaatgaagcaaacacacatctctaattccactgctcagtattatctgctctcacaagaatcacttgtactgaagtactgagtgcagtgaatcatcagacatcataaaggctcagaacctgcagcatgggccagaggcattgtgccaccacccacctccccacgcaaagcagccctctactaccttccttagaactgctgctctgccctaacctcctccagcaaccccagggccgatcaaacacgtttcctctcctctcctcttctgagtataccccaggcccttgttattcagtgtggttccttgactagcagcctcagcatcacctgggagcttgttaggaatgcaggctctggggccccaccttaggcttggaaattagaatctacagtttaagaaaaagctccaggaatttataagaaattacaatatgagaagcaataccctataaaaaaggacagagcaactgaaatccatcctctctgtcacaccatccatccttggctactggttctttaggctctcagaaggtattatggccacattcaaacccttcagcaccagcccacctgctcatccattcccctagtatatccaatccagcttggttttatggtttagtaaaatagcttggctactttacactaaagtatgaatagctaagtgcctacgaacacagtgggttctgatggaatgttactaagaaatgatgagaaagttttaaagtcaaaaaaatttgggtttgtatctccattcgctcaacgatcagctgtgagaatctcagaagcttaaataactctctgaaattccatttctgcctgtaaaaatttaagctgttatctatcctatataagaagttgaaataaagtatcttgtgtaccaggactggcacatagtaggtgttttctttctttaatgaatgaaccataacatcagaggtaactaaatttcaaaatagtactgacacaaataaatatctagttggtgtccctccagccagtgcggccacatgggagacactctggggcatataagcatttcctgtgagtcataaaatcccatctgccaaccaccatcagccttagctacactggaagtcactcactgcacaccccccacctggaaaattctcctctactaacttatactttagagtcctctgattcaaaagctgcttccctttctccttgaagagtttaatccccaaattgaagaaacaaaaataatggcaagggtgtaggtaagttgagatgtttaaactgtgacaggctcgtttttagcacttaaaatttcatttcagcaatatcaccaatgtacatgcaatgagctagaatgcttattattcattaaaactggtaagagagtgctttccctgattttgaaattgtcaatttgattattgactgtacttgaagacaatttaattgaaaaatctaaacgaaaatacatgaaataatttttaaagataatccttaaactacataagtttttcagaactaataatggttcattactttattaaacaaaagatcaaaaagcacaaaatattaaaaaagagacatgtaaataaaccttacttttgccaaacaataaagaccataaaccaagttaaaaggcaaccaacgacctgagagatttcccaacacatataaccagcaaagaaattcagtcagataaacaaatcaatagcaagtattagcaaataatatgaacatgcaattcccagaagagcaaatccattgtccaataaacataaaaagatatgtaacctcactaataatcagagaaatgctaattaaacaacaaaaaagctaccacattgcactcccgccatgggtaaaaaatgttgacgtgtaagattaccaagtatctgaaaggatttgacataacaggaactctgtcctccgggtaggagtgtaaacgaacatgaccactttggaacacaatctagcaatatctagtagcttgagaatggccacaacctgagccccgggaatcgcacaagtgtgccttgtatacccagccaagagtagcattttcttaagtgagattgctgaccagcagtagcagcagcatctgggtgcttgttagaaatgcaaattctccagcctatcccagacttaaagacttacctgggagtgccttttaagaagccctccagcagatttaggtacatgctcaagtttcagaaccaagagagaaacttcacacattagttctcccatcttccaacaggagattgtgtcagaagggtactaggaatgtggtccttgatacattttttaaggaggagagtctgacagaccttctttactagtacagtgtcacttgcgagtcaagagaaaatgtgcaaacaatgggattccctcaaatacacagagatacatacataggtatatgtataaa

SEQ ID NO: 54529 - DNA, 657 bp, Homo sapiens
atccagcaacagaaagcttgtcaaaataggaaccatttccatccctaccactgggtgagtctaaaatgagtaccgctgctatcagcaagaccctctaagactctgagatacagctcagggtagcagctttatttgagagtcatctccctgcaaggacaggagcctctcttacttcctcctctctcttgtgcctagctctggctaagggtacttaataagactatacccttccagaaccacagtgtttcatgctgtgactagctgacacagagggacttttgctgccaaatctgcctccaagccacaccctctggaaactgccacaggctatgctgagcccaaagttctctgagcctgtcttttacccacaggcctctatgatggtgccctttgggctgagtcagggtctggaagtacactctgctccttgtctcccttggacactcttgcctgggtagatgtgaatgcaggtcatccatgctggggacacagtgcctggaaattgaattcacacagaaatcatatatcgctccagggtacctggaagttttttcctcaaaaatgtacagaactggtatgacaggataacattcttaattaaacatttttaatgaaactataatttatctttttatctcttcctatttgtcttagtcc

SEQ ID NO: 54530 - DNA, 2538 bp, Homo sapiens
accaaagtatacgaaatattttctggccttcaaatcatatgcctaactcctgcaggaaaactgcatgggcactcaggctgatctcccttaccccacaacttagatccacctctcacgttttctaagtttatttccacgctgtccctgggccaggctctagggtcccagaggtgaagtggaggaattcacagtttggttgaggagagacccccttgaatagatcaagctccccaagtgttgctgtaagtttacatggaacatggagtctgagtgggaagtcagggaggtgaatcacggaagcctttggactttgtacacctgtgggcagctcccagatgaaggggggaaggtgttgcaggcaaatgaccacctttgacgggcggacatcggcctgctttgccacttcaccttatgctgccctgtgactggtctttgcactgtgtcaccgatatgtcttttttttttttttttgagacggaatctcactctgtcacccaggctggagtgtagtggcaccatctcggctcactgcaacctccacctccggggttcaagctattctcctgcctcagcctcttgagtagctgggactacgggtgcgcgccaccacacccggctaatttttgtatttttagtagagacgaggttttgccatgttggtcaggctggtctcgaactcctgccctcaagtgatctgcccgccttggcttcccaaagtgttgggattacaggcatgagacaccgagcccggccaaccactaatatgtatcgtgagtcagctctgctgtctctgaaagtccaacctcctactttttgttttttgttgttaagacagggtcttttttttgttttttaaagacaggctggagtgcagtggcgcgatctgggctcactgcaacctccgcctcccgggttcaagcgatcctcccacctcagctccagagtagctggaaatacaggcacgcgccactatgcctggctagtttttgttttttacgtagagatggagtcttactatggtgcccagactggtcttgaactcctgggctcaagcgatcctcccaaagccctgagattacaggcgtgagccagcgcgccggacacaacctcctactttcatgaaagagtgggcacttccaacaggaggagtaagtggatgagcggtgtgtgacacacccgcctcagcgtcgcccggagtccgcaaggctgcggctcaccgttctctgccccatagctggcattgtggagtgaaagggaacgtgggtggaggattgaggttggaaattctgaatctgtacatacagcttgaaggggctcatcgaatgtgtcggtcctttagattccccctgcccatggaggttaaaaaaaaaaaaaaaacctatcaaaagagctattcaaaaccaggctgaagattggaaggaagttggccagcctcggctgcaggacaggtgcttccaggctccattaggggtgtccagcgccttcttttgccctaggcagcgccctgaagaacgcgtcggggcctcggttcgcggacttgaggagtggaccgaccgagcgctgtgcgtaaaaggaccgctggggcacacgcccgagcgccaccggagctaggagaccgcggcccggaggtcggcgagtcgggggcaggcccggagctcctcccacggggggcggggcgggtcacatggcggtggcgcggtagcgcgcgatgcagcacaggctagaggctgcgcaagcgcggggcccgcccctgggaccctccgggccgggcggtttggccccttagcgcccgggcgtcggggcggtaaaaggccggcagaagggaggcacttgaggtaggtgctgcgcgccggggctccgcgaggcacgtgatgtccgtaggcggggcctgccgcggcgtaggtggggaaactgaggcagtgcagggccggtagggtgggtgctgggctggtgaggcgcgcccctcgggcccgcgccaactttcttaggagccgccgcagcgctggcgctccctccgaggacgacgacccttccgccaccctgcgtggcggccgatggaaaaaccctgcgcccagacgtcggagaacggagacggggacccggcgctgctgcggcgggctagggccccctctgtccacgcccgcaagccttgagtgacgccggtggcgccaaccttcgcgaattgttgggacaaagaacagaggagagggccctgccctggagcatgggcccgggggccgccctgctggaccagccccaggtgcggacctggcagtcctcgtcctcgtctctgtgcccgcttagggtcgtgtcttttaagagggcacggtttctagcgttgttcagcgtttcggaggcacctgttccccctctttcccaagagtcacaaacgcctgactttaaattgggtagagcccagttgtaaacttaacagccctgctgaggtctaggaatgaaaagatgaacaatctgcccccagggttgttgctggagcgggaggtgaaggcgcaggtggagatggttagaggcaaaggaagg

SEQ ID NO: 54531 - DNA, 721 bp, Homo sapiens
tcagtactgaataaatgtttggaaataaatgttgagtctagttgagttgaattctcttgtgcctaggagcaaacatgccaaacgcccatcactggacagtgggaaggtggaggctgtttgagtgtggcaggggtgtgttggaagaatgtggagctgactgtgaggggccctggactttgtgaatgcactgatgtgtcctaggagtcagagtccatttgtgggatagatgtaaactggtctttgtatactgacgcagaaatgcccatcaaatctgtgatcagagaccattctatgtgctcctgagtcataacacaagtcagaaatccaggaacattttggaagtgcataaaggtacagaagttgttccaggctctgggaaatctcttgtttacagcaagcagataagagctgtggttttcctcctaattgttctgtgaactgtcatccagtaatgtgtaactttgtcaaattaaagaattggaagcaggcctgtggcaggttctttcctgtttgtcccaagaactttagttgtccataagccattgtctctgtaattcaattctgttgaattcatttcagcatgcacttgtggtgagcctgctttgtaccagaggtgcgctgtgctaggtatgagagattcagagataaactgcagaatgtcaccaaaggagagaaatctgacaggtccaaaccagtgtgtcaagcacatcagaagaaatgt

SEQ ID NO: 54532 - DNA, 3210 bp, Homo sapiens
gaatgtctctgcccaacttttcccaaggctaactccttactcttttgacttcaatttcagcatcgcctcctcactttccctgactgcttcatctaaggtagcttttattctctattctagccccttgtttttgtcccagcctttacttcaacttgtgattatgtatttgtcttctccactaaaaattaactttattgggcaaaaggcctcagctgtcttgttcactgaagtatcccaccatgcacacagggcctggcatattatcaggcactcagacaaacactcactatctgctgaatgaatggacaggttcccagggagtttccagagctgcctgggctgtcacagacaggttgcatccctcttaattaaacaaacaaataaaattagccaggcaccgtggctcatgcgtgtaattccagcactctgggaggcagaggcggaaggattgcttaagcccaggaatttaagaccatcactggcaacacagcaagatctcgtctctacaaaaaaaaaaaaaaaaaaattagctaggtgtggtggcctgcacctgtggtcccagctacttggggaagctgaggcgggaggtcgaggctgcagtgagccatggtcatgccactgcactccagcctgggtgacaaagcgataccttagctcaaaaaacaacccaaacaaacctgggaatggactgaacagtctccatttcaagatttcctccttccattggaattaacctgttggttgcttgtactggcatgtggcaaccagtcttagcccagttttaatagatccctgtttggtgttactcaacagagaagaccactcggccctcagccaccgaataagtttaagaaacagaggtgtggcatgcttcattctacaggtagggaggctgaggctggggagccgcccctggctatccctggaaacccctctaccccacaggaatcgtcccagccatctctttagcgtaaaggtgaggaacaaatctcagccacgatccaaagaggggcgccacccctggctgtccctggaaacccccctacaccacaagaatcgtcccagccacctctttagcgtaaaggttaggaagaaatctcagccacgatccaaagaaagcttggtatttttagcaccaaggccagaaggagcgtgtccttactccttggtttacaaagaaataaaaaccttttccccatccttcttttgattgaagactacccccgcccccaggctccaaagccgggcaggaacgcctcttatctccaccacagccattttcctaatccttcgcccgctctccacggtcatcccgtgtatccctcgagacgccgcctcccacagctcgtgcttctcccaggttcggctccgacaaggccagagcggcgtctgcgcagcgcaacggctcagagcgctcccggcggctacaagtgcccggccccgggccaggcccggcctgcgccgcgcacccactgggagggcgcggaccggggccgccccaagcctccggcaccgcccagagcgggacaaaggggcgggccggcgacccggcctcgcggtccccggtgccgcgcgggccgggaggcggggtgcggtgggggaggggcgaggcggctgggggaggggcggggccagggcgggcccaggcgcccggggccgcaccgggcggcgcagggaagcggcgccccttcctcggcagacggcaggcgccgcgcctccggccccgcccctccgcgcccctccgcgccccgcccccgccgctcggacggcccgagtcgcgccctcccgccccgcgccgcggaacttgctctaacttcctcggccgagccgggccgcgccgccgctgccgccgccgcgcgcgggtgagtagagcgcggagacctggctggggcgtcgggccctgcccctttctttgtctgaggccgacttccccgagcgttctccgggggcgagggctgctccttaggtccctgtttggcccctcagcctccctccccgcctgcccaggagcggccccgcgggcggcgctggctttgtctgccaggattgctcgctagaggttggaggcctccgccgggaccccgctgagccgaactccggcgccgcgcggacgagagccgcggcgggcccggggccggcactcctggttcggtagccctcgccccatcagcgcgccccggcgagtgcgcgcccgtgccgggcggggtgagggcgacgggagcctggacggccgctgctgctcggggctctgcttctcgtccccagcagcgagctcggggatgggccaccctttcggctcagtcacccaccctcggctcccaggagatcgggtccggggtgggggtgggcgtaggccggggcgggccgccccttcctcctgccccgccgtggttgtgctcagtctcccacgccgccgtgggtcccactctgcccggcttgggtttgggacggccggagtttgagtaggcggtgacccagcttctccgcgttagtcgtgtggggttgtgtttgggagcaaagcctgacccctgacctagccggagttctggtagagtgaggtttgtggctgcggactgtgcttgtcccgggccgctgctgcttctcctccacccccaggggtggggtgcgggtgggtaggaagtgcctgtgtgagggtgtgtggagggactttggccctgggaccgcaggagcacttgtcttggggacttaaagttgatctccggcgagaaacagtccgtgctagggggagtcgggggaagtcgtgggcccgggtactggcctggggctgggcgcagagcggtggtgagtgcggcggtgtcacacactcgttggctgtgctggcgctgctatccgggaggtcaggcggtgctgggcggctgtgcagagcattgtattggagcctctgcaggtgtgctcttggcagtggtctgctctccaggggatcttcctcccttccgagagggagttgctcttgggctagtgagagagtggcctgccaaatcctcaaaagtagccttccccttgccccttgaccttgaagtccagaagcagttagtgcctgctgagtgctccggccacccttctctatttgtgaagggaaacctggggacaggccatcggagcacccctatgtccttgccacatttcagctagccgagtggttggtgggggcggccgtctttccagggatcttcctgggccctggcaccc

SEQ ID NO: 54533 - DNA, 766 bp, Homo sapiens
gtgacaggccctggaaacccagggccaccagatgtattttccctttccttctcattgtgttgcaccccaacttcagttggagactctggatatatccatccccacatctctgaactccactgcttgggccacctaatgtcatcctcagtttagttaacaaagcatggttgagatttctgtggggtgcgaggcattgttgcaggcactattccaagtctggaaagtccctcaccagctatgaacttggtgtggtcttagaacccaggctggacatggcataggtgctcagtagtgtttattgatctgagcttgatctcagcgtagcaggatcatttagggagacggggttgtggggggggtctgagcccatgggtgcttctgaaggtttgtggctgccccaggaagaaagggcatggagctgcagaatggttggctgcccagggaattgtccccttcaccagctgggcagctgtgctagtctctgaggactggtgaaggtccttctcatgtaggaagtggcagtatgaagtgggagaggagatggctctgccctgaaggttgtggcggcagtgaagtgaagttcccatggaggccggggagcaggaaagccctgggttctggaactatttcctgaggcctcactctatgccaccatgtgctcaggaatttgacccatttaacttcaactgaggtagaattccttttagcagtgcctgcaaagtggcattgtgccaggcctgggaaacctttgctggcttaaaattta

SEQ ID NO: 54534 - DNA, 2123 bp, Homo sapiens
caatttctgtaggtcagaggtccaggcccagcatagctcaacttattccctccttagggtctcacaaagcccaaatcaaattgttggcagggctgtgcttctctctggaggctctgggaagaatccacttctaggctcattcaggttttcagcagagtgcagtttcttgctacatgtagaactgagtccttgcttactgtcagccagggctactcttagcccttagagtccctcactggtcctcgcatgtggcccctgtactcagatccagcaacagtgcatcaaatcctgctgctgcttctctgccttcctcttctgccctcaactgggaggaagctctgcttttaagggctcatgtaattacattggatagctcagatgatccccctatgttaagatcagttgattagtaaccttaattacatgtgccaagtcacttttgccctttcttttatgtaataatggactatacttcctgattttttcactttgctaaataaaaaggtggcaattaaaaatactttgaaatgttcctagaggtcttctgggtaaaaaatagtggtttgagtagacacatgtaattttgctttctcctaaacccccacataagataaagggagttgtaaaaaagaaatcaatgcatgaggacagggagaatgagaaagaaaacaacagcaagaaaaattttgcaagcaaagagtacatgaatgattcaatttaaaatgtaggagtggatggcatgagatttttttgtggggggaggggaacgtgggcatcagaggttgctgagtacaagaatagtttgaaagcagctaatgcagttacatccttccatcccttcctttccttccaccgtgatgctgggtgatggcctccgactttagctgcatgttgcacatttctgcagaaggaaaaaccaagggcccaggagcctccaggtattcttgggagttaatatagagaccacctccattctctagtcttctaaccccttttagcttctagaacattgacagccaggcccttatagatgaaaaggggcctcactgtggagtctaaccagcctaagatgggaaaaaaatacaaatgatgctgacaacagggatttcccagcaaatggcccaaccagatcatcctagacagaaacttagccgcccaaggactcagagcttccagctggttcctgagtcattcactcttagtcatgcggactgccagggattactagatggctaaagaaagtgcctaatatgaaggaaagcaaaacaaatgaaaaaaagcaatttgaaaggaagtctatttagagaaaagaacattttgaaaaaaattcttgtatccatgaaataagaacaggatacaataaaaaggaacagttagaaaacaaagttatcagaaaatttttcaaaaataagagcagagcaaagatatcagtagtagtattagaaaataaagttcagggagtctttcagaaaatagagcaaacagatgaggagatgaataataaataaggcagaaaaggtaagaaaattaaagcatcagccaggcttcccacatcaattgataggagctaaccgaaagggaaaacagagaagaaggcaagtgtcaaaatcattgaggaaaatattgcctgaaataggttattagcttctctatggaggggcctgtggaatattgagccaagtagttgaaggcagacccagactagtaccctcagatgtcaatatgcttggaagaaggggatgatgctacaagttacacagagaaagaaacaggtcaaatacagagatcagaaatctgagtggtttcgggcttctcaatacatctgaatataggaggtgggggagtgatgccttcatcatgctcaatgaaatggatccccagcttagaactctgcacacagccaaactcattcaagagtgaaggtatcctgtaatcccagcactttgggaggccgaggcaggcggatcacttgagaccaggaggtcgagaccagcctggccaacatggcaaaaccctgtctccattaagaatataaaaattccacaatggttgaactagtttacagtcccaccaacagtgtaaaagtgttcctatttctccacatcctctccagcacctgttgt

SEQ ID NO: 54535 - DNA, 645 bp, Homo sapiens
cctgtgagtagtatccttgcagtcttaagatacgcattttcacatcagcatctgctaatatagaacatctactaatatagaacattccaggttgcaacattatctttccaattgtatttttagaaattcccatattggacatttaggttgtttccaatttttttgctatcctagataaggatgcagtgattagtttatgtaatacgcattcttccctttagggaagggagggaaattatttgctgagatagattcccaggagagattaattgggtcacaaggtgtgtacattgttttgacctgcctgaacatacagtcaaaatcacatccccagaacgactgccccaattcataggaagttgactgtcttttggcactgtgtgtgtgtgtgtgtgtgtgtgtgtgtgtgtgtgtgtgtgtatgtacatgtgtgtatttcatcatttaggcttgccaaggcagagggcagggattgcttaatcagaaactccactagaacttaaggagtggcctgtggtgctgatgcctgcatggcctcagcccctgatttccccaacttaggcaagtgtgaggctgggaccaccagttgggattactgaggaagggatgttcaaggtgctctgagattattgcctggcacacagg

SEQ ID NO: 54536 - DNA, 1743 bp, Homo sapiens
agcccagtaaaacaggtgcctctggaaagcacttggtcttaggacagaagctggtgctggaagtaattgggggtggggtacagaacaccagtgtcaagagaaggagactctgtcttcaggacagcagatgcttgtggcatatccttgaacgcccctcacatctctgctctgtctgccgtgcgggagggcatggccaccttgagactggctctgtgcctggagtaagcatgtcacgtaggatcttccttcaatctttacaaccttcctgtgacctaggaaagataatccctgttttgtagagaacataggctcagagaaggtcttggactcgcatgaggccctgtcactaggtagctacaaagcagagactggacccagggccggctttgttcaggggaagaggctctgtgaatgtcaggctgagtcagcgtgtggattgtgcaagacccggaggccagcagggcagagcctgagagcatcgcctgctgctggtgattcgccttgatcttgctgaggaaaggcctctggggcctgcaggagttgccaagtacttttatacacgcttaaatgaaatcttgcaaggagccaaggccattaaatcatgggtgagaggctgcctttgacctgcttggagctgcatctttctcctccagttcagcagggcctggccgggtgtcacttccttttgtgacttgattgtgcttgggtaaagtaccacaagcttgctcgtgtggtaagtggatttcttgtgtctggactctggctggaccagcccagagtgccccaagaggacctcctgcctttcgcaaggtcatttgcctaaggtgaaaggtcaatatttaatcttcacagtgacccacaaagaggccctgctgccttgtccacctgccctggttgggacacagcgtggtctcactgcctgacagtgtgggtcatttggctgtagagctgcacaaccccaaagcccccctgtggaattcctacatccccgggctcttgtgtgagtgcccgtgtgtggaaggcagctgctctgtgggtggtaagatactgtgttgccagggtcagaggcatccaggtttggttcttaagtctgccaccagctagccgtgtgaccttgggcaaaggaccaaattgctctacatttgagctttcccatgtgaaaaatgagggtaattgagccagagttatgggatatggagggatagccttaggtccattaagtatttaatgcagcgcacagctcccaggaaagggcagctattcacagtgaccatagcagtttaggtgctcgctggtccagcagaggaggctggcctctcctcaagctgggccggagctgggccccgttcttcagtaggtaattcaattaggtcatgggagggagacaaagaaggtcacttgaggctggagggcactcagctgaaccctcactcccagaagattggcagccagggctcacagcagccagggcttacctggcctggccccatggaccatctgctgcagagttccagggaagggttccgtggggtgaagcgggccaatgacccagttcattcatgggaccgttatgtgagctctcaggcagatcacttcccctgtctagtcctccctcaatctcctggtctctgaaaccaggtttgttggtactcagagttcctgccctgggccactgttcattgaacccatgatctgacatgtgatccccaagttcctgtctttccggtgtgagttaactttagt

SEQ ID NO: 54537 - DNA, 705 bp, Homo sapiens
gagctgtgaagtgcagtgtggaggagagaggggagctccagcagtggttttgttgagtgtccttaaggtagacttttctcacctgtcccatgtggccccacaggatgagcggactgtcatggaaagctgttaggcaggggctggaatgtctgttgggaatgctggatggggcatcggcctctgggcttgttctgctctgaccataggcaaatgcccctgtatagagcttgacccatgcacctgggccaggctgagcttttcttggcccacatttgctctgaatgcctttggattgaatcacacccagaagtgtgcctgggggtagctagaaggacccaggcaagcactgtcctggtcttgaatcctggggagtcactcatgcctgctctgtgcctactgagggccaagccctcctcgttgttgggctgcaactctgaacaaaacaggtaacatctctggcctcagaagggcttagctggggagacacaatagagagacagcccctgtggtctgggatcagtgccgcgaagaaaatcaacagaggaggtcacacatggaggatggggagcagttccactcagggtggtaaaaggaggccttgaacgcagtgagggaggagccaggaatggatatggaggaagagcattgccggctgagggaacagtgtccaggctctgaggcaggggtgattttgatgacttcaag

SEQ ID NO: 54538 - DNA, 2811 bp, Homo sapiens
tcattgtagttaacagtagggaggaggctcagccctggccagtgaatggcctgggccactggatagctgcttatctgtgcctggagtctatctccagggctggagagctggggtgtgtggcagagatgctgggctgtttccccctgtcctcaccctgtggtggtgcctggtcctatgcagtctcatcctgtgttgggaacctctgaggggacctgggtcagccctcccaaggggtgatgtcttcgtatacaccagatagtgcactgaaatgagttcagggttgcagaaaggggaagaagcagcacagcctgatgtctgtgacccatagtctctccagggtggagtccgctctgagatcttttcctcttccttccctggggcatagggtcatctgaggttgaaggagtttgtccagatattcaggaaggtaggttcaggttatctgtcatctgcggggcctgaggggccatgtgggatgtgagctaggagcatgccctacctggcagtgtggactttgctctgtgaagcatgttcacagtgctggtttccaacctaacttccttctctctttcctctgccccgcttagttggctggagttgtcttccttggagtcgggctgtgggcatggagcgaaaaggtaggtgtaactgtcgcaggacactgagcttcaggcagccaaaaccagattcgttggacttcattttccctcctccaatctgttccctgacaacaagcatttcttgtgcagtgtcaaggtgtataattgtcaatctttacagacacagctcttgcgtactctgcccacatgatagtattggctgctggaggtatgggctgggctggttgggttttgagccctgtggatgtggagagctcagctcttgtatgcagctgtgcccagagcaggcttgggcaatccagcttcctgaccctgtctgtgcctctgggagcaagcgggcaggtccctgaatacaggcatgcttattgtggaagcccttatcctccaggatgagaaagagcaggcagcagggagcggggctgggtgacatgcccccagggtgccctgtggggcaggggtgggcctttaagcacctctgggcctccttgcccagcctcaggaggagaggggaggagtggagacctggctcctactgtcgggaaggacatggtgcagttgcggctccaggaaggggatgagactggatatgggcagggtggggctgtgctgctgcttgttgccctgtggcaggggtgctggggaggcagtgagggctgaaaaaggccagggagggaagaggggaggggagggaagcagtaaggtggagcaggcctggccagaaagagccaggaataaagcttcctctagtgtcttgagcctaggccttcttccttcagtggaacctccctttgcttccagcaggaggaggcaggagaacctaggtctacaggctttcctgccatggtcttagggactggataaggcccaccttcaggtttgggcaccttccaagtggcctgtgaacccctaaagggcaagagctggggtacgatgtccctttgccccagtgacccagaagcaggttcaatctgtgcctcacagcaccaccgtgtggcttcccctgggactgcagccgcctaactgggtgtggccctgagtgtggagctggctactacaattcctttgaatctgtcgatctaaaataagtgaaaaggccagaacctagtttagagagagtttattcaagcacacatgttgaggacaggcctacccaggaagcacaaattccaaagaatggaagtcagccttcctgttcgaaatgtaggagcttgggatcatttatccagccaaagccagacagagactctgttgcccaggccggagcgcagtggctggatcttggctcactgcaacctccgcctccctggttcaagagattcttgtgcctcaccctcccaaatagctgggattacaggcatgtgccaccatgcctggctaatttttgtatttttaggtagagatggggttttgccatgttggccaggcaggtcttgagctcctggcctcaagtgatctgccctcctcggcctcccaaagtgctgggattacagacgtgagccgccatgcccagacacctatgtatgtcttgatgcttagtcacaatgttctgattagttgaggcggtctttttctttcaggaaaggtatgtttaacattccacactgaagatgtaattgtccctgggtcttagatgatatctgatctgagttagtaaagaacaatgaaggaagcagttaaactataacagagatcagtgactggaaggggggctgtggtctctccggtcccttagttcaaccataatctaagaaacagaattgcaaacatgctacatgactcagtctccagggcttagcttcccccttggcgttttacaaaccctatggaactgctctgcccattgtgtgactgtgtttatatttaaattgaaattgaatataaattaaaattcagtccttctgtctcattagccacatttcaagtgctccacgatacctgtggccagacagtgggggtatagtctaaaacacctccattggtgtagaaacttctatggacagcattgctttggcctgcccttgggcgtgttttctactagagtgttcatattgaggctgttttcatctcagaagagtagtgttcttcattaattaggtgccaaattgggggactaacaaggtcagccacctgggtgaccagtttgaccacaggccacagggccccgtttccctccaggcctggaataggcacc

SEQ ID NO: 54539 - DNA, 1671 bp, Homo sapiens
gatgtgctttgttaaacagatgcttgaaggcagcatgctcattaagagtcatcaccactccctaatctcaagtacccagggacacaaacactgcggaaggctgcagggtcctctgcctaggaaaaccagagacctttgttcacttatctgctgaccttccctccactattgtcctgtgaccctgccaaatccccctctgcgagaaacacccaagaatgatcaataaaaaagaaaaaaaatggattaccctgtgcacagtattctgcatggcgtcttttcattttatcaacggtggccacttccctcgacgaaacagtcgacttcattgtgacaggagtagaggtccatgctgggcaacccacccccatggagggacactcaggtggtttccagtcacttgcacaacattgttgcgtgcgtgggccttccgggcccggaagaaactgcgttcgcgtgcaacattaaacaccccacatgggctggtgaaaaatgaaagcaaaataagaccagttgaaaggcggcagaaaacctgtgtgactactccgtggctcccctgcctggtttccagccgcggactctgctcttcggcgcgacccctgctcctggggtcctctggggtcctctggggtcctcccgcacacccaggccaggcacacccaggttgcgaagccgagtgcctccccgtgcggccgccagggagcgccccaggcctggccgagtcccccgccctccaccccgccaggcccaggagaattgataggcgggccccgaagcacgtcttcccggaaaccggacttcacccgctcccgggctgccatccgcggctgggtgacgctcacgtccccgcgattcggtgtctcttggcctcctgccccgctgacctgggagtgccagggatcaccccgcccccagcgagatcccctctatcgcacaaaatgggcgctagcgggggtcattctagtccggctgcctcactctcccgacggtcctccagggtggcaccatcaccgttctcgcccgcctccagccggcccattcctgctgctccctacagcgttgtccctgccccgtgccctcttgtggtcgtaggtatctggcggcccgggaaagacaaaaagaagctgcccgcaggagcccagaccctgggggccttcctccccttgtctcctctttggactcgggggtctcccaccagccacggcgagggggagaaagagaatagctgggcagaggctagggaagacccccggtctcagaaactgaggggagccaggactcccggtgggggagtcggtgcaagccctgaggtgggtggatgggagtccagggccacagctctgcagcggacaggcgagtcctgtggcggctctaggaaggtctgggcacactgggaccagctagctggacctgggtggggaggggtggggcgtctgactccactcctgtgacctggacattgcctagctgagcaggagctttgaccctatgggcttacagctcatctgaatctgcttagtccatcttcctgttgtgttaaccttgcagagggggaagaatgccaactctccacccctcttccatcactcttgggtacctgatccaccttccaccctcatgggcaaggaaggggacaggaaggtcaccaatccaaccaagccacagtgccaaatc

SEQ ID NO: 54540 - DNA, 844 bp, Homo sapiens
taaacaacaaacatttctcacagccctggactctggatgtctgaggtcagggagccagcatggtcaggggtctgatgagagccctcttcctggatgccaatggctgacttctgtatccttacatggtggaaagaaagtgtgctagctctctggcctcttcttataaaggcactaatcccattcatgaaagttccattttgttgacctaattacctcttgccctaattaccttccaaaggccatacctcctaataccattacactgggactagggtttcaatgtatgaattgcaggggtacacaaacattcagaatttcagaccattgttagagaacagaggctcatgcccagggtcacacagctggtcagtgatcagtggaccagcagggagcctgagtttcggtgcagtttccctttccttcccttctcccagctgctgccaaaagcccagggactgtttgaacaggactgacttttgctccactttgcatggagggaggtgcctctcctgcgctacttcaggactccagctggtggatgctgacctgagctgccctagcttcctgtctctcccctgggattcttttctgtcccctcatttcaggatgctaacgctgtcccctccctgcttccccatctctgcacctccctgcttccacttccagcctggaggacagcaggggcagctcgtgagaaaggccaccagctgcttatctcggcactccctgtaacccaatcccagctctcactccagctcagaggagctgggtggaagtagcaggttgtaggcatctacctgtccctctgctatctctccgagtggctagcattactgctttccag

SEQ ID NO: 54541 - DNA, 445 bp, Homo sapiens
attcatgaaagtgtttgggtatcgatgttcagcacagcctgccttggcttgcccactgttgttatttgaaactctgccagtactttaaccctccagtcctagtgaaggtgttcagagatgctgccagatgggcattaaccatctaattaatcattaaccattagatggttgtgtgggaggtgccagctggctttgggctggaagacctttgatctctttttgccatttgaagcaatgcatctgcatcttctctaacaccaggatggttccctgggtttgttcatctggccattatgtgtgtccagatgtgaaatttggagaaaagcttgccaaagtgtttttactatctttatagtggcagcattttgtaacgtgtggggaaagcagtattaaattgactttctttaattctgtgtatgatggagcagagatgaagacacctcag

SEQ ID NO: 54542 - DNA, 833 bp, Homo sapiens
agtgagatatcccttttgtatttcttcaaaatttcattcagcccaagtctataattatttggacaagattttacattcaagagataattcttaatttactaaataatttgtttgaaccattaatggcaaactgatattttcggagtatttcttttttctattcaagaatattggatgtatctgcatttttcaagtcttcttttatggcacttaccaaaattgcatagtttacattattttctttgaaataatagatattttataatataatgggctttcagattttcttttaagagaaactttcctaaaagtattataaactggacttgagaggagcatgactaaagatagggcagaaaaaatatttccacgattacgataactctagcatgaaatgagatgggctaaaattgaataaagagtggtaataatgaaaaaaatggcatttgtgagcagcttgcagttaataaaatcaataggacatggtgactgttgagtgtggaatgtcagaaagaggcaaaagtcaacatcgatccctaagttgctagcaaagttcagacctaggtttcagaaattaaagcatttcttcagaatgggttgggcttacagtgtatggtagagcttgtaggtgaagatttcggtaggtaattaaatatattatcatcctattgatcttggcttagacctcaatttcttcatttgtaaaatgaggatgattacagttacttcatggagtttgagcgacgatgggaaacatacttccggtttccctctttctcctcccttctacttttgatataattacttagctaccattcccagctgtaaagaca

SEQ ID NO: 54543 - DNA, 427 bp, Homo sapiens
aatgcaagttgttcattaaccaagatagcgtatatgttaatctaccaaagcagaatgcaaaaactagaagagaacaagaaggaaaactgagaggttttaaatatttgcaatgaaaaattaaggaagaaagttggtttcagggaatatttaggagctgagttctaccaaggcaaatttcagaatgttttctcaatgtaaaggggtaatagagggtgctctctgaggaggctagcactaaaggaagtcaggagacagaatttgtcatattgttgctatgtaaatattactcatctcaattactcatagatgaaaactttcacccaacagactgtttaaacattttgaaataactttattttacttcattacctaaacaacacatgaccactttaaataatttttcaaacggaaaacacaacagtaatct

SEQ ID NO: 54544 - DNA, 462 bp, Homo sapiens
tgtaagattaagaatggaaggttccagatatgctcacttactattataagccaggatctagtacagtgaaacttgagaaacatcttataaacatttaattcactttaacgtaaactagatttgataccttggacttggtgttaacctcccagaacctaatttcctgagtggcacaacaggggcacaatactcctgagaactatgatcaggttgcagtgtaataatgggtggaatccacactttggcaattctacagtgctttgccaactacaaagctgatgacctcagtgacagtgagcacacccagtgcccagagcttggtttgtaataccattcatcaattaaaacaacttggtttccttggagagatggatgattctagggttaaagcaagaaatatatatttacctatatgaacctggagcatcttatactgccagaaagcaaggaagtgctaaaaac

SEQ ID NO: 54545 - DNA, 666 bp, Homo sapiens
tgagattctcaacagtaatcagctaagaggtattgctctcctatcctaagagatgccttctttggcaagactgttcaactatgtctcattactaaaggtagacagaatcacttgggagaatccaggatgtggtactgttttgacacggtccaagctggatgatgtaagcaggagagaatgttctaccaaaaaccttgcaacatcagatcttcagctgtgcagccagtcagcacacagaagctaagctaaagagatgtggcatccccacagggaaagagaaagaagcattaggtaagcaactgcctcatttcccagcagtcatgaaggcagttttgctaagccatctcatagcaggttatggatcctgaatttctatgtattcccttagcccagaatcctgctttgcttttatgaacttaccacaaatgatgctcctgttctagagtctaggggagtgattccaaagtctggctgcagagtagaatcacctggaatgtccaaaataaaaatccagattctacccctgaacaattaagtcagaatctgtggggtcctggcttcagtgtttttcaaaagtttcctagatgattcttatatagagccgtggttaagagctatattctagggctcagattctgtccaactcctttggtttgacaagcaggt

SEQ ID NO: 54546 - DNA, 2340 bp, Homo sapiens
atcacgcctggcaaatttttgtatttttagtagagacagggtttccccacgttggccaggctggtctcgaactcctaacctcaagtgatccacccgccgcggcctcccaaagtactgggattacaggcttgagccaccacgcccggctgattcatttgtatatatttctagaacagagcttggtacgaagttgagcattcagtaaatatctgttgaaatagagggagagtgaaaaagaaagtaactctctcgcgtattccacaactagctcttcacctatcaaattacgcgcaatggaaacatcttagtcctcagagcaatcctgggtgcaaggcagaggcggctgttatcaggcctattacacaggtttagggtgaaacttgaaaatgtgggcgggaaagtcacaaagcaatgaaaaaaccatctagaaaaaatcttttctggatgtcaccatctaacatttggcatgagaccccagaaaccggatgactcggctcagaagcagacacatttgaaaagatatttatctcacgataaattaagggacaaaaaggccttcaaaaaggaacggaataaacggaataatttttaactctaacattactttctttcaatttttacataattcttatagctgcggcgagtgaaacgactaaaacaaaagcaaaacagagctccactgcccaaaacaaagatggccgagacgactcccatgcccacacgcaaaatggacgctgactatgacgttccctgcaacaatcctcaactggccccgccccaccaatttggaaccccgcctcctcaacccggaaccccgcctcccccagtgtggccgcttttccgacagaggcctgcccgtgattggctgctcgtactatttacgtcctttcgatgttgcgtcatgcagtgcgccggaggaactgtgctctttgaggccgacgctaggggcccggaagggaaactgcgaggcgaaggtgaccggggaccgaggtactgctccggctggccggcgggcgcccgggatccccggtggtcctgacagccgccctcacgggaccgctgggtgcggggggaagggctggaagcagcggtgctgctggctgcgtcagggccggcctgcgcgttggggtcgcagtcctgtgggtgacctggtggagagggcggcggcacaaggccctggtcaggcgggcaagggctcagtgtagctgtgcttctgtcctcgggcaacaaggtgctgagtcatccttgcggcgaggccgtacagccgctgcgctggtagcggcacctggggcaggggcagaggtgttgtgggttgacagggaagtttgctgccgggttctcatctgaatctagcgggctgggtgaactttctcggggaccaggcacccaaactcatcaatgctcacggaggcataagcccttggattagggtcggtagtattttccccattttatagcaacgacatctgagtcttagagatccacactcctcacaaggtcacttctaacctgtcagaagcgggattcccactctgggctgttacgccacatggaggtcactctgagctggacctcttcggccccaaccagtggactgagtactgaggaagatacaggacagccataggttgagatgatgtaatggcacgaaagttccaaaagcgctgggtgttttcccaaaggccgggtgccgaattttaagacccttaatagttcagttgcagagctcggaggacgctcgggtatcttaaagcaatagttcttagcttttggagtgttcgttaaaacacacgttcttggtcttattcctaggggtagaatcattaggagcaaagaaagacccaggagcctacattttaagatgcatccggggcactttcaagcaggtagtctaagggtcaacgctgtagtctgaacacggaatccttatgttacagatggggaaatgggcccagaagtatatcacttgcctagaattcactacaaatcattggcagagatgggctggtagccccagttggtttacactcgtcatttcattctgacctattgtagtcacctcaccttagcattacagaaacactgtctgctgacttctggttgaccacccatctagtataatgtgccctggagctaagataatccagtttttagcatgcttttcttttgaagacaccatcgagggagtctaatgtaagggaaacctggttggtaactgagtttacttgtttactttgaaagactaaatgtcctttacgcattatagtaggacatatagaataggttaacttagaatatttttatatctcatgttgaaggaaagtaatatttggtatgatt

SEQ ID NO: 54547 - DNA, 2125 bp, Homo sapiens
ggtaagggcaactccagagctttaaacagccggccaggcccggaagccttccaggctgaggactctcagcagcaggactggccgcgtcgaggaaaaacaagaggggaagagatggcctctgggggatggaagccccaaagggaagaaagacctggtttctggcaaagaaaccacattggccaggagctgtggctcacgcctgtaatcccaacactttgggaggccaaggtgggaggattgcttgagcccaggagtttgagactagcctgtaagaccacttcccccaactctaaaaagaaaaaataaaaattagccgggtatttgggtcaacttgtgatagtttactttgactagtgtggtcttagttgtaattatttcggaggcttggtgatacacgcctgaggcgagaggatcgcttaagcccaggaggctgcaagtgagctgtgatagcgccaccgaactccaacctgggtgacagggcgagactctgtttcaaaaaaaaaaaaaaaaagggaaaaccagatcagcacttggggtgccccttcccctcagctttagcaagatcctgtgttttgatgcggtaggcaggtgcgtggttcagtcatgcccaatgctcagaccactcctcacttttcacatccaggaggaggagctgtcaggtttgaccgcactcaagcagcaaatgtagtccaggggacggctagaggtgaggtcagccgcaagactggcgtcactgcgtgggcccagcaaaaacctgagtcaggaggcggccaggcaaggtcagtggagggggcggggcccgaagcggaggcggagcttgggaaagcctggcgtgagggcggggcggggccagaggtgggctgaggccggatcaggcggtgggggcggtccccgtagccccgtgaggctcgcgcctgcgcacgggcccgcggcggggcgggactgcgcgtgcgcggtgcgccggccctggagggcggagtccgggcgggcgccggccgagggagggggcgcggcggctttggagtccggcgctccctcaggccgcggacgcgatgctggttgctgcggctcgggcggcggggctggcggggatgtgacgggcggcccttcgtctcaccttccgtcctcgggcccgcaggtcgcagggcggcctgcagctgggccgcggccgaggaggcagcgcgacctccgcacggtgagatccgggctcagggccagagccggggccggggtcgcggcgggcgccgggggcagcccaagaccaggcacgcagtccggggcggggcggaggcccgaactcccgggctgaggcggtgtcgccctcccgtacccggcctccagggtgagcctctctagcccctcgcgagccgccggacgcggggcgggcgcggacccgggaggccggagggcgccctccctgcggctgtgacagcgcggggcctcgggccgcgggcgccgccgcctttcaggagaaatcagggcgaggctgaggcactctgatttcggagcctggttgcgtgtgagggtggatagggaaagtaccggggctccccgaatgagttcgattttttttttctttcaattactgggctaaatgaaagacacaccctaaaacacatcctgaggtgaaactttggtggggcacaccgttgccgtaggttcagatcttctctcttgtctttagacatgtattttcatacatttttaaataatgcacctactttcttgataaagtaaaaggaggaatgaagggactcctttgtggtggtccttggtggcgaagcttgtttccatttcagtaattgcatattcatctgtgtgggctccccgaccaatgaggctggctgctcccagacaaggccttagcggagtggaaatgactgacgcagggactctggtctcagattagagtgttggtagctcactcctgtaagagagaaattgagctttaagctttttaaaatagccatatgaaaagcattccttttctcctgagcattaaaatatgacggaacctattcatttggccagttgttttttttaaagcatcatcttttagactagagactttagagatggcagctgctctttaaccaaaaggaacttaagatgctctcctgcaaaa

SEQ ID NO: 54548 - DNA, 492 bp, Homo sapiens
gaatatgcaaaactcatgtatctctgtgtgtgtgcccaagctgctgctctacctggacgccacacagctctgtgtattggtgacatgggcttatgagaggatctccttatcctctggttgcaaagacctgtgggagaagtgtggtttccccaggtgggattgcacaatcactcaccacttctcttggcagaggttgggggttcctttggctccacattgctcccgggtggactgttgccccaccctgcttttcttcattttctgtgggtcaggctgtttgtctagtcagtcccagtgtgagaacctggatatttcagttgaaggtgctgagttcactcactgctttcattcctctccgtgagtgccgcagactgtaactgcttctaattggccatcttggcactctctcctgtttgctttaaatgtgtacagtttaattgcatgtcaaacattctgcaatggagtttttaaaaatgaaaaaaaaatttccag

SEQ ID NO: 54549 - DNA, 885 bp, Homo sapiens
cttcccagcactcccgtatcaccaggagattcggagggcttacaaaagatttcgataaatgtgccagaggcttcaagtagggcaaggaggaaaatgaacacataaggacaatgattgacaaggattccaggtttcaacgagattagagaatgtcagtagtggcaataccaaatcagtgagccggaaagacaggagagggaggcaagatacagaagggtgcatgaaagagagattgttggaaggtggggtagttactggtggcaataaggtctgaagggtgtgtaattgaaatgctttggaagggaagattaggttgttgattggattagctatgcgtattacaagaatgataatgtaattggtgaggaaaaggaaaacagtgatccaggccctgtggaagagtgaccatgaggtcagcagatgaccataaccataaaaggcaatgagggtaaagttcagtgacttgaacttcaaaagaatggaggtttatgagagaggaaagagggtgtttcaatggcgagaacgaaggatcctgaccccacctccattcagagcatacgaggttgtgaaaagaaaggttgccactactgagagagctgcaggtgtgcacagtagacaaatgagatatttcactgaatcaaggaaaggaaagttcagccaaaggccaaagcctgagaatttagtgatgatgggaggatgagttcctgtggtcacagaggctgttccctaagctggaggagctgtggccattgagagtacctggtggttgagcaccttgtggtagtggcctctttcctccatacagggggcaggtgggtgggcagcgtagcagtcaggagaacaaggcagttggcttctggtcaaccatcccttctgtgatgtgtc

SEQ ID NO: 54550 - DNA, 663 bp, Homo sapiens
tagcaaatttccagtatacaatattgcattattaactatattcctcgtggtgtacatcagatctctagacttactcatcttacataatcacaactttgttgtctttcactgagtattcttgatataacaagaggacagtatatgtgtgtgtgtgtgtgtgtgtgtgtatttaaccaagttgttttctgaaagggtcatatacatttatacacccaaacctattttcttaaattttgtattttacattaaataatcaacaccaccacaatcacaacaacaagctttactaattttgtgaaatctgatttttatgttggcaaatgaataaaacattcttcaagtacattctgaggtcaaaatacactttgggaatggaatgtgtctgtgagtcaccagcttacagaagcagccttgtctggcagggagctggtgctgcagcaggggccctcgcctgtcacccacagaagtatgggatctgatggtcagaaacagagcttggtgcccataagaacagacacaaggtgaacagatgtcatctacattaactcccagcctgccagagccttacacatgataccagcttaaagaacacagaaattatccttagttgcacagtcagataatcacatagatataaagcttacaaagtaaaagccagagtag

SEQ ID NO: 54551 - DNA, 785 bp, Homo sapiens
aaggtctcattctttatatatattagagtttcagtttctttatccattaattcctcaacagacatttaggctatttccacatcttggctattgtgaataatgctgcaatgaatacaggagtccagttatctttatgatgtgggaggatttaatttcctttcggtataaacccagaagaaggattgctgggtcatatggtggttctgtttttgatttctttaggcacttccatactgttttccatcatggctgtaatttgatatgttgtgttttcatcatcattcagttttaaactaccaatttcccatttcgatcttttttttacccatgcattatttagaagcacaattcagagacagaattaaatgcaaatgggggaataaacacccacagtagagcttgctctggagcccagctcagtgtggacagtcaggcagaaaatcaataggaaagagtcgagtgcggcaggtcacagtggcaagggacactgataacattatttccagaaagaggatttcaccatgagtgagaaaatataaaacaggtcagagtcctcataagttggagtactgattactgaataatttaaataaacagacttgaaaatgttcagaaccaaagaggtaatcctggaagaccctgttctacggaagaggtggtagctagaaagagagaagcatctctgggtgggttggtggtaaacgaagaaggaagcaggtagagggaattcacaattctatcaaaaagaaagagaactgatgaatcagaagacattttaactttct

SEQ ID NO: 54552 - DNA, 538 bp, Homo sapiens
ggctaaatgttgagaatatagcagaataccaaaaagataaattttaagttaaaattacatacataacgatttaaatgcatttgtgataaggtctgtggtgaaaagctcagggtgctgtgaaaagatagaggtgggagacaaggttcagtctaggacacgagaggtgtgcctgagaaggggccactgaagctgggacctaacgctaggtagacattcatctccaaaggaggacaaagtgcatgccagggagaggacgtcgtatgtgtgcaagccctgagagaggactggctggtagagatttagtaacaaggaaggtcaatgtccctggactgtggaaagccaggcagagtggccagaaagggggttgatgaggcaggcagagctgagctcaggaagagccacagaatccacacagatggtggagcaaaggacagaccaattgccagactacagacgttgttggaaattctgtaaggttgaatgttactgagagcttttgtttttgtttgttttttaaaaaactaaacatacataatct

SEQ ID NO: 54553 - DNA, 1341 bp, Homo sapiens
ttgacctaaaatttgaagtgttgggataaggaataaatcatgtgtcatataccaaaagtctagcaatgttcttaatccagcatgtcccaaaaagacttctatttggctacaaaatacatactctctcctctaactcctactagtatccccagaatacttaggaaagtctgcgctctccacaactgctgattcccattttccagttttccttctttctgtgagagtgagaagcagaacatttaggctggcacattgcagttcctttgccttaggctaactgacctcttcagatgtcaaagtattgtgaactcatattgggaatccccttttctgaagtggcctgacagggctttgataatctgagaatctttggcatagtgactgttccactgtcagcttcctgcatttatcatttaatcagacatgtttagtttttacaatggatacttttcttcccagaacaatgttgggataaatatgtcatttaagaaccttcctttatgtcttgctgatctcccatcaaattttatcttggtcacataaagatcagattgtcctttgtctatgagtgtgcaatgattggggaggttgagagaagggggctaacaataacagcttttgcggagtgctcccagaggaggatgtggcaaggacacaagacacaggactcgaactctgcggatgcaggcttgtccattgcaagaaggggcaaccagcccatttacagatgagcaaacagaggcccaggcgatactcaactggttcatgttcacatgatgctgggtacatgtagagcagattgtttgtttttttctgctgcagaatgaggtcttaccatgcttcctctttagctaccctgagggtttagtgctggcctctcatggtttgctcttcccagtgctgtctatggattgtacacaaagactctggtattgtcaagctggctttgccaagttgacaatcgatgttacagaggacaaagaatcccagaggatgaacttctgccacttgacctggtgtcctgggagatgcctgagtgattgatcttccctctgggccctgggaggacgcagttcagagatcaaagttcgaggtccctgaggaggcattaggctaagagagtgctcttcacagaagacatggagacaacacccctgaataaaaggaacagaataattaaatataactagaagattaaatttaaattggcacacaacccaaattttaagtttgggttttatcctaatgtctaccagggctttaaaatctttttgtttcataatattcaccaggaaaaatagaggtatagcttatgttagttctgtagcttaaaattatctt

SEQ ID NO: 54554 - DNA, 1118 bp, Homo sapiens
aaggcaggaatgtttaagtctgtagaactgtgcccacagccgctcctttcccccaggtgctctgtcccagggagatgggagatttatctataagcccctgtctgtggctgctgtctttctttcagagatgcccttcccagagaggaggaatctagagaggcattctggctacagtggctttggtgagctgctgtgggctccgcccagtttgaagttcctggtggctttgtttacactgtgaagggaaaattgcctactcaagcctcagtaatgtggatgccccttcccccaccaaattccagcgttccaggttgacttcagactgctgttttggcagcgagaatttcaagccagtggatttcagcttgccagactccatggtggtgggatccactaagctagaccacttggctctctggctccagcccaacagttctgtctcactggcagtccagacgcctctgtggtatataaaaaaatctcctgcagctagctgggtgtctgcccaaatggccacacagctttgtgcttgaaacccagggctgtggtggtgtaggcacctgagggattctcctggtctgccagttgcgaagaccttggggaaagcatagtatctgggccagagtgcatcatttatcatggcacatttatcatggccatttatcatggcttcccttggttaggggaggggagttccctgaccccttgctcttcccaggtgaggcaacgccccaccctgctctggctcgccctccatggcttgcacccactgtctaaccagtcccaatgagatgaggtgggtacctcagttggaaatggagaaatcccccaccttctgctttgatctcactgggagctgcagaggggagctgttcctatttggtcatcttgccaaccacccacagctatacgtgttttaaaaatggataataacaagtattggcaagtatgtggagaaattgaaactcttatgcgttgcttctaggaatgttaaacaaggtatccattgtgaataagtaagtttgatggtttctcagaaagttaaatatagagttaccataagacccagcaatttaagtgctaagtatataacctccaaaattgaaaacagatactta

SEQ ID NO: 54555 - DNA, 1024 bp, Homo sapiens
cacttttctctgagagaaatcagagaccagttgagtgactcctacccaatagacaaccaagaaaacatttacgtagaaagggtagtaaaagatgaagcacacttgggcacaggcccccaccccagacattgctccataaaatcaggaaaggaattcccaatacccggattctccctgtggataggaggttttaagacctcacatacagtgcaccagctctcaggttttgggggattggctcctaattcaccaactctgagagcaaaaggtattaaacatatgtgagtctctcagacccaaatgaaaaaagtggcagttttacataagcatgcaagcacttccaagggctgcatcccctaggaacagtacaagagagagtacataaaaattcagccccttgtttcttccctgaaaaggtttatgacacacttttccagcgggcacttggttagctggattcttgcatcacagggttaaagggcagaaaaacattagctaaccagcagccccagaagcagattgtcacttctcaggcctactcccttagcataccaaagttataactccaaaactattaatccatctcggaagaagtttgtctacaaagtgagcactcacactcttgtagcttccactgagaaactgtaccctaaaccccctcgctctgggagcagtggggactaagtatatgtgagtatctctaggccacagaaaaaaagggcagtttttatatggcatgtaagcactttcagggcttcatctcctagaagcagtgcaaaagggggttttaaaatgcagcttcttgtttttccccagaagggatttatgccatgcattaaatgtctaaattttttacagctacttttcaaaggattccatcctaaacctcttagctcttggatcaaaaaggactaggtatccatgaatctccttagataacaaaataaagaagcagttttaagtggatgcataaacacctccaagggatacactcccttgaagatgtgcagaaaagatgtagaaa

SEQ ID NO: 54556 - DNA, 534 bp, Homo sapiens
ctctgcaatgtcaatcacagcctaagtcaaactatcatcatatctcatataaattatgaattttgtcttttaactggtctcctggcttcaactttgtttgcctctggtatattttttcacacagcaaccagggttatctttctcaagcagagttccgattagatcactcctatgcttaaaataattcaatggctcttctggtatttaagctaaaatatcatctccttagcagagctcacactctttcacaatttgacccccatcgaactctactgactcagctttcatcacttcccatccacactctatttcccaatcaatctgaaccatgtgcaatttccaggatgcacacagttctatctcatgtctacaggttctatctcaatgccctattctcaaagaatggaacactcttgaactttttttgccatgctatcttctatttattctttaattctcagttcagataccatctaccctagatatctttttctgggtaaggactgccacagtactctgtatttatttctatca

SEQ ID NO: 54557 - DNA, 1784 bp, Homo sapiens
cggaacagccccccgttgggtgacctgtgtttgcactgcatggagggcatggtcgccgagctgctcagcggcagcggcaggttgctgctgggccctgatgagagtgtccggctggtgccatggctgctctgctctggcagaaaggtgctgaccgagagctgggtgttctggtactcccgtgtcggctccaaggtctgggtgggagccaggccccccatctccagggccgagagctcaatcgacgctggggaaatctgcttgtgagcaatgtcttcatccatgaggctgttcatgcgccggtggacctgctccaagttcacttctttgtcctggagggaaggcataggaaggtcaggtggagccctaacagtgagtcaaggctggcttgctacagctctggatgtctgtagtcaccaggcctggtcagcctgttgggctgtgggcgagtatccctttcatgtggctcccacctcccctcaattatatggccaaccctcagttatctggagaagccaggggggagacatgatccctatgtagcaaagaagatgccatcaacaggccttggctgcatcctgccttgcctctgtactcagtttagagtcactgccatacccagaaccaacccttaggacaagatgctttcaagagcaggcagagacaggagaagaagtcccacaggaataaaggaaatagtccttgagcccctaaggtgtcccatgaatttgccacttagagttcaagatgatgaaaagactttgtatgatcatccccaccttgcacaaaaggaggctcaggctcaggaaggttcaatgattcatcagagtcacaggaccatcagtgttagaggcagcttggaggcctggagccagagagaagccctgcctcacccagtgacctgtgtcctccctgtgcaatctcttcaggcagcccaaggagggggacatatccctgtctggaagggcaagggggcgtgggttcctgggtggagattgtgaggaatgggacttccccagggtcagctgaccctcctggtttcatgagggttcaaggctatctaagtgggtgatctcacacctgatactgtctcaccacagtgggtgatatcacaggaaattacttggcttgtttatttgcttaagaaagaaaacaaaacagaacaaatattgttcctttcaaataacttgatgatttccctacaatgtcagaataattaaaggcagacaaactgcctgaaagctcaaggaagacgtcatctccttccttggcttccccgctgtgaggtgggcacaggacctggtgctcagcagaggagccatatgagcttcccggtgaggttgaggctgcagggactttgtaagcagcatgggtgctgatgcgccagggaatgtggtgacctttccctcacctcaaactcctagagaaatacagtcccaaagctcagctcccaggccaccctgcaggtggtctcatgttggcatcttgtattggagaaaggaacccatcccctgtccaccttgcaggggagttagaaatattaagaaatgtagaagccctgaatatgccttcagaaggaaaaagaaggaatcacatgaatctaagagccattccagtgactgctttgagcttctgtggggacagtgggagaggatttccacccccagaagttcaactgaatgataggcatgagccctgaccagatgagtgcatgaatcacagggctaacccccacaaagggtcaactcagtgttcctcaagcaaggaggtgaagtgctctgcagttc

SEQ ID NO: 54558 - DNA, 4842 bp, Homo sapiens
tttattcaaaggactgaataagctgtgaagattgacatttaaactattaacgctatattctacttgacagtgttattaaatattaggtctgatttatggaaaggcttaatcaactggtgatccaggtcagccctggcactgggcagaaattgggttatgctggatgttgcttgatgaagttgatcaagctaaagaaaaaaaatcccatcagcaatattaaagtctgacttcatgtgatgaagttattatcatataaatttgaaccatttgccaggccaattctgcatctccaagtttctgtaatggatattttaatagtttgaaaatcaaaagataaagtcacagacttcaataacctttgctatgacacatggaaggagcagtatggctgctaaacatggaagtcaggcatatatcttgccactttggtgtcagagagggaaggaaatagaggcacaagcaaaatgtacacaagggggtggaaacacattgaggtgtagaaaagacgagattaccaccccatgggaagaggcacgagtggaatgaggttttggtgaccatgccactaattactcacatctgtgtgaaccttagccaagtcacttagtttctctgaggctcaggtccagtttctacatcttggagataataatcaagtagtcggtttcagatgaaagtatgaatgcatgtaaatgatctggcccagtgcctgggatgtagagattgctcaatagatttcagagggaggccaggccagaccagcagtaaagctgggtctcagcgcagtgagggagaagtttccaggccaccagagacagacctagaggacaaaaaggggcagagcccggatgctattcaacggtgcagagctggatgatgcactactagaggcacctatgagctgttaaatggtgcagagctgcagcaggagcttcttagcagagatgcctgtgcactatttgattatatagagttagaggatatgctccctactaatggtgcctgtgtgctatgagatgatgcacagctacaggcaatgtccctgggttgcccctgtccagaccaggagtcctcaaactttttctataaagggccagataatagatattttaggctttgtgggccacatatctttatcacaactactcaactctgctgaaatagcaggaaagcagccataaacagcatgtaaataaatgagttgggctgttgtccaataaacctttataaaaacaagctgtaggtcagatttgaccaggagtcagagtttgccaatccttggtctagtctttccttaggcctgataagtgcatgtggctgagagaaacggaagcagcctctctcctctctctttgtgacacatctttcaggaccaggaaaatcttctcccttacagaaggttatcaagagacaagcctgacaggaaccctggagctatttctcttgtcccttccaccatgaaatctaaagggggtaacctgctaactgatgacaggaatcttgtctccgatttatctgcctctgctcagtcagacagcaaacagatgactcattcaggaacaatcctgtatttattgagacttactgggtgccaggcaggtttgttgtgaaaatggtgtgttgtcgtctcttaataaataaaaattccctcctgttccaaattctttcatctttgcctcatcaaagcctgacaaggtctcacttgtccttatcttagtggccactggcatggtaaatcctttatttgcatcttttgctactgattttttaacattattgtattcatgagtaagactctatttccagagggttagtgatttcctaagtgccaccaatggacaaggagtagctagaaaaataaggaagtgtttctctaatgactcatctccaggtttattaccctccagaggctcaatgatgtgtattggcatgaaggagtggatctcagaggcgagccaaccatgacataacccttctccagttctgataccgtggacaagtgatcactctaaacaattccccacctaaattggtttcatgtcattaaaagccttaggactcccaaggagaaaataacagcataccatccataccaacctccttgacttttgcagcaattagacattgctccactaccaaacactccctgaaaatggagctgagtcatcaaggagcaactgaaaatcagaagtgtgattatctgtcaattgctaaagaagtttccaggagaagcccctcggtgggcttctcctcacctttgccaggctgcctacactgcatggcagcagactctgtttgggatttggagaggctgttcctccctgaatactaggcccataataccctacttgctggatttgttctgtagtttctggattcaagtcgtcatcctcacttagggcacagccatctccagactggtctgctctctgggctcagggattcacaaggttactgaagccatagtctgggggcagggagcagaggggccgctccataggagtagggaagaagacagatttcagacaagcatttaagtccagtagtcatccaaacaggcacacgaagaaggaggatttgagagtaaatctgagcttttcttccactaaaaaaaatgcagcacacttcattgtctgacaatactataaactcacttttatgacactagttataaaacccttaacatttgtctagtgctggcagtcagttttttttttcttagagatccaaatgcaagagagagatttgtgatcccaaagccagcttggggttcataaaatgaaggtaccataaaactaatccatcttatgtactaacaaagattaaattctataccatgaagtgataggcattgataagaaatcctttgtttgcatcgtttgctactgattttttaacattgttgtattcatgagtaagactaaatatcaccagacggtgagtggtttcctaagtgccgccaatggacaaggggtagctagaacaatgatgaggtgtttctctaatgactcatctccaggtttatcaccaaccagagggctcagtggtgtgtgttggcctttctgaggcataagcaggcacatgtcgcctgcaaagagggaaggggtgggtacttgtgaggagcccagcactgccttgcttggtctggacttacgcatttggaagagtagggaggtgagcagaatgagattaatgacaacctttgcttcaggatacccatacatttctccaggaatggctcactttttgaattaactcattaactaattttctaaaatctcctgctaatctaaacctaacaccaactctgacttaccaacaatgtccttctctcttctctgctgctctggctctcccacctgtagcaaccactgtggtgaatcttgtattttatcattgctttggatgtgtatgtgtatattttatacatttttaagagggtataatattctgtgttaccttctattagttgacccgtatgaaattgccttaatgttttattttactcaatattattctgctaagattcatccatttcattgtagacaacatctttctttatattgttaatggtcatttggatggtttccagggttttggttctacaggaagtgctactatggcctttcttgtctccaaaagtgcatgtggacatttattttgggtggatacattggagtgtaattgctgggccatacagtatgtaagtgtcccattttataagagaatgctaagctcttctccaaagtgattgtactgagcacacccccatcagcaattaaccaactgttactccacgtcttcttcaccgcctctcattttgtgccaaactaattggtgtaaaatgatataatctttatggtcctgatttgtatttcacagatcactaataattttgaacatctcttcatttgattactggccatttgtgttgcctcttctgtggaaggcctgtgcaagcctcttgccagttttctattaagttgtttgagcttttcttattaatatattcttgacagtaatcttgcattggttatatgtattgtaaacatcccctcccagtgtgtgacctacctttctattttatttaaagtggcttgtaatgaatagaactttaacaaagtcaaaagtagctatcttttttttttctaagcagtgcttttttttttagcattatgcaatgaatcttcttaagaccctgtgtggatgacagtattggctctctctgagagtcaaagaaagccaggaaagggaacgcgaaggccatttggcccaggcctcacatgcacaaaaggccttaaatcaacattgtgttcattatcttcaaatgaggtcacctacagccacaaagattcactgtcaggggtgaaagaagatcctgcagcttaaggctagagcatcatcctttgcagtgcagtgagaactacgaggttttaataaatcttgtaagcatgagaatagcacagttacactgcattctattgttattgtcaaagtatcactttgttaaatctaaacattcaaaatttatcatgatatgtattttcagatcatttaagtctctaaggagaccaccaaatggaaagttgcccaggtctttctcaaatccaagagttcccaaacaaggagaatggtgtgctccatttcacaatgttggtaacttacgaaactggaattcacacctaaatatgtcaagctccagagcctagacatcttctgctgttcaatgtggctaaatggcaatgaaaaatcatcctgagcatgggatcctgtacaagtcatcctgtgcacgaccatcttcccagtgggcctcactctacatggcaccacagctaggtgccc

SEQ ID NO: 54559 - DNA, 954 bp, Homo sapiens
taaatatatatttttttaaactcgcttgatatgtctttaccactaggcccctgttagtgtgtggtcagtgggccaggagcattgcagcatgtctccatcccacatctactgaattagtttctgcattttgacaagagtcccagaagaacataggcacagtaaagtcggagaagaacagtttctatatcagggtaccatcattttttgcttgggacctttatgagctgccttaactatccttcagtttcttttttatgcactccctatctaagcctccctcaatccagctgccaggtttctctttttctttaagaaaattgctttatttcattcttctcaaaattctcaagtggttttcaactacagttgggtcctccttttcatggcctgtaagactcaccaagacctgatccatgtctgcctttaaccccaaccatcacactttctacctcgctcactacaccccaccgacactggccacctttcactttctctttcaagccaaggtccttcctgattaggaactttgtgtatatccttcacgttcccaataaatcttatctctgacattcacatctcatggttggctctttctcatctggtgggtcttgcctgatgaggtttaatcttgataaaggccttctcaggttcaatcttcctaagtattttaatatttttaaacacaagaccttgctattttcttcatacttctcaaatattgaaactgtgaaaagcaccttccacgatagggaggatgtctattttgctcaccagcatccactaaacatctgacacactttctggcacgtggcatgcacttaacaaattatttgttgaatcaggaaataaattaaagaactagttgatggatagttctttaactattccataaaggaccatgtttaccatacagtaaatattttaagttgtctgggccatatggtctctgtggtc

SEQ ID NO: 54560 - DNA, 644 bp, Homo sapiens
cctctacctggcctccatgcaagccagagcagccctttttctgcccttcccatcatcccattcctcctacagcctcttctacacccttaaggaagcccatagcagaccatcccaattttcaattagctctttactgttcctcacctccaggaaatcttaggtacccttgaccccttgccaggacatcaaaacaggactcaacaattctgttatgaaataaatgagccattgtttgaaaagtagttcagcttcctttgtttgtataaatgacgcaatagcttctgctcactgtagagccagcactctgcctgccctcatactctggctgcccagcattcagctagcagagctgcctctcatccacctcctccatcacagcccattcccaagcgtgggcccagtcagcacagacagcaatctgcagcagtctcctctccctaaagactagcacgtggaggaacaggctctctgctcagttctggcaaacccttcccagatctactggtttacaaggagaacctggtataccagccagagaagtccaaagtcctaagaactttacattttgagaagcttaccccattttatcaatcaacttgtatttcttcacattttactctattttgttcaatcatatttaacca

SEQ ID NO: 54561 - DNA, 1837 bp, Homo sapiens
tccccagaggacaaccggtttgagttaaggtaagtaaggtaagagaagaggaggaggccagggtatttgctggcctcagaacagcaggtacagaggacaaggggagggatgtgggagaggacagtgggcagaatctgtgcaggtgcaggggcagctttggccaaggtaagcaaggcagtaggatgggagctggcagatgtgtagtggggagcaggcctctaattctccgatcaatggtatgggccatcccaggacactgcctcacataggcaagccacagtgcaagggtcacttgtatgtgtaaatattagcaaatattttaaaagcatggacatttatatcaatcaaatggggtcagggaagcaattagtgttggaaacccactggtcctaggaccatttaatcctcctactgtcccatttaatcctcctacaagtctgcaaaggagctactactgctcctactctatacacaaggaaaaggtttagagaaactaggtaccccagccagggcccatgactagtaataagagaagaagaaggagaagaaaatgatgaagagcaccatttaaatttacttagcattttacttcatgtgagcctatggctaattgcttttacatgaattgtcctattttatcctaatgacaaaactgtaaagtaaaattacattatatacccatcttatagacaggagaattgtgcctaggagagtaatgagactcgcccaaaatcaaagccagggacccctttccgtctctgatgatgttcagtagatgatgtttccttgcatggcagcctgacacagaagtcatgtccaagccctgtcaggcagctgtcccatcaaataaccagtttaaatatggagcaggtgccccttccacggagatggacattgcaacttttaaccttgttggactcctgccctgctgagccatcttccctgatgaaccagctaatcaaacatgtcctgggccaggagctgcaaacggctttgatttttcaaacacaccaaacaacaggaaagaaaaatgagcaaaccagacccagaaagaggcttgacccaatgcctccaaacagctcttccagctcaagaaacagaccctccatctgggtttacagatgctgtgcagtgacccacagcatggcagcctgacctgccgggtctgctgtgaggatcccacagtgtcagcatctgtgagtggacagaggtaaggcagggtgctttccagaggacaaagctcacctggcatcaggccaacttgagattaaaattgtttaaaatccagcccattaacagccaataatctcaatcctagcacccgacatctctgcccttaaatcacacacctggaattagatgctggggaccacacagaaccctagctgcccacttcagtgataaccataaaactggccaaacccaagggatgctgggaggccctgaaatgaagaaatagaggtccattctggttggaatatggatacacacatgctgccacttattggtgagctgttagatactcagcacgtgattacgcagttgtggcagtggacagaatgctggggtcccccagctggtcgcctggtagtccagaaaccatggctgtaaactcatctccagctgtcagaaaagagtaggtaagatggcctatgcttttacagagacagcctactatggaccagaattccctacttttgaattcagtttaaaggttattgaagcaatcaaaagcacctaatatataaaatttattgagaatgcaagacagaatctttagtcaaaatgccatttggcttatatttttaaacatttccacctggctgaaacaactgca

SEQ ID NO: 54562 - DNA, 962 bp, Homo sapiens
taagagaatcctggaaagagaggaagttcccaactagcaggcagccggatgcctctgctcccaatctgttggctctgccttagttttcagggtctccagccttaggggtgaggaagagtttcggacccccactcacatgactccataaaaactatgcaaggggaaaatgttccccagttgactaggtgtgcatgtctgattaaggaacactgactaggtgtaatggagtaagagcacccaccatgattctcccctgaacatagtcataaaacctggacagaatgcatgtggcagctattcaaggagtctgatgagtaaacatgagcaggcagataggagaagaaaacaagaattcaaagaataccaaactggctgtaagtttaccaagcttttatcctctaaccctcttgaccccttgccctagaggcagatgcagccacaaaagtgtgcagcagagcaagaactccaaagccacagctgattggagaaccatcaaagagtccctcagaataggaaaagagtgaggatgtcacagagaaggaaaatctcaggaaagcaactctaacaagcggtttatgaagtcctgggctcactcctgagctgctcatacgtggataggattctaatcagtatataaaagctgtgaataaaagataaaagacagattaccattaggttccagactggccactgggtggcacacacaccagaatgattagaagagcacggcaaatgctttcaaacctgagctgacattggtaacagcccacaggcaacatgctggagcttgtggcctgaacttaacctgctaaaacaaaaatatcaacacctttcacagaatgtaagtgaaaccaagagtcataatattcaaaattcccaagataaaatccaaaattgctcagaataagaacaagcaaaatctaaactcacatgggaaaagataatcagcaaacatcaaccca

SEQ ID NO: 54563 - DNA, 2175 bp, Homo sapiens
gaacagagtcctggggttgcagatttctctccaggagggcagcctggcagggggcatatatctgatccatcatcatgggcatgggcctgaaggagccttctgaaagccagtgtcagggggttgttgagttggagaggcctgtactaagtaagtagcacattagggtataagaacctgaggaaacacaggggctgagattccaaaactgagggccaggatgctggagaggtggaggcagggagcgggagtgactctgtggacctccaatgggccagtaccctcagtgccctttatgcatcccaggttgtcatggggcaggctggagccacttgaaacaacgggagtgggagcagcacagcctggcctggcacttgcgtctgagcctgtggctgccctgggccatggcactgccagctgtctccatcaagcccaggtgaggcgctccatggcccatcctgtccttgaggcccatagcagagacagagctaggggctgtggggtgtagctgtcctatgagcatgagccccagagcagcatgttttgacgcatttcttttttttttttttttcattatactttaagttctagggtccatgtgcacaatgtgcaggtttgctacatatgtatacatatgccatgttgggatgctgcacccgttaatttgacgcatttcttaaagatcctctgttaacacgtcagctgttaagccagtgatgaagactgtgagcatgatactttggactgatagcgtcagccaccgaccaggcaggcagagaagcggtcagaggctgagactttgagccttgcccctgcagttggcctctggctgctcttctggcccagagccacaagcagggactctgtgtgggaggcctgggtcagacaatgtttgttgagtccccactcggtggcagggatggtgggggcagtccatctgtggtctcttaatcttctttctagagaagtatgattatccccaccaaatggctgagaggatgaagaacagagaggaggaagagtggcccagcaccccccgctggtatgtggtcgcctgctcagcctcacccatctgcttacatcaccctgtccatctcagaagctactggcaaggcaaggaagggtctcaggcctgaggcccctgcaccacccggtgctgctcactccagctggccatagtcctaggaccccaggtggggaacagttgtcaaaacaaaccggggcagcacttttgccggtgcaccaggctgggcagagtgggaggggctgtgtgagctcagtgaatagattacccgcttcaattattttatctaacgatgacatttgtactgtaaaagtcagcacaaaaatcaatgagttttaaaggacaaaatctgggggaggctccagcccagcgacctggaacagcagcccaggaaccagaaggaaagagaggttcagaaccatggaggtgagcaagattcccaggatgccagcgctggggtggcccacccccagcagcaccagggagcagagaacaaaagcgctcagtgctgaggcccagccctgaaccccgcagcctgaagcattcattcattaattcattcatgcacaggataaatatctactaagtgacactgtgttccaggcagcctgctgagcacagtcttagagggacagtccctgccctcacccagcacagtggaggaaacagaagggtaattaagtccataattgcgcaatcaaatagttaaattacagttaaacaaggacaaagtctaacttcatcagggggtcagggagagtttcccaagaaaatgagtttaagccaaggcatggaggaggagtttgcaatgggtacagagaggtgggagagggaacaacattcaggcagatggaatagcatgaacaaagctgaaggtttggcttcctccaggaccgatggaagccattccctccaatgtagtcggccctacactcactcagcctctctcttggggccccaaggggtagtggatgaagctgggggcacatcagcagcatggaggaggcagcatgggtggtgataaagcatgtccttgggtgatggggaccagaaggcagaccaggcatccaaaggccagagagatggagcaaagaacagtggacagaagcgaatgttcagtggggggtaggaaatttggggagtccaacaatggc

SEQ ID NO: 54564 - DNA, 869 bp, Homo sapiens
acatccagagagctgagcacctgcagcagagccccaggcaagggaaaaggaggctgctgagcactgctctgcccctcacagaggccttccagggcaggctcctcccatcccttgtaggcatccaagggctatgcaaggtcacaagataacaatggatttcagtccaccagactcataaaatgaaagtacatgccagctttcaccagcacaaactctctgggcagcaggcagcccaccaacaatacctggccagtgtctctctccctagacaactgtcaaccaagaatctaactccctagttccagacatgcagaaacactcactctcacaccccacagagactgtgtcagtctgccatccttggagcctgacacatttttccagctatacaaacagagaaaccaagacccagaaaaggcccctgggtggaacctttgtccccaggacaaagttgctttggggcgcttacaggttgaatcacccatagctatgttttgtttggcttgtactgtgttgtttacattattttattagttggcaatagctttaaatcaaaatttacattaaggtccagatttggggctcctcttaaaaaaataaatcagcacatctacaacagtaggattttcacgcccaatggcaaaatctgttaaagctgtgtgacagcttctccttttaatggagatgacctcttcagaccctgtactccaggtgccacaggaaccagctgcccggttcatccttgtgtgttacctgcatgaggtggcaaccttgtgcaagagcatcatgtttagtccctggggaactgctgatgggagcggacgggcatcattcagaggcaaaatgaatgagcttggatactcaacact

SEQ ID NO: 54565 - DNA, 2059 bp, Homo sapiens
ttccctcggctcccaccacccagaccgtctgggcccccaagacttggaccacgcaaaactctaggactgtccaggatggggatgcagtcgccacaaccagatacacacgcactcacacatacaccaagggctacacagacacacaccggagaagcaggcagacactgtgtccactctaacaggctgacagacagtcgtgcacgcaccaacacacgctcagatggccccacacaccccaacaccctctcacagtaacaccgacaccgtgccaggcgcacacagcgacacacgctgacaacacgcacccacacacattcacacacggttccggtccggcctctttgatcttgccctgccaacttggcgagccccccgctgtacctccccctgccccccgctgctctgagctgcgcagaagggccctcccgacccgccgacggccccgctaagggcgcgggtctcgacgcgcgtccatcccggtgttccccgaagcgtcggccctaagtgtcggtagaggccgcggggccccgcgcggagatcggagccccggggagcggcaagcagccagcgggagcgcggcgcggccggtgcacagctcctccgccgggcggcgcggcgcggcccttcgggggagcaccgcccgccgagcccctcggcccagggaaacgccaagtttggacgccgcgcaccccctgccccgttggggcccccgcccagcctcggcccggcctccagccgcgcttaccgatgtggatgatggagtcggcccgcaccgacacgcactggcatatccaggggagaagccacagcgtcagcgcttccatgtcccccgggcgcgcggctcatccacccgggcccggggcgaggccgagggcagcgcgaagcggggaggcgctggtcccggtgcagtcccgggccgctccccgggagagccgagcccgcccgtgcgtcttcccccgcgcgcccgcccctgcgccctgcgcccgccccagcccagcccagcccagcccagcgcggtcgggctcccgctccggctccggtggcggctgcggcggtgctggcagcttgagcccaggccggcgcggcgggggcggcccgcggctgtggcagcggcgcttcccgcggctagagcggcttcgggggaggctgaggcggtggcggcggcggccgggccggcgtggcggctctgggctggctgtgtgtctgagccccggcgaggagcgaactgcggaggacgccccctcccctccccctccccctcagctccgctccccctcccctccctgcccgcctccctcccctccgcccgcctctctaccacgtgactgcggagcctcagcctcgccgcgcggctctcgcccgctcgcggctcggagggggcgccgggtgctccacgctcccggctcgggggacgctcggagaccggcacagcggcggggaccggcctgggctgcggcgcgccgagctctgacggttcgggcctccttctccggttcgccaggggcgggagaatggaggagggccggccgctaactgccctcgaggggctcccgaagcgccctggcgacctcagcagccgcgcgtctcgggtcatgtccccggccgaaacagaccgttcctcgtggagtgggacctggggagcaagaagagagaccggggcggggcgccgggccaggccccaggacagctggggagccagagggggccggccgccgcaagcatctcagagtagagcccgggccgtgggctcgaaccctggctggccgcgcggacctcggcgggcgcccatcccccgctccatgggcagcgcgctcagccgggagtcgggcaagaggctcggactctgaagcccaattcatggccggaaaccagcgcagccgtgaccgcggcgcctggacgtgaggagccttccaagcggccggcgggctcagactccgaccctgcacggagctttcatgtgcgagcccgggcgaagagcccgctcctcgcggccacagcggaacagggctccctccgcctccggtgcctgcctcgggccggccaccaccaaagagagcgt

SEQ ID NO: 54566 - DNA, 4256 bp, Homo sapiens
agaaagaaactacaaattaaagagacttaaaatatattaacaaaatgagcaagtctaatttatagcctctagagaggcgaacttgggtgacaacaattttttaaaaactcgggtaagtaattactatgaaaggcaggagagtggctactttgggaaggagggagtcgagtgaaatcgggaaggagcacgggtaaggtattctgggggaaagtactgtttcttggcttgggtagtggttacaaaggtgttcatttgataataattcacaaatcttcacatttgtgtggctttctgtgtattggcgattgaattcaaactcagaactgctaaggccagcgcccaaggcagccgaccgcagaggcgggtgggcagagtggatgaaaagcaggcgctcgggcctccaggcctggcggggacaggaatgtgttccgggccccttgcaggagacgcactgcagggggcgctgcgggcacactgagacctcggagaggatcacagctcctggacctagcccgcgacgcgcccagaagcctctatcgcattcaactcagagcacgaccgctcgggaggagcgggcccatccagcccaggggagggaccaggccgacttccgcgcaatgagccctaggcggccgcgcagcggtgcagtgggcgcggagctggcaatcagcgacgacccgcggctgcggccctgcgggagctgcaccatgcggtccggggcgagtcggctgacacgcgcgctcacggcgagtggagccgggaatccagaccccagacgcacggccgaggaccggcagaacccgctggattggcagctcaggagcgggagggcggaggcggcgggcggggccgctggaggcctgcaatcccagcgcatcccggggaagaccgcccgccggtgtccgtgtggccccgcgctcctggggtggggcccgcctcgtcaccccgccccgtctgtctcctggtctcggctcgccgccgcctccgatgaaccttctcggccttccgccgagctcgcctgagcgcgctcctaacctggctctgggctccgccgctggtcgcacggggattgtgtcggcctcgccccctcccgctcctcccacaccctcaccttccaggcggggaggaagggctgcagccccacggccgccggaacgccctcccgacccagggagaatcaaggccagggctctccaccgccccttccatatccgggtccccgaggcgggctagggtctgtggtttggggacagaagaggtcgcgattggagctggtgggctcccctaggggagagcagggagttggagacgcagctcggccgagctttccttcgcccacccacttttcgggttggaagactgaggcagcgggcatgactggggccccgcagtgccggcgcctctggaggcagagagagcgcctggaaggcggcgccgacgccgcggtgcgtcactcgcccacctacttaccaaagcaggtgacactcgcaaaccctggccccgcgccgcccgccccagggtgcgggggagaataaaaagggcagaagacaggagtggggcctaagggcgcgcgtgtccccccgacccctagcctcctctccaggtgagcggcgcgccccacccgggcctccgaggccaccgctgggtaaagggagcgaagccgaggggggcgcccgtgctggctggggtccgagacccggtttcctccgtgacccagcaagtgtcgagacgcgcccagggacaggagctggacttggagtccactaggggcaatctcccgcccttcccgctgctccgtgccaggcccgagcttgtctcgagccagaagggccagcctcggaggaggttacagcgtccgggcggccggacgggagctgacagcacacccgtggccctgagcggcgacgcgccctagaaagcccgtgggcccgaccccgcggggggccctccccaccccgcccggacgtcctcctcacgccgatcctttccctctttcttccccttggacctctgtcctcaactttcttctgtccctttcctcgaaggacacctctcccaggactggggccgcgctccagggctccccctcccccgccacccgcgcagcccggcatatgcctcgacccagcacccgggcctcagaggagctggggtgaggcctgggacgtgacagactaggtccctgccctctggggcttccattccgtgggggagcagcagaaactggcgcgtctacctttgccagtagctaggagtgccatgagaacaagggaaggggtgggagggcgtcgcctacggagacgaaggaaggcctcccgcgctcatccgcctccgccttcggagcactgtgcttggtgtcataactttttactgaaaaaaaaatttcaaagagaaaatattctaaaataaacagcaataaatcagatgaagggggtcagcaatacataaaacgtggtacaatttatggtagaaagaggtaaaattttatttctattatccaatgccaaaggacaccccaaatggttctgaggataccttgggcaggtgccagatttggggaggcgagggggagggaatcaatgggactccagttcaatgacttcggttctttacttaaaaaaaaaaaagtacttgatgcgttgttggtgaaactgaatatatacaaatatatagatatctggtaaggagagctgaagacacaaggaaaaggcgttgtcctggaggggatccctgagaaatgggggcgcctgccctgcccagaacccttttaaggaaagcatatgggcaaagcttccacagactgggaggaacagcaatcagcagagagctcaggtgctggcaggggcttctaaagaaaggagggagggcggtggcaggaggaggcgttcggtgcagcaggaacagcctaggcagagggcacgggcggtgggaatggcagcaccatggcaggaaatccgaggactagtcaccaccgctgagatgtgttctgatgtccctgagtctccatccctaagagacctgagaaagtcgtccttccgtgcagcctgggaggacttcatagagcgaagagcagaggcaaaggctggtgcggagagtgacacagcagggtccaaagcaggacagtttgcttgcaggctgggttgcctgtagccaaaaagagacataactctgagaggcagtgagactgaatcacgtgggtccttgaatgccaggatgagatggtcagacttccaaggggcgctggcagctgaggcggggtgatccaaagggcaggggcggttttggagctgggctgcagaaagccacatttgtgtctggagaaggtgattttcctaaaggcaagccagagactgatttgccaagagcaggagacgcctcgtgctgcacgataaggacctgaatgtggtgatggggatggaaaagcagaggtcaatgggacaggtggtatgcaagccagtgccaggggatatgggtgtggctcctttaatcacgtggggaagcccactcagtctgcctggaggaagggggagtttccttaagggcagagatgaagcccagccaggtcttacagaaacgaggctgagagctgggaatcattaagattggagaaagctcctctttccatgtatgtgtgtctctcctttctgcgactctaccctgtcctctgtggctccggtttctgttccctgtgacttcatcctgcactggtcttccgttgccctggagccaattctgacctctcatctctgtgacctggaagctcctgtgttccacacttctgctcacagttaaggatcttgacattaaaataactggccggcactgggccatgaatacactggatcatgtgtccactcttgggtgaggtcacccaaggctgccccttcctgagctatggcaaagcagattagttcagaaattgactgacaggtttggtagagatgccaaagagaaacaatcaaagacaacagtagggacaactcattcttactggaaaacactggtgcacttcactgaaagaaaagcatgaacttgggcatttggtaaacttcaacaccaggtgttgttgttgttgttgttgttgttgttgttgttgttgttgttgttgttgctgttgagacggagtctggctgtgtcacccaggctggagtgcagtggctcaatcttggctcactgcaacctccatctcctggattcaagcaattctcctacctcagcctctcgagtagctaggactacaggcacccgccaccaca

SEQ ID NO: 54567 - DNA, 3004 bp, Homo sapiens
aattaaaaaacaactcaattagaaaataggcaaatggcttgaacaaacacttcataaagaagatatccaaatgaccaataagtgcatgaaaaagtgttcaacctcatcactcatgggagaaatatacatgaaaaccacagtgagatgccaccacataccagacaggacggctgaaatgtaaaagtctgacaatattaagtgctagcaaggctatggagcaggtggaaattatcattaattgtcagagggagagtaatccatgtttctatttcagaaaacagttggacaatatccactgaagttaaacatatgcccaactccatgacccagaatttcactcctatttacccaaaagaaattagtgcatatagctataaaagacatgcatgcaactgttcatgaaagctttattcatatagccccatactagaaacaatctagaacatatatctataaaagacatacacgaaactcttcatgatagctttattcagaatagccccaaattggaaagaaactaaatgtttaccaacaaggtaaataaattgtggtatatttattatacaattaaaaagaagaaactactgatacagtgacatgcatgaatctccaacattatgtagatcaaaagaagtcagacacatacatgctgtatggttctatatatatgatgttctagagcaggtgaattaatcgatgatggtagaagttgtaatagtggttgccttttagtggggaaaggtcttgcctgagaagaaacaagagggaaacttctgggatgatggaaaatgttctagatattgatctgagtggtggttacattgtgtatatatatgaaaatttttattgagttgtacatttaagatttgcatattctactatatagtgttttgttttttttttaagtccactagttctctctttcaagccaatttcccctccccagcattccctgtataagaattttggacttcttgacatttggcctaaggaaagccacttgaatcacagtgaacaaatatagcaaagacactattattaggagcataaaatgactcacagggccgggcgcagtggctcacacctgtaatcccagcactttgggaggccgaggagggtggatcacttgaggtcaggagttcaagaccaacctggacaatatggtgaaaccccgtctctactaaaaataaaaaattagccagacgtggcggcacatgtctgtaatctcagctactcgggaggctaaggcaggagaattgcttgaagccgggaggcgaaggttgcagtgaggtgagataatgccactgcactccagcctgggcaacaagagcaaaactccatttcaaaaaaaaaaaaaaaatggctcacaggataaataagaaaccaggtgacacagttgagaggaatgtattttgctgaaggaatgaagataagtagaacagaaaagctgactgcctcatgaattcatttgtttattccacaaacactatttgaacttcggccacatgcagacatcatgccaacttctcctctaaggatcaggccatctgactgatgactcggaaacagaactggctttatcttccccttcatgttgactcagtttatctctgctcctgccttagcctctcgccctttcttctgtggaccttttccatctcatgagtttagctgacttgaatctgaccatggcctgtgaatctgtgaacccttcattttggttcttcctaataagtatctgtctcagtcagctatagctgtgtaacaaagtacacccaaacttggttggtcaaaacagcatttgttactcatgattctgtggagtttggcagagctcagtgggcatagcttatccttctccacatggtgtcctcgggtggttcaactagggctggaggatccaacacacctccctccctgtgtgggccttgaaatagctgttatctaccaattctctctgactctctgccctcttctcaacagctcgttaagaattgcctgaacacatcctctcctttcccattgagctcttgtaaaactttcagatagtggctaccactgtccctataacaaacataaacaggtactaaaaccaggatgctgagttccacaccagcgtgaggagtcctctgtgtttctaagaaccaggcttcaggaaatgcacggggattgtgtgcagtctaagagactaaagctgggctaaaaatattttattgtcattgttaagaaagagaaaaaaaaaccctatcttgggtaaccccaggttagataaataaatcagtcgcttctcttgacactttcccactccacccggcttcttcctggatttcccattccggctaaatcttcataaatccaaagcctccgtgcaaacggaggtggagcaaaacagaaataaatgtcaaagactgcacagacagcatgcatcagcctctgacccagcagattatttcaggaaacacccacagtgctcagacaggaaattctgtgcacttcagagctgtgagctcacagatgcagggagcattgctgttacagtccagactagaagaattgaggtaaagcatggactgggcccttatctgctagctgtgatccttgggaacttgtaggccacagttcccacagctgtaaaagaggagtgacaatgaatgagacagggcacataaaccacctagtaggtattcagtagacattggctcccacttggagcatggtgcaacccagccctgcagaaagttggccctgtccatccacttcatcagctgtcatgaaaccaggcctggccgggcatcgtggctcacacctgtaatcccaacactttgggagaccaaagcaggaggatcacttgagcccaggagttcaagatcagcctgggcaacatagtgagaccccatctctacaaaaagtaaaatgttagtcaggcgtggtggtgcatgcgtgtaatttcagctactcaggaggctgaggtaggaggattgcttgagcccagggatgttgaggc

SEQ ID NO: 54568 - DNA, 7956 bp, Homo sapiens
cgttacactggcgtactatgttcttaaaaggtgatgggtaggggttggggtgggtagaaggaagaaaacaatttgcctggaatcagttacttccttacagatttcccaacaatctgcattatcaaaaataggaagacaatagaaggcagccactgcatttaaaaacattacagctggcactgatacaagagccccgatttgtcactttatacaaggaaataacaaagtctaaatgggtaaaaattagacttttagctattttccccaatacacaccaaactaatatttttatggcttcaagttttacaaatccaatgaagaaacatgatgtaactacctgaaaggtatttaaaagtattaatgaaaaagatctctagaaagcctgtattcaggcccaatcaataaaaaaggaaaaaaaaaagtataaccagtggtgtgaataatacaagaaaaatttgcaatgttatgatattaaatctataaaatgttttgtgttccataactgtttttcaaataactgctctacgaacaaagaatctgaatgaaaaaagggtcttctctaaaccagcaatttaaggctttgcgcttatgcaattgatcctgtcactctatagaagaatatacatgttatctggaaacaggaattccacattggtgttttagcttccttatatttattgtactgaacattagaaaatatatctagagagtctttcctcaaaatctaataatgttttaagagcctccctagcattaagtgtaaactaccctgggtttgactattttgcctcctccttttaacagggcacatcatcttatataatattctctcaaactgttgtttttcttgtgcctatagctatgacacattatggtatgatattgaatatggttgtggtctcaaaagtaaaaaatagttcaataacccaaacctaatcaagaataaaaaaatatactattaatcccgtgtatctttggattccatctaattttaaatatagacagtagttcagggaacaacaaccaaaaaattcacaaaattattaaaagctttatttacgattggaatcattcaacaaaaaagcaaaagcaaatgagcctgaaaaaggaactaagctgttgtctagaatgtcctcagaacattcgctacctcagtagctaagctgcctttgcacctggctggcatgacaacagtggctcaacatacacagcagttgcactaacagcagcacaaattttccccttcaaacttgcccagaataaagcaagaaaacaaggggagggtataaactctgccaaagtaaatgtatttaaatactgcatggaattgttaacagcctgaaccttttcccctcatttttgatagttgcagattgatgtagtaactgtcatttagcaaatgccgaatgcatgacgaagaaatcaggtggccttaaaaatccaaacacgaatgatactgatgaatgttcttggtatatcttcaaggacttctttcatgacttgacttttctttgtctaaggatagctccagcattaccgagcacctgaagcaaaggtaaagcagctagcaatgttccaaatattcaatcactctagagatagatttctggccagttgttccaacagcacactgaaagcagggtgaaggggaaaggaagtaacagttaatatttaacagattttaagaagtataaataaaagtttacctctagatttactaaactgaacactacaaatcaaagtacaccgagattaaattgtgggtttgataaagttatttgccataacatgcaatgattaccttgaagaaatagaacacgattattaaaattaaaagaaaatccctttttgctcccacttactatggccatagtatttttatgtctactgtcaatgtattataaatttaaaatcatataagctgtaataaaagctacttacagtgagattcataaaactcaaaaattttttgagcatctctgtcattattgaaaagtctccttctggcagatattcccgcacagtggttacattgatctgaggaaacagagcaagaaatattggtcagctggcagaaaacatgagattgcacctcgtacaatgttgttggttttgacacacatcttggtgcaaatttttaagatccttggaacacgtggttatttattctctttccacactcactctgcatgtgatttcctacctcaccctcagaaagaaaggagaaaggtaaagttggcaaaagctacaaagaaatatttgtgtacacatttacttttttttttttttttttaaatgaaacagtcactctgttacccaggctggagtgcagtggtgtaatctcagctcactgcaacctctacctcctgggttcaagtgattcccatgcctcagcctcccgggtagccgggattaaaggcacgtgccaccatgcctggctaatttttgtatttttagcagagacgtggtttcatcatgttggccaggctggtctcgagctcctgggctcaagtaatccacgcaccttggcctcccaaagtgctggaattacaggtgtgaggcagcatgccgacctactttcataaatgcaaagaaaaaggcctgaaataacaaactgcactgtttaatgtatgtgtgtgtttcactgggggccctgggggaataggagaagagggtgaggactttagacctgagaatgtactcacaaagctgctcatgaaataaaaagatcaaagaaaaattcacatccttcacagatgaattcaactaattatataggacaggaattaactagaagcatctttccaaaggcaatctaacctcatctatgatagattctcagacaatatcaggagagaaaacccttcattattagcaagaagcagccaaactatatataaaccaatctgttacatggaaaacattacacaacctgcttaaaaaactatttcattaaagaatgctttaaatgttttacggagaataaaaagaaaaaatcttttaggaaggttcacctgtagtaaggggcaaaagaaagtatactgtcccaagtttggggacacaaggtaaagggttaaacaaaaccaaccaaaaaacaaaaagaaaacacacaaaagctcccaattcgacttttgttagcgggggcaaaaaaggagagatgacatatttctcttcagaaatttgccactacccaccccctttttcctattcccatgccagggtactcgcaaaattagaaagcagcaaaaaaatgagatgaatacagcttcagaaaagatctaatcaaaacactgctaaagtactcatgtgctgaagatatcagttacacacattcaaactgatcctcccaccaaaagctatcacagtggtgggcaaaatagtggctaaggtgtctctggagaactgctcagtagaaaagtacgcctctgtaatagagaatatatgattagctcctatattttggatgaaagcccctcattaatccaaatcaaacccttctctatcaacacactacagaacatgacatacagcgtttctgaggcaatgggagggacagtgacagcattttttaacagaatatagcaggtacaaaaagaaaaggcatgatacagcatggcctatttgaaaaattttaaaagtgtccagtaggtttggaaattggagaagcagtcttaagtccagggtcttgcaacactaaacagtcatgagtccccttcctggctgtgagccaaggaagactgggcaaggagctacgtgatcagtaagtgctctgaagtaagttagctccagtggcaatgtgcaatgtcccaggaatggaggggcaacaaagcaggaagagcagtgaggagactgaccactgcaatgcaccagctgcaaagtgagaagacatggagggcaagtgaaaatgggatcagaccacaaagcagcatttactgcaacaaccacatgctttcttgtctatctcttttcacttacacattaggtaaaccaaacttcctttacattttgtggtatcagctagctttttggtgttaatcataataatctccaaggcaacaaataaatctggggctctatgaattcacaacatttcccacaatttaagaacattctctttttagagacaagatagatacaggcaaacacaaataggaattagcatgggaaagatggcccaagataaatcatatgtggtaataacacaatttcaagaacgattatgtaagaaagaacgtgactgaaatatgactaaacctatagtgtgtaaaaaacagagtatctaaaaatctttaaatttaaatattattttcattgcttttttttttttgagatggagtctcgctctgttgcccaggctggaatgcagtggtgcgatctccactcactgcaagctccgcctcccgagttcacgccattctgctgcctcagcctcccgagtagctgggactacaggtgcccaccaccacgcccggctaattttttttttgtatttttagtagagacggggtttcaccgtttcaccgtgttagccaggatggtctcgatctcctgaccttgtgatctgcccaccttggcctcccaaagtgctgggattacaggcgtgagccactgcgcccggccttttttcactgcttttgaggcctgcctcttcctcctttcctgtgtgtgatgggtttctgatttgctcttaaaatcttgtcattggaaataagaaaaagggatataaagatcttgcggggcctccagagccacgatgagaactttggtcttgatcctgaaatcggcggtacccagaggggccacacagagtgggctgttgtatttaggttagttaaaatgttaagtatggaagagatggacaagatggattcagaaaaacacacaggacttagatacacaaagtgaaaaaaaaaaaaaaaggcaatacaaagaattagatggctaaagtaaggaaacgtggggtgggtagatgggcccaggtacacagagccagcatgagttcctgctcaaataaagccattcatttatcattaactctgttcttccagtcctccagcttcaaaaagagatggcccctgcttcctgctgaaactaatgcccccctcctataggtctccactctttcttgttccctcaatgcccttgctcctagaaaacaatctgccttccatttcaaaatctggctttacaaatggactttacacttaaaaataatccacctatgcccaaccccccatctgaaagagaacactcacaatgattctgctggacccttcttcaacagttttacccttcatatttgtttttcccaaggcagcagactatccccatagtcacaacctttcactttcaggctgactcagcctgattgtctagacatttgtatttctcctaagtgaatcctgatgatctaatccactcacagtaatcccatgttcccagccagtgactggttcagacaaaagcattgtgacccaatgctggccaagatgagaagtctacctggtgaggggtgagagtggcatggggtcccacaggggaaataaacaaacagttgtcttaaaaagatatgtatttccagccaatgcacctatgaaaaaaaaaaaaaaactatagaggaagaggccctattactgctaggcactacttaatttgatgagacacctagctgtagtcagcacgggaccataagggctagcagaggacaacatgtggaggacagcagtttaaagagagaaatggggtgggcactgtggctcacacctataatgccagcactttgagaggtcgaggcaggaggatcacttgagcccaggagttcgagaccggccaggacaacatggtgaaaccctgtctctacaaaaaaatacagaaaaataataaagacagaaatgatctgagtctctgatgacctcagtgaggcactgacatcacccaaattagactctgccatcttgtttaagccagatgagtacaggtttcatactatcccttcttttactccaaccaaaggcatgtgaacagattcatccatcaaacaacagctttttcttttcttctttttttttgaaacagtctcactctgaagcccaggctgaagtgcagtggcacgatcttggctcactgcaaactccgcctccaggattcaagcgattcgattcttgcgtctcagcctcccgagtagctgagattagaggtgtgcaccgccacgcccagcaaatttttatatttttagtagagacatggttctgccatgttggcaaggctggtctcgaactcctaacctcaagtgatctgcccatctcagcctcccaaagtgctgagattacaggcatgagccaccatgcccggccacaagagctttttcattagtattctgacctttgggatgtacctgaaaaagctcaacaagtattttaaagtttttaatattatatactattttgatttttaattttatttcatgtatgtaattcttcctttttcatgagattaaagcactgactagcttgttttccagaactgctttttcttacatctttaacagcctaactctgacaggcacatccttcctaataaagccataaagatcaactttatttcactttttaaaaagtgaaaatcaatttaatttactccactccaggccttacttagtaaaacctatattggaaaggattagcatgtaaaaaatgctatacattccctttccaatacagactgtactaaagtttttactttaaaactatttaggtaatttaaataaaactactggaaatggccgggcacggtggctcacgcctgtaatcccagaactttgggagtccaaggcaggcggatcacgaggtcaggagattgagaccaacctggctaacacgatgaatccccgtctctaccaaaaaatacaaaaaaaagttagccgggggcggtggcaggcgcctgtagtcccagctactcgggagactgaggcaggagaatggcgggaaccagggaggtggagcttgcagtgagccgagattgcgccactgcactccagcctgggtgacagaacgagactccgcctcaaaaaaaaaaaaaaaaactactggaaatgttaacacattttcttgccatttttcctccataggaaacaaacaatttaaacaaccctataatcagccaatagcctttgtggaataagttggacattaagggggaaacactgaagaaataaataagtgaaacatgtaaaggtatgaagtcgttacattggaatctttcaaagatacataaaacatcactgaactatgtacttactggactttcctggcagagacacccaagaagtagtgctgtgtaggaggccacaatgcaatcctccatgtgtttgccggcatgctgaagggctgagagaattgaagtaaagaattgtaacagtatattaattaacacaaacctcacaaaaccaaccattctgttagttatctttactttaaaactgctacaaatcaacgaatgatgctaggacaactggatatccacagattaacaaaaatttaatcaaaatgaaatagggatccaaaagaaaagctgaaaccataaaacttttagttaaaatttttgtgttgcaaaggacacaattaacaaactgaaaagattaatccacagaatgagaaaatatatttgcaaatcatgaacttgataagggtcaagtatccagaacatataaaaaacattcttacaactcaacaacaaaaacaacccaattaaaactgggcaaagggccaggcgtggtgcctcacacctataattctagcactttggaaggctgagttggaaggatcacttgagctcaggagtttgagaccagcctgggcaacatagtgagacctcctctccattaaaattcaaaaacctttaatgggtgtggcggtgcacgcctgtagctcccagctacttgcaaggctgaggtgggag

SEQ ID NO: 54569 - DNA, 2989 bp, Homo sapiens
ctcaaaataataataataatgataataataattttgtgccaaaagaccacgtcttttacaaatacatagtgaaatactgatgaaataacgtcagcgattttccaacattaaggaatgagaagtgtatagatgaaataaatttgtttaatagtcactgctaaatccaagcgatgggtacagagaagttcattatataatatctcctcctgattgcctttatcgtttcccacaataaaatgtctttgcaatggcattatctaagcgtaaagcactacagattccaaaataagtgtgcagacgtccttgaagttaaattttaagtgtttcaagtacacaatcttgctcaacctttaaactccaaagactgtcctaactaaaaaggaaagaatgattgacgactaagtcttttcggtcgttcggcttttgccctagcccaaaatcaggtcgaattttgagagaagtgcgctgtgatttaaaaaaaaaaaaaaaaaaaaaaaagcaaaaagcctttatacttcactcccaccctaatctagcgtcttcccgatccccaaaggctttaagggcttccattaaagatggaaagcggacgggacgaacctgactaaccagaaatcctcacctggggacagccggggcgccacgggcagtgggcgcgatggacccctcggactagacactcaatgcaacttttctcctcccaacccgcgccgcccaggaaagggaggtcactttcgacgccccggaagcctctgccaccgaatccttaaggcagtgcaaggccccagtggcggccagaggcggatgaaaccacgggaaaggactcggggctgaaatcaacacacttgactgggtttggggagctaagtcaatcagcagtcgcccgaaaaagaactccgaaaaaggaaaataaaaggggaaaaaaagagttcctcaggtcattcccctgcccaacttcctcagcggcccggtgggcgaggcagtgagacttccaccgcccgctcccagcctctgcctcccccaccctcccggctccctcccggcctaggcggccgcccgacacctcacttaccctcggagcctggcgggtgctttggccacgggccgcctccgcctctcccgctccctacggcccgcgggcgggcgcggaaccctcgcgcgggagagcagggccggcaggtgagagccgagagaggcgagggactctgctttcggtaaataggaagcccggttgggggggcaggagcggcggccccgcaacttccctccccgcctcgagcgccgccggccgggcccaggcctagctctcgctggccgccactgctggagctggtaacagagcctgctgtgtgcccccgctgggccgccgccgcctcctgcgccgccgcttccgccggtgaatggtcagtgctggagtttgaacagggccctgaaccatctcaacgccatttgcgctcccggcccccacctccttcctccaacagccgctcgctccgtcactccgcttcccacagtccccgcgcggccgcccgaccccgcagccaatcgcgcagccgcttactcaaaccgccgcgcaggcgctgcgccccgcatgctccggcgcccgccattggcccggccgcggagcccgacgggagttgtagtccaggtccgcgaggtcgcgggccgaggaccaggcgcgggagcgggagcgggcgactggccgggccctcccggtctcggcagccacttctagctcccggcccagccgggagacgcaggtgccacggagatgggcagccgggcgggtggcgcagtgcaggcagctgtatcaatcgcttcccctccagggacccgccggtgcctggggaccgcgggctgtgcagctgtgccgggcctgcggaggccgccgcccgggagctgggaggcagggggcgcgtggtcaagagccgccctcgacctggcctggtcggtcctggcccggcgtaggtgacgatggcggggaccgcgaggcgccggacacccgaggccacgagcagcgtcgcccctcgctttttcgcgcccctccagccctgcagtccttcctctaagtccgtctgcccctcaccgattgaaagtggccccgagaatattggatggtattgagcaattatcattaactttgttgggtgtggtaacggtaatgtggttatggttttttgtttttttttttttaagacctactgatgtgttgacagagtgatctggtgtcaggactgtaaaatacgcctatgaaaactgggggagaggaataaaacaagctggcagaacgtttttcatcgttgaagctgcgtgatgcgagcatatgtgctcatcatacagtctctttacttgtgtatctgaaattttccataataaaaagtttaaagaagtgaaccagcgattgcctctagggaggacagtgaggtggcggatgacgggaggaaggagtcttaatttttcgctgtacgcctttttgtgctatcttaggtttttcccattcaatgtgttacctaattcagaaaattggtaagttttttttaaggctaccatgggaaaacagcgttctaaagagtagcgcaaccagttccccctaagagaggtgcatgattcgtcggactccgacagccttggtgtttgttaggcggttaatggagacccacctgggaaattagaaaactactaattgctttcagtgagaagcccgcccttctcccacaaatggataatttgcttttaatgcacccagaagttatccagctccctccggtataatcggggaaactccaaataaaggaaaaatagttcagagaccctgcagctcttcccaagaggaatttaaggtggattttagtgtggttggattgttttgcctacctgactgcagaatttatattctgacatttacaatttcctaaatactgaatcagtactttttcttgtttcaaaataaatcaacttcttctgtagtttatatgaaaaacaagtccat

SEQ ID NO: 54570 - DNA, 1988 bp, Homo sapiens
tgtgtaactggctttattatgtatgaatgttggctcccttggttgaaaaatgatcactctattgggttctcccagcttgaggcgaaaccttttggaagctcaggaagcttggaggatttcgtggattacagaatgttgaagttggagaactgtagaggggcctaaaaaatgttccagaatcaagacggtgcctgatgccctacctagcccctctccagcacacaggagccccgggcccttggcaatcatgtctgcgcagcttggaccccatatccaaaaggggagcacgccccaatttactctcaccccaccaggtgagtggagggcaggtgacctgccagttctcgaaagaagccagatgactaactttggtcgccttatcacaggttaatccatgagaagagcttggaacagcgcccggcagtgtctcagcgcacccaaagtgtgtgcaggtatgattaccattgccagtagctgagctgggaaaaggatctgactagataattttggcaataactcgacaactatccaatgtggacagggaaacgcatgccaaggtttctaaaaagctcccgctgtgacactctctgtgtcctccccgggcgtggcggcctcctggccagggacacccgaccccgcgtggtccgggctacccaaggacgtcccgaggcgtggcggagactttggcggctgagtgcaggccgggctgcggcccagcgggacctgggcgaggcctgcgacctgggcggggccagggttgggctctgccagagctgcgccgcagccgccctgcccgggcctccccgcccccacctgtgacctggattccgcggttcctgcgcgggggtggagggcgtaaaggacacgcgcaaataaaggtctgtggcccaggaaaacttcaagtcctgaaatcggtgcaccaaggatactttaaggcgaggggtcggggctgtgtaatcatttacccggttcgtccgtgtacaccggcctctctagcttacaccaacacatgtttactgggttcgcacccaagccagagtcggtttgtttagtaatcccacagacgcttctgcccgttttctaggagacggatctgggccgaggggaggcttcaaaacattaacatttcttttttctttctttctttcttttttttttttttttgagacggagtctcgctctgtcgcccaggctggagtgcagtggcgcgatctcggctcactgcaagctccgcctcctgggttcacgccattctcctgcctcagccccccgagtagctgggactacaggcacctgccaccacgcccggctaattttttgtatttttcgtagagacggggtttcactgtgttaggatggtctcgatctcctgacctcgtgatccgcccgcctcggcctcccaaagcgctgggattacaggggtgagccaccgcgcccggccaaaacattaacatttcaaataaatgcccccggatttgggggcggggtgccttaggctgcttctcccccaggactcccctttgcactggggtcaccctgggcattaccttggggctgcctgggccgcctttgttgcgcaggtgaccttcccggccgggccagtgtcccggctgctctgagggacagtcctggctccgaaagcgggcgccagcgctgagccagggcccgctcgagatcgcatcgtctctgctttcagtcgttgtccgcgcggtgctggggcctcccgggacccgggagccgcggcggattaggccgcccgccccaacctgggctttgatcttatctgagacttgtgagtccaaaagggcttagcaaccgcagccatggcagccccaacgacgtgaacatccgcacctctgagcctccccctgagaagtaccttcgaggtgaggcctgcgcagccccaggaagagggtgtgggcgcaaacctgaggtggggagcaaggcccgccggctacacggttcctgccatcctcgctgcgcccttt

SEQ ID NO: 54571 - DNA, 1249 bp, Homo sapiens
catggacctctgaaggggactttaagtctgagtggcaccaccctgttcctcagatccccttttctgtacactctccagtccctgagaacctcccctgacctcaagctgagcaggaaggtgggagcatgccctgcagtcagtcaatgcccactcggagctgggttgggagactgctccctgcgctcctacccagcacctctaggtgtccacagtgtccagcgctaggcccctgggttgaagcacaagtcccttgataacctttgcttctgcacaggtaaatgccctttttcctgatgtcagccttacggcactggggattttccaaatgaatctttcttgagacaaggagcagggagtggcccttccctgagtcactgctctggtggactctgggttgggcaggcttagtgggcccactgctgctctggtgagcccagcacacctactgccctcacctgccccacctctaccagctagcccaccctctctgctggcctttccctcagtacctgagcccaggcttgacaacaccaccagaccatacgcagcagatgtcatcttcccagtggtatctctacctccaatctctttccaaaagtgccatgaccggagggaatgtctgaattttagtcatggacagaaaccaaaggtcaaaatcagacagtatacctctggcaggaagcagggaagtggtgagaattccagaagctcaatggtgaacttggatctaaagggacaggagagggcgttggataatgaaggcacatgaagttggggggtaccatgcaggacagaggctgtgctcaggtgaaggcagtggggcctgtttatggggtgtgatgtcaggcccttgggacaggcctgctgggccctgaggggcagcccagggccctgctcctgtgcacactgatagctcagcatccacaccctggatagagacctccagctaggacaatgtcaggacttggtggcccagcaggcttctggagcaatgctggccaagtccttccctaaacagcatttttccatgagtgaccctgggctcccctgcctatcacgtctccttcagagaaccacagtgcacatgcacagactaaaggctctttgaaatcctgctgtgtggctgggcgtggtggcacacttctgcaatcccaatactttgggaggctgaggcaggaagattgtttgagctcaggagttgtagaccagcctgggcaatatagcaagaccctatctctacaaaacattt

SEQ ID NO: 54572 - DNA, 889 bp, Homo sapiens
agaaagagaaaaagaaagaagaaagaaaaggaggaagaaagaaaagaaaagagggagggggagaaggaaggaagggaggaaggagaagaaggaaagaagaaaagaaaaaggaaaagaaagaagaaagaaaacgaaagagggagggaaggaaggagagggagggggagggagggggagggagggggaggggaggggaggagaggggaggggaggggaggggaggggaggggaggggagggaagggaagggaagggaagggaagggaagggaagggaagggaagggaagggaaggaagggaagggaagggaagggaagggaagggaagggaagggaagggaagggaagggaaaagcaagcttcctaggaaggcaagggaaaggaaaagcaagcttcctaggcaggacaactcagcagagtcatggcattaggagaggacatgatgcaacagtccgtggaggttgtggttgccagggaaaaggggcagagggaggttgaaatatacaaagtttattggaggatgacataaacgtcctggaattagatagcagtgatggttctatgacaagtttgtccaaccagaggcccgcaggccacatgtggcccaggacatctttgaatgcggtctggcacaaatgtgtaaactttcttaaaacattaggagattttttgtgattctttttagctcatcaactatcgttagtgttagtgtattttatgtgtggcccaagacaattattcttcccatgtggcccagggaagctaaaagattggacacccctgtaatgtacaagattgtgaatatactaaaaatctctaaattgtacactttaaaatggttaaaatggtaaattttatgacttgcgaattttttttttttttgtgattgag

SEQ ID NO: 54573 - DNA, 829 bp, Homo sapiens
tgattttgtaacataacttagaaagtaaagctcaaaaaagttttctgagctggtggagttacgcagaggccagggcgagaaaccctgggaggacaggggagtggatcagtcagtgtgcagcaggaaacagatgacacactaaaacagggaaattgaggagagtttactgaatgggatcatttacaattgtacgggcagcttcaagggaaaacagcaaaatggtgcagtctcctggggctagtaagaggaggaagctgttggcacccctaggcctgaaagagcaggggctggaggaatctggatagggaagatatagaagagggcctcctcaggaggggatgaagcaaccatggtgccctggcctggactgagttaggagggtaagtactccagcctcactcccctcctgccctctgctctcttgcctgtgcctccaacaggaagcaaagaaactttgctgtagtccacatgtcagcaaaactatagccaggaatccaaattcagcttgccacctgtatttacatgacctttgagctgagaaatgctttttacatttttgaatggttgacaaaaacacactcttaccatacaactcagcagtcatgctcctaacccaaaggagctgaagactatgtccacacaaaaacctgcatattcatgtttatggcagctttattcataatcagcaaaacttggaagcaaacaagatgtctttcagtggatgaatggataaataaactgtagtacatccgaacaatggaatattattcagcactaaaaagaaatgagctatcaagccatgagaagacacggaggaactttaaatgca

SEQ ID NO: 54574 - DNA, 2302 bp, Homo sapiens
caggagaatcgccgggaggccgaggttgcagtgagccgagactgcaccattgcactccagcctgggcgacagaatgagactccatcttctctgtgtcatgccagtgtgcgagatttggccgcagccatgggggtacagaacagcacataaggagcctagactcgggagcaggtcctatccaggcgcagggagaaaccccagggaagttttctctgccgctggagcccagggagatgagacaggcactgagtcagggcaggccttgcttcggggcgctggttcatgaagctcgctctgacagcagggctgagtgtgggcggtcgaagcggcttttgcccgagacagaggccggtgccacggcctgctctgctctcgaaggcaaagtgcctcatccatccaggctgcgctgttcatggacaccttgtgttctggggatggaatgaagcacccagcacagcgtctgtcacacgggaggtgcccttctctgtccctacagagaaggggcaaggatagacggttctgaggtgaaaactccgcagggcgaggtggcattttgcagtagtgaaaagccttagatggagcagtgggaagaggctgcccctgcagagactgggaacacagggaggggaggctggagaggagttggaggagaagcggcgggtggaggcgaggccttgccggggcacaaggaggacatttccgtctcttcctggggaggcgcttctggcaccttccggggcggcctccggctgtcttcgcccagcccgccaggcggcgtcagggctccgggggcgcgcggccagcccgccctgcgtctccttcctcctccttcccgggctggggcccaggcgagcgagacgggccggagccgcgggcccccgcgccgttcccaggccgcgcagacattaactcattcctgcctagggggaaagaggcggccgggcgggcgcgcgctggagtcggcctgcctccacctccctctccgggaggcccggctgccaagcggagtccgggggcggctggcaggcggccccgtatgaagtggggcgtgtggtcccgagcccccctccgctccccttccctccaggctcttcggatccgggcgtcagagagggcggggagcccgcgcgggacccggagcgccgcggccgcagccgcagctccccccggggcctcctccgggccgagggcggcgttcgcaggccggatcttatcgctggcgcccgaggtgggcggccgctccccggaacacctgaggcccgggagggggcgggcggcggcggcgcggagaccctgcgcgcgggccggggacggtcacgttggcccgcgggccgggcggcggccaggcgcttgcggagagccgggcccggcccggcgtgagtcagaaatcaccttgtttaattacatatccccgagcccgccgagtgcgataggggacttttgaacttgccaattagagatgaaatatcaccttctaatttagactggcttaattccgtcacgcaaaaatagcaacagccccggggctgcgagatgggatatcaggtctctcctggcgtgacggcgagccaggctgaaggatgcagaagctgagggctgcgaagcgccactgcctgctcgccccccgacggagtcggggttgcgacgggggaacggagctgccgggccgggccaccgaggccggggaggttccttctctgggtgggttagccccaagcaaggaagccgtcaaatcggggtccagattctagcctgcctctgtgagacctctgtgttgtgggggctggaaaagaaaaggaggtggatccgggagtctgtaaggccttccgatggagggaagcgactgccaggcagggggaatagggttagtattgctggagggaggcaggaaaggtgggccagggccctgtttacttgaaagggggcgtactaaagcctgttttgctgcttggggagtttctaagcgggcatctgctgttgagtctggcagcctgagctcgtttcggctaagcagttcaccagctggatgacttggaggcagccatttaagctctccaagtctcagttcctcatctgtaaaatggacttgcaaatattatctgcctccttggattgcagcgagtaataaggcacgtaaagggcctggcatgtggaagcagtcattttggtgaaggcagcaccacgcaatagaaatttcctattagccacatttttaaaaaataaaagaaagcaagttaaattcattttaatatattttctttgactacatatatttaagatatcaggccggacgcagtggctc

SEQ ID NO: 54575 - DNA, 3275 bp, Homo sapiens
gactgtcaaacctgagacagctgaagagcccagaaaaaaagattagggaagaaaacagaattgaaaaataattcagaatgacagaggctatctgcagcattaagggcaaaggcgggtaaaagaagaaaagggagacagaataaaagataaaccaaaaaattgaaacaaaatacacgggaattcaaacatttataccagaatataagggaataccctggaatctaaacacctcttcaggcaagaatgtgtgtcaatacaaatgcctggcacattgttttccttccccctttctttttacccagtttacccagttttaaaagtgattttttaaaatgcacctttaaaagaacatcttttgttaagtgacttaaacttgatacatttcttggattactaaggaggttaaagtcacatttggtgaaaaaggggcctatctcctctttcctcacatacgggtcatcgaatacttttaaaagcattttccaccatgaatgaggggaaatggaagaaaagaggtggtgacaattatttgcattttccaaatggacggaatgagcctccggagggtacacgaggtcaccagcgtgagcccgcggtggagctggaggcgtatttatagctggctgacctcagtcctgttgggccctcgccgctccttatcttatgccgctggaattcgcgggctcgcaggtcacaggagcccgggcgcgccgggcctggcgctcccgaatcgatgagggaagccgctctccccggcagatcctcccggccggggagcctccatcaccctgcctgcgcctcggcacgctggcaaggagcccgggaagagacgccgggagcggtgggtgggcgagaaacaaatgcaatgtgacttatatttttctttgtcgcaactaccacgacctggccatcccccaccttggtgacttggtgccttcccagcgaccttatttcacgccagctgactggcgttcaccgcagtgtgagtgtcggccggaggaggggtccacgcgaaagagcccgcgagagtggggatatccggccccgaaggccggagcgggcgtccagggcgccgatggccgcagcgcccggcagccgtgtccacgctcccctccgccgcgttccatcgcgtgctacctacggcgtctgcgggaagctacccgggcggcagctgtggggctggcttgtggggaggggccggcgggcccgcgcggaggagcagccccgactcccgcccgcaccagcagctcggcgcccccttgccggcggctggccctcctccccggcaactgggcgccgggctccgcgaactcttcgggcgcttccgccgtgcgctcggctcttttcgtgtccggggcggggcggggcaggcgcccgtggtcgggtgcgcgcggcgcgggcgggggccttcccagtgcgcgcgcgccgtgcaaggcccgcggacgcccgcccctcccccaggcccccgcacccgcgccgccccctcccctcctggcaagagtcggcggcggtggcggcggccgctgcagagattggaatccgcctgccgggcttggcgaaggagaagggaggaggcaggagcgaggagggaggagggccaagggcgggcaggaaggcttaggctcggcgcgtccgtccgcgcgcggcgaagatcgcacggcccgatcgaggggcgaccgggtcggggccgctgcacgccaagggcgaaggccgattcgggccccacttcgccccggcggctcgccgcgcccacccgctccgcgccgagggctggaggatgcgttccctggggtccgggtgagttgggagtgcgcgtgcggaccggaggggctggccgcagcggggaggccagaggggctcgggcgaggctgcagaggcagctgggcgcgcggtggccggagccaggggctgcccggcccggccccggcagctccgcaggcctcggcgcgcgctgggccgggaccgcccagccagagacccacggcaccccgcgccgcgtcccccgccggcccctcttttgtctcccactcgcgggttgcaggccgagtttggggatgcggagtgggcgaaagtcgctccggggacgcttctggaatccttaaatgggaaaggcgctcacctccccgccccggagcggcgaggctgatatttgtgatttggctccggacgctgtggggaggaacaggggagaacaaaatgagtttcgggcgggggtcgagtgagaggagcagccggcccgcccccgagtccccgcgggaaggggccctggcccccgagctcccggagctgcttcacctgttgtcctgcgcggcctccgctccgtggcctggtgattccgtacttcagttttggaaaactttctgctggattgcctggacccttttttctctttccagactcctagtggaaagatttggcaaggaaaaaaaaatgagcttgcgtcagggaagaaaaataatatgctgtgtgttagggtctggcgtttgagcgtggtactctttcatgctctcagatgttttaatttggtcaaactcctgcaggttttctcttttaagcggttaacaaactgttcagagtacatagtatgaacttggcacctgtgttacgtcatttaatccttacaacgattctggtttattgtattcctcattgttttaggggaagaaaccgagtcgcaaagaggttaactaacttgtctaagggagctgggatttgaacccaggaacatcgtattctggcaaacgaattaggaagaaaaaaaaccaaaactgtttgcaaacacttttacgtttaggaacatttttcagttactcttacttgaaattatcgctattttgttgctggagttgaaaacaactactttattgtatttacttgtgagaggagttaaactttgaattagagtgtaacttaatgcgtctcattgttttcagttgttgaaataaagaatgtgaaccagaattatttagatttttaaatttgaagctaaaatatgggcaattctctgatctaggaatggggtgagtgtatgaaaggccgattgaaatgtagaatgcgtttttagtagaaccagactcagttcttgtttaatttttcctccattttccgtggagcccactttaaactttttctactttcttcacttctccccaccctttacagaagaggttgaggcacttagcaggagctccttcattaaattccttctgttactggcttcttaaccttccgtcaaagagggagaatttttttttttttttttgtctttcttatta

SEQ ID NO: 54576 - DNA, 709 bp, Homo sapiens
gaaattaagtaactctttgtgatagactagttttaagaaaagaaagaaccttcctcaacctgataaagggtaattttctacctggggcgtgtagcaaacccaacgggtaaaatacttcccgtgaaaggaagaacaatactaagttcatttttagtgttctttttagtgctggagaccccagccaatggactaagagaagctgaagcgaaaaagttgtaaatatttgaagggaaggtcagaatgtgtactgtttgtttatgctctttgctaagcatgtaatctacctagaaaagccaagaaaatcgattgacaaactgagaaaactaataaatgagttcagtaagttggctctacacgtggtaaacgaggaaatccatacataggttcctgtacaccagcaatagccgtgtgagaagtactgtcactgtctgttacatctgataaaacctgcctattaatctttggcctgcttgtcagtttcttgtcccagacatgctttgagtcatgaggagagcactccaggagatgaggctttcagtttcctgcttatctcaacacgaaagtcaaatgttgtgaagggtggacacaaggctgatggtttcatgacagccccagagagcaaaattcattccccctgatgcccatctcaccctgctatagaaagtttcattttttggacagcatttcctgagagaatgtatcactgagt

SEQ ID NO: 54577 - DNA, 487 bp, Homo sapiens
tttttctttcttttccttttctctttctagaactttctagaacaaatctcaggtcccctagatgtttcttccataattgttactatgcttctcatatgtttcatcctaccttctacttttgtcagcccatctgagtttatttcaacagccaaatgttttattttgaaatgattccaggcttccattaaagtttcatcaatagtataaggactgccatttacccttcacccagattcataaactgctaacattgcacaattgctttgtcattctgtgtgtgtgtgtacaggaatcacagagactcatcttgtaatgtttgtaatgtccatgtatcgtgtatgcacacatttttttctgacctattagaagcaaattacagagctaatacccctttatccctaaatacttcagggatgttctattacttaaccaattatgtacaattatcagaaccaggaaagttcacattgatacaatagcaatgacc

SEQ ID NO: 54578 - DNA, 1699 bp, Homo sapiens
aatgacagcagggagacttgggtcggcctcctgaaatgacagcagggagacttgggtgaccccccttccaggcgccatctagcacagcctggccctgatctccgggcagccaccacctcctcggtctgccccctcattaaaattcacgttcccaccctgtgtccacttcatgattcctcgcaagctgggcccagtcctctcatcccaagagcagagccaccgtagccggagtcctagcctcccaaattcggaaatccaatccaacggtctcaggaatgttttccatcccgccacgcgcctcccgaagctcccagaccggaggctcagcccccatctcggttagtgcccctctcccgcccgactttagagccagcccctgccccttattccctgccccaggatcccggcccctcctgggagctgggctggactcggtcctcagatcctcggaaggctcagctctgggcggggcaagggaccttgcaagtcgggggggcctcgggaacttctctccgccagctgcgactggaggctgggaacaggggagacgacccagggccacggcccctcaggacttcaggcggccggaggttgtggggacgaagcggagtcgggagccgggcttccggccctcactaccccgtctcggcccgcgggttgcctgcgtgcccgccccacccagcggtgagtcatggggcagggcccgcgggaagctttgttgagtggggcgctgccgcccggcggggtcccgccccgccactccccggggaggggcttcggggcacggggccgtgcacgtgagaacgaagcacggttgtggggggggcatgcacgtgcgcgctcgcgtgcgggagacccctcccttccacaccacttcctttcgggacaaaccggtaacctccggccctggaaggttttgtctagtgggttccggatggactggtgttcccagcacccccccggcacgtgtccacgcgtgtggccccggtacggtgtatgccttgccagtaggtgactcaacgtggcactggttgagcgccggatgaggcctggccctggcgcggggcgtgggctgctgcggccctttcctccccgcgcccctcacgccccagcgggcccctagcggttcccgtccacccgctccatgtctttaccccggtactacctccacctgcagtcgcctcctcctgcgcgccagtggcctctgcgtttctgttgaaaggtaccgactacgcggtgcttcccagttctgaggcgatttagtcagcggactcaaggcgcgctccctgccttccccggcctcccagcaggggacgaagtccccaacctggctgccagtccagatgctgcagtacaggtctgcctaggaggccgttcccttctccagtctgagatctccctcgcggggcacgtgtctaccacccttaacccagggctgccctggttccactatcggttacatgttgctgactgtccccaaaaggtttctttgtagaatgtgggaaagtccttgaagagacacccggagcagtgtcaggggcgcttccaggagcccctgcctccaggagcaggtcctagggtctggagagccggcctcagggccactccaggaggctggtggggctggactggcagagcccagcatccttctggtgtgcatcattcccctatgactcagggatgaatcccaagggacttt

SEQ ID NO: 54579 - DNA, 3853 bp, Homo sapiens
tactagtaacaattcagtttctccctgtttatatgctgggggttaatagcatgtttttttgtaaatgggataaacggaacagaaaattgtatcttacactctagtacaagcaagtgctacagtaacagtgctttggtatggctgacccaatttgttgctaggttcaatattttggcattaaaactgctgtggcaacaagagaaagaggactcacaaactatggtaaacgagttgcttcagtgagtttgcggagctgcgacttataaaaacaggagagagctgggcatctgaagaatcgaagaaaaaggatttcagagaccaaatcatcctgcagaaaaccacatacactgatttatctgtacaccttttaaaggactggcaaatgctgccagcaagatagtaaaaaataaacttgatgtccgttttaagaaaacgatgcaactcaatatttgctaaacattgcctgaacttcctccaacatccttatttgcctttctttggagtctgaacttgttttcctggtttggataataagggagtggtaggaagaaggcaggcaaatgtaggagactgacggtgtgtacattttatacaattttgaagctagaaaggaaatcagaggtcaaagtggttcaaacattggttttggctgaggcaaccagagctaggggataattaagctccaaagttaagtcctagaagtgggcggggtcaatgcaaatttagtaaatctttaaaaacaacctttgtcccccctgctgggaacaccagcaccgctcaagttttttccggtacagagaggatttctaaaaatcctcataagtcagcgggcataactgaaagaccacagaaccaggtttactgagacatgggtctagcccaacatcctctgtgcttctcagccaatccacctccaacaagactcctcgcctccctgggctctttattccatataatttttcttttttacagtagacaaaagtggtttgtcctttccattttatgttactaaagaggtatgatgcaatgtattggggggaaaaaagctcttatttgctcgaagaaagcaatctgactacagaggccaaatctacagacattaaatgatttaaaccacaggataacccagtgactaccaaacattatctgacccctttcttcacgtactatatttttcctgaagctcaaattcagggctagccaggaccagtacacacccccagagctatttcattccattggctggctggccatccgcagcctacaacctgtaaatttactgtcaggacgccaggtgtttatttgtcagagatattacattgcttgtgatttttttgtgtttttccttttttttggtataaaacagaacttgtcagaatgggaaaattacttaattgaaacgattaacgcgtgattagtaaattcctttggttaataaaactgtctagatttcaaacttagaagccaagtcattttctatgttcggatatcatctgtcactattggaacaggagtgaacaaataccagaaaataatttgacagcttgcatttaggggagactcacaaaagcccaagaacactgacgaggcattatcacacgggcaggtcattccctttcctagaagtgcatttcggcaggacccgccgtgtgtgacacagacaccgggaccaaaaggagaccggtgcagcgtctactctgcatgcaagatcagcatatacagaggcccggggtgacggcgcgggggagggggcaggccaatcgcatgatgattttaaggcggaaaaatcaccatccacagagccggccacatccgaggcggggtgacccgggcggggacccggcccgctccagctgggctgggctgggctgagcagcggccccgcaccggcaggaggccggaggggagggccgcaggggaggcagggagggcgggacggggcccggccgacgctcacctcccttgcagggcgtgcggtgctggctgtgctgggcccggtagccttcgatgacctcccaggagccgtcgtcgcgccggatggggaaggagagactcagcacatggttgcagggcttgatgatccgcaggatgccgcgcacccggttccgcttctgctcctcgctctcccgggtcctcaggtcctccaccagcttgtcctccacgatgctggcgccgcgatcgaagaagccctccaccatcttgaagaagttggggtcgtcctcgcggtcggccaccgcctcgctgtagtggcgccgggcggccaatgccagccccggctgcggggcggcggcgggctgtccccgggcccagcccagcaacgcggccgagtcggcggacgccgagcccagggcagcgggcccggcccgggacagcaacagcgcttcgcccaggtagcggtacatggccacaagcggaggggaggtgcgtgatggtcgcgaaacaggcgcgctttctcagactccccgcgactagggaggaagggtcccgcgcgggttgcccttttaagccgcagcttcctgcttgcccggctgtcccctcccctcgggcgctcgccacctaacggggaggacggacttcggggacagggcgccgcccagggcgccgggcctccgcctccgccgcggcctccccgggcctcgctggcggcagcgcgcgccggcggggcgtcgggggcgcgcaggcgcgggcgggctcggcgcgcacgctcgcgcgccagtggggaagggaggggaggggagaggaagggcggggaggagagtggaggggaacggacgggaggggcagggaggggaaggtcggggcgggtcggggcgggtcggggcgggcccacgggcggccggatttgcccggaggccgcacccgcctccggcggggctctcaggtatgtgcgccgcgggggtccctcaggggggttgggggtagcccagggaggtcggggtcgggggctggcctctgtagggcgctcagaggccgagtccccccgagcgccgcgtgggtgaggcttggcggtctggtcggggaccgggtcatgtgagtcacgggcgcccctcctttccgcccgcgcgccctcggaacgggcggcccaccctggcctgtcctctggcggcctcaggccggggccgggcgtgcaggggctgacacgtgggcaggaaagcgaggcagagccgccgccgcgtaaggccgggctgagggctcggcgtcaccagccagggctgcagagagcggcgtggcacccggagttggattatgcgtggctggcgtgagctggaagggagtcactcgcccacaagctctcaccacgcgagcttttattgtcccgttcaactgctccgcagtgtggagatcgcatagttacgcacgtcgtggttgtgtcgccccacagtactgactgcttcacctttgcagacagaggctccggcccggcgcggtggctcacgcctttagtcctagcactttgggaggtcgaggctggaggatggcttgagcccaggagttcgaggctgcagtgagctacgatagctccactgcaccccagcctgggcaacagagggagaccctatctccctctgaaatagtctaaaataaggaaactagaaatgcgataatgcccccaggaaattctttctcaggaatatatgtatttgttaaatggttcagtatatgatttattttttattttatttatttatttgagatggaatcttgctctgtcgcccaggcgggagtgtagtggcaccatctcggctcactgcagcttccacctccctgggttcgttctagcgattctcctgcctcagcctcggggtagctgggattacaggcccgcgccaccacgcccggctaatttttgcat

SEQ ID NO: 54580 - DNA, 546 bp, Homo sapiens
ctgaatgaacgttaaagataggaccaaaaggatttgatgagaaattggaagtagagcacggggaaaaagaaagacatcagtgatgatgccaaggttttttggcctggggaattgggatagtggagttgttatttgctgagtatgacttttcacaaaggaatgtcaaggcgtaagtagcaaagttctttctttttttttttaatttttcttgattgtgtttgttttgtttttcatcttttgtgggaggtgggtggagatgaaagcaagcacaggggttggcaggcatacccctggcacctacctgtgagttcatgattactagtcttaaattcagtcctttttatttttacttttttttttttttttttttttttagagacagtgtctcactctgtcatccaggctggagtgcagtggcacaatcacggcttactgtagccttgacctcccaggctcaggtgatcctttcacttcagcctcctgagtagctgggactacaggcacataccaccctacccagcaatttttttttttaattttttgtag

SEQ ID NO: 54581 - DNA, 633 bp, Homo sapiens
ctctacattaattgaagcacaactcaagcaattcaatgtagctctgatatgctggagaacaatctagcagttagctatcagcggtggtgtggttccttttaagcaaaggtagcttgtagtcttcagacttgtgacctgtgcagcctccacattcaagtgaggttaaagggactgctgttggaacatggatcactccaggcctatctgtacacatggacccctcttctgttggcttccactgcaacaaaaagccaataaacactaaatcaacatctggcaactgttaaaagaggaatgatgcaacagcagggcagaaagataagaaagctcaaactttcctggcataggcacaaagttcgttgcttaatgtagttatgagataataaatatctatgaaaaactatttgtcagtttatttaagagagacgtgataataagaaaccctttaattctgcttaataaaagcaactgatatttatttgggggcagaaactatataaagtctttatataagctgtttcgtttaatcctctcaacagtctcatggctaggtattattatccccactttacaatgaaaaagaatggtggcaaaataatttaattttttaaatatttcacaggtaataagaga

SEQ ID NO: 54582 - DNA, 2248 bp, Homo sapiens
agcatgtttgcttcgcaaagcagattagctcatacttaataatagagtaaatctgttgggccatgactcaatgcacccaaattctctagattgctatgtctctactcgctaagccttcgggaacaacaagcacagaacttttagggtgctgtctcactgatgtcggcgttagctctggtagtccaggtcaagattataccaaagattcaggacttaaattcctgcagaatgtaagcccctttccaagttctctgctttactgtatcctgtttattttcaaactcaaatggaaaaaaacgaaacaaaaaccttgggcttcaagaggcatcctgccgcaaggcccagcgatgtgaattttcaacaaccgtctcaggcagatttcatgctgatggttcaggcactaaactttgaaaaacacagtatcacagagtagggatggtgatgtaagagtcatctgtaaaagctgtgctgttttggcagcctgggaggctaaggtttagtctaggcgactaaggtttagtccgggctgtattcacacccaaaacaactaaaaaagcggaggagtctttgagtcaatccctgaagctccggctaagaggaaactcgcccacgctccagggcagcgacgccggctccacctcagccacggctgtctcaagcttctcggggttttccgccggctccacccgagccacaagtctacaggactcctcggagctttccgccgggacgcaagacccaccgccagaggttggtacctcctagagaacagcgaagcgcatcccgagggccgccggccggaagcgccctccagacccgccccctgccctccggagccggaagctgggcatctgcagctggctcggcgcactccactgaccgtcccgacgatgctacgcgcgcccggctgcctcctccggacctccgtagcgcctgccgcggccctggctgcggcgctgctctcgtcgcttgcgcgctgctctcttctagagccgagggacccggtggcctcgtcgctcagcccctatttcggcaccaagactcgctacgaggatgtcaaccccgtgctattgtcgggccccgaggctccgtggcgggaccctgagctgctggaggggacctgcaccccggtgcagctggtcgccctcattcgccacggcacccgctaccccacggtcaaacagatccgcaagctgaggcagctgcacgggttgctgcaggcccgcgggtccagggatggcggggctagtagtaccggcagccgcgacctgggtgcagcgctggccgactggcctttgtggtacgcggactggatggacgggcagctagtagagaagggacggcaggatatgcgacagctggcgctgcgtctggcctcgctcttcccggcccttttcagccgtgagaactacggccgcctgcggctcatcaccagttccaagcaccgctgcatggatagcagcgccgccttcctgcaggggctgtggcagcactaccaccctggcttgccgccgccggacgtcgcaggtgaccccccgggcggcccgtgtgctgtcccggtcctcccacccgccctggatgctctcccgcctcccccagaccctgggcttttccgatgccccccagttctctttcctcttttcccaagccatcatccctcgggctacgtcctccctgtcgagggatattacagacttggctatctctttttccccttacacgtatgttcatttattaattcatcaggtgtaaattcagcaccttgtactcgctgcctgctttagtagagttggggatccaacaggaaaggggacagacgaggtctcccgcaatttttgcgctcccgttcccaaactgaattgccccttcgagcgccaacccatcccttcccccttccctggcgtctagtttcacaattgggcgcacgttttaaaaaacagaatctagaattttcttcctcgggctttgcttccgatactagtttttccttctttctttttttttttttttaaactcatcatctttttcagatgacagttttagacctacaccctgttttaggaacctgatctcaagcctttgtgtcctccttttttcttctgttttgttcatgtttttactgtagcgttcccatcgttgtagctgtggtccgtggtcacaagcagtaacaactcatttattccattaattacactttttcgaaatttgagaaatcatctagtaaggccccgttatttcacaggtgaag

SEQ ID NO: 54583 - DNA, 1543 bp, Homo sapiens
acccctttgctaacttgccagttatttctggagtcccttttttcttactgtgagagtagtcagatccagggaaccaggatttgggctttgggaggaaggggctggaagaactgctttgctcctaggtcctaggcctgccttcagccatgtgaaagggatcttccacttggtcctgttcagctcgccatggtctgcacgggagttcaggtcaaagtcttatcacatgtattttcttggctttgacctttgtgctgttatttttgtttctctcaagaacctaaggagggaaggggtcccagggaagggaaggaaaaggagagaagtgtttgaaatcctgagtccctgccatccctccctctctatgtaaatctctgctcctttatactatgacttgcttattcatggaaatctgtctgagggaaggctgtggtcagaagatggaagatagtccatccgcatgccagcttactgtcccattcatttcagttgcgctgacaggcaataaagaatagcaggagaagctaacagatcatgtgcttactctgtgcttgacctggtctacgtctttcacttacagtctcagatcctcgcagtaacccccgaggtcgatactgttatgatttctatttacagatgaggaaatgaggctcagcaagaagtaccttgtccaaagtcagaatctgcccaagttctaggagacaaagtccagcaatctgactctggagccagtgttcctacccattatgcttgtctctctcctcctcacgagcatactgaggaaaagccaacagctgcttactgtggctcaacccgactgctacacacaaggaatttgctcctgagggtggaaggaagttcatctgcctcgaagaacacacccacacggcagggctgggatgccaccatcagccttccttttgacttaaagcttgtccacgttgtcatcaagtgacacaccaaaccacatcagtcatttcttcagcatgaaagaataaattcgatattttcctgggtggattgtttatatttttgtacttctgcctagagagttcccatttaggcttaatcgttatttgtcttcatagatttatccatatctacgtttcccagtttgccagttgtttctaaaacatttactgaccagtgtaaatagcaaccttttgtagcatttatatatcattttggaaacaatctatttacccaatatttattttaatctagaaagttttagcaagagagctgaagaaagtgaacgtggtaggacaactcatagccagagggaatagtatatttgttctcagtgaaatcatggtttgctggcactaaaaatgagtttccagccagaatgatgagtgggtcagccaagggacaagaatactatatttcttttcagtaatttaattgggtgcccttggaaatcactagtgtctgtctgtgaaggagaaaatacatagagaagctctgtatttgtcagaattgtaatgaacttttagattattttttttttaagtctctagagtatattcaaggaaacatttaagga

SEQ ID NO: 54584 - DNA, 1101 bp, Homo sapiens
ttcaaaataatactgaaaaatatacatatccaaaacaaattaaaaaaactgttcaccatcagaggtagctagtgctctaacagcatattttgaaaattggccactaaaaggaaagaattaaacatttaccttgcttggcaccattgtagttttatttgtggagctgccacacaaatctggaactgcccaacttttaaaatattttacatgcaagagaaaccctaggtgttcgagtctctttattggggtttctgttttacacagtggaacctaattgtaactgatacaacatgtagaaatggaactctattttcttaagaaatgaggttgatttcttcactaccaactgaaatgaaggctgttgagacagaaataacttgacaaagatttattggaagccagatttgatgattgacctgggaagacacaccaacaaagttgggtgtattccaaagtccattacaagttagaatgtttttatcagaaagtgtagaagggaggaagactcctcattttggagttgtccttttcattgcagggtacaatgcagagattacaaccgttggctacagatgacaacatatagcctagaatgttttatgcacaaggttaccagtaaaacggaacgattcagaaacaaattaatgtccttttcaatgtcagtaggttatgtattaatcagtatgtcaacactttgaggaaactcatgataagacttgagtaacctacaataagattctttagtgaaggatagaatgtagccatgagtcataagaccttccctaggtaatttggcagcctgccaaatcctacttattatcccaaacagctagaatctcttcaacttttgctcactgtatagtttcttgccttctgtcaatcccccttattgaaataataattataaatcaggggcacataatttcagctcagaaagcagattcctggttcacaagaattaagtacagttttccatggcagcctttccatattgaaagatataaacaacattttaaggatggtggggaggaaaagagaaagatgatgggaattttgtgaaacagtgacatttgagcaaaaatggatgaaagaccacactct

SEQ ID NO: 54585 - DNA, 1286 bp, Homo sapiens
ggtatatatgtgccacattttctttatccagtctacccttgatgggtatttgggttggttccaggtctttgctattgtgaatagtgctgcaataaacatgtgtgcatgtgccttgatagcataaatcatttttaagaaaagctggaaatccagatttctatatgaaattcacagattttttttagtacaggaaacttgttcagatttcagaaaatgacaatgctatatgaaccaaacaataaatttcttaaggtagtatcaggcctgtgggctaccagattgtgacctttgagtcaaggtttcatcagaaacctttttggcaaggttagtcagagttaatatataaacagaatgatgctgaagtttattgcaacagtggattgtttaaatagacagccaacaccaagaatatcctcaatatgcattataaggatcataactatatatttctttacacttaccaatagcccaggtcagtaaaaaaccttaaggctttagactaaaggccattataaaacatttagagaccaaaaatctaatgctgtctgatcctcaaagtcagtagtgatatggacacatactattgcatattaccagtatcctctttctatgaggaataacacattcttgttttagggaattactcttcctcctccccattcatgtaattccattaggagctgccatgtttttactttaccttgatttcctgttcactattggctggtctggaccttggtgcctgacccaaagcacacagatcagaactccttgggaaagggagtcagtccctctctggtggtaggagctggcagcagctatgtgcaagaaattagtctgcaatgaaagaaaaaaaaagcttagctcacctgcagctagtagaatggttatttccaagcccttgctgtatccctgccctacctttggtgtgactgtttatgaaaagatgctcaatatcttagtcattaatgaaatacaaatcaaaaccacaatgggataccattcacaaacgttcaggtggctataattttaaaaaaaagactattgtcttttttttaaagagttgagaatatggagaaatcagaacctacattgcttgtgaggttgtagcatggttgcagccactttggaaaacagtttggaaattcctcaaagcacagagttaccgtatgacacagcaactccactcataggggtgtgtgtgtgtgtgtgtgtgtgtatatatgtgtgtatatatatgtgtgtatatatatgtgtgtatatatatatgtgtgtatatatatgtg

SEQ ID NO: 54586 - DNA, 523 bp, Homo sapiens
tagagatcaggtaggtatgccagcaaaactttcctctcggcttttggtccctgtattgcagttttcacagtagggtttcaggagcagagggttgtggctagcacagttctcatgtgttttctttaaaccagtagcaacctggcaactacattttccaagcctggctagacagatcattctattctgctttgctgcattcaagggagtatcctgccccttcagactcggggctgtgtagcagactacatttacagagtgttctggataatgaggtcaggcaaacatttgaagaagcagatcgcagactacagggacactactgtttttttccaggacaagctgggaaaagaaattggacgctagtccagacgacgtcgcagtattagccgaattggtaaagggtgccaatgcctcactggcagtcggggacatgactgaagaaagaactgtaacattattcttaaaaggtggtatttttagcacatagatatactaaggtataaccctcttctgtggagcaaca

SEQ ID NO: 54587 - DNA, 862 bp, Homo sapiens
gaaatatacactcacaccccattggttctgtgtctctggagaagtctgattaatacagtacctagcctttctctcttcctactctttggtttcctgccagtgcctgccaaatgcaaccaaccaagctgcagggaagggagcctacagatcctggctgtgcaggtcagcctcccggggcgcagagcagaggggagaggatgaacagctgatctggaggatcaactcaagattgtcaagcaccagcggttactctcccaccaagaagcattttccctgcctaactcccaccgtgttactactgccttaagacatttcgcaagctccctttcaggggtggagatgtcccacacagccacgtcttttgtgacctcagcccttcctttctgcccagccttccctcccgcctctccctcacctcccactttgtgtttctgaggtaattccctgaagcacttgtgatttcccacactgggcaggtttttttcccggctgctgtgcctctgtacacaggctccatctgccatgctgccctttgcccctgtccatttgcagagtcttgtttacccttccaaatccagctcatggggcatatgctttgtgaagtgtcttctgtttgctcaggcccagaatacccccagttttccctgttgcctctgtatgattctattattgtgtggattatacagaattcagtgattcatacagaggtccatccttcccactgcactgtgagcaccatgaggacagacatagagtgtgatctgtctctatctcagcatccagctcaaagcctaaaccaggcacccaggcacctgccaaagaggttctcacagccaggcatggtggctcatgcctataatcc

SEQ ID NO: 54588 - DNA, 1820 bp, Homo sapiens
taacctaaatgctattacataaagttagcacttaaatactgctatgaagtcaataaatcttatgttacatgataaaggtaaaagcaagtaaatgaagatatttcttcaatatgggtgtaaacatgcacaaacatattcttaacaaaataaacaggaattacagtcctcatttctgcaagtggtcatagctcatattgataactaccttcttctactacacattctatattccctttgccttcagcaagccccttagctggtgattttttacctggtggagtgaactaaatcttcatccttgaagggcctgggttatttgtagtcatgcctggattgcatttttatagtttcccattgatcttaatcacagggcatggtaatactaagagatggcctaaggaatctcctgtattccagacatgctcttcttgacctccattgtgtagtagtagactgattttatcttgatagttcgggtcaatcaccccagtcaacactgtaactcctcttagcctgttgacttagaggcaggaggagcccaaagtggcaaggtgatagtcttaacttccagttcaattgaatcattgtgtcttctggtggcaacattcttccctctggaactaagacctctaggccttaattgacagcagaatgtaacgttgcaggaacaggaagcaaacgttttgctaatgagtcactaggggtgacggtgagtggtgccactttcacttctaccccttgattcctagacaggctatgggagaagcagtttcatacattgaatgctgattcagagcacccaccgtcttctgcagaactttgtcccaggcctgcaaagtattgtcacctagttggtgctgtgattgtgacttcaaaaggccattcttcccattctatcaagccatctgcttcaggatgatggggaatatagtaagaccagtgaatgccatgagcatgagcatactgccacatttcttcagctgtgaagtgagttcctttttcagaggcaattgtatgtggaatacaatgatggtggataaggcattctgtgagtccatggatggtaatcttggcagaagcattgcatgcaggagagggaaatccatatccagagtaaatgtttattccagtaagaacaaactgctgccctgtccatggtgtaagaggtccaatgtaatcaacctgccaccaggtagctggctgatcaccccaaagaatgatgccgtactgagggctcagtgttggtctctgctgctggcagattgggcaatcggtggtggctgtagccaggtcagctttggtaagtggaagttcatgttgctgagcccatgcataacctccatccattgccaccatggccattttgttcatgagcccattgggcaatgacagggttggctggggaaagaggctgagtggtgtccacaaaatgggtcatcctatctacttgattattcaaatgctcctctgctgaggtcatcctttggtgagcattcatgtgggacacaaatatcttcacggcttttgacccctcagagaggtccacacacatacctcttcccaagattcatttgtcaccaattttccagttatgctcctttcaagtccctgaccatccagcctaaccattggctacagcccactaatcagtatataatcccacatctggccatttctccttccaaggaaagtgcacgaccaggtgcactgctcaaagtcctgcccactaggaagatttcccttcacctctgtccttcaggcatgtcctagaaaggggctgtagtgctacagctgtccacattcaggtggtgtctgcatac

SEQ ID NO: 54589 - DNA, 1126 bp, Homo sapiens
aggtgtcacagaaaagaactgaaaacccaaatcagtcaggcctaagagcttatatatcatcttaacaaagggtgataaattctggagaaatgataagacaaaggaaaaggggcttgggcttctaatggtggtatattttgggagggtaaatatatcggggaagctcattgaaggaaagggttatggtagtaaggtttgtttgtgcagactcatctcagtgttgacttaccagctcctgtgacacaggttgttctctgccttccggtatgggagaggggaggggagatacttttacagatggaaatttgttatatttaccctacttttaggcagaaaaggggagggtagagagttccttctgaatctgctatttctcaattgctttaacttcaaaataatcctatgccaaagtggtatatttgggggtggtatattctgatccccttcaccagactctcaatccatcaccaattgacagtccttagacaaactattgtgcaagctctcacatatcttcaagtggaatttgatgaattccaaagtatgctgtcaaaggcatactttggaagctgccacagcctagagtctaaggaaggcctgagccaggtaaagtctccagacatagtattgcagaaatgacagcactctgagtgggacagtttcccaaggtgtgtggagccacatttggaaggatcacattggtgtctcgtggggctgatgtgaaaggacgtctgctgacatacgggagcttctgatctgagaagagcctgctgggtggtggcaatgtccacttggattcttttgagtacacactggctgggttttggataccagcacctctgccaatccagcatcaagtgttctgtgcttcaggcactccaccattcttgtgatatcatttttctaggtcttcacttctgctgtgtctacgcttctcttctttacctaaaggctctgcttactcatggattccattgcctgatgacatttgctcaatggcttttcttgctttgtctttcagtttctgctgccaatagggagttcccgtctgcctcacatttaaatttctgcctcctcccaatgtggggcagttgcctggctctctttacacaatctattttgggat

SEQ ID NO: 54590 - DNA, 1509 bp, Homo sapiens
atctcctttcagatttttttaagtgcccttaatttctaacttcactttataaaattccaacctggaaattgttgaagatgcctaatgaaagtagtttatgaagttcctatcagtagactcatgtcacaattagaagcctttggccccatatcaaaagattagtgacgtgtatgtgttaagtcaaaataaaatgtctaaggcatgcacgtatcatctttacctgttcaaccaattatgtattgaagtgatggggaaccagtgggcggcaggaagggagtcgggtatctttctctttcaatagattgtgagtttcttgaagacagggaccacatcttgctcatctaagtagtacctgtgcctgagaaaagtgttcagatcctcaaagattttcactaagtgctcttcacccagtggaatgctgcacttatttttgtttagggggtttcaggtcttgttcagcatttatgcattacaaccacgagggggcaatatagtcacattccttgtaatgaccacccagtggtgttgcctccacgttagagcccctaatatgatgagcccccctaaaatgcattggagaaactgtggcataaacatctcaccaacactggcattctttgtatatccttctcctgtttatttggaggagttgactgattctatcttttctaaacaatataaggatcaactagcaatcaccattttattaagttatgcaagtgcagacagcttctggaaggaagaaatgaaaatgagatggtggagaaggggtggtacaggggaaaccttcatgtaaatgttatcagtagtatcagggatgatcaattggcacaatgttatctatggtgtttttcagggaagtcttggagggaacactactgaagaagttacagattctgtgtctatatgaagcagaagacctcaatccttcctctgtcccctgaatgagtcttctcccagttcctatatgtccgaatcataggctccgaaaattaagtttctcgttgctcatatcttttcagaaggaatgtcctctcctaagagcaagagggtagtgagatgaaaaagaaatctattgcctttaaaaggaaagaccctgagaaaataaaaaaagagtgttttgctttttagtaaactgctgtgctgaatcacgactaaattggtgatctgtgacatcaaagggtcataaacagcctagcttgagtccaaaagaactgaggcctccattttcacagtaaaagaatgcctattccaaaataatttttgagaatgaatgaaatctaaaacaagataagcagtcctgtttacagttatcatggggtattgaaatagttggcgtggaagttgggtgactcagtgggcaggacatttggggtcagagcacttgggaagtcaggctgacctgcgttaaagcctcagctctgctcctaactagtgactacggtcagatgccctcccttccctaagcgccagttttacattgctcatatgtaaaatacaggaatgggg

SEQ ID NO: 54591 - DNA, 2514 bp, Homo sapiens
gatgcatagtgaacagacaagctgtgaaccttgggagttatcaccatgtgtgatgatgctggtgaagaaagcctgcactgaggaggctgtcagcctgggtttgaatcccctcatttggaatataatcttggcaaagtctgaaagcctcaattgctcgtttgtaaaactggaagatagtaggacttgctgcccggggtcggggcaggatggagggggcccatgagaattaaggcagagcccagcggagtgcattgtaaggatccatgagtgtgaaccttcgtttttactactgcatatgaggatcctgccaacaaacctggcggcttcaagcatccttgcccttaaccaaataagctcttaggtcctagaggcaggaagacttccttgaagaggcgcgggaggctggtgaggggagtggaggacgctctgggaccctctgggggtggggcgggcggggtgaacttgaccccaggccgcgtgccgggcgtgccatctgccgctccgctgcaaggtctcgcccgggaccggggctggcggagcgcgcgcccgcgagtaggggccgggccggggaccccgcctaggcggcggcggccgggtccccaaggctgggcgctgcttgcggaaccgacggggcggagaggagcgtggcgggaggaggagtaggagaagggggctggtcaagggaagtgcgacgtgtctgcggagcctttttatacctccttcccgggagtccggcagccgctgctgctgctgctgctgctgctgccgccgccgccgccgccgtccctgcgtccttcggtctctgctcccgggacccgggctccgccgcagccagccagcatgtcggggatcaagaagcaaaagacggtaggcttccaggcgccggcttccctccccgccaccgcactgcacgcgccgacccccaacccccaattccccggcacttgggtcccaccctccccgggagggggcgtcgggaggaggagtaagagtggggcacggagggaagcaagagaaagaggctctgtgtggaattcccggggcagtcctcgccccgcagcccctctccaccccgcgactctgggaatctgcgctccttggggtcgccgcgcccgcgagagacctcccgagcttctcaagtgggtccggatctagatccaggaccagggacaggaaatcccctttctttcccaagagctcttccagacccgccttttcttctgtagggtctcggagcagatcgagctgactcccgttctgccaggtctggtcgctggggttttgtctatgggaacttccttggagtgggctttaatgacggactttcatagaggaaactgcaattatcaaagcaaactggaggaaattgcatttctacactggcgggatttagccctctagcttgatttcggcattgggtggcatctcgagttcagtaatgaggggtgagggtgcccctcggtttggtggagtaagatgaggggactgtgttgaggaggcacacttttacccagaattaataatctgagctgtcctcctttaatgggaaatatgagggcgtgtcaaagagaaaagtttctttcccagcaacatgggcacctataaattttgcattcttaaaaatggcagcagttctatttgtcaattataccccaataaactgaaaaaaaaaaaaaaaaaaaaaaaaaaaaaaccgggagcagtaatcatagactcttagagttggatggcgccttctagacagcactggggccacgtcagatgtggtcagcaagccttgataaaatcctactcagcagtttggccgctgaacattctatcttcagccaccaccctgcaagcctcagatgattgtactggttactgaatgggttgacctctctctagtagatagacgtgcaatggacacatagtaggtgcctgataaatgtttattcttatataatgtgtattaccgaaatatctttgaggtgtatttgtggtgggccggggagaggtttaaaaaaaaaaacaaaatataaagccaagaagtggggaaggagtgtggaggggccatgcagggctagaagggtcatttgagcagcaagagaacagggtgggggctctgtggctccagggaccatactggaccagcaggagggtccagggtgtaggtggcatcaatttgggaagggacatttatcaaaatccagctgcctttctcaggagtaatttttaagtgggggactctcagcgttgtaacatatttttgaaataataaatgaaaatcacttgtattttgttcctatttaatgcgattaatttctgtaaaatcctaaatagtgtcttctaaatggcaagccgctgtgccagtagctttttatatcagtggggttttaattcccaccttcctgcttgcatcaagaattccttctcagttgtgatgggggactttgtcaagcattagaaagggacgaggtggtctctcctcttgatgcctccagtcggcaggagcccaggaagaggagggtttga

SEQ ID NO: 54592 - DNA, 1013 bp, Homo sapiens
aggtagaggctacagatttacatgaaaaggaaagatcagtttcctagccttgtgtcaggagcccatgtgaggccagttcttggcttctccttggctggaaataggagggtacaaatagggtcacctactctcaaattctgcggttcaaattgtggttggagatgagatgttctatttctgcatctctcctggaccatcttagagcagtgcaaagtttactggatcttccagtgcattattggcctttggtgtgatgacgagagagcaggaaggaggtctccagctccttttctgagttcagatgttccctagcccaagaagactaatcatgcacctggtttcctgctctgaaaaataagaagtgattttggcagcctttgaatctggatggaaggtggttttttttttttttcagtaacaaaggtagttgtgtatgtatgtacagagatagattaaaacaattttttttcctagaagcattttacaaaagttaagtgtgcaagctatcctgtcgaactttgtccttttttttctagacactcctttacactgtggaatctgtgagtagtgccagccaggaggagagtggcaactttccaaaaaaaaaaaaaaaaaaagaggcccttttacccattggttaatagagggggagggtgcagctatttaggaacatctgaatcctgtcattctggagtctggaatccccttctcttccccctccaaggtcttcgtatagctcacctcacacccagtacacacacccgctcctgggatactgtatcctattcagccacctcctagccagtggaccacctcataactaatgtcaaggttatgtgtaaaatctgaatgtgcttagatcttgataggaaaattatctaaattttgaaaaattgctatgtctacaatttcagaactggttgtcgactcatgagacgacacttactgttgtcccatgatttaattgtttttaccaactaacaatttggaaccaaggcttttaaaccatccct

SEQ ID NO: 54593 - DNA, 3018 bp, Homo sapiens
tatattattatataattagtaaaaatgttatgatacaaagcatagaaaaaagaagcaccaaaatatgtttttatttatataataattttctttcttttttcttttttctttctttcttcctttcttcctttctcttttttctttctttctttcttttttccttccttccttccttccttccttcctttctttctttctttctttctttctttctttctttctttctttctttctttctttctttctttctttctctttctttctctctctctctctctctctctctctctttctttcagacaaggtctcactccattgccaagactggagttcagtagtatgataagggctcactgcacccttgacctcctgggctcaagcaatctcctcccacctcagttccctgcatagctgggactataggcacgtgccaccacacccagctaatttttaaatttttttctagagatagtatctcactacgttccccaggctggttcctatctcctggactcaagcgattctctcaccttgacctcttaaagtgctgggattataggcatgagtcaccgcacccagcccaaaacatagttttaaaaagtggatgagatcattgtccagattgtagttaattaatatcaaagaggcaaacacacgaatggcctaagtaacttattacacagaaaaaggcatattcttaccaaaataagtacaaatcaacctgggggaaaaaacagtaaaaatacaaacacaaaaaagtcattgaatatttagaagtgggtatatcgtggtagcctggtaacttggttttgtcacttggaaaatgaactggcagtatacaatgagacctacaaaatagtttataagttttgatactcaataatttcactttgggttgtatattcaaaagaactaatcggaaaggaataaatatataattgtgaaacatttgaagctactcatgttaagtaatgaagatgaagtgagaatgatttttaaattgtttacattatagtgtagtatgaaaagccttattatatattatctccttcaatcctcagggaggaagctgtgacaaagagctcacataactgggactggaaactaggagtcctgtctatgcagaaataagacccagacttaaacctggctacatcctgtgtcttctggctgtgggacttcagcccccttcccaatatctctgagcagtagttttcagatctgtaaatggatcacaatgctcagtctctatggctcccaggttttgagcaataaatgagataatgcacgtggaagtggagctcctaccatgggcctgatagggcaatcactggggttgcaactttctgaaaatgggtctttaaatgaatcttcaaactgcacactgaggagcgggaagatttggaacacgtttaatcagcaagggagcaatgaaagcagagaccagtggcaatgagggccaagttaaaacagggcggagtggagttgtaaagagagaagtaaagtggatttgtttgcactgcctgggaaggagtagggtacagaggggattcaagggcacgtgcttgttttttttaattgagacattatgaacatctcagaacaaaagctttgggctttggtaagctccaccagacacctggtttagggctttttcattccccaagactcctcctcccttccatgacactcctccctgggacacatgcttggatttggctctggaaatgccccgccccaccatgaaaccatctagtcttttccccaggttacttctcttgtagtcacgcaaaatcaaggctgaggctccctgtcacgaccctcggcacttcacctgagttctaggagccactttggcagtcctctttctgtgccaccaatgggagtgaggggtgagcctggcagagacacacatgccaccctgggctttgtgacaaggcctggactctaatgggtcaaacccagggcaaaggccatcctccatctaggtaacgaagtgttcatgactctgtgacagccaggacaagggcagtaagtttgcagtagaatgacactgcaaattggtgaaccttagtgtagggtacgtcccagccgggctttaatacagagcagcaataatgacaacaacattgcgtgtgtgtgtgtgtgtgtgtgtgtgtgtgtgtgtgtgtgtaaaactggtgcagtcctatccattgtctgattcgatcatgagtgccacatcctccccagacttgggttagagtagacccagatccccagaacccttttaaacctgggtgatttagaattcaaactaccatcacttctccagactagattaaatgccacctggactgatcagatccaacatcctaccatgagtctggtattttctttgctattttatctagataattcttatttaatcctttcagcaatcctaggaaaaaaatattcttatccccattttacagagaaagataaggaggttcagagatgttaataacttgctccaggtcacagagcaaatcagccgtgaagcaggtttcaaatccaggtctgcttgactccaaaatcgatactcatgctactccgatgcatgctacagagagtttttctgggccagtagtgggaagaaggtagagatttttgcaaaattgtcttagggacccagtatagaagtatgccactaactttggggtttctggaccacttcctgataaggggcagagttagatgggatgccgaggatgtctgtgtgttctctatgtacacacagcaagacagacattttttcctttaacatgtgttttgctttctatagagagaatcctttttctgacagtcactttctttccaaagcttagaacatcataggctctttggcagagagtacagctttcaacaagaaaaagaaaagtttttggccactctgcccccttgcagttcaagtataattcaaaatatctgcttctatttgtttgccttttgcaaaacctcaagggtgattttgaaataaataggaataaaatattt

SEQ ID NO: 54594 - DNA, 2231 bp, Homo sapiens
ttgtaaaatagtagtctacctttttaaattacttcaaaatccttcaatgaaactgaaacttgttttgtagactgtaactatatatactttattgtacactcatgtatcattcatttggtattgatatacctaaaatgtaaggctgttacagcagcaataccatcaccagcgaacatacaataaaagctgcatgcgcatacaacagcagggagcgtatttcaatcctgtataaacattaggttcaacaaaatgaatacacaaatatgtacatatacgatgatagtgctgtatgcaactaagaaacatcctaaaacactataacctagagttatttgttaggcaaatatggtatcaggtcgtttcattttaagttctccatttccgagtggaaaaccgtgaaatcgtactacctcatctatgagcaatttattgacatgtatagcattcatagcatagcattcactgtagtatttctctcctaattcattgcagtatttcacaaatcgtttctcaaactcaaaagtcccagttttgcaggcataaaggccctacgaatacagcctatgacaatgaaggcctgccaatcttcacaaagagggcaggttattattaacatcaccatcttttgtgaaagcgtgcccggccctgaagaaccaccttcgattttgcacaaggtggtggccgcgcctgtgcgacaatcagacctggttcattccagccgccttcgtctaggttcgcctggttctgaagtcttccgggacgacctcaaacccccacagtgaccaggatgccgacaaagattccctcgggaatggcacgagtcttggggaagagctaagcagaccctaagggcccaggccgggccggacgccaaggcgaggcccgggacgcccttggaggttaatcctctagatactaagggctgcggggcgcttgggggcggcactgaggtagggcgtgggagaagaccggggtgacctttcctccgggggttcccaggtccgagacggtccttaaaggacctcagaaggatacgacaaccatcccatgaggccccacgggaaccagctactcacccaggggcagaaacagcaagagcaagtgccctcagccggcctcacacaggaaggaaacgcaacctgggagagaacgcttccggcgggaggcgcggcgcactccctcccacggagcatgcgcgacccgcggtcgccggcgcggagggggcgtgctcccaggcttagaaacagtgagggagagcaaattcgcgcacctgatgtctgcttaagctacctgctagactgagactttctgcgaagccggcgtgtctgcgagcagcactcgctaaggctctgcgtttaacagacactacctttgggaaggcgcttatcacaaaaagtccctgcccttctcgcgggctcggggcgcaaccctgacaaatcgggcagccttcttgagagtgcagaaatgctctgcgtacccagcaaatacattctctccttcccaccactctgtgcaaaccctcacgccgcggctttgtgtctgtactttagccaaaacgcagaagcttatggccaccctccactcctcacccctcatccctcaccacctgcctttcaattctcgggtgagctcacccttctcccccatctctgtgctgacaaacacctcggggtggcgcctgacaatctttccgcgaaaagatttagcagcccacgccaccagactcggtagttaggacggaatagggcatctggtaacagattttgcattttggtgatttccctttttctttcaccccttttcctttccagaacgagcgacgtgacacaagaggtcccaagggagcaaacctgaaagccagagcctcctgaatacacaaactgccggtgggccagatgacattagacactcctgagatacgagaagcatcacttccttcagacagagtcggtgagactatgatgtaatgagagttctccctgtgttcctcaggaaggcagcttgtgcctttctacttgaggcatcatctttgatggctaaagaattctgcagcttggccagcgcggtggcttacgcctgtaatcccaacactttgggaggccgaagcgagaggatcacttgaggtcaggaattcgagaccagcctggacaacataatgagaaatcgtctctacaaaaaaaaaaaaaaaaaaaaaaaaaaaaccacctaaaaattagctggatttggtggcg

SEQ ID NO: 54595 - DNA, 2093 bp, Homo sapiens
gtaggtggatgttgcagtgtgccgagatcgtgccaccacactccagcctgagcaacagagtgagactctatctaaaaaaaaaaaaaaaaaaattaaaaacccaatgaggtggctactgttatcatccccattttacggatgaggacatgggtacatagagattaagtaacttgccaaagatctcacaactggtaagtggcagagcaaaatttgaaaacaaacaatctggttccagaaactgtacttttaacctcatgatagcttcctgaggaatttatgatctgagtatatatagtaagtacctcccctttcagggtaaggcagtaggtaatggtgaacagggaagcaaaaggtgactcaggttgagtaaacaacaccaagcatatctgactcaaggaatgcttcagaggccaggggtgcatgcctgtaatcccagcaccttggaaggctgacacaggaggatcactggagcccaagttcaagaccagcctgcacaacatgacaaaaccctctctttacagaaaataccaaaattaggtgggctttgtggcgcatgcctgtagttccagctacttgggaggctgagagttgggagaatcacttgagcctgggaggtcgaggctgcagtgagctgtgatcgtgccactgcactccatcctaggcaatagagtgagactctgtctcaaaaaaaaaaaaaaaagaaaaagaaaaagaagaaaaaaaggaatgcttcagtctgctccaaagaaaagaatggagtaatgtgaagtattaaatgtagcaagatgccactgcagtagctcacacctgtaatcccagcactttgggaggctgagatgggaggatcacttgagcccaggagttcaagaccagcctgggcaacatagtgagaccccatctcttaaaaaaataataaaaagtaaataaaaataaatgtagcaagaaattagaaatctttatgaacagatggcaatccagtttaatgttatgtgcatggccacaacccttattccactacatcctcctttcacatatatattatgaaggttaatgaatacaatcattgtgataacatttcttttctccctttctccctcctctggtagagtactcacataaaggctgcattcacaattgaggttagaacttgtctaggcatgtctagtgagcaatgggaggagtctgctaggaaagtactttcagaatactggaaaccttagggagaaaactcctcctgaaggtagaaaattgcagaaattataataaagcctcagctgctataggagaaggatagctttagtacttttggtagggaagcagtgtagcagcaaattttaagagatatatgagaggtatttaagtggatcatgcctgtaggtcatttagtagtagtatgcaatcaataaatattcattattacttgtgtgacagtgcttaccccacactgtcctttatagaaacatatttgcagagacctggggagaaaatgcaaacatgccagagggcttcataagaccatacataccctttaatgactccattaagtgttatcaacaaatgttagtaataataaatatagttattatcattattgttcttattacagcctcattttatgttattactgattttttaatggggtcagtgagaaaataagacttcattctcaaaatattcaaatgtctagtcagatcctggcagcagctgcagcggctctccttgccatctccttttcacttctggaaacatgggctcccatgtggctgtctttgatgatgtcatcaaggtgttcagtgacatgaaagtgtgcaagtcttcaacactagaaaaggtgaagaagcgcaagaagttgctgctcttctgcctgagtgagtacaagaagtacatcatccttgcggaggccaagaagatcctggtaagtaatgtggaccaaaccattgatgatccctatgccacttttgtcaagatgctgacagtaaggactgccgctacgccccttatgacgccaccaaggacagcaagaagaaggacctggtgtttatcttctgggcctctgagtctgcatccattaagagcaaaatgatctatgccag

SEQ ID NO: 54596 - DNA, 3846 bp, Homo sapiens
ctaggtctcgttagatattttttgactcaaattgtcgtctgtagttctacttcctaagggaaatgaaaaaacaataaattcccagactggtgttgatgctcattctctttaagcgggtcgactacttgctttgtagatccttgacgggtggggtgcggggtaggagtgcgatccaactctcagcatttccgaatcagctctctcacggtgacaggtcagcccaatcggggctgtaaacagacttgacaggtttgttctgggctgacggccattgactaggttctcagaccagataagtcacttggctgagtccacagtaggtggggcgcgctcaccagctcaggggtagtgactggacgtttgttgcaacatcggagaatgcacgctctgggctgcagcaggagataccctcaagcacagaaccaaaagggttcaccctaagcggcagggcatcagcgatggagaggcccgagagccctagcgcccagctccttttcccacgtttgggaaggcgcagaataggtcgatgtagagcaaggagtgagtctcaggtctcagtcctttggcttgctcttagggtagcaggcgaggagtggcaccagtttggggactctctccccgcgttctgtaagaatcggcggcagccagcaggcggggaggcgggggcacgtgtttggatgtgggtgcttgtgtaaccagttccccaagcgccagccccgacagcgctccttcgggaggctggtccgagcccctgtttccgccgcggcgcaggaagggttggggttccgctgcctgcaccaggcaagagcaccccgagcaaaggaagaagacgacttgcctccggagctatcactggggagtgggaatttggaaagttccccaactagggacacacgtgacctccttcggaaagtagttccgactgtggcccgtgtatccttccacctccttttgaaccctcctaggtctcctcgccccgcccactcgctgggctgcagcttcctaccgttccgtactttccactcaacccggtaaccccaaacgtgcacggtccggccggggcgcgcggagcctggccccgggcgatccatcctgccgggttttcacggcggccaagggggggcggggctaggtggtctctgagaaccgagcttgactccgacgccgcgaaccgacctggagcccgaggggaaagatgctcgactctcttgggggcaccggagcgggcgcaggagaggcctgcggggtgcgtcccactcacagggatcctctttcagttcatttagataggtgccctttgggcccttgaaattcaacggctatgtgttcacgttcagcacgctcggctgagagctttcatttttagggcaaacgagccgagttaccggggaagcgagaggtggggcgctgcaagggagccggatgaggtgatacacgctggcgacacaatagcaggttgctctttgtgctaagactgacaccatgaggacacagatttgggggaagggggaatctctaggcaaaggctgttacagtcaaatctctgcgaacgattgtgatccgacagcggtgcaaaaggaaagagcgaatgcagtccacgccgcggaaatctaggggtagaggcaaggggggagggtattccccttgcagggaccgtccctgcatttccctctacactgagcagcgtggtcacctggtccttttcacctgtgcacaggtaacctcagactcgagtcagtgacactgctcaacgcacccatctcagctttcatcatcagtcctccacccccgccccacaacagcctaccctgcctccggctgggtttctgggcagaggccgaggcttagctcgttatcctcgcctcgcgttgctgcaaaagccgcagcaagtgcagctgcaggctggcggctgggaaccggcccgagcaagccccaggcagctacactgggcatgctcagtagagcctgcggcttggggactctgcgctcgcacccagagctaccgctctgccccctcctaccgccccctgccctgccctgccctcccctcgcccggcgcggtcccgtccgcctctcgctcgcctcccgcctcccctcggtcttccgaggcgcccgggctcccggcgcggcggcggagggggcgggcaggccggcgggcggtgatgtggcgggactctttatgcgctgcggcaggatacgcgctcggcgctgggacgcgactgcgctcagttctctcctctcggaagctgcagccatgatggaagtttgagagttgagccgctgtgaggcgaggccgggctcaggcgagggagatgagagacggcggcggccgcggcccggagcccctctcagcgcctgtgagcagccgcgggggcagcgccctcggggagccggccggcctgcggcggcggcagcggcggcgtttctcgcctcctcttcgtcttttctaaccgtgcagcctcttcctcggcttctcctgaaagggaaggtggaagccgtgggctcgggcgggagccggctgaggcgcggcggcggcggcggcacctcccgctcctggagcgggggggagaagcggcggcggcggcggccgcggcggctgcagctccagggagggggtctgagtcgcctgtcaccatttccagggctgggaacgccggagagttggtctctccccttctactgcctccaacacggcggcggcggcggctggcacatccagggacccgggccggttttaaacctcccgtgcgccgccgccgcaccccccgtggcccgggctccggaggccgccggcggaggcagccgttcggaggattattcgtcttctccccattccgctgccgccgctgccaggcctctggctgctgaggagaagcaggcccagtcgctgcaaccatccagcagccgccgcagcagccattacccggctgcggtccagagccaagcggcggcagagcgaggggcatcagctaccgccaagtccagagccatttccatcctgcagaagaagccccgccaccagcagcttctgccatctctctcctcctttttcttcagccacaggctcccagacatgacagccatcatcaaagagatcgttagcagaaacaaaaggagatatcaagaggatggattcgacttagacttgacctgtatccatttctgcggctgctcctctttacctttctgtcactctcttagaacgtgggagtagacggatgcgaaaatgtccgtagtttgggtgactataacatttaaccctggtcaggttgctaggtcatatattttgtgtttcctttctgtgtattcaacctagggtgtgtttggctagacggaactcttgcctggttgcaagtgtcaagccaccgattgctttcttaggctatctatatggtctcttcctgagggctattgtccgttaatacagaatacagtacactgttagtggattagcgagctcggtaatccggtctcctaaatgaacaaaaaagtagacgctttttgaggttgagcatatttcgattaaatcttggcttaggccctagatcaagggtttagatcagaataaaatgaaaattagtgttgcacgtacgcatattgcatcagaatcttgcagtgattgttttagtttcctgagttgcattgatagattcttttaaaatatgactgatttgcataactttagaagcagaatcattttcagtatatatggtgcacattgagggcaaaaagtagttttgttaatgtttaaacttaagttacctacaactttgaactgtatgtagaagttttgtagtttgaagtcaatagtgccataatataccttataaggcgttcttactagat

SEQ ID NO: 54597 - DNA, 556 bp, Homo sapiens
tataaccaccaaatacagcccaattctgactagatgatggaagaacctgtcccatcagaggtccagcatgaggtccagcagaggtccaccagaggagttcagcaatttgctgctcttagggcagggatcaattccttaatatcttaggaagactaggtattgacagtaatggtgacaaagcaatgaaaaggaaaggaagaagtgataagacgtggcagcaagctgaagtatgatgagtaaagaataggaatcaaagtatgtggagtgttagagaaaacctggatttagatccagattctagtcctatctctgtcattaatctattgcgtaaccctgagcatatcatctacctctctttgagtttgcttgtcaataaaatgaagagactttgaaatctgagacttcctggataagtactaaatacagattatgtcactgatgtctgcctctatttatttctcccttttaccctaatctctataagtctacctcagtcatcctgatcctattctacttctctgatgttgttgtcagataggtgtgatcatcctcatca

SEQ ID NO: 54598 - DNA, 1203 bp, Homo sapiens
gtgagaatgggagcaagaaagagaaggagtggtggggagaaggtgccacccacttttaaatgccagctcacttaccaccaagaggatggcccaagccattcatgtgggatctgcccccatgattcaagcttcttccaccaggccccacctctagcactggggattacaattcaacctgagatttgggagggaaagatatccaaactatatcactaggtctggatcttgttatttattttttggaacatagtcatatatatccaaggatatatattgtagaagtccacagaaccatactaatattggacttctgcttagttaggtcttatctatctgaaacatgatattcatattgcagagaagattattttctttagtgattgaggaaatctttactacttatacatttttaatataatactataatatttgaagatgcacattttagatgtagtttaattgaaacctggaaatactattaatttgctttttaaagtcctaaaatcaggattatcagattctgaattaatggagtttaaatcaaaaagattacaaggcagtttttcagttttattctggttaattttatcacagctttggaatcctactttgtttatttgcttcttgaagttagatttcccagtgaaatttcagtatcacataaagtcttatgaaatggctcattgcactttgaactttgagtcaaggaagtgaaatttattgatagattgttggtgtaatatttatcctgtttgtggtagcttttttgaataataagtgtcttagaagaccatgttggagtagcctgcatgcttttatcaaacatattaattatgtgatggctgatactgctttagatattacatagaaatagtagtaggtgtttactaaactggaaatttcatttaacttggtttagctttgccttgttctcagtcacattgataaaaatgtaagacttttgtttatcttttagaataatgacaccttttggtgctgagaattttttgttttatatatatatatatatatacgtaatataaatacaaaatatatttaaatatgtataatatttctcatacactttatgtaactttgtgttcctgtttctctattatcttggcatgttttcttcaaatggcacttcttaacctcctaaggttaataaatttctttgtaatggacttttgttttctaattcct

SEQ ID NO: 54599 - DNA, 1200 bp, Homo sapiens
gaaataagcaaaaaaaaaattttaaagaccttgtatacaagattactttgccaggtactgttaaaagatgcaatgacatttaagacgtaacatccttaaggatcttattttctgggggataaaaaactttaagataaattagaataaaagatttaaatggcattttaaggtaccaggtaccagataagatgtcacaaggctgtatatcattaattgccaaatgatttatacaggccagatttctttgttggtcaatagaggtttaaagtgatgaacttctgttgtgtttttttattaagaaggtattatcttattagtaagaagtgattttttttaagaacaagcattttataacatcaaaagaaatcagtagtactctttcctaccccctcatatttattctgaaagtattcaagcattatattgtcatgtaagaaactggagcttctcatgtttgtattgctgtagaagtaaacatgtatttgccatgcgtcatcagggaagttgcactcaccgtccaagaacttttgttaaagtaaatcttggaataggtagctcatttgaaatgtagaaaaaattaaatccatatctgaattttgtttatatgtatgtacacgtaaactaaaaacgtatttaaagctagtattagatgagaaaagaggtttttttacttaaaattttaaggcaaaagtagtttatcttagatcttgtgagattgtatttttggtttaaaatttgagaatttgagtgaagaaaaatcatgtgaatgaaaatgcaacagataactcagattgccttataatagtctttgtgtttacctttattcagaatatcaaatgatagtttattttgttgactttttgcaaatgtttaacataggtgacagattttcttttttaaaaaaataaaacatcattaattaaatatgtcatttcatttctttttcttttctttttttttttttttaggacaaaatgtttcacttttgggtaaatacattcttcataccaggaccagaggaaacctcagaaaaagtagaaaatggaagtctatgtgatcaagaaatcgatagcatttgcagtatagagcgtgcagataatgacaaggaatatctagtacttactttaacaaaaaatgatcttgacaaagcaaataaagacaaagccaaccgatacttttctccaaattttaaggtcagtt

SEQ ID NO: 54600 - DNA, 1293 bp, Homo sapiens
aaaccattttgttttctaaattggtttggcaaactctatacaaacagtctgttccttttcattctccaagttgagtttttaaatttaaattatactctttgtgcattttgacaatacttacctcttttcagaagacattaaagttctgttatggccttaaaacatttctgtaaagctgaaaggaaatatcatttatgatttattgatgggaaacagttacaaattttgagttacttgacaaacagaagggatgaaatttatggcctagtgttgtgttttcattcttaacccataagcaaaaatctctggaaaagtaccaatatctagtaaaagaaatattttttcacaaaaagtattttctattttcccctcacctcttacctcgtctcacctcaaagttcaagaagcttaactttgtgatcaaaggaaaatagtataattgaatatttgatactatagaaatttgcaactgtataagggcattattaaccttttgctagtgatcagtttcctatcagggcagccacataaaattaggcatgacactttaaaagaaaatgttgactcttaacttttcctcctctaatgcttaattttaaaatagatttaagcaactttaaagacattttcctgagcaactgcattttgttttcattctgaatttaatgagactctttttttctttaacattttactttgctttagaaaggatttaaggcaggtgaatgtgtttcccagtgtgagaaaaattgtcatgtaaatttagaaaaaagtattgtatatgtcccttgattttggcttaagagttagaatttacttagaatgtttcctgacccaacctcattggaatttgaaagtacattccaatagtattgtgagctgctcctttaaacattggtaagtaggcttcaaacttaattttcaaggaaataagccatgcttttactgtagggtttattaatctgaaatacctgagaatgaaaatagttatatgctcctatctaataatataaacagttaaatgtgacctgtaaatattgtgaaatttagcaaaaatataacctgtaaaaataatctctagtaagctaatattctctcagtaataaaacctagagagctaaagtagcccaattaactgacattagaacagatcgtgatatgtggaagaactattagtgaattatagtcatgtttatacttctcttttcaattataatcatgtccttgagatctcattttccagtccttattacctataaggaagagaaatatatgtaaatttcacaaatgcat

SEQ ID NO: 54601 - DNA, 706 bp, Homo sapiens
ggctagagcagagtaagtgatgggagattgatgtaagataaattttggagaagtaggcaggagaacttctggtttcagccaaggtggaataaaaccactaaattctgtcccctactgatgacaaccatcaataaactttttctacactgttttattcaaactcattagtttatcttattctttgaatagatcttttaccccggcctgattttgtgacatcatcgatgagtcatttggaaaatacaggttcactgagttttgtagattttccagtgttgacacatttcattatgcaatgcagaaaaacaaatcacatttaaaaaaatatcacaacacttttttagagctgacaagaatagtctttaaatatttggaagaaggcagatgatgaaagagagtcaaaacttggaaaagcaacctatattagggatgtttcttttcttctattgtcttaacagcttcgccccaagggtgggccccacttgtggagctgcacaaccacggtgacttgagcagctcacactgagataaatcaagctttttggccagaggaaccagaaaaagagtctcctgtgggccagtggccatggagtatgagggtggggggagggttggggaaatcctgaagacaagagagctggaaaagggaatcctctaattctcagtttgaacttctacaagtcctgggctcactcctgagcttgca

SEQ ID NO: 54602 - DNA, 1481 bp, Homo sapiens
ctgcctgcttgttcaacatctatacctgagttctttgcctcagtaataacaaggatgatatctacagcaatagtaacatagcttctactatttagtacttactatgtaaaaggcattgtgctactcctttgagtaattaacttaatattttccacaggtgaagaagctgaggtatacagcatgtattaaatagagtgtgataactactgtaacacacaaagccttattttattgctcatgtccatgtaccttagtggtcaagggtgtctactccacatagttattcacggattcaggctcctttcatatgggtctcagaatcctcccttaggtcctctgaatctggtggcactgacaagacaaaggagagaggaagtggagatcatacaaaagggtttagaacccaggcctagaagtagtgtattccttctgctcaaattttattggccaggaatcaattacatgcctttgttgaaatgcaagggggctgggaaatataatcttcttatacacctaggagaagaggaaacaattttggtgagtatctagccagtctctgccacacagaaattaaacaacttgtcatacaataaataagtgcagatctgggactcaaatacatattggttggactagaagcctaagctgttaggcacatgtctatcctctctttacctgtatatgtacattttttaatataaaaacttttatatatatatgaaaatacatttttaaagactgtgctgcagccacatggtgaaagcaagtttatagtctgctcttcgtcaggaagactcactacctgattaagggccaggctgaaaatgtcttctttgatgagacagaaaaatgcatgctgtgacacttcctgtgtgaagccatataaccttccttttcatgtcagcagctcagggatcctgttcctgcttaacctattccagccagagatcatgagatcatattagactaaggactttggaccttatcctgtggccagcctgctaatgaaactcttaactggatgcatttaaaatgcaagtgatagtctctctttgctgtatggggagggccttacaccagtgtaatgggtataactttgttctataagttcaggtgtgtaaaaaatgtactttacattttcctttaactcaaattaccatattttattaattccaatacatgcctttttgtatgctaacatctctgaaatgtggatctaataattgatggcatgtttgaattgctatttgctgggtggcagtgctgatttatttgccattgtctgtatgtgtgtgaacatggtcataggtatttagatattgttacctctttagttgaataatatgcactgttggtattacccaggcagagtttagttgctgtttgcaatattttcaaaaagattatcctgagtttcagcaatgaaatgaaaacttataatgaacagaaaggctcagaaacagtagtggagtgtaaatata

SEQ ID NO: 54603 - DNA, 2183 bp, Homo sapiens
tcctcatctatattatttatatatttgtgtatagggggaggttgaccagaagatttttaaggtcctttacaaatttaatattttatgacaaggagattcaagatttgtagagagcaccttcattttatatataaacccaagttaaagtctatattttatgctaactttgctagatgctctaaaagtacagacctcccctccccatcccccacctcctcacacagagtaagttattttgaatccttgtaaaatcttatggtggatttatgtggggttggtagtcagttttcaaacctaggtgcagggcgcatgggcatccgagggaatttcaggatcctgaaggacgtggtttgggacgtagtcacgtaatgaaagagctggttgttctgtgttcatgctagggaatgtggtttgagtggctgtgggaacttcaactttgtgactttctgtgtaactgaaatctcaacccccaagtgtgtcgcagtgacttctctgacacagcacatgtaactcagctctctcctgatgtctgtttttcttgctctcaggagaagaaatggcctaaacaatcttcattggccagcagttgaaaaaatatttgttttggttttgttgagcactttccctgttgaaacatgaacattttgaggggaggggagatccccattgtgtacgtttgattcatttatccttagcaaatcaattgtttcaagtagagcctttatgtccaagaaggctatagaaagctttactgcccttttcctttcaaacaggaagttgcatttggccaaaagtaaacaaatgtgaacccgggaaggtttgtttagtgtctaatgctgacttcaggacctgagaatggagtctgtgcttggcaaaaatgccttctctgggatctgtctgggccaaaatattctctgcttatgacctggcctttgtgctctggtaaacatcctcctcttaccagcccccagaaattcactgccaaaggccacaggcagttttgcttgcttatcagaaatattctaaaggtgatggcaacttggaaacatactttcagcaggacttagctttctggagagtggccactgtgaaaatggcctgtagcttggaaatctcagggggtgtgaatgtaatttgacattctttgtgcacaggcatgggctagcccctctgggtgaagaagctttcaggaaagtgactgttactactcagctaacaatgtagtgctgagcactttgcaggaccgagctcacgaaagtctcacacaagtcctaggaggaaggtgctattattatctccagtatacagatgagagaactaaggcttgagaaggccatgaaacttggcccaagctcacacaactagtcaagtgtcagagccctcagctctctctgccttctgatttagagattttaattagtgcaagttcaatatctaaactctaggaagttgctaagtatttggggtagaaccacatgattcaggtgatgatcagtgtatgacactttactatgacaggccaaagaattgagtaagtagcatttaaagtttttactgaatgggattaatgtcttgttccaggaaggattgaaggcagctgatataaactgggcaatatgtgagtaggtagagatggtgagctccagaggaatttgggatgattctcagaggagggactctggttgggccttgaaggatgagtgggaattaggtaagtaaagaacatttcagatttggggaatcagaatcaactctcttttaggaggcttgcatttgaagctactccatgaaaatgttctaagtacacacagtgacctttcttgggctatgctcctacacttgctgagctcttatattcttgagagatgttttatcagcctaagcatgcaaagaaacatgtgacctgtgaagtaatccttcaccaagagcacgtgccaaagctggtcaatattgggccagaaattctccccatcccaccccaccctgccctgtcattaaccaattctccccacatcctagtgtcactagtcttttcatggttctgaaaacatgttattgcttaagtgcatttctctaccatactttacagacattatcactagtcctcacaactgctctaataaggtaaatgacattaggcccattttacagtggaggaaactgagactgagaggtgttaagaa

SEQ ID NO: 54604 - DNA, 653 bp, Homo sapiens
taacaactttaagtcctgtggtggtatgggggacctgaacacctgggtgcattttcttttatttactctaacagggacacagacctctggcttctttcatagaaacccccctttttgaaatgtctctgttttgttcattcaggagaacagatcagcatctctcatgcaaggcctggctctgtgcccatctcacttttgcaatgaatttagcaacatctgctttgcccattaaagtgatttttctcttcctggccctgagcctgtatgcttgctgcaattgattactagcaatttccttcccaaaccagagagttcagtgaactctaaattgaattgttgctcactggtctcctttggaccaattgcatatggcttacgtgcaaaatggtcaagccactcagttcccgaatctataggctgatgattctggttaaacgtgggagaggacctgatgagtgacatttcccatttttgcacacagtggcctaggactgtggtcacttctgtgtttctcaatttcaggtggggggaggggatgaagccaccttgcttacagcaaggctgttgaagtacacaccctctttcctttcagtcatattgcagcaccaatggcctcagatgtagttgcctggaaaccttgtttcagagacatc

SEQ ID NO: 54605 - DNA, 645 bp, Homo sapiens
gagaagaaatgcattttcaaagatgtttgtgagattaaaatgcaaaaacacctatttttaaggattggcagattgcagatgtgttggccagaggaatgttgagtgaaaatctctggaatgttttagcaacctttaaaatttattaccaggaaatgtgtgctgcttgccttctctgcatcttttcaaaaggtctcttgtaaatccagtcaagcctagtccaggtagggaggtttggaaacagtgataagtaaaaggcattctctgctgctgtgcctcagctccagcctgaccaaacaccgttaatatgtaacccgaatctgaccacttcttttatgtttacatttggtttcagtgttatttttaactggtgaaagagcagttcaaagtcattttttttttcttggcacttaccataatctctcaaggctcagtagcagaatggcaataagtcacgtcaggggtctttaaacctggtggaattaaaaatcacttaccttattacacatgtgaatgtgctgaagatggatgggtcagggttttcaaggataagacattatatcagaaatcatgtttaattgtttttactgagaccttagattttgaggatggtctacacatttggcacaattcatccaaaatgggggt

SEQ ID NO: 54606 - DNA, 1485 bp, Homo sapiens
acgtgtctggcttacccacttggaccaagtgctgctactcagaatggcccaaacccacagaggccttagttagtatctgtgtctggcaataattccaagaatttctgaatttgcctgtcagtgagtcttcccagagttctgttagctaaacagaaagaggaatgctttagcaatagctcatatttatggagtgtttacgatgcattggacactgtgttaagtactttacatgcatcagcttgttcaaccctcacagtaaccacataaagtagagattattcatttcattttggatgtgaagaaatggaggctaagagttaagtcacttgcctaagttcacacggctggtagcaggtgcagtcacgggaacccaggcctttctcttcctactgttatcttttaacccttctatgcattcaagggtcagctacaaaaatatcagggacacccaaggctttctgatttttaaatgaaccctggaacttgtggtatccgtcatctgaaaagctttgtattgaaataaggcttattttagagacgacatggttctagccgaaaagatgttaagtcatattcagaaaaaaaaaagatttaaaataacagctgctttgtcataacccccttctatcctcaaagcccggctctgggcaaccgataagatactgtgtacaagggcacatgcatgacgttttctaggaaaactggtgggtgaaaggcttcctgagaaatttcacactggaaataaacactcttgtagggtatgtttcaaggaagatcttgaaatcttttcttctgggtacatgactcttgccctttgtttatagttgtcattagttcaggtggtctgaaatgcctgatgttgaaaatatttgccatttcgaatttccctttggccgtgagggggtgaagggacatctcctaggcttataaaggacagaatcacatgacttagagagatggaatttgtacccattggcagaggtacgggtctttatggatttaaagtgtgtctatttacagaagcaaccctgatagggatagtggtttcataatttttaaaatgtgcttttattttttttaataaaaatacagattttgagaagcaaatagctgacataaagtgagccaacattttagtcccccctcccccgccacccccccaaaaaaaagcagaaaagaatgaaggtcttggtgattctcaatattatatcttttctttggagtcagttatattttggtaacagttcttattaaaataatagcagacaccattcttaataaaacttttttaaagctggatgagtccctaagggaattgctaatggtaagaagtataaaaaatacttcactgaacctgtttttaaattctctaatgtttaaattctcctactctctcaacatgcagcttctcccagaagaatgcctcacctttaaaatttgtcttaataatatgaaatatcaagtcacttttactcttcattttta

SEQ ID NO: 54607 - DNA, 1369 bp, Homo sapiens
catgctaagtgaaaaaagccagacataaatggcaacatattatataatcccatttaaattaaatatctagaataggtaaatccatagagacaaaaagtagattagtggttgtcaggagctgggggaggagaggagttgggaacaatagctaatgggtacagagcttctttttggggtgatgaaaatattctggaattagataatggtgatggctgctcaaacttgtgaatatactaaaaactacaggtggattttatggtatgtgaaattatacatcaataaaaaatttcttctgtcttctcagtttttggttgtccttatttgggatgaaaataatgtccattatccaagaagaaggaagagcatgaacagttacagaggaggaaaagtaaagacagttgttagggaatggtagatttggatggaacataggtgtatgtatgggagaatcaggagaggaagctgaaaaggttaagttaggaccagaatagtaagtaagttggtcagtcactgggtgagtcacaaatatttgaggacttactcagtgtcagccactgttctggatatgtgaacaaaaagacctggtccccaccaacacagggttgagcagtctagctctggtgacattaaacaaatacttaagaaatcatgagggtgtgaagggtgggaagttgagagtgccataggaacatgttatgggggaggctacttggtgtgagggaatcctggaatgttttccaaaggagcagttagaggtgagaagggtctaacttgctagtggattttaaccaaataagtaggcaactgggagccctttaaaggggtcatggctggtgagatacataatcagagcagtgccataggaagatttagcccgtcatggttcttaaactcaccatacaagcctttttggggtggcagtcttgctgaaacaccatgtactgccagcaaagcaggggaaagacgaaccttcctccaaaagtgaaggtttgtgtgctgtgtttagaggacctctctggtatgcttgctcatctttccagaagttactggagaaacgacaccagtgacctttcatgagaagatgatggactagcacagcagccctctcttcctactcatcatggaaagcaactaaccaagggactttcttggtttatttatttactttttggtcaggcagatagaaaagtcatcatatagcttcaagtttcagggttacttcttcacctttaatttgccccaatgggaattgtcaaaaagaagtaaatcatgacatatatatcctttaagtgtgtgtgtgtgtacctgtgtcagggagagttggagaacagagcattgaaaacaatattgttaaatacacacactgtat

SEQ ID NO: 54608 - DNA, 1289 bp, Homo sapiens
ggtgctttggaaagtacacgggcctgtgggtgaggatgatgtgggtgctatactgggctctgccctgatgcagctttggaggcgctattgaattctctttgccttagctttttaacatgtcagatacaaggctggactgtgaattctctttcatgtctaccctcttaaggaataaatctgaggatgatgtgcagggtggacacttggaggcagagaaacaatttggttgtgggaattcaggcgctgaagacctggaccagggtgctagtaaagggaaaagcaaaggagggaaggatttgagaaatttggaagtgattataaggatacctttagatgttacttaacagagtagcacagtttgcttaaagggaagagagatgttttagagggtggtatttggggtgtgaggtaactgtgggatgtctctgaagcagctagaaatgtaggactagtggtcggctgggcagggcaggctatttaaaagtagatccttgaaatcagatgacatagttttgaatcctgactctaatggccctgggcacatgactagagtagggtgagcaactcttccagtgtgcattagggcattcccagctttagcactgaaagtcccatgtcttgggaaattccccggtcccagtcaaactgggacagcttgcctgggaccgtcctcgtttgaaaaccacaaggcctgcatgccaggaactacttttgtggtaggcaaactgggaaaactggtgaagatacttgatcaattttagcttcaggctcctcatctgaaaagtaaggataataatatgccttcctcagaggttgtatgaattaaatgagatgatatatgtgaagtactcagcataaagattagcacaaagaagcataagagaaacatttgtgaaaggatgagttagatgaatcctgcagatgaaccagttaggtgcagaggagatgggtaaagtaatccagtgtcaacacgggacaccagcagagtcagcggctttgtgtacagaacttgtagctgggattgacctgtatttgtgaaagaaggcttgccaagaaaattagtaatgtaaacaaggaaaatgttagcccattgaagagggcaacattttaataatacttatgctaattataagtgaataggtacattccatcaaggatttccaagattctttaaagacatacatccctgctttctggctcaattgacactgtggctatatgtgcttaaatgaaataaaccacattttgtttccatattcatacattcattggttgaggcactcattcaa

SEQ ID NO: 54609 - DNA, 2003 bp, Homo sapiens
ataccagctccacagttagacttcaagcggaacattgatcagtttaagtctcatcagtaaaacagtgataataatatctgactctctagatccttgtgaggattaaatcatataatgtgtgggaaaatgcctcgcacagtgccaggaacataagggatactcactaaattttaagttaacttgcatgctaggaaatcacaaatatgcctactttgcagatgataaattcaaatttacaagattattactgaggcattcaatgtcagcttaattaaagaaaatcccattttccctgaagctctgctggctttctgaactttttgtcctggaacaatactctgtgctaacccattttattttcattggtttagtcaaaggacaatgagtcagacactgcagtttgggagtcttgagttccattttgagcatgcatagtccagtgaccttggacaatcaatgggacatttttttgtgaaccctttttgcatttccccaaaggcaaagccttagtcctattcctcctttctgtctgctcagcacaaacttggcaacattcgttaccaaaaatcagggcatcgatattttaattcacaagaaaaatccaattcatgtaatatctttatccctctatgaactgcggggaaaaacggaagtaagcaagcccaaatgttcagcctaaagcatttgccgatattcctttaaagtaataatctccctgcaaggccagcagctctttaacggacacttcactttgctgttggaaagaaaaccttttctgtgttctctgcctccacctgaactactcagtaactgaaagtcattttgtttctcctatcacccttggcagctatgtacacattacccatccatttcactatctaaatcaggagttgaggaaaagtccctgtgggaagcctgaatagccagcagctgcgtttggcctggccagctgaacttcagcctgcatcttggcccaaccccaggactgataacgcctttgctaagctttagatttccccagcatttgcgtgcaaaatggaaaggctggtttcctctgtcctgatggcttctctcaatgctcttcgggcttgttaacttgttttaggcaagaagagagtgggggtgggggttcctgggcccaatccggggtctgcatgcttccagcctgccccaagttgtacagcaaatgctgacctatattccagtgacacacaccagatatgagtaggacataactgcccagggcgctgcccactccctcctcctccttgttcctcagccaggagggcagccagatccgtacaccatgttctgtcttgtcagccgatggtgtgacaggcaccggggggcttattaggaggcaacgcccccccataatatgaacctctgggccacaccacactgtattctctccaggaagagtagcagtaaccgaaagggtgcagacaagttgatctcttgagttagatcacaatgatttccttccagccattgtttttggactgctttgctgtgtttctttagagtgggcagatggcaggatcctggaggtgtaaaacagctacaaaaaacaagatgattcaaacagaaggaatatgtataaaccctgctgtatcatctcgatattaatcaagagacttggcttttccttccccctttgcaggatgtttaaggttttcatgcttttttttttttctttctttctttttaaaagaaggacacactgtgtaaatgggccacttttggggttttggctgaaaagttggtgtcatttttgcattcagtttattttgaggacaagcccaactgagagactttacagcaagaccacttactttgagtaaatggaagaaagtaaaaatggaacctccatagaaaaaaagctaatgctgggtagcaaggatggtgccatccaaagtacaggaaccgagcctaaaagagacaatttcaagttgagttgtggtttgccacagtgtcctcgtgatcagttgagtggtcagatg

SEQ ID NO: 54610 - DNA, 857 bp, Homo sapiens
ggtggcaaaggctcaagggttattaatctttgtaggagctttccacattaaacaaagttttgttattaaatcaaagggcattaaaaattcaccaccatagcataaaaacaatttctttgtgtcctctataaatccttacctttaaaagtgagtttagttatgatcataatatatatgcaatatgtgggactttttcataaagaagaacattttgcacatcttcacattttttaatgtcccattctcactctcatagtagtttgaaggcagcttttgcagcatctgtccatttcttgatttctccccagcatatccagctgccctccctctcttcctgcctcctggcaatgaagcgagcccccagggccatggtgtaactgtgaccctgcctctacctatgactaactcctgccacactgaataaacaggagtagcactagatgcaagatgagtcagagtctttctccccaaactatgaaattaaggccaggaaaaggacttgtgttggtttctttttgggtagctgaacctgcaacatgtcagcttaggagtggagaagtgggttttctccaacaatgctgtggacctaacaagagaagaagctgagagaggagaatgaagcagatgtgcagagaagggcagaggtgacagaacttccctgaggcccaggtatattcctgctcttgatttctgtgagacacacctgtattttttgcttaagccagctttgtttcatttttgtcacttgcaagcaagagtccaaactaattataagaataataatattaatgacatggaacatttgtgatgtatcagatatttacacaccgggtatttaataccttcaatcacctaac

SEQ ID NO: 54611 - DNA, 2695 bp, Homo sapiens
gtagtgtaagtatcccaagcattgcatgggatatacttacactcactaaattcttcactgtttattcaaaattccaatttaactggatgtcaggtatttctatttattaaacccggcagcctagacatggtagaatttagtaagcccagacatgacagactcctgaatagccaaggcacagaattcaaaagagtcaaatgtgtttccaacttgctaactgcaaaagcatcaaggaaaaggttgaccccaccctctctgtctctgccaagcaaagagcccagatgggaaaccccaggtgagtgatttagcctcctgtgcatactctatgggatcctggtgcagaggttgctgggaaaaccgtggcagcctgccctaggttttccttcgggtggggccctgtggttatggtgtggtgactctttgtcacggtgcccctgccacgccctgcttagtccacctggtggttgggggtaggggagaagagaagttacaggcagaaaaaaaggacttatcaatgtaacatatttcttaggtggtttgtgcattgctgtttgggcttgcaaaactttaattattactttgatgcagagtggctgcagattgtcactgccaggcctgatttaatagcctgcttgcacaaagtccgacagagattgcttttgttgcactttctaacagctcgtgatggtggcttttttacgttaaggaggaaactctgtggttaaactgtagcctaggtatttttagagccgttaccatgttaaccgaaatttcgtacatttcacctgcaggatatgcagtcgtgcttagggccttccttaaactctaacaaaaaatataatttaacagttgttaatactgtgcttaggaccaactccatgttatcagaaaagctactgaccaaatactggactgctaagaatcctttttttggatgggtggtactgtgccattagagagtatttttttttccttgatataaaacgagttgaaggaacataaccaaaaggctaaaattggttagttctaaaggtcagagcctgaaggcagtgacccatttgttaatcattaagcttttctaagccgtctctgacagaattctggctttctgccacttctctggtcattttaaactgcaaattcttgtactgtttcagtttttaagtaggtttcaaaggttatgagaaaggcataacttgttagctatttttccttatcaaacgtctttagggttttggaaggcagagctgttctgtgttaagagaatcctcacagcatacccagccatacagcatttaaagatggactcttgggtcctctgaaaagggtggatttctagctatcattcccatgttacttagtttccatagataagcaggatgtgagggctgaggacacccacttagccattaggtattagttcccaaatcactgctatctcagggtagttgtctccaataatcccagcactgaaagttcaaaaaacaggagcaaaataaccacaatgtatttatcatcttctgtcatcagttataaagtggaagtactttaaaatattttgaatgcatttttgtaaagcccagtgaggttccagtgctatgacgtttcattgccagaaaactcaatgccagtttatgctctagtccatctgaataaaaagtgatctgtacacccaaaacacataaacagaactaaattttatgtagccaagggacattaagctgctaaaacatttgcttcaatattgaacatggaatagctgtcctctatttctcaagggaaaaaatatacagtcaaaccttgcttatccataacccaaacttccggaagccttaagtatttggaactgctccaaacccagaagaggggaggagtgagaggaatagagtgggggtgggagaagtggggagcagagagagacagagaatgaactagcggaaagcaagcaagtcagcttttagaagtagacctgaagccctagcaacactgaaaagagacctggagcttacatctgattggctttccagccagaaggaatagagagctctgattggctggtgatgatgtctccaaataaccagcctttttcaggaaagcaaatttatgtggcagaaaggacaagagacagaagaagcacgcaagaagaaaagcgaggagaacagagcaaaaaaaaaaaaaaaaaaaaaaggaagattatttgttacagtggtggagactgagacaaaaatgagaataacaagcctatttacgtaactgcttacagtttacaaagtgcttttacatgtaatcattgatattgtctttacaaagacctgcagggctcccagaagttaaatggcatgccccaggtcacccagctagtaagaaaaatagtgcatgtcttctggctaaaaatctaacacttttgatatggagcaggtgttgtggagataatgatttagagttgtcctgtaggacagagggaagcaaatgctctgacagcagaaaagaaaatcagaaggcacgtcagcctgtagtttagcgggcaatgcagacaggagtgaagggctccctgttcttcacgaccacacaccttgaaaacatagatataggaaacatctctgtgggtatttggaaggggagatggttgtggtacaaatgaaacctatgtctagagggctcagagggcagtcctgaatatatttccctggggtgt

SEQ ID NO: 54612 - DNA, 787 bp, Homo sapiens
ttgcatttctgtagttttataaagtgtcccccacctccttccaaatgttaaatgcttgactataatgtgaaaggttcacttttattcatttacctttctcaaatttgtcttttgcaagaaatgtgctggtctaaatttgattctgttaacgacactctacttaggctttaaatggcttaactgtgtctaagagcacaaccgaagactaatctgactgagactgataagactgtccatgtggttttgacccttggagaggatagtgggaggatattatcctttctactttgtgctgttctcagaggacagtcacaaatgtgtaaacaaatgtgaaagagaaataaaggggacagccagattgccagagatccattactttacccctggggtatgtggctattatagaactggggcaaatgccaagagcactgaattcaaagggacactccctgaagtgattcatctatttagacaacatcagaggaatatcagatcagatcctactgtgtgaagaggttacaccatgggcatttggtagtcactttgggaattatattaatttacagcagcctgagtacacagtgccaatgtgtcattaaaggtgaaggcagaatctatttctattcaagatggaaagggcagttggttgtgcattttttcctttcagccacacttgcaaacatggatggtagccatggtgagtttgaaagataaaggcttactaagtaatattctggtgtcttaaaagagttaatgctttcattaatctcatctagtaagaactgac

SEQ ID NO: 54613 - DNA, 466 bp, Homo sapiens
tcccacctccagtattcccacaaccaaatacctggacaaatttgcaaatgccctgtaggaaggcggtgactctcctagttcacagcaagtgtattaaatggattataataatacctcttcaagttggaaggcttaaatgagaacattttcctggcacttttgagtaaacaaaaaggtagttaagaaaatgtgttgaggtcagtcagacctgggctctgttccagccctgtcaatagtgtctctgtgtagcaaattgcttaatctaaacctgagcatctcatctataaaattacaataggtgtaatacctgactcagaggattatttgaggattcaatgaagtaacatatgccaagctctaagcactgatcctggtgcagtcagctcttagtcaagttggctatagttgctgcctcattattaaggccagactcctgagactggggaaaagcaggtagcaaagaaat

SEQ ID NO: 54614 - DNA, 1089 bp, Homo sapiens
gcaaaagtgccagaagccaaattttccgtgattacagtcacagcagtgagtgtgctacgttattatgtaaaagcggaaagtgaagtaatttggcttcaattaaaatgtttgaaggaggaatttgggtcatagttgcgaatggcaaagctgccaacatttaaaatgaaatgtatgcatctgaatatttaaaagatcttaaaaaaattctttgtagtcagttcagactgcatggcctcttttaaactgcaatatgcttttcaggacagacaagtgattaaagagaggatcattatctgtaataagacacactgtacaaagtggtcttacctcgaaattcaagcattctgagtcctggtcccaattccattatggttctgaagtcatcttgagagcaaatgatttgttttttctatactttcaatttaaaaaagaaaaaagagaggcctgtgttctatatgtggagaggtcaattaaggtttccaatatttttggtccctggagatagtcactgccaaagtaaagttattaattaaatggcatcttggctttatcatcactgttctcataaagtaaatagtaagtgtcctctcactcccattgcttctgagaggactgcttttgtctgttcagaaaatgaaagagaaaatcaatcctccagtacactggctgattacctatgtatttcaatggcactttatcaccatggtacccaggtactcggaccctagcaataaattgggaacaagaacatcaaaaccacagctctgtgtgatgaggctggtatgaatactagggcaagagccctttgaagttgttccctttgtgtaaacaaagaaaatgccaaaatggatgtggaggctatggttcccaaggtgattcaaattaaaacttaatagcaaggacctcatcaatttgagtcccccattttctcacaagaacagatacctcctgcagagagggccacatcaatgcatcagtcctgtgacagagacgcacatgtcagctaattttaccaaatagccatgtctgttggatctgtaaggctcagttcatcatctgagatttgcagagtgtttcaaccatcagttt

SEQ ID NO: 54615 - DNA, 1654 bp, Homo sapiens
tgtcttactgcatgacaatgagccttagcaattaattcaatgcaccttaggttaccccaaacagattacttcaaaaatatcttaagaaacttttttaagttgaagtatttgatcagattgtgagattttagaaggagtcatgaacaatgtaacagtgtccagcaccattatagtgcatatatttagtaataggagtcagtgaatggataaaactaaaaatgatgaaagaaatgtcagaataaatgagtcaactaatgctctttcattcatacagtcaatcttcatgagaatgacaggattctgcaaactagatcttcagaaaatcttggtctatgatcactttgggagtctcataatctgcagaaagctgcaaagccaacagacagaccaagacaaaaaatctatttattagggacagcagtaggcccaagctttgcaaactcgggtcggggcccctcccacgccgctgtctcaggtctccctctgtagagcgcggggtactcctgccgggcccccaccctcgcccccaccctcgccccttcttgggccttttcccgggcggcggaagtccccgatcacgtgacgaggcgcgccactcggcgcatgggccgcgctacacggccgctcagggagctgagggtatagcgttttcgccttagactttcttgggtgcaggcccacaccacctcagcagcctgcccggcagtcctcttttcccaggttttggcgtttagacaacccacctgagtcctcagccttgtcccacacagcaaggtacaagggaccggacgtctgcctcctcagcagcgcagcgcacaagcttcctgtcatcccggcgcccacgatcagcacctgcgccatggcgagagggagcagcgatccgcgctgagtctctgcggcggggccgttcggcccgggctttctggaaaggcggccgaaccggcgctagcgctctttggttccgtgctccctgggccgacctgggccctgagctttcctccggccggcctgcagggggcggaaaggaggcggccggagctgagaggcccctccgtccttgaggagcaaacctggggctgcggagaaccggggctgtctgtcttctcgctttgggggccgggcgccctgcccctcgcccagaaaagcctggaaatggtgtgggctattgttgggagaacccgcctcgcaacagagctgacgttgaccacagcagagaagcagcttaacctatctactgcgataactctcatgcctgttgggatttttgctgttttactattctagatttgaaagtgggaagaagaatttaccagcgataccacgggcaacctttcctctaatgcttgaacggccactattagcataatagaaacatcttttggaatctgggagacatttttcttagacctgggactttgtgtaaccttcctgaacctcaatttctccatctgggaaatggaaacaataacgtatacctttcaaacttgtaaagattaaagacagttgattcatcagaaaattccaaattactcttcaataagttctatgtcagaacgcattccgtatgttctaaggaatataaagatgaacaacaagagaaggattggtgccattgccgttgtttttttccccctcctgacattgtactggaagt

SEQ ID NO: 54616 - DNA, 450 bp, Homo sapiens
gcagatgataccagatttatcaagagatcaagaaatcaaagtgttatctgtcaaggcaattcacttcttactgattttgccataaccatgcttatatattagtttattttctgacttcaggttcgggtacccccctgcaatatgtggttctaaagcctcagcatattcattgaggccttgagcttaacaaagtttctgttgaaaatctggcaaaggcaaaagagttgcaacaccttttggactcacaccattgatacctctgaccctgatgacaaatgccaatttgggttctgccagtatatagcagttgccagctttttttgccagcctagccatttgaatctcagttatgggcatctgcctatagtccttgtgatagtgcttagctttttcatagataagcttcctccttgccttttgaagcatattttccttcttaggcattttgat

SEQ ID NO: 54617 - DNA, 814 bp, Homo sapiens
aaagcttttgggaatgatatatgtcaacattagcgacagttaaaggtaggcaacatgctgatacgttctggaaatggagctgagactcccaaggcctcaatccaaaagccagaatgtgttaaggagaggcaatctctgaatacagagacacttaccatttacttcttttaaagggctgggatgtctcctgaatgctatgaggtgcttgaaagggcctcttcttacccgacttgctctctctcatctcttcatttccttctgccccttgcttgccttagcctccatcatgctgaagctgatcttaaacatttgggcaagttgtttcccttttcttggtctgagtttactcatctgatctgccaggggtttgtcagcctcaacaccacatagtcctgtgatgtaataactttaaaaatcagagcaggacaaaagcagagttgcacaaccttgcccttctgccccacaccagccagggaaaccgcaatgcctgccacttcagtgtctgggtggttctcccatcatatagttcccctcttcctccgtaaaggtttgtggtgctttgtgctgcttgctggctgatcctaaaccctaaatttggaagccgcacaagcctgactcccctctaagtgctccaggactaaaataattcccagccatttctctacttcctacttcaaattcgcaaaggctgaaaatacaagtagatattttctaattttttaaaaggatctagatataatgtcagaggagagaaggattatagaaaccaacttatccagggacatatttagaagcaaatcttttcaaacaaaaa

SEQ ID NO: 54618 - DNA, 895 bp, Homo sapiens
aaaaatcagtaagtcagaaagataaatccaaaaacacaaactcctcttttaaaaaaaggagaaaaaaatattagaaggggtgttttttaatattcagaatttttttgctcccttcagaaaagtcttagttaaggttaaattatttttctaaatcaacattgcatggattatgttaccattgattaactatttttgctagctttcttcttgctgtacttcaattatagcattggatgtatgttgaacatgtcaattacagaatacaaaccaaaggctttttttgtttttatttcttttcaacatctcactggcctggcaagagtcaatgagtcacaccatcgatctccacatttgccctttgctctacaagtgttgtactcaccatgaggaaatacccaataagcagaacaggcattaagaggataattagtagataatcaatgaaggtaaattttttcttcacagcataatgcaagcaggttctctctttctaaaaattaagaaaaggattctttactaataaagcatttcaattcaaaatttattcagatggccatctcaaaaagtttagtttgtgctttttgtttttccggtacccatggcatcttttcctgtgggatacatctgattactgaatgcggctttccatggagcagaacagagaactcggtccagtgtaaaggaaaagctagggaagggctcctgggagtcaacaaaggtgaaatgtacacagcagagctcatcagaagacagattcttatacccacttagtttttggaaaaaaagatacactgagatataaacttaggactgaatttactatgaaaattgatagttatcccttaatcatctaccatgtgtacgattatccattttgtggtttgttcataggaaa

SEQ ID NO: 54619 - DNA, 2696 bp, Homo sapiens
gtataaaccactgctgttctgcaagctctcccatctctggtcaggtcaatttcctcacttctatgtttgggctactggcttgccatccttatcttttaaattgtgctatctattcttcaaggcccatctcatggttcatctccaagaaatctctttcatctttcctacctgcagcaggaaatatacagaacctcaagcagctcattggccttaaatgagctagtgggttaaatgtagtctccttaactagactgtaaccctcctgaagttaggcttccataaggtcaagcacccagaacatggataaaagtcatttgttggttgacacatggattcatccgatctggctgggaagtgaggctaggaaaggggttgatgtttagaaggtaatcgatcatgtaaggaccaggacaatatttcgcctcagtggttctcaaccttggctaaatattgcaatcatgtttgcaccaacttaatgtttaaaacacgacccaggccccactattgaccagttaaataagaatctgtaagaataggattggggcattagtgctctttaaatttccctggtgattctgatgcacagtgagggttgagaatctctgcaaaggtaaaagaaacaagccccccataatggaagtaaaaatttaatgtaacattgcagcttttaaactcacattagctaaggagcattcaaaactctggaataatggaacattaggaaaaattttttgtgtccttttgccttcccacatgtttgtctttaaaaggagtcaagaatttggaggtaaggtttcactctgttcacttccatcttacttgcccaggcactaaaatttaagaagcgtccatgggtagaatatgacgcatccggtatgttgatgattaactaaaataatcagcatgttgatgattaactgtatgtattacttaataatattttgcactgctctaagtacaatagatatcacagctgaaaaaatatttgttgttattttaatagtgtagaaacatctgaacaacttgtaccactatggatgtctttaaaagcaaagcttcccccaaattacccccactttttagtgttgttttccctaaagtataatggagcttctgtaattcccaatctaaggaaagactgtgtagaactttgcctgtggctcagaggaattggttcactgtttattagccatctccatgctacaagctcccctcacttaaaatgttccatgaaaacttctgagaaggatttgtaggttttggagcaaaatgattccggtaaagagccttgtgattcacgaaatgtcttctcagaaaaggaaggaagatgtttttctttctcttcaagttaagaaaccttggagaatgataataaaaacctattgggtttaatttgatttctacaattaatcccaagcctttgtttctgataactcactcttcacatactgtattttataaattccttaggaaatgtcttctttcagacaaataaaaaagtcgcaataattttttaaaggctgttctaggcccactccgtctctgtgtaacatggaggaaggtcccaccactggctggaacgtgtagagaagtcatagttcctcatgaacgatagcagaaggggaaatagaagcagggcacatattgatctatgttttctactctttatcctgaaaggtctgtttgagaacatgaagttatgttccttgccaggaagctaaaaaaaccccattgccacacttctgactccaggacatcagaaactctgaggtcatgaggaccaggggaaagcagaagatccttcacctccagcgaggagtaagggtggaggaagagtgggttctggctgctagaaaatggcaaatcagaagccctgatattcccctactacctcagaccaccacagaggtattcacagagaagagagaaggcagtagggtgcccataactaggtaacatccagttctacaaaaggagggagtaagagaaaaaaaaagaaagaaagaaaacctttgtggtcttcttccatttcattggtgtaaccactcccacctggctagtttcaacctacaaaagagagagcaacgaactcagagttgagcaaaattggctttcacaaaccagttcaagctgactcaagccagctccagcctgctccaatacaccagcaacaggaactggcatatatttccgttaaagtaagttataatggagaccaggcttgaagaatctctgggccagacaaatccatttagacctcataagtgaccttaaccttgctcaatttgcaaacataagcaaaacttaacttcagctatttcttataaatccctatattaaagaaaaatgaaaccaagttaactaatcagaagcctaacttacatagagactttccagcagaatcgaccaaataaagcaactctataactgcaaccaatcaaatattttctgtgctttactccctttttcaccctataaaagccttctccttgcattccctccaaaaagcctgcaaaccacagctgtccaattcctgaatcggtatttgctcaaataaattcttttgagcttaaccgtgcctcattttaccttttgacatcccaagacttttctacactgtcttattcttaacgtagaagacagtttggctggggaagggcccaggatttgaactctcagcagccaatgtctctaaa

SEQ ID NO: 54620 - DNA, 392 bp, Homo sapiens
ttttccccattgtctctgcctagcctttctcatatcacagaatgacacgatgttaaatgtgaaaccagatctcattcagctctcttgttttgtaatattaaaactgtgactcagagaggttaaatgacttcctctcaaatcccttgaagttcctggcacaatcaggtctaaaatataggattgcttgactttcagtccaatggccattcaattagtcacatctctattcctgtattccctgacttctcctcctcaactgtaccagcttttccaataaaacttgcttgatctaaattgctctccctaggcattgtatatttcaagacaatctttctgttttttgaactatatttcctttttctgtagtaacatcagcttctctgaaaaacata

SEQ ID NO: 54621 - DNA, 2098 bp, Homo sapiens
ttatatacagggttgtggcagatggactaagattttgtgtaccgactgcctgacacagtgccagaactgtagtaagaacaccacacgtgatagtaacataacatccaggagatattctaatacttcttattttccaagtacacacaaattgggggtagggggaagggctaagatgcttaatagtgggcgtagccagttgtggataaatatcaaaaagggaatcctaacatgaagtataagtgggattttcaccaaaaccctatccttccccagactccagtgacagtttaacggtcagctgcatcaaggcttgtgtactgtgcagtcttaaaaggcaccactcctgtccatctcggtgaaattgatggtggagcaaaagggagtttaggtggttccggtctggggagaagacgtgcagggtttcagatgcgaaagtcgcacccaaccgcttcactcgggctctaggccatccgcaggggccctgcttccttccacctgcgagctttttctgcagaatgcgggaagccgccgccgccgccacagaggagggggcggaggcagaggcggaggcggcacccaggggccggggcaggggaggccgggaccatcgcagtgacaatttattttcctgcagcagcggcagcagggacggttgctgcaggttcggggtcggccggcctgcgcgtgggcttgcgaggacgctgttcgtcccctgcgctggggtgtccgacagcgaggaggagaacgacgcacggagcccgcgcgactggaaccagcaaagctccatctgtcggcagaggagaagggggaggaggcacggccgaggcaaacgagcggacgcctcgtcgccgggtgccggtatcaccccgctgcaacgccttccagcaaaagccaccgcggcccgggttgcagcagccggacggatgccaaggccacacggcagccacgggggcagccgtcgcagtcgccgtcccacacgggctgcggacaccaagggttgctagtgagtagcggcgcgcgcgcgtgagtgagagcgcgcaccggacggggaagtgcgcacggcgggtgcgtctgcctcgtggcctggcgcgcgccggcccttccgctggcagcgtccggtcccgggctggctctaggggaggaaaaaatgcactttggcggctgatcgcttccttcctgccagtcatgcaatcggccgcctccatcggcgccgcctgtatgcgcccctccgctgggccctctgggttagtttcaccttgatagggaggcaggaagacctggctgctggtggcagggcgggactctggccgtgacctatacgtgggtgcgcctgtttttttggttcagccctgggttgcagccttggagatgatgtcgaccttgggagagaccactgcactgtctctagcggcgcggtgtggaggagggaggggcgagggttagaaaaacggacctttaccccggccgagcaggtgccatgcctttccagatgatgttacttttatgccctttatgagcgactaagacattgcccctcacctgaataacttaaagctttcgctgaaagcccccagtgagatgcacaaagaaatggaatgtctccaaaacatatttttttcagaactttctctaaaacaacccacgctgctgatacccccagagcctaaggtgccataattgctgaagtttaaaagaaaatttatgtaaggaataagtaattcaggaaacggaacccaatctagaggtttgaaaaaaaaaatcaagtgcctgggaagtggggtggggtggcttgcttcctggaaatcagtgttcggtagtaagtaaaaaagacagctttcaaagtaagccccagtgagcacactgctttccaaacatcttgctcattactgacaataacatgaagtcctggattttaagctatttccgaagacataatagatatcactaggatgcttgtttatggtctcatgatttaaggccctgtcaaggtcaataacgtagatttgttccagcagataaattatacctgaatgtttgattgttcgtgtcaatttttttgagggtaggttttgacggttgttttacacagaaattaagc

SEQ ID NO: 54622 - DNA, 1343 bp, Homo sapiens
gtgtgtgtgtaattattttcttttcacccatcaggttaccagtactggggttatgagtgtaaagtaatataatcactttgcaagttgtgaggtactgtagattatcccattgatacactttaatccatgttattttttaaaatctccaatgtattctcaaattattcctctttacagaaccgaagtgcagctccccacttcaggtaatgtgattctaccctttgcctgagaaacatatccatcctaattgccatgtgctcagctggaccactagagggagccatcctgtaacgggtgaggtcaacctaacaaatggtatcagtcgagtattgatcggaggccaacgcaagaagttaccagtagcctatttcagatttattaaaaaacacataggtaacgagtcagagctttggctaggaatgatttggaaaagaactgaaggcataattccacaggacattcacagttgtgtgctagagacagagaggagcaggaaagtgttttagaagcatttgcggtggacaatggaaggcccggcttcatcgtattcctgtttgctgatccacatctgctggaaggtggacagagaggccaggatggagccaccgatccagacagagtatttgcgctccggaggggcaatgatctgtcagtcaagatgaaaaagaatggtcattaatgtcatcattagtgcagtcgttagtgcggtaggacagagcctggatgttctaccatggcctagtttcttgttcagcagggacacaggcttgtctgttagatgccaattgtgtcctaattgtgtcatgttcttggcaggaccgccagagggagccatggatttagaaattcttcagtaagcacattcgtttttctcacctgtaactcttcgaccacattattgagcaaactgaaagttggctccaaatccagccatggcccccacttaagaaccctggcaatgcctctgatttccatgaactctgcctcagaattcaacacgatacactttctgtagaaacaaaccctagcctattcaaaggagaagttttaattgtgctaggacttagtatacaaatgtgtttccacgtggtgaagtgaactaccacttttcacccagatgctctgtttaacattggggaactcagggtcccctgctggggacattcccttgcaataggtgcctcttaagctgcactggttggcctttcccagtgcacaggcctaacctgcaaggcatgctcatgtttcttaaataaatgaatggtttaggcacagagaacagtgaaaactggctaaccagtttaatctttatcttctgagcatttacttcttaatacaaagta

SEQ ID NO: 54623 - DNA, 2865 bp, Homo sapiens
attttcccatggttctgtcatatttttttaattttctatattgaatgtgtatttctttggtaataaaacaaaattttaaataacccattttatacttggatcttatacttggatcctttcataaaattagaaaggctggagcagcctatcaacttacaaatttgagaaattgaaggcatattagaggacattttcatccaatgctctcattttcacaaataagaaaatcaggaagtgattgctcaagggcacacagggcattagaggcagagctccagccagacatcaggtactctttagccaccccttggcttccagttcaagacctcttccacttttctaatcacaattaggtcgaaatgttccgttaagagaaggacacccagagttatctgcctggcattgagatctcaattaggatttcaaattgagaaaatttcttcttctaaatgggttaactgattgcacctccaaatccatataaaaaaggcagttcttttaaggaaacatctgagaagtagggaaataaaatagctattacagagttggagttctgccaaaacattcccacaaaatcaaacctgcatcttgccaaaggcctaaaacttccttagcagtgcttcatgtaaaataactctttgcaaagaacataaaactgcaattgagatgacatattttaaagtcaaggcatgtaatattatcttcaactgacaaggaaaccaaggcttaaggagttgaagtgacttgtccaagagccttgaactgatacatttaggacaacgaagatttcagatcacagtgattatgagcttagactctgaagtcagactgcctggatttgagtccaggctccaacagttaaaagctgtgtgatttcagttatttaacatctctaaaccacaatttccttactataaaacagtaatgatatcaggacatacctcatggagttcttatagagattgggttttttaaagtgtttaaaataatttatagtggcagagatactctaagttctcaataaatactaatttcatcatcattattattactatcactgtgtgattattttcattatccagaactctttgtttctaacctttgctttctttccacactgctccaggcttagaataaaaataatcaacgtgtggattccacttgcaagaatggacatgggactcatgaatggcttgccctttcctttcccacccttcttttccctttccagatgctgaattattttggcattcctgtgatttggcttccctcagagcagattaagaagctttagaaaagaggcgagaactataaaggagaaaaaagggaagaagcctaagagcctggggtatctgtcagaagcagccagccccaggggataagcaggcactctatggatgtgctaagtgcattttccaaaccaaaagtaagggctgaaaagaggataaaacatttcaaattaggatggtctctgaaaatgggaaggtatggttaccatgaatgctgggatatttttaataactgttttgttgggcagtgatggcttgggaggaggggttgactatactcagaaaaaggagactggccctcagcatcagcaagaatgcagaaaaatgttttttacttggccaaaaaaaaaagaaaaagaaaaagaaaatctaggaagaatgttataatgtccaaaaggagcactgtcattgaagaagtcactgtgtccccggaaagagtcagctcagtggtttacagctcctctctaacctgaatgagcagttcggtttggagcaaagcatttcctaattaggtaaaacacgctcgagtgtctgcttttggaactgcacccgggtcaggggatttgctccaactgactagagtgcgtcttgtgccaaaaatgagttgatgggaggggaaagaacagtacagttcccagctcattggtcttgaaacacaaaccatatttagtcatgaaacacaaaatgctaggaaaatctcagcatgaaaactccagtctgggctgaagctgccaaaccttgatttgcagtgaaactcagcctgggttggcagggctggctgcacagtcacacttgcctcaccaggctgaagggagctttaagctgagggagatgcaaaccagatatccggccgggaggcacacacagctgtcagatgcaggctctgctccctccctctttctttccagagaaaaattcagcaggtcacctgctgcgctctgctgcaaatgaccaatgatgtagatccaaacttgtaaggtcacacatacacatttccaacaaaaaagagatatacatttccaacaaaagacactaccagttagagccagggaaacccagaagggaatacacaaattcaggcacaatcaaagactaggcaactattcttctgttcacttccaaaatccacttccagacacctaagctgcaccaaaaatacagcccagtgaaagaaaacccctacaacaaatcagaaccagaaagaaatctgagtttccagtgcctaaatacaaataaatgtataacttactgcacacagctaacctgcatacctgtattgtgctgcaagatctgggctgtttgtttaggatgaacattttacagaagacatgcattaataaaattttcatattcttctctaccccttccatcataccaaactacatattagccctgtctttaacgttagatcattaaagccaaaagctacaatcattttagtagtacaatcttcattcagaaatatcagtgcatgaacccagccaaatccctgcagatgatgtcttattataccgggtaattaaaagagccactggaatctataagtcacatccttggcctggcgccacttaccctg

SEQ ID NO: 54624 - DNA, 1749 bp, Homo sapiens
tcaggctctcaaggactcaatttggtgaaccaatgccaaatagaaaaatgttcttgacattttccccaaaatagatgtctaaagattttgcacttcaaattggtactttatgtattaaaagtgatattgaaactaaattcctacccaattagttgaaaaatatgaaaaaagcaattgctagagaatgcaatttattaaatgttggtggtcttttaaaaaatgaattcctcttgtagccagtgagatcagttatttatttatttattttaatagtaacaaggtctcactatattgtccaggctgatcttgaactcctggcctcaagctgtcctcccatctcagcttcccaaagtgctgagattataggcatgagccaccatgcctggctagttaatggttattaagtaatacaaacatttctgtgaattccaccagatcattgactttggcatagttcacttaagactttgtttgataaaataaatctctttcactctaattaggaagcatttttgggatcctgattaatgctctaatattgtggggccaaaaaatatgtggaacgtggccctgcagttagatgagctgagatcactatagtactatatagcgctctaaatcctaaatgctagatcactgtaatactgtacagatcagccacttgctggcttgtgactctgggccatttacttcacctctcaaaaggcatatttaaagtgaggaaaataataagtttattttggaaattcagttagatgatgcaaattgtttactgtaatttctagcatgtagttcgtgctccatgcatttaactgttattacaggttgtattagtatcacattaaattacccactgaagtgaaagtgaaaccagaatgctgtcaacgattaaaaaaaaaaaaaactctcaagcaagagcaaacaatgatactgcctctacattttccaaatctttgaatgcttggctattttaaggtttgtgaggaaaagattgctaaatttatacaaaaggaaggagataaatcagaggcggaagaaaccgtgtacagagcagcgtgtgcatttgaatgaggtattagctccatgcagaaaaattagttgagaaggacaatagtactgtcatactttttaaaaactgaaagtacctgaaagtgtttgtttttttcttattacagactagacataataacaattttcctgtcattcctgctttcccagttctccaatacgtaaagaatcaggtggaacagtagagatggtacaggaaggggcatggagagcaaagggaactatcagcaaataaatgtgtgggctctgggcttaggaaaatggggccctgactacttttccactggatcgtaagttccatgagagtaggatttttttttttcaatgttggtcaatgctgcgcctccaggtcataaaacagtgcctggcacatattggcctcttaataaatattcgagaattaaagaaaggccacaaaccaggagatacttgacagagcaggaggtgacttggtgacttgagcttttgaggctcacctccattgaatctgtcctctatgcttagattcggggagtttttagtgcactatcagtatacagtactactcccattgtgttataccataatactatgcagtgagattaatagaagccaaatttctttcctcttcatttggctgacaaattaattgtcaccaaaatctgatgtctctttcaagtttgaggcaaggtcaaatgaccc

SEQ ID NO: 54625 - DNA, 882 bp, Homo sapiens
actgcatagcatcttttctatgaattacctcctttcatcctcctaataagcatataaagtttattctgttaatatttgttttataaatcagaaaactgaaagctcagaaaacctttttatgtttaaaaacactgtccactgcctgaaacactgaaaacaaaatggataaaaattaagtacaattaaaattatagattctttagcttctactaagctggttttaatgggttatgatgttgtgtatgagcgtagggatctggggaggagagataaggaagggaagaaagtgagtactgagacaaaaaagcagaaaaaaaaaaatgaggtcagcgagtttcccggctctgccgcagggtgccttgccagccttggctcctaggaagggaagacttgtggctcaccacagaccagattcctgctgacttcaaagagagacgttcacaaggagaagatgccagcattcaggacagatgagagtctggccaaataattgtcaggaacccttaaaatgtaggctactcatcttgggatgattttaaacagtaataagtgtaggcagcaataaccctaatgaagtatggggaaagagaatgtgagagtctcacactagggctgttctctctcactctccctctcttttaattgttaatgatgactttttttttttaacaagtctacataacctgagagatggggcgagaacagcataaatgccatggttttgatcctcctatcaaaaatcaggacaaaatctaaactcaattcgatcagaaaaggttacatgtgcttgactgtataatttgctagccatttgtttagtcctgactctctaatcaaatgccaggaggatccagagagcaacagcaaaggtcatttctagtg

SEQ ID NO: 54626 - DNA, 3107 bp, Homo sapiens
taattcacactcaagagatactgattttgtcaattgtcctttcccctttttttctctcttccctccttccattccttcttcccttacctctcctttccttccctcacaccccttttccttccttctttttacatttttttatttaaatgaacttttcattttggaatagttttaggatttcaaaaaatttgcagagataatacagagaatgcccatataccatcctccttatcccacttctttttgtgtctattagatgctcagagtgtgtgcacaaggctggcacgcccagggtcttcctcatggcactaacagtctactgaaaggtggaacagagacaagcctatcaacacctacaagactggtggtaagtgcagtgacagatgcaaaacacagggtgatggaaagccctcaggagggtaacctaacctagatttgagggcccaaacaggctccagaagaaaatgtcaactgagaggaagcctgaaggatgaacagtgggctaagcaaagggttattaatgtgttattaatgggttgaatctaattgggaagggagagaggttgcagagtgaggtgcagagcttggtggacgatgccaaaggaatactgaaacctttagtgtgtccagtctggaactgcatccaaattcaggttcagtaatgatgtcattatccaaacataccttctgtaaaattcatgctaaactacctaagagctatctaccgttccaaagcaatagtgactttgaacagtgttcaccagagcacgaaagaattacaagatttttttttaaagaaaattggccaggaaataatgagtaacgaaggacaggaagtaattgtgaatgtttaatatagctggggctatgcgatttggcttaagttgttagctttgttttcctcttgagaaataaaaactaaggggccctcccttttcagagccctatggcgcaacatctgtactttttcatatggttaactgtccattccagaaacgtctgtgagcctctcatgttgcagccacaacatggacagcccagtcaaatgccccgcaagtctttctctgagtgactccagcaattagccaaggctcctgtacccaggcaggacctctgcgctctgagctccattctccttcaagacctccccaacttcccaggttgaactacagcagaagcctttagaaagggcaggaggccggctctcgaggtcctcacctgaagtgagcatgccagccactgcaggaacgccccgggacaggaatgcccatttgtgcaacgaaccctgactccttcctcaccctgacttctccccctccctacccgcgcgcaggccaagttgctgaatcaatggagccctccccaacccgggcgttccccagcgaggcttccttcccatcctcctgaccaccggggcttttcgtgagctcgtctctgatctcgcgcaagagtgacacacaggtgttcaaagacgcttctggggagtgagggaagcggtttacgagtgacttggctggagcctcaggggcgggcactggcacggaacacaccctgaggccagccctggctgcccaggcggagctgcctcttctcccgcgggttggtggacccgctcagtacggagttggggaagctctttcacttcggaggattgctcaacaaccatgctgggcatctggaccctcctacctctggtgagccctctcctgcccgggtggaggcttaccccgtcttagtcccggggataggcaaagtggggcgggcgcgggacgcgtgcgggattgcggcggcagcggcgcacgcgggcacctgggagcggcgggctgctgcgggaggcgttggagactggctcccgggggctgttaggaccttccctcaggcccgggtgctcagaacgctggaggacttgcttttcttgggccttgatgcgaagtgctgaccccgctgggcaggcggggcagctccggcgctcctcggagaccactgcgctccacgttgaggtgggcgtggggtgcggacaggaattgaagcggaagtctgggaagctttagggtcgctggagggggaccccggttggagagaggagcggaactcctggacaagccctgacaagccaagccaaaggtccgctccggcgcgggtgggtgagtgcgcgccgccccgcgggggcggggagagagcctgcagccttcagaacagatattgctcattttctggcagttctcagacgtaggaaataagtcagcaccgaagcagtggttaagccggagggctcggaagaacggcaccttttctttctcgaaaaagttatatgggggctgaatgagcttctggaggcttgtttaccgttttttattgtcacacagaaaaagaaactgccttgtctcccttccgggaattctctctttaagactgtaagtcgctgcctgagtggtttcattttgttttgtttttctgcccttctctttcttcttttgccctttcttagcttgcactcccatggtgatttctgcttggtctcctgctggggttggtggtactcgttcccaccgcacagaacccggcgcctattattggccaagaaacttgagcagcctgttttgaaaagtccctcgctcagaaatgccagcttgcagatggctaatcaaagagacgtggatccaggaggctcatttgagtaccggagcctctgagagtccatggatttttattttattgggccccaacaaagtgccaggcatagcgagagaagtgtttacaaatgtgatctccgcggattctcacgagagccatgtagtggggaagataaccacatccccattttacagatggcgaaatgaggttcagagagcttcagtaattcagccaagatcacacagctagtaaatgggagatatgggattgaactcagatctaattccaaaactcaggctgttcgctgattgcatctgatatccagattacaccaagaggctgagatgtctgggtccattttatgattagaaaaaaaaatcctgttcctttcagaaatagtgtgcactatttgggattctttagaaacttccttggagaaaattaatgattcaagattgagaaaacatttatac

SEQ ID NO: 54627 - DNA, 454 bp, Homo sapiens
tttcagtgtcactagcagtcaactctccaaagacaaataggttgtaatctagtttcagaaaggaaaaagtgactagttgtctgaaagaactgacatcacctgcaagctaagtaccttttcctgtatctgtgggctttctgctcaccctggctgtcttgctgtgctcacttgtaccagatggacggcgaaacaagacttgccaggaaactgaaacttgcaaccaaacgagagagaccaattgccagacagcgtgtctcaacactgctccgtcagcacacaacttatgtaatcgcctgtttatgcaacagagtacatgaattttaattgatagcactgttaggtttgattcagtgtcatctagtagagagttcttcactggaaattctacttgtggttctaccactaaatttgtggtattagggggtgggaggaaaagtcagaaccagctctgttt

SEQ ID NO: 54628 - DNA, 1200 bp, Homo sapiens
aaggaaagaaaaatctagaaatcaaccagaattctaaaataaacaatcaaagcaaaatacaagctgatggtctccttctaaagacttaactcacaagccacgctgtgaattttcagctatgactctaatagctcaatggacaacccctggggaatctttgctgaggccacagttgaaaagcctgtttctgcatgctgaaggcagtcattccaggctttcacagtctagagtgccacttcacccactcggcaatcagatgcataactttcagatacaaatgtgccactcttggtgtgtgtatatatatataaaatatatattgtgcctatcatggcatcaacttggttaatatttattatgtaaggccacattctccagttcaaagatcactgaatctgtagtcagacaggtcaggacatgaccctctgccctgagacaaattcatttccctatttgaacctggctgtcttatccaacaaaatgaggatgttagtctagaacacaggttgccaaaaccaagaattctaccttggaatccaccagtgaagtgtgtttaaaaaaaaacaaaaatccctagcccaggcaggaatctgagatccctccagtgctaactccccatgactttctgaaataaggctgagcagatgaaaacagagccacttccctatgaagtgtaatttctgaatttcaattcccttcaggagcaaagcattgctcaacacttcctaagaaggttgcttaatggtgggaaacagcatgcacatactgcacgagtagccaagggctactactgtgcagaatggaggtgaaaggtacaaataccagctggacagaatatttaaggaacagtgtgtatcttcatttctgagacccctaaagattgctgaatggcaatttcacatcattatagctaagctttaagaaacttaatcctgcaaaaccacataggatgaatgagaacaggaagcctggcagagaaaagagcagttaggtaaagcctttaagcaaacatgagcagagaagccatgtggccaagccctgtgttcataaaaaaaacctgatctccaagtgaggctacacagtcagtcaaagaggcccatggcaacaggactgaaagatgctcaccattcagctgtagactcaggttccacaaggaatgtggtaccaaaaaatgaataatgttttaatacattttgtaat

SEQ ID NO: 54629 - DNA, 1585 bp, Homo sapiens
ggggggaaaaaaaaccttccaggctgaattaagtgtgcttttctgggctgtattaacacctttatctcagttatttagactttgtaacaatctgactcagctttgtacccccaggaccaagcaaagtgccacgtatatattagatgcatagtacagattctgaaaaaagataagagcagtccaacagttcagtggcagaagaaaaggccccaacgcagcatgctatttaactttctaataacaacaattattacgactcccatttaagctcttgcgaggcgccagccaccgcaggcagcgcttctgatctactgtcaattactcctccaccgaccctatggcagtaccattaattccatttttcaggaatctgaggttcacccagctgaagtactggaagcaaagtgtcagctgtttaaaaagcagtatcgctgggactttaaccaggattgatgcccaagtctgctttcgaccacgccgttggctaacaagagaggtaggatgggatgcctggaggagctaaggggagagcacgaggatgcagagagaggaatcagacatccctgctgtcctcgcggtccaggagcactgggcagcttcactgaccggagaccgcgcctgtccaggaaagtggacagcgcccagggaagagagtgggcttctctctgaagttgctctctgaagttgccctggttgattggcagatgccttgagccaacgcccgcagaaaaagcacccgcaggcaccccaggcaagactcgctgggtccaaacgcagagggtcttgccggccggcagagcctcggggcgcgaccctccccttgctgaaggcaccagcttccacgccgcacccgcacctggcagcgccgcggcgccggcactctcacctggagctgtcctgccgggccgctgtctcgagtcgcagtgccagctctcaggggccggggtgcggataggggacctgcagggggcctggtctgccttgtcgggagggcggatgcccaccaccctcggactatttgttcagccaatcagagcagccagccaccgggaagtgcctcggagactccgccccagaccagcgctgccgcttgccagccccccagttgaccccatagagcatgcgccgtaggcgtttctaagagatggagcccgtcctccgcctcgcaggctggcaggtccacagctctaccagcgcgtcgcctacgcatgctctcttagcaaaggctgttttaggcggccttctgctccgcccccgaagctcctgcagggctggcaccttctgcgcctgacagagagcatgtgggctctataaatgaaagtgaatcatgggctccatttaaagcgcttatcattgtgcctgatgcaaagcaatcttgctgctttaaattttttattattattaaagatttgttaaaagaggaaacaatattcaatatgtacatattatttattaatcattttctaaaacaaagattttattgagcacctactaaatgccaggcattagtaagacagtggaggtatagaaaccaaccaaacaaggttcctgttctcttgtatatattctgatgggaagagacaca

SEQ ID NO: 54630 - DNA, 1394 bp, Homo sapiens
gacaaataaaactttgatgacataatcattaattttctctgaagtcaaccatataatactttaagatgacatgaaagtttgtacatgagagactggagtttctgaagcttatatgttcctcttttggggaaatttaaagcgatgcgttggcaatacagcaatgcaattgtagcttcaaaaatattaatttccttaccaaaggttaatgtcctataactgactctccatactttgctgtattaaaaatttgggggaggatgaggtttttttaaactttattctttactaaaatgtgagactaatttttagtaatgaatctgcaggtacagatttgtaggtagcaacctgatgagtttacagagccactaaggtcttcagttgtgggtatgtgggcctagactttggagacacacagctttgtattctggtcagacataagttgtgtgacctttactccaatttcttcctctttgaaggattgctcaattatgtctgtgcaaagtgcagatggaccttggtgaatagctgtggattattaaaacttaaccaggtggtcactccaaattagctactattctaaatgtcttttccttggagaaagttgacacattccctagcatgtggtgtgccacaatatatttgacaaatgttatattgtctatttgtgttggtaaagatcagctgaagcagtttgcttccaccagtcagggccagaaatccaccttcattgtcccattttagggatatgtaattctccagaactgcaaagatttttacctgccaaaacttatcacttctccatttcacaatacatcatgtggtccaatgtgatactgacagtatttgctgatttagaccaagtaagcaggaaatagcaagcattctagacaccttggcaagacacaagtgggtgggaaataaaccccttataaattcagaggactgccaccttattgcaatttccagaagtccattttctggagcatgttgatatatcctttccaatatgaaggatacatttctgtatctgttttcttctaccactgaaaaagaggcactgatcctagtggacctctttggaggtcaacatatacctcatttgggcctgctcctctagcccacttcctgaataaccataaaggctgccagctttgagtagggcccagaacaagagaatgcaacagctctaagctaaaggcaagctgctctgctactcatgttatacgacccaacagatctgatggtgctcgaagtgtctgtgacagatagggaggctctatggcacctttagcaggtaaatcacagaagatacccttaggatcttggagcacagctatgtcatcccctgcagataactattcttttgatgaacagtggctggcttactttggggc

SEQ ID NO: 54631 - DNA, 2518 bp, Homo sapiens
cttacaagtgtgcgatcttatacaagttatgtaatccttttgagtctgctttctcgtatttaaaaagcagataatcacaatatatatcataaagctgtttcagaggttaaacacatattttaagtaaaacacctaagagggttactggcacatcggtagggatcaataaatgttagctatctttagttttacttgcattatacgcagaacattagaggcatggaacagtgtctgacacatggttgaaattcaatatatattgactgagtgaattaatgaatgaataaagatggatccataaagataaatggatggctagatggacaaagtatgttttctgagttcagcttccctaaaaaatacagagaatacagaaaacaaccactgaaaaattattggcaattatctctatattggaggaaacaatttagaacaacctctgctggtcatgattgggttcagggatatgactggattggaggcagtaaggtgacttctttcattcatcttccaagaaaacaaagtactactatatttgaacttacctggtaacttttactctatgttgttgtcgttgttttcaaaaataaacaaacccctccccactctttcctttctcttgttttcatttgtgtttttttaagtgtttcgtgctcacttacctaaattacaaaggtaacttggaaacacaggggtctacataatacgaggtataagggattatgtactgccattgtgagaacccctcatacaatcctgccttttttctttagtttccctctttttgatcagattatgctcctggtgtaaatcaggctcaggaccaagagccctggtgggaccagcaagagggacacagcaggaaaaagaagaacaattcctaccaaagcatgttactaagtttctttctctcaggaagtaataacaggaatgttttcattttctcagttctaatgatttcatactgaaagagaaaaaataagtcacaagaccagtgatctccatggctggattggctccaagagaaaaaatccatgacaagaatagctgggagttgagtcactgtgcccagaagttctgcaaacatgattcaggaggtaattctctctgctttagtgtagcaggaaggtgtggagaagggtccactaacatgtattaacagcgtgcagtttgccaggcaccatccctgaggcttttcttggtttagctgatttaatccttacaataaacatctgtgataggaagcagagggaaagagaggttaagcaagttccccagggccacacaactaaaatgctgctctattttgcttcagacctggaagacctggcaatgttatcttagtttggaatattaaccaaaaatataaaattacaaagacaggctccaaatagttctttatgctttggaaaagtaagaagtctcataaaatataattgaattgtgaaaaatgtaaaatcttcagtctaggttaaaaaaagtaattatggaagaacacaaaatatatattacttacatatgtgttatagtaatattatttacatatgtttatattttaaaatatgtaatataaaattacttttatatatagtataattaaaagaatgtacatggtctaaatatattttgataaaaataatatatagtcttctttcatatgcacacacacacagagacatatatataatggaaacatacagaatggtaacaggtttttaccaacaattgcttgtagctaatgtagaacatacttgagaaaatggcttctgtgaaagaccagttagtaccaaaataatctggcccagaaaaatagccaccattcttgactacattaatagaaatagaataacccccaaagggagatgagaagcattctaaagtgcactgatcatgagtttctatgtgatgatttgtgtccatttggagctccagtgctttaaagctgaaatgaaccctggcctttcaccaccctccctgcccatagtatggtatatcctcttattccttccctcttagcttactgagagtgtaatttccaaccagttaagccaaagaggactattttctagaaaaggagagagagaatgaattagcagataaatgaagagtgtgagggaggcctttggtggtcctagggttggaagagagttttggagaagcattcagggatttgctttctaccaggtggcagaatatagggaaagatgggagtgtaaggggtttgcatttatggaaggattccagatttctaaatgtattggcaggagccaagttcctgtcatgacccttgattggagaccagggcttcgagccaaaccacaagggatgatagagaacaattgatagaaaaattcattcatttcctgagaaagtaataggaaaatataaacccacaaacaaaaagtgaccttcccatgctcccagaggggtaacagaattgacagtggaaggagggattttccagcctaaacctggcctatacacactgtacttaagtaaggaagtgggaaatggtagc

SEQ ID NO: 54632 - DNA, 2378 bp, Homo sapiens
aattataatagaaactagcatttacttattactgccaggcattattctaaggacatttcacgtattctctcatttcatcctcccaacaccacaataaaccagtagttgtattattcccaatttacaaaaccgaagcagagacattcaataattttccccagagtttcatagcataaaggtggaagctgatttcaaatccagatagacagacatcactgcccatgcttctaatcatgtattcatttagtcaacaactacttttggaatgcttgccataccatgcaatgtgcaggttgttttgcagggactggagattcagcaatgattcagactaaaatcccctgccctgtcgaggctaaataactgctccttacagtggcctgtggatcatattggtataaggcagagcaaagatgggttaatatggtaatcacaaggcagggagctttgtaaatgtgtcctcctaggagttgtgctcccttgatgccatcagtacattccacaaagaggaagttcttctaactcactacgcagctgggcttggctcttactcaagagcattttggggtgaaaatatctaagtttaccagcccttgtgcaaatctgagatgaaggactacattaaaagtaaaattcaccttagcaggaagtggggtttgctattctgtgtatatctttaacagtatctgctgaaaagaacccttttgttaaataattgtattacaagtccccaacttaatcttttcgaatatgaaataagagagggacagtgcacaagagcaatgtccccagacccatctttaagtgaagcaccaggccgatgaaacatccctctctgctgccttctttctctgatcacaactcagctccggaggaaaaagagtcctctaaagtataataaaaagaaaaaaagaaaaagagtcctgccaatttcactttctagtttcactttcccttttgtaacgtcagctgaagggaaacaaacaaaaaggaaccagaggccacttgtatatataggtctcttcagcatttattggtggcagaagaggaagatttctgaagagtgcagctgcctgaaccgagccctgccgaacagctgagaattgcactgcaaccatgaggtaaatattttcccttcgtattcggtagtgctgttgagtcatcttgtccaatgcaaatcctgagaagctatgttcccaaagagggccagctccattttagtgtttgtttatagccttactatgcctctacctctgttggttgtaaatctgtcttaccaatggtggtttgttccctcctgaacaattttctgcttcacactggcaagcttcctaaattcatctccagaactgcacgcctggggagttgagttgcaatcagagaaagaaggcagcagagagggatgatgtttcatcggcctggtgcttcacttaaagatgggtctgggggcattgctcttgtgcactgaccctgtcttatttcatatttgaaaggattaagttggggacttgtaatacaattatttaacaaaagggttcttttcagcagatactgttaaagatatacacagaatagcaaaccccacttcctgcaaaggtgaattttacttttaatgtagttcttcatctcagatttgcacaagggctggtaaacttaaatattttcaccccaaaatgcctcctgagtatgaattagagatggagtgcttggagaaaatagttctgttctcacctctaacattcccttctatccccaaaacatgagactgccctggagaggaagtgttagctcattgaataggaagggaaatattttctccagtttgaaggtggggtggccggacctggttgcctaaccctcatcctgggagctctggaatcccgtgttaccaacccctgtgcttacttcctatgagacaccttgccctctgtctgtgaggttcctgatttctcttcttgaaacgatattatttcctgctagtctaaatgttctgcctgatttcaaaaaaaaaaaaaaagatttgagatatttacagatttcttttttttgtagtcacccagaatctatagaacccttttcttatttcttagaattttagcatggtcttatcttagaatttttcccattacaatacagacccatctgtcctttctttccttaattctttatctattgtgactttcactgggcattgcccttgtgccctaagacagtggttctcaaaattgagcatgcataaaaattgcctggacagcttattaaggacagagtcctagggttgactccccagagattctcattaagtgggtctgggttagagtctgaggatgtgtgtttctaaaaggctcctcagtgattctgagactgcggtggtagca

SEQ ID NO: 54633 - DNA, 2337 bp, Homo sapiens
cttgaagtcatttaccctgatgtgattattactcattgtatgctcgcatcaaatatctcatgtaccccataaatatatatatctactatgtgtccacaaaaaatttttaaaaataataagaattggcttaaaaaatgctgtttcctgggccccaccctagactgatggtcagatacctaatgttgacaaaaaaagtcaaactctgtaaaacatttgaagagatttattctaagccaaatatgaatgacctatggcctgtgacacagccctcaggagatcctgagaacatgtgccaggccacaacttggttttatacattttagggagacataaggcatcaatcaatacatgtaaggtgtacattggctaggtccagaaaggtgggacaattggaaacagggaagcggggcagcttccaagtcataggcagattcaaagattttctgattgacaatttgttgaaagagttattatcaatagaaaggaatgtttggagacatccaatagaaattcaatagacaatcattagaaaggaatgtctgggtcgtggagaccaaggttttattatgcagatgaagcctccaagtagcaggcttcagagagaataggttgtaaatgtttcttaatacacttaaaaagagcatgttctggctgggtgcagtggctcatgcctgtaatcccagcactttgggaggccaaggtggttggatcacctgctatcaggagttcaagaccagcctgaccaacatggcgaaacctcgtctctactaaaaatacaaatattagccgggcatggtggtgggtgcctgtaatcccagctactcgggaggctgaggcaagagaatcacttgaacccaggaggcagaggttgcagtgagacgcaatcatgccactgcattccagcctgggcaacagagtaagactctgtctcaaaaaaaaacaaaaacaaaaacaaaaaaagagtgtgttctattagtaattccaaaaggaaaaaggatgtaatgaggcatatccagcttccccttcacatcagttttcaggttaactttggaatgcccttggccaaaagcaggggtccagtcacatggttggtgagtatggccttagaatttaattttttggtttacattaggaatgcttccacattctctcaaacaaattttagtcacagttttgaataacgtactctggctcagccattgcaggtctcaagccgttaggtttcattttcctcctcccaacgattttaaattagtttcactttccagtttcctcttccttcccctaaaagcaattactcaaaaacggagaaaacatcagctgatgcgtgccctactctcccacccctttatatagttccttcagtatttacttgaggcagacaggaagacttctgaagaacaaatcagcctggtcaccagcttttcggaacagcagagacacagagggcagtcatgaggtcagtgaaataagaatgcataatcatgcttgtttttgagtgcaaattgtaagttgagtttcttactgtgcaggcacattcctgaattgtcctgatgtttatagattcaatatgtctttatcagtctgagcatttgtaagatgtttgaggggtttttccctgtggctttttttggtgtacacacaggcttcttaagtttctggaatggttccctacggaactacatggggggaggcagggtggggaatgcatcagctcatgtttcctccctgtgtgcagctatttcctgcaatgagaggaaggcttggcaggagcggtgtatttcactcagccacaaacttggctgattcaagggtagacctaagggaattactcttttgggtttttctgttattgtcattttgtttgaaaagattaagtcacaggctttttttcttgtaattttaaaaggaggaatttattttcaacagatattgtgaaagatacaatcagtactgcaaacccactcatgaagaaggcaattttgccctgaaacgttgcattactttaaggtgggaagtggaagaaacaattcttacaaatgggcatttttgtcatttcttatataaaaacaaacccaaagcttagcatttatttttattgatgtagtgaatgctggtcagcagcaaaaaaagaatttctcctcaaaagtgtaatgacctaatctattatctaaaactagtctaatctctaatggtgggaagcagatcagtggttgcctggagatggtggggattgagtaggaaggctcccaaaagaatctttttagaatcataggaatagtctatagggaggtagtgatggtggctacatatgcataaacatttaccaaaactcat

SEQ ID NO: 54634 - DNA, 2004 bp, Homo sapiens
taagctgagatcgtgctactgcactccagcctggatgacagagtgagatcctgtctcaaaaaaaaaaaaaaaaaaaaaaagtaacaatcaaaagggtctctatttccataacatgaggtctacgttttaataaagactaggttgtctgaggccgggcacggtggtgcaaggctataatcccagcactttgggaggccaaggcgggcagatcatgaggtcaggagttcgagaacagcctgaccaacatggtgaaaccccgcctctactaaaaatacaaaaattatccaggcatggtggtgcacgtctgtaatcccagctactcaggaggctgaggcaggagaatcacttgaacccgagaggcagaaattgcagtgagactagggagtctggttaacatgtaacccctcaccacacaggtcaaagagcaacagtcatgcacctgagaaaaaaaacagtcacgttacgtgagtcagttttcagggcttaactttgcctcttgacataacacatttggaagcttctaaaattttattttctttttacagtgcctttttacaactttcaaaccacagttttccaaatctgtctggaacatgttcctggcgtgagtgagctcagttctcacagattctgtttcagtttcccctcaagagggatcttgatagggttccatcagtttcactttcctttcccctttcataaaagcacagacctaacagcaccctgggtggaaacctcttcagcatttgcttggaatcagtaagctaaaaacaaaatcaaccgggaccccagcttttcagaactgcagggaaacagccatcatgaggtaaatagtccctgcttctctgataggaaacagaatttcttatgtacaacttcctgacttatgctatttcagtgtttgcttagagatgaaatatgcatttatctaattcaagcataaatctgccttaccaattcatgcatttttatttctgtagctctttgtgatgtatagagttaggcagccaaaggacacagggaaatgggagctgggagctgggaagggacggggcatattgagagatcctagagagcccatgctcagatgctttcaggtaaaatcgggccagtgaaagctggggcctggagggaagttactggaggttctggttcgtcttttgtttcttatatttagaaagcctaagtcagaggtttgtggttttgttgtgactgtggttatttttaaaccatgcttgcttctcagcaaatgtgtcaataattaattcagcactgcaaaattccaatttatgttgaggtcacttttaccttgaaatgcactttttcataattgggggatatgtctacttgagttgtcctctagcaggtctagtgacctgctaagcctcccacgtgatcaatgaacagggagaaggtgttgcttgcagtctctcaaactgtgttctgcgagtggcctgaatcatatcaacctgagtcttctaatagaatgcaaatttctaggtcctgcattctgaaatcctgattgagtaaaacagaaataaggtccagaaacaaacatatatttaaagaggaccacaagtacttcataggcatactgaatggcttacagaagaaatgtccatctccaaatcctctcttccttaaatgcatacaaggcttcctgcattgtatgtgtgtaaatgtgaaggaggaaaccccaagaggcaggaggggggaggggtgggaagaatgttgaaataaagcaaagcttgtttctgggcacagtggctaagcctgtaatcccagcactttgggaggctgaggcaagaggattgcttgagcccaggggctccagaccagaattggcaacaaagtgagacctacaaaaaaacaaaaataaaataaaaataaagcaaagtttgactgtttaaagggtaatttaagtatgagaaactggtgattggaaatcactgccaaaaagggaagtcttcccagagccttgctgctcacagtgtggtctgaagc

SEQ ID NO: 54635 - DNA, 1157 bp, Homo sapiens
agctcagacttctcaatagcaaccaaaacacagtgggaaatagtttcaaaatgccaagagaaaataattgtcagcctataatttgactttttaaccctttttatttgaaatgattttagacttaaagttgtaaaaatggtgcccagaattcccatataccctttacgcagcttcccatcatgttaacaccttacataaacatagaataatctttaagacaggaaactaacagtgacaacatataatcaactaatctacaagtcttgttcaaattttaccagttgtcccactaatattctttttctagttcaacatccaacctgggatcttccccaaaatgacctttgttcacagtgtcataattcaccctgcaacacaagctctgctcaactagagtttgatgaataaaatgattttctctttgccatggtccctttatatgaatatctcataaagcataaaggtcagggtggttcctgttagaatattcacttcccttgatttcctgccaaatatcatttcacaaccctcctgagctccctcttgattataaagggaaagacattgactccagtctgacgcaataaacagaagagtttttgatgaccctgcaccttcttttcttctgatttatgtggaacataccagcaacaaaatcctgaaccaagatccaccaggggatggacaggtgtcctaggtatgcccaagaatgatgcaacatccccagccatgcgcatgatggctgaggaatctggggacagctattgtgtggaaagaaaatcttacaaagggaaatcctcataggaaattgcgtaggttggagaaagagccacactcagtcaggcttagcctgtcttttctctcctttggtctcccagagggagctgttatattctaatagcctgctgcattgtttttttctaaagagaattctaggaaattgacatcagggtctccaagactacccctagatttgatgattcactggaaagatgagcaggattcaacatatggtcatactcacagctaagccttattataacaaaagtatacagagcaaaattagcacagacaaaaagtgcatggggccaagtccaaagaaaatcaggtataggtttccaagagggccggtagagtcatcaggttgtgcttaattc

SEQ ID NO: 54636 - DNA, 2405 bp, Homo sapiens
tagggaaacagagtcttcacaatgcctgggaagggaggagagataaggcttactagccacagaaaaacaggcagttaattttttaaaggactccagttctttctctttctcagggggagttgggttttcttacatacaactgagtttttgcttacacactctttcatttcttttaatttctgtttcagtagggccccagcctatgaacctaagacgggaagaggaaataatgtttgctgagccaggcgcagtggctcacgcctgtaatcccagaactttgggaggctgaagtgggcggatcacttgagcccaggagtttgagatcagcctgggcagcatgacaaaaccatgtctctataaaaaatacaaaaattagcgaggtgtggtggcacatgcctgtagtcccagctactcaggaggctgaggtaggaagacggcttgagcccaggaggttgaggctacagtcagctgtaatcatgccactgcactccagcctgggcaacagagcagaaaccctgtctcaataaaaatctttaatgcacagaatggtttttttcctctcctacaatcataaatatgtaatcagcaactggatttcagatggcctaatcagagaaaaatccaaatagtccagaaaagcccaaaaagtatccatgacgattttataaattagggctccacagagcagtgatttgcaaggatcccagaatctgagttctgtccacagagcctatgtctgctttcagttcagcacaacacaaactaaggctgaaaccacctaacaacaggcagccacaggtttcagtttagagtcagaacaggcaattagaatatgtgaattctggatttcaaaggagacagcttcttttcttcctgcagcaacaaaaccaagatactttagagtcagagagccatggtccaagtccaagggacaagaaatgctttcccaggccctttttattttgtcaggcttagagtcttaattgacccactcaaaaaatacgcgcatcaccctggaacatcatcagccttaaagattcagacatctgacatcacaagggctctctagcaactaaaaattgatttttcaaactcagtgtgtctccatctggagacaacgtctgagaaataaaaataaaatcctaagccccacaagcaactgaacataatataccccctcttggccacggggaccccagggaaaccttaaaaactgagtgcccggccacgatggaatgtaaagtcagacacaccccttccttattaatctttaaccagaattctttcctaaggagtaagcagaaaccagctctggaaaacaagaaatagaggacacattcctttattgcctttagccaatcatctgaagccactgctcgactccccctccctctttgcagtttcaatgtgacagctcgccagtttcacaaggcaaccctttctaaaaattgacctctatctccagtccagttttggcccaatcacagaggaagggcagtgcgggttttcatgtcctctacctcaccttttgacacaagaaggccaaaaactccacccatggatcacgctaacaccaccattttttgtacatatgattcatggaaaggcacgaggctcaattgcacatgtgcatattttccctttcatgaatattcatgactcctcctatagcttatcgaatatgtgtatttggacacctcattcagcaacaatttttgtcttagtcttccctcccacaaagtgcctgtggcttctggttggaggctatgctttccagcctgtcagaatggctagctttgtaactgcccaagggttttttcctgcccactgcacaaagaccatgccattgtggtacagaaaattttaatagacacatggaaggaaaataaatcttgggacccccaagtcactaagccaaagggaaaagtcaagctgggaactgcatcaggcaaacctgctcccattttattcctaaatgagataactacaaagataaaaaaaaaaaaaaaaaaaaagctacatacttccttcacaatttgtccataaggaaattccttgtgggcctcaatatctttaccctaaaaacagttctgttgaattttaccctagcaacataaactgatagcttgtcttcaccagtacaggacagaaagtcataactctactcgcctgagacaaatgcctatctggttgcttcctctgccctatcgttcatgtaaaactgccgattcactgagacagactaaggcataaattgttagagtaggtagttagacatgaacagggcaggagagggcctcctctcctaccaggcaaccatcaggtgatggtcaggcagttgttaaaccgtccctaaaatgataattggttgaagccaatgccagggaagggccatctcccaatag

SEQ ID NO: 54637 - DNA, 2111 bp, Homo sapiens
agcttacagtgagccaagattgcaccactgcactccagcctgggcgacagagcgagactccctctcaaaaaaaaaaaaaaaaaaaaaaaactggaacacgtgggagtcagccagaaaagtaaatcagagtagcccaaagatagccatcaagacccctgaggtggtatgaagattaccaggactttcagagcagagaagttcctagtagctgagtattttctctgtggacatgattggtgcaagtttgcaaacatgagtagtctcaaaagcaaacatcagacactctctgtagaggtcagtgcactttgacctacatcctttctggtattgcatggattattaaggtgcacaaggggaaaccaaagcatagaaaaataaagttctagactcagagcctcatagaaaataggtatttattaggaattagtctctgatccaaagcatttggacctgaaagggatccagggatcatttggaaaagtatctgtgaaactttaatgtaccaacaaatcatctggacatgttaaaaggcaagttctcattcaggagatctgtagaggggcctgatattctgcatttctgggcttttagtagttgaggatgccactgtaacagaccatatcctgagtagcaaaaatctagtctagtggttttaaaccatgcacaaaaaaatcactttgggattacttttttcagaaaacttactgataatactcatgcctgggcttcacttccagagattctgattgattgggctggagattggctcaggcatctgcatttttaaaagacttccaaggaattttacaaccttgcagcccaaggttgtaaaccactgttcaaggccaacctttttctatacctgatgaggaaactcagtgtttaagtgaaatcaagttcactctgctagttcgtcgaacacagagctggttctggaatgttgatagtggttaagttttatttctccaatgcttaagtttcatttctacaagtaggcatcctgcccattagaaatgagtttccctctctagtttccattgtttttttcctatttgtagacacagacacacacacactctctctctctctctcttacacaatgtgttggctgtttccttattgttgctctgtcctgtgtggttcatggctgtatttatccaaggacacactgggccagatcctgaatacctaatcagttgagccagagcctcacagaaccaggactgctgccaaattcagtgaccacatgacaaacactcactctgtttctctgacacgctgttactagcaataattttatgcatgaaaattccaaagtcatactactctcagtgtaagcagctctcctaatgttcatttcagtatttgcttatgtttctatcccttttagagttgattcagggctagtgccttacagaagatatttgtatctgaaaacacaattggcctcctagaagcttcccatctgatacagaactggagagagagagctgagaggaaatgagtcccattccaaaatctcttctccccctacacaggtccatcctcactagggagaggttgaatgcctgctgcccaagaggtactgctgggctctatgtgtagatatggccagggctccctgacctgagcctgagatgggaatatgtagattgccctggcctgaagctcagaacaggacacccctatctcagcagctgcacagtcagatatgacatgaaacacctctctctcagtgcccactgggaaaaattgtagtctggaagggctccagctaatggtcagcacagactgcacagataaggggacttgtcccacactgtgaaagcaacactcacaattactgaatgctgttaaatgagacatgctttccatgcaatatcccacttcatctcaacataaccccatgacgaaagtcctagtgctattccgattccatgggtaagtaaatgtggcttagaaatgtgaaccaactatcccaagatcacatgtccagtaagcagcaaagtccattaatgaccccaggtagtctgattccaggtggccttcactactgagcaacatcatcttgtgcgcacaaagacaagtaaaggtaaagggttttaatagtt

SEQ ID NO: 54638 - DNA, 882 bp, Homo sapiens
ttatttttaacttgatgactgaaaataataataataatagttaccacttatttgcatgcttctatgtgccaggtagttgctaactatttaaactcaaattccatgaactgtagtggaggttgtactggaatttgattcagaatgacagtgtccatgatggagcaatagagggctctctatttcaaaccatacctccttgcttttacctcctgcctaagtcatcaggggttagaaggctttctaggtattggtctctttccttcattcctaaaccagattggttgcttatttccgtcaagctgaaaccaaaagtaagcaaccaaaaagcaaccagcaaccaaaagccttgttactcaattaattaagagtagatttttatatttgatagtaggttccttctaaatatagaaactgaaaatagagctatctccttcaattctcctttttctgtgtattcatccagaatccagccaccaactgccacaataggcagcaatggactgatgttctttagggaggacgtgaatctcgttccaaatgctggccagtcattgggtttctgcagcactagaaacatctatggttgcaggtctgcagtttatctgttttaaaatagaaacaaagtttcattccccacccccccccgtcagcaggaattccgctagctttagtttcactttcccctttcggtttccctaggtttccaacttgcaaggacacacccacagcttacaccattggctgctgtttagctcccttatataacactgtcttggggtttaaacgtaactgaaaatccacaagacagaatagccagatctcagaggagcctggctaagcaaaaccctgcagaacggctgcctaatttacagcaaccatgag

SEQ ID NO: 54639 - DNA, 2327 bp, Homo sapiens
ggaggatcgcttgagccatgaaggttgaggctgcagtgagctgtcatctcaccactgcactccaacctgagtgacagagtgagaccctgtctcaaaaaaaaaaaaaaaaccaaaatcaatgcaaaagatgaattatggacaggatattgaggttttgaatacagacattaactcaataagggtaaggcccgtgtctgttttctttattgttatattgacagtactttgaacaaagtctggctcttacagttgtttgtcaatatttgctgaatgaattcaaaggggacaaaatgtttaaggtatgggtgtttgacattttctgcctagatccccaataccactcttgtctttattgggtccttattacaaagcaccattggcgaaggtatggaagagaagcagtctcctacaattgtgggtaagagtggatttttaaagctatttggcaatatccgtcaaaacttaaaatgtatatagattttagctccaaatttctcagtttacacccaacagaaataacagcatagatgtatagcattgcagtgttgcttgttgaatcaaaagactggagtggaagcagggacttaagtttccgcctgtaatcccagcaccttgggaggcagaggcgggcgcatcccttgagatcacgactgggtgacacagtgagacgctatctcaaacaaacaaacaaacaaacaaacagttacacgggcagcatgcgaactcagcgtactcagggaggcagataaaagccgagaccaaagtgaaggagcccagctgcaaattcaactccgaaagaccctggactccgcaaacgtctggccgcggctcttgagctcttctattaagtttcggtttctgaagcttacgtttagtttcgatttcttaagtttcagtttctgagcgctcggcatctgattcaatctccagtttcctgttcttgctggggctggggtctctcctttaacaaagacacgccgcgcggccgagtccaggggctgcagaggcctggcgcgcgcacgcgcacgcgcacgcccaccgcgcggcttcccgcggtccccggtgctgaggagagagcgatccgagggactgcgccgcccggacggcctgcagagcgctgccatcatgaggtaagggttttcctttgcctctcctcccaagccctgcgtcggccttggtttcaaaccgggctgcttttattcatttccagcgcagttctgcggccttttcaggggccgagcccctcgcgcccagcaaccgggcatctgcgttggggaccctccccgggcgctctgtcccggcgcgcggcgtctgaagtcgggcctgccggggagggtggccgagtggacgcttctcgggagtccggcccctccccagcgcctaagaaggccggtcagggaggaggaacaggagatgctccccgggagcctgtcccatccctggcgtctgcggtcgggactgtcagggtatgtgccgggcgacgctcccccggaaggcctgtccacccatcgcgacccgacggctcttctcggcagcggcgacggtgaccgtgctgggtccgcggccgccgcctccgggaaactggtcagcgcctgcagagcccccaggcgctgttccgggggcagctgctacgtgccacgggtctccttaggcctgtcgcgtgcctctctttccagctgccattccctcggtgtggcatacgcggtttcgccgcagccctgcaggcgtcaggttcgcctgccactgccagtttgcgtttctgatttctgggtctgagttcttcccttcccaggagctacctctgtaccaagcacagattgttatcgtcccacccaatccgctgttttatgaggatttctttatctgtttcctttactgatttagtatgatggcgtccttttcttgatcattttgtatccccaggggctagcaccccgccctgcacgtggttagtgaaccttccgcatttaatgagttgaggaatgagatgttaaggtcttgggctctaaaagcagatagtcccttgttctaaatccggactgaactcctactagttgagtgatcccaaagtttctcaaactctgtgagtctgttccttatttgtaaaaattaatggtgtccatctcttgggactgtggaaaaggacagtaataaatcctatcagttgactgcttagcacataatacttgcacaataaatgttaattattcccattataagtttaaaaaaaaagtttaagtgccacccacacatctaactttatttttgagacggagtctcgccctgtcacccaggctgtagtgtaatggctccatctcggctcactg

SEQ ID NO: 54640 - DNA, 1545 bp, Homo sapiens
atcccttgtgcacacaccaaccagcatcagaccctcacccagtgtggagagcaaaataagaaggcaaggagatagtttgatatggccattccacaatgtatacatattttaaaacatcatgttgtacatgataaatatacatgatttttatttgtcaatttaaaaaggaaagggaaggggcggggaggggatggggaggggtggagggcgctggaacacgtgtaacaactagggctggggtcacctgcgctttaacatcccctgagtttgccttgagcctccaggccatggactttggaatgtggctgcgagtccctaattctattaaatattaattttgttcaagagtaacttcatctctcttcacatgcttttcctttccataccacatcaactccagcaaatctcaccaaagcaaacaaacaacaacaaatataaaaaccaaaacaccaaaactaaaatcacttacaggtcatttctatataaaaaccctttattgagaagatcttaggagacagaagaatctacaactttaaagttaatattaggtaatctctgtttttcagaaagaaaaagggagagaagtgagagggagggatattgggagaggggagacaggaaacaaaaaagaggaatggagggagcaaagaaagaagaaaagaaggaaagatccccaaccatttattgatatgcctgcctctttctgtgattctgagctttgcctgtttccctgtgtctcttctcccttcaaaaccgttcctccatttttcttaaacagagcaattcagttctaactcttatcctcatactcagtcacaaacccaactatgagttgcttagttcttagttctacataagaactttcattttaacatgatccactctcctttgaaagcaatttcagttataaataaatagaatccccacgatttcacatgcactacacatttaaagtaaatttaatcactttgtcatatttgctgtacagtataatccgatattttatgttttcaaattgacatggaatccattcttctgtatcatttggtttcaacattttctaacatttggcttctggtataactttgagattctgtgtctcacactttaactcctttatcaactcacatcaaataaattaacacattagtaggggtcacagtgggaacaagaatggaaggctgacaatctgggttccagagaaaggcagaggacttcaaattttttttacgttatgttttaccaatggctatccctagtcaagccagtcaaaatcatcattcatattaactttgatactctatgttacagaactgatataggtaaccaaaagctgaaaactgcaacacagcatctttatccccgtgtttatacttgcaagaggaacaggataaatgtgggatgggtaacgagcaagggggagttggaagaggaggaaacaatgacaaactttaatgtttgtgcctttaaggtaggccttggggagttgaacaattggagattcccctactcctgggaagtgttcttgctaattccagcagatgg

SEQ ID NO: 54641 - DNA, 716 bp, Homo sapiens
cactgtgagattcaggattataattctttggacttaaaatggttggaaacaagctgggggatctggactttttcttccctccatgccttccctcttcaatctgaagactcagaaattatcccaaaccatagaaaagtggagtatttgagaatgaataaacttataatccaatgagtagatttctaattattatctataaagagatgaagagcagtggatagtggaacaagaattaacacagggagaaaggaatctcacctttagaatatctctaggataatatttttcagacaactgactccctccaatcctcttttgggtaatgataaaactaaatgtctgatctgcaaagaaaactctcaccagagacctgctgattcaagaattcagttcctgcccaattggaatactgccaacatttttccaacctaacaggaatgcgtctgcagtctaagtaagagcttcttctctgaaggtaaaagacgggaagttttggtgttgttgacatttcaggtaagattgagaggttgtccttgtgactaagtgtgttctgctaaatttagagtaagtattatatgtgatggtaacaaatgtgagagcctggaacccagtcttaggaaaagagctttcggtttccagtggacaatttcaaatggatcttaccagatgccctttaagatctattccaaccatggcattccatgattatttggatt

SEQ ID NO: 54642 - DNA, 639 bp, Homo sapiens
ctcccctgacaacactgcatgtgagtgtaaatggaggcaagtagctttggctgactttggatgatgcacttgtccatctgctctgagatttcaaaattgttattggcgtttctgtcaacaagatgtccaagcaatactaacgcttaagcaccattcatgtgagtgaccacgacaaaaggaaggggggagaagccgacaaggttatcacaaggttatatggctgttcacaaaacaacgcatgtgagtttctttcaaaacaggtcatttaatagatttatacatattcagaagaaatgtgcaggttagacatggcaaaccttgtttcctggagactttgaagcagtctgcaattctcccacaacattaacctgagcattcttgtaaataattaacccacctgacaagagacaaatataatgggcaggtcttttattaagttaatagtattgcagccgggcacaatgactcacacctgtaatcccagcacttttggaggccaaggtgggaggatcacttgaggtcaggagtttgagaccagcctggccaacatggcgaaatcccatttctataaaaaatacaaaaattagctgagtgtagtggtgcatgccgtaatcccagctacttggggggctgaggcat

SEQ ID NO: 54643 - DNA, 8839 bp, Homo sapiens
ttaactcccagagcaagtcacctttgcatcttcccccaattcctctcaccttacccaaacccaaacaaaatacatgcatgcacacacacgcacccaaacacactgcctggttcagaataagagcttactctacgcctaataaatgaatgaaataagttctgccttcaccagggagaaccccctcaagtcataagaaataaaagtgtaaataactgtcactagtttttaaatggccattcagctgaaagaaacatggaaagcactttatcttcatcagagaggtctaatcttcacaaagcaagaaaatcaaccattataactagaaaacgaacagtatttaacacaaccagcttctctctaaacagcgcacaccagagtgtggcattcatgtcacggaggtaccagccagcactcagagctcaagtgtctgactcttggaacacagaataagccacaaagtaataacagtaacaatgattattactatttaggggcactgaatccaccaggctctgaattcactgctacatatatgttattccatgttatcttcatcttgaccctgtgacgtaggtattataatctccattttacagacaaagtaaggaatgctctatccaagattctacctcaggtctgatttcaaagcttgtgctcttattcaccgcaaaccattgcctctccctggcctttaagctgcgtcttggtagaagccataactgtcatgttggatgttgtgtccccagcaactaaacagtgcctgacatgtgtttgctaaatgttgttgctaaatgtaagcctcttgtggatattcagaaaacgatagattggctccctatcacttcacattttattactccctcttaacaagaattaaatgtctgcctctaccccaccccagttaacatcctggcctatggctaggaaacagagaggaaaccatgtgtattaaagggtaattttccaagtatgagagaattccaacatttttttctgcacagcctttacagcagtgtagcaaagggttccagctggtagccttacagacttctatcctaggggcaaactcgagttccaaagggactgaacgtgggagggaagttaagaaacccctctctctctgcttaggcttgcacagtctctggcccaagcacccaattgttttcatccacttagagcctctggatcctggagatgccttcaactggaaattgatttatttatttttattgtttactgacattacacatgtgccatgagacaatacatatataatgttctaggtgaagagagactaagactgctttttttgatgtgcttatttttcctttctgcttctctctgcttagtcctcaaacaaatcctggtaacgggagtaaataattactgacttcaaccagaaatttttggatgtttgtcagagacctttgggcactaaactgaaacactgacctttgctaaagaaactgccaaagcctctacattgtgtgtgatgctttgaggacaggaacactttacataagacttagaataaacagcagagtgatttatatggtatttggtctacagaaaggaagaaaaaggtacaactcgtgattcacatacgaggcagacagtagaaagcaaaattctttcccaccctttcagttcctaatccacagagccaccgattctaggcaacatcagaaaaatgcttacttctgagtggttgaatgtgcaattcataaccagaagcttgcccccaactacattttctgcagtaatagggttctggtataacattgggtgtagtgtctggcataaagtcggtgctcaatacttgtgtagttccatgaataaatttttgtgtctaactcagtgccttgtataactcttttattctaattttgtactctgttacagagtatggcatcattaagtcagattatatcggaggcatcttggctgtaaaggagaacctgggagtttgagatgcatttcacagagtctttttgttcgtcatcagagagcctattattgagaacagtgctgctctccataccacgatatttccttcactctgtaatcgctgccatccgccatgctgttgaaatgggaggggcaatgagtccattatttcagtcagctagaaattaacccctcatgtcatggagtactacggagaactggtgtttgtaggagtgcaggcagaagaacatagttctgcactcagagtgtgagatccctaagaggagggaccctggaggctcccactccccactatctccagtgcctaggatcatgcctgggagagaacagggactcaataagcagttactgaacaaacttcccagttctctggttcaggataatttctcaaattacatggggaaatggtacacggagcttgaagaatggtaacaagaaaccctttctttgatctttttatccaccataaccagccttcccagcactggggtcatagaaccctaactgactacatctctctgggcacatacctaggccctgaccccagaccaggccaaaggtggaaacagaaattcactggcagatttgccccttctttctgcttttgcaaagtgggccgcaggagggctcacctacagggcctggcactcggcccacagtctgccccacatcacgctggccatcacattccacaggcctgtagagatgtttatttttgtgttctgtagactctgctcactgcttgagccacagcaggtcacacaaaggacaaggtgttgccaaggctgagaatgtggtgtactatttttttgtaagacgggggcttgaatttctgctgtgaaatgagttagaaatgattttacaaaaattccttcaagatacggatggtcgtttttgttcctatcctgatagaaatagatattgttaaaccagttcattccacctccctctagtttggaaccgaagaaagtttgatgaacttttaacaaagtccttggaagtaattcccagattctttgcatgtgagtacagtctgtacatttaaaaacatgtccagcccaggcgcagtggctcacgcctgtaatcccagcactttgggaggccgaggtgggcggatcacttgaggtcaagagttcaagaccagcctgaccaacatggaggaaccccatctctactaaaaatacaaaattagctgggcgtggtggtgcatgtctgtaatcccagctactcgggaggctgaggcaggagaatcacttgaacccaggaggaggaggttgcgttgagccgagattgtgccattgcacttgagcctgggcaacaagagcaaaactctgtctcaaaaaaaaaaaaaaaaaaaaaaaaagatgtccttagccaaacacagcaatagttatattcttaatataagccataagccatttgttagttaagaatctgtataaagacaataagtaaaataaatttgatgaattttcaaataaattttcttatgaatcactaaggcacttacacatttgaagaatcatgtaactgtgtaagatattctgtccaccaacaatattatatgtacatatggatttacagtctctgtactaagtctattgttccctcccagttctgagaccggcccctgccctgcccccgcccccacccccaccccgatgaagtccctctgtttattaagagtaggacttgtgccttggagaacatgagttctttctggtttactgggtatattatttaaggaactgggaagggaagacttcaataaagacattgtttataaaggtataagcagtgttaataatatctaacaacactatatcatgatagtgttggagaataacagttacatcaagtagaacttaataaaggaagtggagtgccttgggtctagtaacagtgggaaactattaccacctctagacttaagggggcagagggagagagcagttactagaatcttggagagttgacgtagaaagtccctgttgaagggaagcagtcagtccacaggatctgacagtgaaagaaccaaggaggtaaacacatcagccacacctactcctgcattccaagtctcagaggtaattgaacccaatgggagcccaactgatgcagtccataaatgttttcagcctcccaggtcagagaacagggtggaagtgggatggacagtgaacctgcagggggaaacaaaaactgtgttgcataccagtgtgatccgtaagcttgccttgcagcattctagggctatggtaaaaaggtgaagtcaagtcctgagctcacgctgggctttgcctttaaactagatcaagttgctgatgtttaccaactcaaatcttttagtgtatttcaaagatgaaactcatctgtgaaaccaacttcctctttcactgctcagacttaagcattcccttagtttcagccacctatcacctttatttaaatggacaactataaaatctgcatctctgcttccgatctttctcccaagttacagactcaaatttccaatagtctgcagggtacctcaaactctcatgtccaaaaacactggctattcactcctggaaacactgttttcttaatgctctcattgtttccaactagaaatgctaaaagctttgagtcattttgactctatcccaactctcattacaagtgaatccaactcttatcacttattttttgtaatccctttcacatctgccctcccatcttaattttccattgccttgttcctgaactgagcctgagcccgtcctagcctggcttgttcagccctgactctacctcttacttatggactgaccttatttagacttctctgccacttactaatagtgaactgtcacttagtgtctcagtgcctcattccttatctgcaggatagccgcatgtttagtacctacagctggggacaaagacctccttttccatgatcctgtggggtggagactccagtagatttaacactcctggctcttctccttctcctcacttttcgctgtaagaggggttgcttatctgtttccttgggagaaatcattgcctacactcacctcacactctttctctttttttttttcatgtgggatctgcctatttgtagagaagcttatcttcctcagcaattctgtgctataagtaaaataggggaagatgcccttgcaaggaggcctgtggttgtttaagagctgacagtgactacaacttggctccttttcatgagcaaagtattgcaaccctacttggctagttgtcctaagcctcgtgccttaactatcagtattattagcctttagggtggcattttgatcttcatctgtttaattcctgtttctacctctaaattggcttagaacttagggaaaatatgaatgttttgtattggtcctttcaaatcccaactcctaccccacggagttgttgagaaaatgaaatgaggtaacccatattatatcacaaagcataggtcctgtccacagtaagcattcaaataaatgttagctattactactattgttattatagactgcctccatgagccttacataagggataaaaaacttaaaatttcaatatcctgtgattattatgatttatatatcacgatagtgttggagaataatagttatatcaagtagaacttcataaactgcaaaagaagctctatcaccattctctatccaaagactttacatagaggcatttacatgtctcctgaggctgggtgtgaaaaatgttctgaaagataatttatctgagaaggaggcttataagaggccctttaggtcatgatgcagctgtaaatagtaacacaacatggctcagaaaaagatctttaaaaataaaaaagaaacccacattcctctgacaggacacccctctctcaataattccagggtttttttgccatcccactccaccctcagttatactactactctttgaggccattaaaactgctgcaaatatgaataccacattacattttgaagcacatggaacagtgcccttggcatgaggtcagacatatctggcttggaaactctactctgataattactagctctgtgattttgacatgcaacttagctttctgaatctgtcctgctgtgtacattgcagtgaatatttccttttaaagggggctttaatgagggttaaatggcaaaatacatgtaaaagcatctgatacctattaaatattcacatattaacaaatactaatttctttctatataataccagcaaatacatttttcatcttcattgatttctttcaataattttccaaactaaaaagtaagagactgttcactacagtagctatacaggagcatatagtaggtacaaaaaaatgcttaactaagttattacatataccagttactagatcaaatagtaacatgattagaaaattagtaaatatatagcttaatcatcactaaaagtacacacatatttcttttcttggagtatcaaaaggaaaacagacccagtgtcttcatctttccaagtcaattttcccttatgctatgcagacaacacaaaagagttaaatggagtgaggaagactggcaaaatgaaaataagagggagaactataaatccaagaaatgccatgtttcttgaacatttaaactaattttcacttctttgcagtatttagttgattctttattttgaacttccaccgaaattctttacagacaaatatctgtatactaaatatctgtgtctacgttctttcctttttaatgatttttcctaagttgtacacaaatgctatgtccaatccctgaactattaaaagcctctataaatgacagctctgaggactgtatcagcacacaaaaatgcccatctatgttgggatattaactctaaatcagaacacaaaatgtatgtgctatgagtacaactgtagaaatacatatgcataaggacaaaataagaaatgaatgcaccaaaatagaaaatagctgtgtgaggaaactgagataatgaatgagctcttcctgtattttctgaatttcctggaatactcatgctctttttatacaaagtaataaaaccacttgtacatagtggcaactaagtgtgtacatttttttttccatttaacatcagttcacatccgcttgtctatatacttggcgtagttgacatttgtctatatatatatgtttaggtttgctctctttatttaaacttattgagattttatcattccactaatacctgagagttttgcttttgggactactctcatacacagattaaaagtttccccctcactttttatctgcccaagaagccaaaaacaagaatctattgatggatagataaactgtatgactatttttttaaggttggctactatctaattgacactgttttttttttcttgtgtgtgtgtgtgtgtgtgtgagagagagagagagtgtgtgtgtgtgtgtgtgtgtgtgtaaaacaaaaaaaaatgtattccagcatggtttttcactataactttcaaaaattgttttccttttacaaagtgatgcaacatttgatgactaaataacatggaatgaaaaagtccactttaggacaactgcactacacagaatgagaatgcaatgttctttctcatggcatttcaggctcgcatgaggaaatcattctctttttctttcataaacttcttgagagaatgctgacaatgataaaattgtcttcaccggaagctaggagaaaaacaagttaatattttcaggataaaaataagtaaaggcatgagttacgctgaatagttttagaatctttgaatgaaatagcccaaacagagaaaataaattttttgaatttcgaaaaataattaatcatctaaaagattgaaaagtacaatttagtctgtacttaatgatttgtgtcttaaatccatactcctcacttagaatagagtgtcaaatagtacaaattcagtttactttggattatcatttctcaagaatacaccaaaaaaaaaaaaaaaagaagaagaaaagaaaaaaaggctaaagtatagctacagactatggtacaaagttaacatatattcttagaagcattccaaaggccagtgtagtcaatgtatttttacaatgtactctacactaacaagtttgaggtcatgggttttagatccatcaataataaattttaatcacagtgtggcagaaaacagtatcatggtcaatgtataaccaaggatgagaagtcatagttaagagtctaatagatgccgggtgtgatggctcacgcctataatcccagcacttggggaggctgaggtgggcaaattgcttgaaccaaggagtttgagaacagcctgggcaacatagcaagaccctgtctctacaaaaaatacaaaaaaaaattcccaggcacagtggcgtgggcctgtagtcccagctactagggaagctgaggtgggaggatccttgagcctgtgaggtagaggttgcaatgagacaagatcacactactgaactacagcctgggtgacaagagtgagaccctgtctaaaaaaaaaaaaaaatgtctaatagaatagaccaagaaaaaagaagaaaaaacccacaaaatttagcagagtgaaatcatgttgtgtagaaggaaacacatcaatatgccttcttaatccagagcttcctagttgcttagccgggctccaggtgtgacatgaatctgtattagtctactccagctgctataacaaaataccagacactggatggctaaaacggaaatttactttctcagttctggaagctagaagtccacgattaaggtgtcagcaaattcagtttctggggacagctcccttcctggcttgaag

SEQ ID NO: 54644 - DNA, 1409 bp, Homo sapiens
cttatccccgttttcccacaagaagctcaagaaaaggcatatggtttcccaggtccaagctcccaggcttgttattatagtgatctcatcagagtcacagtgtagaaagccctgcttgtgttgcccaaagaaaaccaggcttgcaagagcaccccctcactctccagcccagagccatggaattcataactgtggccatggtaaatcactaagtcatcatgaattaaccacagaaagtcatcacaatcagtaccataacaggagaaagaaatgggatttttcacaatgagctttcattttcaattaaatagcaaaactagaattaaataaaccagtactgccttgcagagccaattatatcttataaatatggtcatttggcaagttatatcatcagaccaagcagaacgccaaaaacaaactaactctacgtatattatatagtaaatcttatgtatgcagaatcttagctgtgtgaaaagggcctaaaagcgaacaaaatctaagtccatacaatttactcacaggaacacaccggtgtgtccgactcatttactcttattagttatttgttttctaagacagcagcagattagaatgtaaactccgagaggcaggaattttttgttgaatttgttcactgatgtatccctatcaccaagagcggaacttaagtatctatggaatggtgagagaatgagccctgacgtgtcctctctgatttggctatggtccagcccctcccgatgatgtcaccactcggctacttcacactggaggcccccaaaacgtctgtctttgcaacctctggtttaaatgctgtgacagaccattaacttgaaaatagaaactctaaataactgatgagatttcttttaggaatgtaaatactctctctgtgatcttgtttccactggtgatttggttagcaccatgtttttaactggcaaggtaaattgtttcctactagattgcaaactccttcagacttggtattagggcaaattggctgaattaagctggaaagtgaaattttagctcagttcctaggctttgcaacctttgctccctccaaacttaactctatctggacaggaatagagtgtctgagtaattgtttttgatcccctgatgtcacctggaagattgtaagcattcaatagcttccttattttcagtttgagtcccaacacttcttttttggactaacgttctgtttaagagttttgtggccctactgatatttccagtaagggccaggaatccactaaatccatagtaagcaattgattcttgctaaggcctaatttaagaaaagttcaaatgtttaaaagccatgtttacttgtttgtttcacttgaaataaaaatagtaccaggcatgatggctcatacctgtaattccagcat

SEQ ID NO: 54645 - DNA, 1164 bp, Homo sapiens
tgagcacgtgtctccctcccaacccaagctgcgcgccgacgcacccaagttagggtcccaggctcccggcgcgggatgggcgctagggcagcggagaatggagggtccccgtcctcctccagctccaacgacagcgccagcgccccgccgtcccgccgcccttccttgaaggatgcccgtgtcacctgagccaccgcgccctctgcacaaccgtgtcagggagagggaagagggggagccgaggaagcttcttggccagggcgctggggatccgggagcgggggccgccggcgagactgagcccgggacagcccagagctccagcgctccagcgctctgcagcccgcccagagcgcgcagaccacccccatgccccgcccgccctcctgccacacccgcccccagcccggccccgccgcctcctcacctcgccgggaccactgcagccctggcggtagcgcgcggacatgcccccggggcgcacccgccgagccgcgtccctgcgcagtggccccttcccgggccccaggctgcgcgatccgcgcttcggtggggcggggagcggactgggcggaggcgccggcgaggctggggccgggggcctagctggcaacgccgggagagggaagcgtagcgcggaaaatcccagtgctcggccttcgaaatgcaccggctcattcagccccgccagctccgccggggactctgcctggccggcaaagaggatttagcgcggggatccgctctaagtactgtggcttggctaggggcgaggggcgcagcggaggagggacgtctcgcggttatgtaatgcaccggctttctgtgtccccagccaaaccgctctaggactgccggaccctccccgggaagagccatgacccctgacctcggcaagccgaggggagctcggtgttcccaaaaagaacttttcccctcagggtcaaagagcaagatctcgagaaaaaatacaaggcctcctttaggtgtatctggcagggatccggaccctgctagccaatccttcccatttcacagcacaggaaactgaagctccagaatgctagtgaaaagcgttatctcttggagtcaaaaggacctgggttcaacgcatctgaaaatctcataaccttgggcaatttaactctctgagcctcacttttg

SEQ ID NO: 54646 - DNA, 3052 bp, Homo sapiens
aagaacattatgacaatctattttggagttaggcatcatctggagagaatctagggtggtagcactgaattagatttggctgcttgctgactatggcacaacagcacattgcatttctccatgaattgaggtggacgtgtgagagggggaaacgtatggtactaggaggggtgtgagtgattgtggatgatgagaattagctctaaggtcccttccaattgcttctggctcttcaattccagctaagccaattcaactcaactaaacagttattgagagccttctgagtgccaggaagtaagttgggagtatgataatgaacaaaatggataatcggccctgccctaacagaatctggagagagtaagtgagatgcgaactaagacttagcaaaaccagatggtgacatccgcacttggctttcctctcggagtgtcagttttacaccggaattagccacgtgtaatgaacaatcaaagaaatggtactttcttaaatgctaccaaaatgtttttattcccaagttccaaaaaatgaccattgaaatgcattggactcagaatttgaagccccagctgaattctcttgaatgtacctccgtccctctgtccactttgggaggctgaggtgggtggatcacaaggtcaggagtttgagaccagcctggccaatagggtgaaaccccgtctctactccttcaccacacccgcatgcctattatgttttctgtgatattgaatcattttttcttaatttaatagtaaaatccgtatgcatatcttttattagatttgggaaataacagaatgtctgacttgctcagaatttcttgtggtgttaccctgcagctgttttccagtagactgttgtgtttatagttacttattcacctttgatagcaccatcttgtaatccattacagtcagagtggtacattttttgtcttctcattagcccctctctgacaatcaacattttgcacattaggtactacactctttgttcatataaatcacaggctattaaatcatctcagcacaaatattgccaactagcatgactcatttcaatactaaattgtttaaagttgacagtagttgtcttaatagttcgcaggcattttctccacattttgtagctacttgatgactcaatgaaaagaatgcagactttgtgacaatattggacaagttgttagctgctctgagtcattaccttatctgtaaaattaggcgattgcattaggttagggagtgaactgctcaacaatgggacaaatttaattctcagatcagcttggattggccctcacagcactttgaaaattatcacaaattggccaggtgcggtggctcacgcctgtaatctcagcactttgggtggaccaggaggtcaggagttcaagaccagcctggccaacacagtgaaaccctgtctctactaaaaatacaaaacaattagccaggcgtggtggcaggtgcctgtaatcgcagctacttgggaggctgaggcagagaatagcttgaacccgggaggcagaagttgcagtgagtcaagatcatgccactgcactccagcctgggcaacagagcgagactccatctcaaaaagaaagaaagaaagagagaaagaaagagagaaaggaagaaagaaagaaagaaagaaagaaagaaagaaagaaagaaagaaagaaagaaagaaagaaagaaagaaggaaggaaggaaggaaggaaggaaggaaggaaggaaggaaggaaagaaagaaagaaaatgggaaagttctcaaaaaactccagatttctggcttctcttgaaaaatcaacacctgacttccctagaaaaatctggcctcagagagtgcctgcctcagttgcacattcttctcacattcacaaatgagaagccaggaaggcataactaacccacctcaattcccttctgatagcacctgaagaccctgcttctggtgaaatctaccaggagatttaaaggaaccagatctagagagggaagctcttttaatggccgagaaaaccttttgaggaaacaggacaggagacctcatctacatcatcactttagttgttgatcatgttattatcttgtgttgtttaatatttatcacaatttgggttgaacaggtttgttttttaaaatatttgaggttgtggggagatggaggacaaagtgtttgctttgccacctctgaatccacctttcccagagctgctctttctgtttgttgacttttagatgacatatgtatgtgtgtgttgtggggaaacggtcttacttttggttgttagagagagagaaagaagaaaactgtagcctgagctgatgagatgggagcaacctttacattggatacctgctctttgctcaacagcaggccccagctggcctactttacttatttatgttagctatctggcccctctagccctctagccatctgaatttccactagataatgtctaagtcccctttcatcttcataaagctaaacatttctaagataatattccaagggtgttgaggctccgcaagcaggtattttcctacccctgtcctggcagaatatcccccagtagaaacactggttgtccatacctaacccttgtctgtcttcctcacttaaatttctagcacccagataagcccctagcacctagaaagcatccagtaaatatttgtagaatgaagtcttcaggattagcaattacctttggaaagggcccatcgtgattaacaaagcaaattagtatttaagaggacacaatatcttcttttttttttcaagatagtggatcttgctatattgctgaggctgaactcaaattcttgggctcaagcaatcctcctgctactcaacctgttgagtagcaggcactacaggcacgcaggcacagttacctacaatataattttgtcttatgttacccaatagacagggataatgagcttaaattgcattggtttaaatgttttgttgtttaaactttctattaacacgtgctgggtacaaacacagttaggcttttgggtttca

SEQ ID NO: 54647 - DNA, 1564 bp, Homo sapiens
tatatttcaataaagctattattttgtaaaaagaatgctatatagagtttgctacctttggaaagataaatgtatcctacattacatacaatataaacaaagatatattgtaatacgtacaataaaaacaaacaaaaaaaccctaaaaaaaatggcagcctctactgaggttaacactgagagacagaagtggaaatggtgactcacttccttgtgtatccttctaatgtcttagaagtctgtattatgtgtttgtattatctatccaaaaatttgaatcagaaaatttataactgatggggaagcatttcacagcatctcaagaatcacagcaaaaatgttttagatttggtaaacgtggtgtccctcaatgaaatggctgcaatcaaaggttctcaaatcagtgactccagagagcaaagcaaggactgagggacttggtggctgctctcatgggaaatgcaacactgccagtcactggtgcggccactgggagtctgcactgactggacaccctctggtagagccttggccccaaggcgactggtgattcccttcactcattcagccccacagaaacatataaaatagttgctcaaaccagtgtataacatggctacattttcaaattggcactcgctctactccaccaatcaacaatattgaaattgaaatcaaaagtgaaaagtaaagtcagttgctctctcccaaagggattctgatgcctgtgaaaagacctgctgacctgctggctcactccagcaaaaagcacaagaagccagctctgcggaaagtaggggaaagggcatctattgctctgtggggcaagggttgttaccagctgacctttgagagcccatgagtacagccaactacacacatattggtcttggggcttgtttcattacttggaaaaattccctttaaaggttaatgtcaagaaataaactctgttacattgagtcccatgactcaagtggactttgaaaaaacatctctggaatgctcttttctctgagtatcagcctcccatttaaactccgtctgaactgagggcttccaaaaaggtatatcgctgatctgcaggccagtaacatactctgttcagtgttatgcaaggagagtatgttttttgtcaacccagaactcaaaggcagggctaacacccatgtatcataaagactgcctcatacactaacattcaactattcaactgagagggggctcaaggggctttctgagtacctataatgttctatttcttgatctgggtgatggctatacagggttgcttgtgtgtgtaaattaaactgtaagcttataatttgagccttcttctgtatgtatgtcacctctattaaaagctgtatttataaaaactccattacagatctactgtggttctttaatactctcctatgacctgttccatgcctcaactcctctttcctgtctttctaatatacctcagtgtgaagagttctactttatacaccttgtatttcagaaaaggttcaattttttccaaacgaatcttgcaatgcttcaaaacatgttaatacaa

SEQ ID NO: 54648 - DNA, 1089 bp, Homo sapiens
ttgaaataaacattctaaatgacccatggtgctaagtaaatctacctcataaatggttctaaacatttctttttttaccaagtgaaacttctgtatgagatgtatgtaattatacatgttttaagaagcaaaattacaggtataaaactatctggagacctgaaagactatagcagggcatagcagtgtaaacactatttcctctgttctccctgattccacagccttccattgcacttacagcacaggtcacattctggcttgttttctaggtctcttgctgccccttagcactatgctcaaaggcctgcacataataattgcttaataaacatttattatgtggaacagggagttattatctcttggatcaccccaaactgaaaagtagcaatttcatcagccagtcttggaagtataggttaactgcttaaaaattaatcagaggttcatcaacaatattgacagccaattccagagccaacataacaaacacaaagtctgtcctgctggacctcctgaaactatactaggaaaaaagaaaaacctgccaaggcaaataatctacgtacgtactagaaaagaaacatcattatttcaccttttccctaaaaattattttctaacaaagtgctagcagcaaacatctcttctacacatttcactgaggggtggatatctctgaagcttgaggtcatgcatccccagacagggaaacaaaaatatgtgtcactttcactgagccctacagagacctccctcaaaagtcttcaccatctgggaaaaatgacagggtcccaaatgcaggcagtgagtcatactgctacttggatttttcaaacaggacatctgaaattcaggacaagttgggaattaattatcagactttgcagtccattagtacaactgaatgaactttgtggaaagcttaaaacagcatgttgagatttcagctagtgagaaacactctttctcggggcttagtttcctttacatcaagggccacagactcaaatgcttaaaggagactgtaagaaaacaaaggagcaaaggccttgactagatgtagagtcacagaatgataaggac

SEQ ID NO: 54649 - DNA, 627 bp, Homo sapiens
catacacataaaagcacatgtattattttcttctgctagcattgatggaattgttaacacctgcttggtctacctgctgggtaatccagcactaagcccaactacatttacagtaggaatttaggaggcaggaagggaggaaaataacgatgtgattccaaagaaattctaccctcataccaaccacagtgacccctgaagtatttgtagaatactttctttcctgagaataagcctccctcatcaaacttctcatcttcagacattgtcctacttagcaaaggacatgttgacctttactccccttctctacctcaaatgcatcaataattcaattagtattactgatacctgctgggacttttctctgagcttcttctgtgaactgtgtcccagtcactgtgtactggtaaatgtttaacaactggttctctgaaaataaagccctgattttcagtgtttgccagtttccacggtgtatatatatatatatccatgatggccagtttcaagttatcagcataaggatactgaaatgcagagttgggaagtcatgtgtataaacaacacccatagcctgtataagttggctttagcacaacgctgagatgcctggtttgctaggat

SEQ ID NO: 54650 - DNA, 2715 bp, Homo sapiens
ttaaactttcacagaaatccaaaacctacttaacaatttccctatatcgaacagcataacctctatgcaaatgcagtcatttattagcatttactgtacttactttgctttttgccatttataagcttcattaaagacacccacaaagaagtaaccagttgaatgagcttcagtcaagaaaaaccagctgtaaactcgacctacaaatttacatcccacagcgtcctgtggggaaggtacactttacaaactaccattatatatacaagctttagattgtgaaataatgcacttcggctttctccggtgtacattacaattacaaaccctcaactcaacctcccccttcgttgaaaaaaaaaatccacctccaatcctcattggtccacatagttccggcccacatggtatcagtgggtgtgtccctcccaaaaaaccctctcattggccgtgaagaaacagcttctaataggctgtgattttggggggtagttaaactccacgcctccagacttgcgctctccaatagacccgagacgctgctggctactctgtgattcaaagggcaggcaaccccagtaggacgcgctcagagaagcgagaggggtgagaaaggagagagcaccctcggtgtgccgcccactttatcctcactcctggaccccagcaaatgttcacacacctgcgttttcccagccaccaattagaagggcggacagagcgttcgcttattatatatccttgacctagggacccgctcaagcttcgtgtccaatcctcgttctactgatagaagcgagcaaagggcaggctcaggcaaagacctgtagtgcttgatgtcccctaggaaaagaatcagtcccgggaacctactctgtgcagtccctcgaccgcagacgcgggggcgcacggggcgtgctgcggcgcctgcctcagccgctcccagtcccgggccccgcacgctgcgtctgccttgcgcccgcgctcccctcccagcgggacttacgcggcctgttctttctccccgagtccatcctcctccgcagccggcatttcttggccggggagtcatgctgagggagcagtggctgcggctgcagctccggcaggagcgggaggcgctggggcgccgcgtcgctgccgcccactggaccccggctgcagacgtgcggcggctggactggcggcggatggaagccgttgtgcagcagcccgttcacagcggcggcgctggtgcccacgggggcccctggagagtgcgggaccgagcgctcctgctgcccgctgcggtcgcccatgccgggggctggcggggctgtgcgcgggccccggctcaggcggcctcgctggaggtcattctccggcgtctttatttccccggatcctccctgcggcttccgattcagcagccgcagagccggcgcctggggatggcgaacccggcgctcctcccctcctcctgccgactcccccacctcctctgcgccctgccccccgcgcgccggccccacggcgccggcctggagcacgccagccccgggcgcggaatcggggatccccgcgcacccccagccggggctcccgccgcccgccttcccctgatccccaggccgcgcgacttcaaacgcggcttcctcgcctcccagactggtccccgccactgagcatgcccagtcctgcccgccaccgccaccgacgagtttcaacatggggaatcaagttctctgggcttgcagagaggagatgggcgggttgggctttgtatggcgatgtgaaaaccagatgggtctgggagagacagcgaaaggagcgaaccgtttcaggaggaatacgggaggaagacaattatttgcagaggtgtcaggtttgctaatcctgtccccagtgagcaagatacctttgcaaggtcattcacgttaccctccccgctttgtgagtgtgtgcttacgcgcgcgcgcgtgtgtgcctgtgcgtttggttaagtgaccaaactacttagaggcctgaggggagggagaacaattatttatagaaaagttggcagacttggggagggaggggagtgaaatttctttgctggcacgcacacacactcaaacaccatgtggtctcatggagttgtcttttgcagggaggaaacctaggaatacagtgtaaggacagtgaaggacaaaactgtaggcaggattaatcggtgctgaaagagatcaagtaaacaggagcaattccatgctataaaaagcactttcctcacccagaaaggacttcaaaagacaatgtcatgttatttatagagtaaggagttgcctcttctaagaagggaaggcggcatcacgtggtgaccagcactacgagctttggagttagcactgggttcaaattccaactcagccactgagcaaacccagataacgttaatgctcaaggtaacacttctagcaataggaaacgggactgtccatgctcactatgcaggactaatttgggtggtgaataccttcccaaagttatgcaatctcttgaggcctcactttcctatccataatggggctgttgtgagaaaatctactaaaagtacctggtacaatcctggcacacagtaaatgctcagaaagctagttttccttattacgctattatgattagcagttcaccctttgtttcgacaggggaacaaaccatgcttacagccgtatttattgtgtgatttatttt

SEQ ID NO: 54651 - DNA, 400 bp, Homo sapiens
tggaactaggtagcgggcagaggttgatacagtttggagtgctcagaagaagacaggaagatgagggaaggtttggaactccctagagacttgttaagttgtgaccaaaatattgatagtgatatggacagtgaagtccaggctgagatggtctcagatggagatgaggaatttattgggaacttatttggagcaaaggtcattttgttactcattaacaaagaggttggaggtattgtgccctgccctaaagatctgtggaactttgaacttgagagagatgatttaggttatctggtggaagaaatttctaaacggcaatgtgtttaacatgtggcctggctgcttctaacagcatatgcttatattcatgcaaattttggaaaatttgcagcctgat

SEQ ID NO: 54652 - DNA, 751 bp, Homo sapiens
acttaccaaatttttcattttatgttaatattcatttcaagggcacagatggaattctttggaatgggtactaaatcttaagcacttcccaatcaagctggctctgcatctccctaagggaaaaacccagcagctggtgctgaaatgaaaaacgtcggaaaaagtacctttaaaatctggatacttttctgcaactcctctgccatcttccaagtccacattatcattatcttttcctgggatctcttgcaacagcctcctaactggttcaacagcatcctccctggctgcctctagtttctccaggagattaaccttttcaaaagatagatgcacattggattgcaccatgcccatgcttaaaactggttatccagtaagcatttcgtaatactcaagtcagtaacttggctaaggcttacagggtctggccttggcccatgcctacagattcactcccctgactcctccccatggtctctacccagccacatcagctttcattcattgttcaacaaatattgatttgcttgtcttgtgttagagagtcattgaggatacattagcgaccaaacaaaacacagttattctactcacagaacttagattttacagggtgggggaacaacaacaattgctagttgtaaaaagtataaaaatgaaattgaacctgcaaataaaaaaagagtgctcacttgagatacagtagccaggaaagtcttctttaagaaggtactattttagacgtaac

SEQ ID NO: 54653 - DNA, 1075 bp, Homo sapiens
atttttgaagagcctaggcctgttgtcttgtagaatattctacattgtttttttctgattgtttcctcatgattaatgtcaaacatttctagcacaaatactatcgggtgatattagcgatgctaagtatcttcacttggttaaggtatgtctaataaatctcttcagtgtaaaattctattttccctttataataagaaatgatctgtagggtgattctttgagatactaacatcctcttccctacaacctttcagttaattgtttgttttagcatcttgcattcattagttttagcattcataagcttacctatatcaatttttagactggcagttgcacaatggggatgcagcgagggaagtgaccctccggatcccgggatgccgagcctttttctgccccgtagggacaggactgggaagtggctagcccgccattcctcggcccgtccttaggggagtcgcaggactaagtgcagtggcagtggcctcacctcgggccttcgccacatctttattgcctcaaggacagaattggagatcggtgtcccagtcaacagcgtggtacttatgacagccgcgagaaagcgcactactaaagcccggctagcagagctgggaggcaaaccagaccgtcagcaccagggcggcccacgcctgcttccgcccattggctgcccgcgtttcaagacccgcccccatattggagagcttcttccggtagccactggaaagcccgcagcgcgagccggctacgctccctggcggagctctggacgccccacctactcccagcgttcagtgcggtgccctggccgccattgtttgaatttgaaaacggtaacatcgcagtgctgctcgcgggtctggctagtcaggcgaagtttgcaggtgaggaggtgacccgcgggaatgtgtggggaaggaggtgggtgactgcgcatgtatggggcctaaggtggggaaacggctttggcaatgtggacatgttccgacagggctcataccccagtggaggttactgtcaggaactgggttgcggagcgatgcgaacacggggtacgcagcgagga

SEQ ID NO: 54654 - DNA, 616 bp, Homo sapiens
gaatataaaatgatgagcctatagtggtgtcttggggccagaggtgaactgaatttgtgttccatatttctttggccaaaggtagtttatggtagcaaattccctacatttccaaactgctgactcgaggtgttctcaggttatacctgtgcagagatgaccgaagcatgtagggctagtcaatatagcagtggctggaagaacaggtagggttgagccagccgatgtgacacacaagggctagctgataaatgcattcctacataaccatcgcagcacagttaatcagataattctccacagtatcattccactgaagggttagtcctattgaagaagattccagtttataagagtcattgaaagaatcaataatacctggtggatgacgcattcatctgtaatctagacttggctgctactgagtagcttgtaagtctttggcagataattctatctatggacaaaaagggggaatgaattaatttgctcctctcgagggaaaactatgtgttgaatatactgacccaattacctttgaattttattaaatatgagaagctatttggcatagaatttaatatccactctgcttttttcagatctccattgaaat

SEQ ID NO: 54655 - DNA, 1660 bp, Homo sapiens
tcatcacaggtagtttgagagcactgatgtaaactatagtcacacttttgtagtataattgattattatcctcaatagatcatttacactaagtcggaaaaaagtggaaacatcagatatgtgggatatgcgtcaccttgtacatttctcagctggaaaagtgtaaaacatctcaattttgcacctcccttttcaaacatgtctttggctaaatcaatgttggctctaaccgctcgtcctagagcgagtcccgccatcttgtggttgaagatgttgactgccacagagaatagcgggctttgacatcaacagttctgattgggtaaaaagaccctcgtcttggggtagttctcttttgaagtcctagagtccgtcacacacaaacgccttcttcccggtaagtccattgtaaacaacggaatggactttagggaaaggaaaggaaaacgtgttctttaagactctttaaatagcgttttcacccattagcagaattctctgattcatgagcagcactaagtagataccgtgtgcgtgcattttgaatgaattcatttctacactattttataggagtattgaatagttgggaattggaacccctccagggggaaccaaacattgtcgttcagaagaagacaaagagagattgaaatgaagctgttgatttcaacacacaaattctggtggtagatgaaagcaaagcaagtaagtttctccgaatccctagtcaactggaggtagagacggactgcgcaggttaactacagctcccagcatgcctgaggggcgggctcagcggctgcgcagactggcgcgcgcggacggtcatgggacttcagcatggcggtgtttgcagatttggacctgcgagcgggttctgacctgaaggctctgcgcggacttgtggagacagccgctcaccgtgagttgccccggcttcgcgcctggccaacctcatgccacccagaccatcgggccacactccggagtaactatttcctgatgggtctcggtcaggtctcccagagtctctgggatgtccctggaggctgatgcccgccgaggtgttggtctgattcctagcgcgggaaactcgaaggttctgggggttgttatctggttcagctactttcctgcaatgagggaactgaggcctaacgagggcgagggatttgcataggggcctacagctgataggtgacagaagccggagctggactccaagggtacaatcttctaagcttctaagttactatcagcccttcctgattctcacgacagtgtctaaacaaatactggaatttggggcacggacaggaagcgccgtggaggctcggagaaggaggaggacgtgggagtgttggaacaatactatctagacagagagagggtaggtgggggcagaggacatacacagcggagtggaggtggaggaggaggatagcatggcccaaatcgaagggaagcgaaagccttgagagacgagaacctgttttaactattggagttagtcatgggttctgtattccgtagactgtaaagtgttggaatagagagattaaaaagaatcaagaggttcgtgtagtaacatctgctcctcagagacagttttcagctcattgtgagttctgattactgatactgttcagaggtggtg

SEQ ID NO: 54656 - DNA, 1318 bp, Homo sapiens
agtagctgggattacaggtgcacaccaccatgtccggctaatttttgtatttctttttagtagagatggggttttaccatgttggccaggctggtctcaaattcctgaccttgtgatccgcccgcctcagcctcgccaaatgctgggattacaggcgtgagccaccacacccggcctagggtaaatattgacagtactagtgaacataacaatattggctgagctcaaatcattggttccttgtgttattgccagtacttataaataaataagtaaacagtgaaaaaccactgaatcaccacattttcgagttggaaatctatgttgtgcaacagttcatttgtcaaatgtggggaaatgaaaaactacaagaagtcattcagttctgtagtcacacagggttaggaaagttctgattggttgtctgtcaagatctctgatgtgccccaggtacctatgataaaagccacaaattaatacagtactcaaggttatggcagtcttgttggcctcacatattgtttctctccagaggtagcaatctctgtctttagaagtttgcctaacctttttaccagcctcaaactgccaatacagtttctgtggaagtagcacccccagagttgggcactatagctactcagcaaattgctagtgaacttgcaactttttcacctttttcttcatcttaatgaactaggaaggtcattttctagatggctttgcctgaataagcccacatacgatactgtgacctttgatgggaggagctagcatgtgatgttaaggccaagtccatggaatggacagcaatgcacaacagataattcctcatgtctcacgacagtggtaagattcccagtggctgctttggtgagagcttttaattggggttcttaggaacttgtattattatttaaaccagagtgtgagctcctagagaacaccggctgtcatggtccttttttaagtactccactatcttgcgtataatgagtcctccttacagtttgttgagtcaataagtacatgttgaacttagcatatcagggtacagcataggggacctggccaaattctgctcgttgttagtcaccagctggatgtccacattcatcaggaagtatatgccgtgagggaagtggggcagtggggcaacatgaggaggacagtggcactcaagacagttgacaccaggacaccccaccccctgattccattgggaagttcaggaaagctcctttcgtttgatgggcatttttcgcttaattcctacatttttcaatttaagaattctgaaaagtaaaaaattctgtca

SEQ ID NO: 54657 - DNA, 1382 bp, Homo sapiens
acaacattactgctaattgaaaatgcacctggtcacccaagactgatggagacgtgcatctgatgaggatgtacaaggagatgaatgttattctcatacctgcttacacaacatccattctgtagcccatggatcaaggagtcattttgaatcaagtcttattaagaaacacatttcataaggctatatgccgtagataacgattcctttgatggatctgggcaaaataaattcaaaaccttctggaaaggattcaccatgctagatgccattaagaacattcgtgggtcattggaggaggtaaaaatatcattaactggaatttgaaagaagttaattccaacctgtgtgaatgacttggaggggttcaagacttcggtggagtaagtaactgttgatgtggtggaaatagcaagaaaactaaaagtggagcctgaacatgtgactgaattgttgcaatcttgtcataaaacttgaacagctgagaagttgcttcctatggatgagcaaaggaagtggtttcttgagatggaatctactcctagtgaagatgctgtaaacattgttgaaatgacaaaaaaaggattttgaatattacatcaacttagttaataaagcagtaacagggtttgcgaggatgtactccaattttgaaagatgttctattgatagtaacatgctatcaaatagcatcagatgctacagataaatcttttatgaaagagttaattgatgtggtaagcttattgttgtcttctttcaataaattgacacagccatcccaatcttcatcaactaccaccctcatcagtcagcagccatccacatggagggaagaccctccgccattaaaacgattatgactcactgaaggctcagatgatcattagcattttttttagcaataaagtatttttaagttaaggtaggtacagtgttttttagacatcgtgctatagcacaattattaaaccacaggataatgtaaacataacttttgtatgcactagaaaaccaaaaaaaattgtgactcactttattgtgatattagttttattatggtggtctggaggtcaaaaatcatggacctgtgtgttctctcctgggaagtctttgacattgccagtccctgtccacaagaattgttaaatctccagttaatttgcatttttctaatgatcagtgatattgagctttcttttccagatgtttgttggccacatgaatatcttcttttgagaagtgtctgttcgtgtgctttgcccacttttttgatggggttgttttttcttgtaaatttaagttccttgtagattctggatgttagagctttgtcagatggatggagtctgaatggcagttacttaaaaagtcaagaaata

SEQ ID NO: 54658 - DNA, 11271 bp, Homo sapiens
acacatggacacagggaggggaacaaaatacactgggacctgtatagggggtggggtgggaggaaggagagcattacgaaaaatagctaatgcatgctgggcttaatacctaagtgatgggttgataggtgcagcaaaccaccatggcacacgtttatgtaacaccgctgcacatcctgcacatgtaccccagaacttaaaatttaaatttaaaaaagtcactagttaagccttaatgggaacttcgtaagaaatgcgggtttaccatgcagaaatcattctgaccaccaggggtctctttctacacaccactgggactgaaagctcgctagaattcctttgtgtctttatggctctcggcctagctgctcagtgtggtggtggcatttcgtggcctgtcacctgggagcttgtcagaaaagcagaatctcaggccccacctgagaccagctgaatcagaaatctgcattttaaccagatccccaggtgatctgtatacatattaaatactgggagtgctgttgtacgggacatttctaatctgcaaaacttggaaaacaatggaaaaaaaaaaccctcctatatagctttttttttcacataggacatttccaccacacttatagaaggacttagaggtttagagtttgattgcctttattatgaatataaaatgtacatacaatacaatatacatttatacatttacagtttgcatttcctttcatcttttttgagcaaattcaattctgcatgtcccagtttgccgctccttccactgatttgcacttacactcatgacgttctcttcacttgggtactctgtgtactcggtaaaaaaaaaaaaaaaaaaaaaaaaaaaaaatccagcctgggggtaaaatagctggcttcactgtccttttcacagaatcactttccttccattgtttcctttcctgtccctacatgccttcccttgcttcattcaaacttctgcattaaaaattcaggagaaaagagggctgtgataatcagccctctcttaaaaactcttacatgagcgaatgacacataagtaggcacttgaactttgctctttcacctggtttaagaactacctatgggtgggaaggctctgaaagtgttatatacaaatgaagctctgctcaccagatggatgatcatgaaggtctgaatatcagtagcgtggcagtaaataaataaacaggaatacataaaaataaataagagtttcactaaaggaaatttaaacacctataaccctgtgctttctcaaaacttcattaggtacatcttcacaacacgttgataaatagaaactagattttatggctagtgtctcttctcttgggccatgccttcaaaatgccagtgaacatttactgattaagagtctgtcgtttgcctcagaatgtagctatgcgagaggtcttgtaggagttctctctgaggctgtcgaatattgctttggttccattctgccagtgtagcaccagatccatcggcgtcttcccagcctaatcaaatgagataaggaaagttgactttcaggtgggtgacatctgtaaattcacattctctgtgtgtgtttcatgaggtaaggattaggtatatgttataacagtgttttatggtttccaccaggagtgatctgcagtttatactcaaaccagtccttcactgtttctcagagggatgcttttgccattttagagcaaaaatctttttcacgtgggaccatcccaggtattggtaaaatcccttgtccctagacactatgtgtcaagagcacctcaagtcattttgaaatttataaaatgtctccatacatcttccagtatcctgtggaatggactcccggaggtgggagcatgcctcttggaccaagaatcagtgcctatccatttgaatgatagttctttgattgataagaaatgatggtaaatgagctgcatcaataacttggcttaaggacttaggtactgcttgggtactattactgttcctgggagcagatttttcataacttgtcagaattttcaatggactctcccaggaaatgtatttttcttggagttgatggcaatgacacatgtgaacaaataatttttgagacgaaattttgatttcccttatgcacgtgtctcaagatttaaaaatattaaaaccatgtcatctctcaattctcatctatagatctgagaagtccaaaatttttccatctctattcattgagaagtttctttttaacccagcgactgcaaattggcagctttgagatgcaaaccagaatagagacctgttttgttttgacccaaacagaacttagattttttttaagattagtatgaattggcaacagttggaaaccaagagctggatttgtgacttctatgaaaaaatcagaagagttaaaaacatggtacccatggttccacagagcaacatagactgggttggggaagggccacctttaaaagagttatgtgcacagaccctgacagccacacattgaagtcacttaggccatctgcccggcacagtgaggtcagtctgcagtcagattatgagatctgtaggtatttaaattagtggccctataaccttcattttggaacttccccacctctgtagtgtctttctctaggaacaatcatcagtagacatgaatatacagttttggataatgagaaaatattgtatgctgctcccaatctccttaagatggcatcaataggttattgatctttgggggaaacatcaatccattgggtcaatgacattaatagttccataaacctgatgctaatatctaactgataattcagaaccctaagccgtatttgtatattttgggctactcttccataaattccttgcacttctctccattgaaatttatattgtgatttttctggctacttacacagtctccctaaacctgtatgctatttgtctctgctggtagtgtctcactgcctgaaaaaaaatcttcacattttctgcagctttcaagatttcatttaacctgctctttttctgatagtttaaaaaaatattagataggatcaattccaatatctagactgaggaagccctactgttaacactttcccatcccaagcaatcttcatttatcaccattctttgatcctgtcaccaagccagatttgttttaaaagataagatattcctctcagtctttgcaacacaaataaggggagaaaattatttgcatttatatgatgactgagtttccctccccccccccccactcttttttgtaaagtgattcttcaaaagcttctttaaaattatttcttcagaaatttatacctgttcctctgggcaatattttttaagcttatattagatggtgtttgtctggaaattgagaccatgaggaaaagttggttatgttccctgcttacagatgaagttaaattaatatgtacttatacaagaattttcagggcctaaatataggaaattattttgagagatgtgaagacaaatccaagtggagaatggatagaaattatctgaaaaaaaatacaggcaaaagcacagctacccctggaagaaaatggtgacatttcacattgctgtaaggaggaaagggactttctgaattactcagattggatattgattaaccttagttcactggctgcactgacccttgtggaattttaggacattttggaaatggtggatgcctttatttctaacttcctcagcccttgcacagacagaaatggccaaagcagattggacttctaggtgtttgtggggatgagcaaattttgactatctttcatttccaagaccaaattgtaaaagaattactatgcactgtatcaggcactgaggtcatagcagtatctatgacttccctcatctctggccatgtgaactgggtcctagccaagataaacactgtccttggggaaatgggcaggggcatttagaccatcgaagacccctcaaatactgccattgtgggagtcgtttcacctatttaagaaatgctcctggaaattggaaagcttgcaagcggtgtttcttgtttccagtacttacacagttcttgatgttgagatccgcgccatacataatcaggagtcggatcatcttatagcggttcagtctcaccgcatcatgcaacggggtatctccttcctagagaagcagagtcaacaggttcaaggtgggtctgaggccaggaagtgggtcctgcaagggcacccaggcttgggggagtgattccaaatacaaaagcaatgaagctttgggaaacccgagcgtgtccagctactcactctgtctttggcgttgaggtctgcctcacaggcgataagatgctccgcgcactcatagtggccagtcctcaccgccacatgcagcgctgtgctgagcaactggaaaattggaaaacgctgctgattcgctaggaatgaggacagaggctgtcccagaccccaagacatgtgcgagggggagaagtggtcactagggtgcctgcacacagcatgggcctccagatgactttaatggagaggcgaggttaggagatggaggggtgggggaggagggaagggcgggtgggggagaaggaggagggggagggggaagagtgggagaagtggagaaggatgggggacagggagggggagggggtgaatgaagggagaaggagaagaaggaataccttatctcgggcgctaatttttgctcctttattcagcaacaattttaaaacatccaggtttcctccacggcttgcccagtggatggctgtggattcaagctataccgggagggaagacccgacaatgtgaaggagaatgtggtctggggaattagaacctggttgctagggcatccgtgaaaataatgagttgtccccatctagattgacaattctaactggagtcgaaggttcttaccaaatgtgttagctaaattacatgtgtgtgtgtgtgtgtgtgcatatgtgtgtcttattaggaggctcttaataaatctaataatgttttaaaagaataagaatggccacttattgagacatttctcatgccaacatggtgctacactttagacaccttgattcttccagcaacattttgaggtaggtgttgctatgcacattttgcagataagaaaaaccaggttccaaaaagttcaagtttctagcccaaggaaacacaactaataagaggcagaatacacagtcaaactcccctctgcctggaacttctaacttcttttgtcaaatgtacacaaaagttctaaacacatgtatttaaaaattttggcagaataaaagtagtcccttccaaaatattttaatctggatctgacacctcatctagggtccctgtcgctctttctctacttctgtgggttttctgctcatttttgctagcacagcctctgtacctcaactgtagtcacttgtgtctacagttgtaacgtgtatagttacccctaggagaccctctcctcactgatctatgtggttggtatgcccctggccttaatcccacactcatgatttttagtttccatgcaaacttcatattttgtttcttgatttttttttcaatgtgtttatgttttggattcaattttggccaagtcccttggatttctttgatatcccgttgccgctttgctataaagtcaaaatgagctgcatttaaatacataaagaattttcccagctcaatcttcagttcataaattatgctgcatactggtcttcgtagaaatcacagtgattgaattattgaggtctgaatagcagctactttccatagatgcaattcatttcatatgcagtctagccccaaatctcattggtagcaattggcatctatcatataaagtgtgcagctagagaattcgtatatgttgctggcagccaaccataagcaggctgccctgtgaacaatggagggacaaggctgttgaaaggcaagtgtcgaaaatgaatgactaactcgctgatgaggatattgaattcagtttaacagctttcacttccttcttttccctgaaatattcctctattttcagtatgtatggaaaatattttcacatgacctactctcatctcccaactttcctttatttggagaaatgagcttttgcctagttctctcagatcaattttcaatccaatcagctcggttttgcattggaggttttccggagcttcatatagtctacttcttttggctcattcccaagcaaagaaatatatttaccatatcacggaattcgatctgggctccagcttccattaacttctccacaattgccaaatgtccttccaagcatgctctatgaagagctgtccgtttatactatcagaacagagattttaaacagagatagcaataaatataaaaatgtgtgtaaacccttttaagagctatgaagctggagattctgatgacctaactgatagaaactcaagtgcttctttatgaatagaaatgtcaaagttaactaaaattgcagaatcagaacaattatcctgcaactaatatttgagcttcctccaatatacatttccaagggctcaaaggcctacgttgaggagtgtgaacttaaaggctcaaaactatctaaatgctgacatctccgtttcttctatcttgcaccttccttgttcatgtagcattaccatgcagatcagacagctttcttgcatctgggactgttgctagactatcaaaaagtttccattcatttttaggagaatgggagacatgtttttagttcaacttcagaagcggtccccaatttcacttcatgggggaaagaatacaaaaagattagtgatttctgataaattggctttatttgaatgggctaatgaactattagagctggaacaactttaggcgttatttcactccaatgccccatgtttacagataaggaaaccacagcccagaggatgcaaattagctgctcaaaaccaaatagccaagtagtggtacaactggcccctgaactccaatctccagatttcttatctagtgttgacgtgcttggttttaatcaaagatgatgctaataatatatctctaaaggtgactttttggcccacattaaaagtcttatcccaagaatctaagaagttaaagaaaaactgaaaaatcagccagatgtatatgagtgcaaaaaacaatgcaatccgtatcactgatctaatatctatttattttttggaccactgaactctcctattaggctcctggcatacacagcaacagctggggaaactgtttcaggtggaaggactttggcactatattagcaagactggagtaaagcataagaaacataaaattaatgagctggattttgcagtgctttgcatgagtcttacctcatcacaaacatctggattgttcttgtctgacaagaatttttctactactggcagtttattctccagagcagccttcagaaacgtaggcacatccacaggttccgtctaaagccaaaataaataaatatatatatatatatatatatatagcatgagagttaccgtgagcttgccagcattcaatcaaaccctccacagatatttgctcccctgtagcacaacactggacatgtattactggaaaccaaaaaaaaagcccttacaatgatttcaggttctggttcctttacaactggaactttagttttcctgtattttttccttttcttcagttgaatgattatttcaaggtcttctaaattttcaagctttgatctttgttctagttttttctttttgagctaaaaaagaaattcgtatttcaaaaatatggtgagttctactgacaagcattctggttgtgtctaaactaaatctgcaaggtctgagataaacatgtgaacagtttgagcaaaaacattttttaaaaattatataaatctttgacttcattttagggatttcttattcagatatttatctgggagtctaattttcagctaattgccatcatctttacttctgttgcttgtagaatcagcccttgaccaattgaggacacgatctggtctctaagtgatgactttgtaattaatgccataagcaagtcttagatttttaaaggatttttaaaattatgctcaaaacttggtttaatttttgagcatgataaaaagaatctaacaataaatgttaagctctgaaatatcaatgtcattctctttcactaagcagagccttctaaaacagactgtccagggaccacagctaactaaagcaaattttatctgtgttagtaattaaggaaaattcacccagaaacacagattgtgtcaacacagatagcagacagttaaacaatgatctatggaccacagaccatgttattgagaaaaagagatctccgttgcttgggattaactacatggtgtgtaacatcaggaattcactggacatgtgtatctttcaatcaaaacatggtcacagcacatttattcattgattcagaattcagaggtcatagtcttgtcaaagagttatttcccaaaacctgttccatacaagttgcctctttacgggttagaatctggtaaagagacatcttaatgattgggtttgtttctctcttctccttccctgacatttccattccctaccccagccccaacatcctactagtggattccacagatggctctcacctctgcctctcgttgtttctcgcttttccactgttgctcccccagggtcacagggtgggctagaagtgtcttcagatcctcctgcttctctaaagtaacagcagcttcatactctccatctctgaaatcctcaggaaggaattcccctgcctccccattgccattcttctttccagtgacctatgagggaagaagatggcagcgtcagaagcagcagcctcgtcctgggtcattcttcacagacaatgccgcaggaggctcttggtccttctcccctgggaacagccacctttgagcagtgcactctcagatctcaagctgcgatgcacactgctacaattgtcccagaattaccttcagatgcttgtcctactctcttggttaaatcaaagcttgggttaggttgacagattaaatctacttttaatctgcttaatcacatttcttttaggaaaatcaaaaaccttctctgcttaattaaaactcaactttaggtacttttgatgagtttcgccttattgtaaagtttccgggcttacattctttcaataacacttcttccctaagacattttgataactacacgtgattccacactgtagtaataaaaccaaaggagaagatattaaataggaaatatgcagagaattcattactggtagctccattttttttttccaatttcacttgtttcatcacatcaacctttttccatatatgacattttcagagttcccttgcattacacctgaaagcaaagggcatttcaattttcaaataaaaaccaagatgaaccagttttcattttataaaattaatgcatcttacataccagttcctctactttcagtaccatcatgttggctgaaggagtcttgtatgtttttctgtcgtggaaggaatccctggagttggccctgctgggcccctccacaccggtcagcttatatagctggggccgggtgagataatcttccaacctgggaaccgaagtaacactcccacccccattaggagccaactcagaggcaggtgaattttcattccagactcagtgtctgggaagctgaagagggaggggaggacaagctaaccctgctgaatatgtgaatcaggaagaaatgtgagagggccattcctttggtggtgatcacatcgctcagcaatgcaagtcatcctatttgtcaagagtcaggggacagctgtctgttgacattgcaccacatcactgccctttttttctttgtcagctttcatatgactacctatcaagaaaatgtagatgccctacatatcacacccccagtaatatctttctgataagcagacttatcaacacttcacttaggggaaacttgtcccaggacatcctattccctgggtaaacagcctgaggggaagggatctgggccctaaaggcacttgtctatatctgtttggaattctttggagtgatgtctggggctaaataggccccatgacatgccaccttaccatcattataagaaattgaaagcattcagtaatgcacttttcttttatgatgtcactggccataattagcacatgacatgcttaccgtgttctaaaacagcataataattggagcatttttacttcaaaatggatcagagtggtcaagaaatagagtaaatgaaaccagctatcagccgggtgcagtggcttacacctgtaatcccaacattttgggaggcagagacaggaagattgcttagcttaggagttcaatactagcctgggcaacatggcaaaatcccatctctaccaaaaatactatatatatatatgaaaaaaatgagaccagttattagcaatggcaggactctgattaggtcattgagctgaagttctcaaatgctgtggggaaaggaatcacctgtgggagcttgtcagaaatacagatccctgggccccactccagggaattctgagttgatttatggtaactcgtaggaatcatcttgaatttcaaagcacccagatgattctgatgcatcaagatttgagacacgtggctggagggataatgcactttgcttccggaagggttgaaaaaggtctctatttctggtttctaatctttgaggtgtaaattatgtaaaaatactggggtctttttatagtttcaggaaaaactgggtttttttcagtaaaagaaaggagagaagaatgggagaagggaattgtgaatggagggaagtgttaattaggaagttatgtttgacctttgtgtgtctatttctccccaaactcacccaatcaacaaatgtggctgccattctcctcttcccccttgaatgctcagtcagtggatggtgtttctgaaactttgagaagacatcgactccccaccccaagacaaaacattgacaaagagggaccctcccagtacctcctgtatcatatgttccggtctcctaatattctatcttaaaagggggttaattaaaggaaatctcctgggcttttctttgagatggacacagctatcactattttctttttaattttttccttttctctttattatttatttat

SEQ ID NO: 54659 - DNA, 2755 bp, Homo sapiens
tgattgtgatcttcagaattttaggcatcagggattttagactttagggattttgatttttcgtgatttcaacatttgggattacagcgttccagactgtgtcttgcaagattatgatccaaacctccccttctagtaatatagtaatcacgtgatcaataataaatgctaccttgtggctggctggtttcattacaataatagtgccatagcaagtgcctagtgtcagtctctgtagctgtcaggaagggcattcatgaatgccagtggctggaagaaccataacaagaggaatgccataatcttgggctcattgatagcaccatccctacaacaatggccactcatgggcccattgcccaagtactgaggtggctgagaggagatgctggcttagatccataggacaactcatcctgcctacctgttcagtgcctcctcttcaaagatacaggtgtgttgctcccatttccatgactctttcgcaaactttcttttatctggtctttcaatctttctcttcccaggatccctactagccagccaagccatttttcacttctctaggttctgtgtatgtctgtacctcaagctgttttttgctttatttaaactgaatgaccaattacactgctgaaagtcttgctgactgggaggattttccttttgcactgtcctttgggactacctctgagtatttctgaaatgtgatagctgtacttactcagatatccatctctatgccaggctggagatttttctttcctctgtcagttgattgcaggggaatctccatgaggtcataggtgagaactgaggtcgaggaatctgtgcaatagagctaggtaacatgaaggtctgtgtaatctattcatgtaaacttatttgtaccttttgggtctgcttggatccaagtctaaatgtaccatttctattgtacaatggattgcctgatctcatgaagtggtgaatctgataatacccatctcatgatctgtaattttatgtcccatgctcaggtacttcacctctgctaaggcccagaactacaccagatgctgctttgcaaatggtaactatctctctgccatagatggcatggccttactccagaacccttgggtctgtgatgtgactcttctgttgaaccttggcagagactccacacagaatttgtatctgccatagctatctttagcactactgatctgatgagtcatatgtcctgaatgacagaacacttttcactgcatcacagcctgaatctgctgcagattctcttgctctggtcccactgaaagctggaagcattctgagtcactcaataaatgtgttgagaattagtcccaagtatggtatatgctgcctccagaatccaaggaagcctatttagtgctgtgcctgttcttagtggtaggagaagcaaagtacaacttgtcctttaccttggatgggatttctcagcatgactcagactgttggacccaaaaactagaccaatgtggagagtatctgaatctccttgggatgtagctccctccctctggtatacatgtatttttactacagtgtccaaactacttgccacttcccacttattaagttcaatcaatatgaggaactgaatgatgctctccggaatgtcaatatgatcaaggccctttggacttcattgtaacagagaacaggagatattcctgggaactaaccctagataaaacagtggatatgtgccactctccagcctgaaaaaaaagcaagctatttttgatcctctttattggtgtttgttgaagaaaaaggttttaccagattaattgcaagacctagtagacgctccatgattattttatagatgaagaaactgaagctatggagggttataaaactccaagcgttgaccaggctagggcaccacactacaggatcagagacatctgggccatcatgaagtagcccaaagttacctggagagagagaaaaaaatgatgaaggaaaactgctgacagattttgcttgctgcacagagaatcacagatcctggcgctgagggtactttggaagtcacctagcacaacctcttaccctgacaatgaagtccctctgaaacagtgttggatttaaggttatgcgtttcatatagtgaggaggaaaaaacacaggtgtgcaggtttggagacatactgtatccaacagctattgcagttaataaaacaccccaaaacttactagcttaaacaacactttttatattttctttgaacctatagggttggctgacgggttatactatgttgagctggaatcagaagggcctgcttgctcatatatctgtagtcagctgcaggttggctagctggatggcttgctgatcttagctgggctctctcactcatctgtgaacaactggactggcctggtcgttctctgtctgtctcatcctctaggctacccaagcatattcttatggtaaagtcagagaaacaagatgagtataagggcaagaagtataattggcttgtattccatatgttagcaaatggagtaacaatggctcattagccaaatatgtcatatgagtccaaagtctggcagagcagaattccctggccacaatgggagcaatgaagactcagggccttgatgcaggcaatctaccacatataactcaattccaatcccagccatggcacttatcagataactcactcttctgagccttagtttccctaactaaaaaaaataaacaataata

SEQ ID NO: 54660 - DNA, 849 bp, Homo sapiens
ttctcaattcctcagccagctgtggaagtgtttgggggaatgtcagaaaagctatttaaagggagaatcagtgaggaggtctcactccaatacacatacactcacacatgctattaatttttcctctttcatctttcttccttctaggcttcaatgtggatatgatggctggagctccagcagccatcctgtgaccctgagaacaagccattcattgaggctaatgaagcaggaagaaggaatcctgagtccttgggaaacaaggatctacctgaatagctccgaatgcctacttctagatgtccttttagaaagagaagcacacccttgtgtatttcagccactgctatttaaggtttaacctaatcatgatataattggtttttcttggaatgattcagtggtaattttttcttccataagaagcaatcccaacccctaccactagggggtggccttgccctgtaggcctcaacatgacaattacatcactgcatatcagagtccaacatcagtgcattctgtgtaattcagtctcaaataacaacgtgcatgtgacagcagtggtccagtctgagctaagctgtgccaaactccatccagttcctttagcatgagatttggatctcatgcttttcttctcttttctatatccaattcttcagcttggacccaaaaaagcaagccccaggaccaaaaaagtatgcagagaagcagctctgactctagcaaacacacagtttgtatttccaaacagaacaatgagcttctagtctgaacaacatcccatttgatggtaacttgatactttcctctttttgtttttccagcaagaagcaatgggtaggt

SEQ ID NO: 54661 - DNA, 582 bp, Homo sapiens
ctgcttcacaagaaatctatacttgtttcaatataaaaataatgtttaaaagtactatcaagcatcacagtttagagaatgggcttcgaagtcagaaaggtcagagtttggcttgcgtctctgccaattacttgttgttggacctggagcaagttctttgacctctctaggcctctgtgtccctcatgtggttgttgaccacgtggtcaatgttccatagatttagcaccctgagggccagagtctatcttctcttcatttgtgtctcccacacagacaccagaggagtgtcctgtccgcagaaggcccttggtgtgtgttcattcctctacatcagacattagtgcacctagggttatcccgtttttaccactagatggagagcacgtatcctagaagttttaatccattagtaagtgagagagcaaacatttgtctgtcttgtcttcaccaaatcaacttattgaatgatgacagaatcattaaaactagctttcaataaatgcaattataaggtaactttataactttcagaactatttcttttttttttttttttgagaaagtgtcttactctgtcac

SEQ ID NO: 54662 - DNA, 3380 bp, Homo sapiens
tattcctcaagggttacttaagtgcccattatgagtatggagggcacatagctaggtgtggtggggaggagatatagagacgcaggaaaaatggagggcatgctcagtttttggaagtgtttgcttcctgcaagatgaggtttgcggacctatcaggagagcctcttgataaagactcctgaacttttccagtctcaccagagctgcagacactcggaggcaatattagtcttacagctttcatttctcccatcaccagagctctgttaaaagcagactcctctttaaggaatccacagatcagagagggtacagcacatgcacacaactgacccccaggtcagaatgatgccagccacaaggggggattctgcttgggggagcaggaagactgcacagagatggtaggagacggctacaggagctgagtccaacaaagtttgacaggtggaggcggctaaggggtattctggcagagaacagagaaggatcaaaataaagtgtcaaaggacagacacatttcaggtgttgtctgtaaacggaggctttggggtgagggtagggaagtggaggggagactgaaaaatggaggcccagctattgaggactctgagaatgaggcattaaggctcgaggccatggtgagtcactggaggatcttcagcatcagggcggcaaggtcacttctggtggggtggcgggggtggggtggggtggggggactttgcgattagaagcaaagaagctggaggcaggaaaagaaactgcgagctctcgggtggagggcagcttatacgggaagcctggacttgaccatcgccagggaggcatactgacattcgagctgccttccatctattcaagggcacgcttcctccgtctgtggggggagaaggtgccccctcagaggctgtacgattcgaagtctccggcctgagaagtttcgaatttctccttgccaaggtcgggccactacaggtgggagactgcgagccccgagcgaaagcttggcttcacgcccgcccggggcagccgccgcggctcgtcccctccaggcctgggcaccgccgtgggccgtgcccggcaggacgctccgggagctgcgcggcggcggctcgaggaggcctggcgggcggcggcgagaggctgtgccccagtttgtgtccaatcagggagtgcgggctgtgccccgagccgggcagcaatgcgtaaacaaacccacggtaactcctccgccccctcggcgcgctcgccccgcgcccgccgccgccagcgccgccgccgccgccgcgggctctgctctcctcgcgcccgcccgccgggccggcccagcccccgccccgcgccgctcgcacccccgctgccccgccccgcccccgccggcgcgggctccctcacctaccgccccacgcgcgcgcgctcgcgcaccacgcgccccgcgcggcccgcccggatcgtggcctctcgagagcaaggtaagggcgatgcgcggggacccaggcggcttccccgcccgacgcggcccagggaagtttctggcgtggctgttttccgcggggccgggggggaggccccgggagccaggcgagcccggcgggcgggagggggccgcctggcgccccggggtcacaagttgcctaacctgacctcggtgcgggccggtgggcggcgcggccgggctggcggcgcgcggaaaggggctggaggcacggcggggccgggcgccgggcgggcaaggggagggccccgaggaactttctcttccccagaggggcgccttccagtcctggccgcggccccgccgcgggagcagcggctccctggctggagggagaccatgaaatgtgttcgaagaagctgacgcagtttgtgacgctcgcggcttcctgatggggaccggcagcagcggcgcctccgccgaggagggacgacctgagtcggcgctcgggcccttcccccgccggcagccgcgcgccccggcgcctagtttgggggccgctggctcggggcgcgagcatctgctcccggctgcgcgcgtcgcttccgttttgattagctcaggttattatataagatgtcacggagaggaaaggggcgagcgagaggcgcgttggggagggcgcggtggccttccgcgagtggcagggaggggcaggaggcaggacccggcgggacccacctgtacgccctccgcgccccctgcgggcgctgcccgcgcgcgtgccggggtggtggggtgggggggcacggacggacgtgcccgctgctcccatcccctccccgccaacactcgggcagcggccgaaacgtgctattttttcgctgccacctctcctgggtctacaggtttctggccccaggcgtttgtactttgaaacatttgtttaatattaagaaagctgcgtgtgcggccgtcatagtacacccggaacgtgtggccgtgagctccagggcggtgaatgaatcatcgccccgcggaccgggccccgatgattcatgcggggtacacacacgcgcgcgtactcgctatgtacctctgacccagggagagtggcccctctgcagtgatgacgcccggaggggcggggaagacttagtgcaaaaggacagcggggtcccccccttccacaataacttgtgggggggtcagggacgcccggagggacgggggagacttagtgcaaaagggcagcggggtcccctcttccacactaacttttggggggtcagggtccacacattccccaaggcttgttttgcgttctcgaaagagttacaaaattccacctggctacattaaccggttgaggagcgctggttcgctgcagggctgggtcctgtctcattcagtatttggtgtcaagtgagggaggtatcagactctgaaggaatcctcctagtaattgcgtctacctaactggttctgaagtaattagaaaaattttaaaagtggatcttaaaagaagactccttaagactagttttttgagggtttttaaaaagccagatcctaaaaggaacctcggttgccattcatgaatacagaatttttcccaatgtgatcactctcaaagattaacttgactcattcccacctcacattagtaagactgaataaagttttctcatcatttaagactcacctcaaacggcatctactcagccaggccttcttgatcgccttcattatctcctgtcccctcccccaggagccaccccataatactattttattttcttcactgcgcttaatcgctatctgatcttactttgtttaggagttcttttagtctgatctcttcttactggaatgtaagctccactatgctagggatttgggctgttttgttcgctgctataaccctagcacctagaacagt

SEQ ID NO: 54663 - DNA, 634 bp, Homo sapiens
ctctcctggaggtcaccccaaaccactatttcagcatgaccattggcaaagcagcatcactggctttctctctagaaggcagacctgcctacgggctgcagagttcaagcttgtctctgtccttcgatcttcttgggagttttctgtaaaggccctgattagtggcagcaccatgggaatctccctggcctattcagtagcattgaatcaatcctgagtttaattagcagcaattgccaggatgacgttttggccttgtcataccacggggcagtacctcttaaggattggatgtagttttgtgcaatgaagagcccttcttcagatgggttatttctaccccatggtctttggctgagtgtgtttcgtattagtcttcttccttttcttgccaggccattcttgttctcctcctctctcagatgttcttctctttcatcaccctctgtgattgcctcatctgagttcttagctttcagtttcactggccatgctgaccttttatgtatttattgtttttgttcagaaactgaaactgcatcacatacatgctggtttgtatctgtctctcccattttattaaaagcctagttttttcttctgtgtctctaccactttctgggtcttacagcat

SEQ ID NO: 54664 - DNA, 2245 bp, Homo sapiens
tattttaaacacactagaagtagtgtgatttttcacatactgttctgtttagtctctgaaatgaaagatatgaagcataaagagtaatcctactgccatgaagtcatttgacctcacttgttttctcttactcattgtgattgctgcgacttatgaagttgatcccagcttggacattggcatgtatgattttggaaaatggttctttaaaggactatacgaatgtggtcatttaaagctgtttcagaaaatgtattgctcctgctgtgatattagaaatggcaatttttaaacatgtcaaagtttgattataaaatggatagtttaaaaagctgccttggtctactgcttgatgcattttaaatttgaaatggatctttgaacacttgtatggctgctggactagcggttgttaagtttgttggtttgccacttagagtcatctatcactttagtaagaagttaacgcctatcagttggagaaaaagcaaatattttgcattgacagtctcccctaccctctattattgtcattttcttaagccatcactgctctggcttctagaatacacatttttgaatgaaggtttttgcagtgaatggtctcttgtagatctcaaagtccactagaaagagtactgggtttttgtttgttttgaacgttgcaaacagtaatgcttctttaccactcaccctccccccaccctcaacctccacaacgttcccgtttgcttatagttgtcaacgaccatgatctctggacccacactacagtaacaagtttgtcagtcattttcagataaggtgcaaatcaagggatggctttgtccccacttcggcgcaggtgggacagacttggggaagacgcagctgaagagacaaattctcagggtgcgtcagtctcatcactgaccgttgcttttaaaccctccagggaaaatatgccagtcattgttatgatgtaaacaaccgaaggggtggacggtgaggataagaagaaccgagataatatttggccagagctacgtgtagcacagggagccagggcggcagctgcacctgcgagcagcgcaggcggcaggcgcggcctccgggcgtggtggtgggcgtggccgggcggcgggggcgtggccgggcggcggggcgggcggtgccgccggttggaagtgggtggagttgcccttggaggcggcaccggacctgggccccgaggcccgccgcgccctgtcgggcctgagccgagtggccccacagagccggcgcgctcccgcctgcagggggagagcagacggggcgcggggaccggccaggccgcggcgggtgctgtttctgtttcactttccttcactctgaggccggcgcgctggcgggcgaggagcggcggcggtggcggccgctgggtaggtaccgggcgggctggggagctgcagggacgccagactcctcacccaagtttgcgcctcaggcgagagcgacacctccagacacctgccctggccggcccagcctggagccgggagggcccttcgggtgcagggggctaccgacccgggcgggggcttcggagctgtgcctacctcggcggggagagcggccggctgcggacgccggccccgggaaaggctgctcgctctccccggcctgagcagcgcgcccgcggggcctgggcccgcgcacctgccgggcgggcgcggctgtgctgggaccccacagggctgtaccgctgggtcctgccggagaacgcagaaaagttcccccttgcccccgccccgtcattgcaagttcttgcttcccttaactgtcttggtcacagggctctgtgccttaggatcttagtaccaccccaggtcgggaccgtgcatttcctcttccagaggactttctcttactttggagtttcatggcaaacctgtgggaaaggcaaggcagttaatcccaacttatagaggaggaagccgagacccaggctcagatatgaaacggtttgctgaaggtcatacaggggtaagggccagaaccctgattccctgtcttttaattatgcttgctttctgttacacgcacgaatacggtttcccaagaggataggatgattacacgtagagcctattccctgcacattcgcagtgggtatgtgttgatggaatgccttttacctttccggttgctttatatttaccaatgagttaacagctaagatgggggaaagttcctgtttatagaatgcacttaggaaaatcaacac

SEQ ID NO: 54665 - DNA, 859 bp, Homo sapiens
ctttcccttggtagagttctttcactaacacccctgtgagtcttgtcagatgtgattaaactctgggcaacacaaatggaatgaaaagagggaggtggaattgttttttttttttttttttaacgtgagataactgacaggtaagacttgagatgaaccggggggttaaagaagggtatgcgtgcctctgggtgctttgctatctatgtgctcacacataagaaggagtatgtgtaatgtactgaggaagagaccttgggaagcccgacctgggcaggagcccctggaaagtgggggaggggaaggcagccgtggctgcaaaattgaggcacacagtttcccatcacggcctccagagggcgccatcagcccgcagtggttctttgccttttgagggcgggcagaaggaagaggatccacctggaggatgggtaacgagagctgcaacccacttccttcagggctggggcatgcaagaacgaggagtggaccgctcgcagtgcttgaatgtcctccttgttaaccccagctgggataagcacctccgcctcataagatcaaagctctttcattcctgctttaactttgccagttccctttacttcggaaagaatgagaaacctcatcctagcaatcccagggatctgtgccctccagaggaagatctctgcaaagctgtttacagcgggttgtttggaggccagcttctctggcacggcgcggtgtccccgtggagcgtttccagggcgcggaggccctgggtcaccaactcgaatgaatagtgagtgagctgattgccgctccacgctgatggatgtatatttgttacatttgaagtgttctgagaaaagaactgctt

SEQ ID NO: 54666 - DNA, 3634 bp, Homo sapiens
ataagcatttattatctcagagtttctgtgggtcaggagcaggggcatggctttactgagtgcctctaactcgggatctgtcaaaggctgtaatcagtgcatcatctagggctgcagtcatctcagggctcaaccgtgtaaaggtccttttccaaagtcactcacttggctgcaggcaagcctcaggtgcttgctagctatttgcttaggacattagttacttctgatctgggctgttcataacatgacagttcgctttcccaagactccgagacagagagagagagacagacagagagagagagagagaaaggaaaacaagatggaagtcatagtcaaccaggcctgattttgccctcaggggacctttggcaatatctagaggcattcttggttgtcacactgtggcgaggagagggaaggtactactagtatcctgtttgtagagatcagggatgctgttacacatcctacaatgcacaagacagctccctacaacaaagaatgacctggccgaattattaaagtacaaagttgagaagccctgactttgagtgttgaatgtttgtagagcacattatgtacattctcccaatcctcatacaactctataaggtaagtgttattatctcttacttttattgctgaggaaactgaggcttacaggagtccagtgatttgctctaagcaagcaagtagcgaggctgtatttgaacgaaggtttggtctcatttcattgccagcctctttcaatgtgaagcaggaacagagagaggtaagaaaaggaacaagctctgggagaggggaggggagaaatgccctctctgccaggaaatgttccagatgccattcttgtcacctcatttgaaacttgcaatgaggcaagaacataagcctgagcagactctgttctctgggagaagacagcttggcaaggtcctggtttgcatcattgttgagctggagctgtggattcctatggttcctggaaacccacagtgtccacactactgcaacctctcccttcttcttggggtcccagctgggcctgtatgaatcacttgtgactactcagaggagccatgctgagctcccctccattctgctttcaatatggtaggcctggcctccttggtgcccagggacacacaaccaataagagcacattgtgaagccaactgataagtacatttcacatttcttgtgatttcactccaattgtgttccccaccccaccttccccttttaagactttcagacttgttcccttctgacccccttggtcagaatttgaacatttcatttcccaaatgtcattttgagatagattttctatcacgattatgccctcccacaaccttccagatggggattcaggattcacctcttgaattaaagagtttgttgtttttggttttggttttggtttttgttatgagatggattcttgctctgtcacccaggctggagtacaggggtgcaatctcggctcactgtagcctccgccttctgggttcaagcaattctcctgcctcagcctcccaaataggtgggattacagctgcccgccaccatgcctggctaatttttgtatttttagtagaaacaaggtttcaccacgttggccaggctggtctcaaactcctaatctcaagtgatccgcccgcctcagcctcccaaagtgctgggattacaggcatgagctaccatgcccagctttgatttaaagggtttgaataatctactccttctagaaggggaatatgcaagtccattttgaggaggctctaaaaaaaaaaaaaaaaaaaaaaaaaaaaccagcaagaagctgtgagtgacacaaacttttagaggatttgtattaaaaacttccaggtttgcagacactatgaaatctcttagttcttatttaaagttttacataaaagaaaaatttggcaagggggaaattgttttctccaccctggagctgtaaaaatgaatgaacatctcattagctgagaatttgtaggtctatgcctgctgggatttcaaagggcatatattctttggccaaatatgactttggcatatagccagtctcataggagcattagttgttgcagcttgagtctgtgtttgagtgactaatgtcatcttaccttgttcttgccatgacctaaactttggagcagttcttcagctggatttgtggtggaccttgcacaaaattatacaaccttcctcagtccttccactgtcagctggtgtcctgcaggcttcatctagaaacagacaaaagctagtctgaaaatggcagttaccaagtaacaaaaatgagtggggccttttaaattcaacaggaaaacatagtcagcaaaaccacacaaaaagaacaaatcagatgacatctagtagcctgttccttctgccaggttatttacggtttctgactggttggcatggattagctctctgattcgggtaacaagttagttattgaattaccaggattttgttttgacagaaattttccttcagagttaccttttttgccccctgaatccttttggttttttgatatcatatatagaaattcattacataaggattttcaaatatttttggaaatggtcacagtaagaaattgattttatactgtgacaacacacacacacacacacacacacacacacacacacacacacttgctaaactaaaacaaaagttctatagaaagtatattcactcttactatgtatgattcactttaatattttccatttatttccttccagactagtctagactagtctgttacaaatgtttttggctgcctattaaattaatttcgcaacccatgaaaggaacatgtcctgcagtttgaaaaatattatattacttgaaccatggtttttaaatgacaatttatagcattctgatgaaattcaaagtataactagaaagtgaatttaatcagtttccaggattgttcctgtggtatctgtaattctgcttatccaactcctcagtgaaattgtaatgcacctatagtgtcactcttttctctttcgattctgatggttagatgtgaaaactatgtatttacatcagtttcctttctacattgtcaaacagacaggttctttggagcttcttccagtgttttacccaggaggttgggaacattggagaacatcgtgccacttggctgtggttggggtgtatgcagagataaaggagtccataccggaaacagcgtgccaaggaagtgccaaggcttaatcagagctatcaacctggaatcagcaccaggaaagacagggtagccagctgtaagccaagaaagatggagactgagtgtcatgggcaaaaggaaaaggcagtggagcataaggcagttctgaaccaaagaataaaatgctatgagggctcttgatactgttctatggctctggttaggagcatgcttcaaatgcttgaagaggaaacaccaaagctgtttcccagagcatcacactagaataaactttcacacttacccataataattaatcccatgagctattttcccttaagaatctgatattaagtcaaagttttatagttctcctccccatttgccactatatacggtattatatagtggcaaatg

SEQ ID NO: 54667 - DNA, 589 bp, Homo sapiens
tctttttcctttttcatattattattcctttatcttcacctggatttctgggtgacatgagtatctagagctatgtccaaaagtataaatgccatgtgacagcaacccacaatatcatgaccatgtcaatttttaaaccatctttattgaggtataactcacataatgtaaactgtacccattttaagggtacagttcaatgatttttgacaaatgtataatttgtgaaacctccaccctagtaaagacaaatatagaacatttcatcacccaaaaagttcccttatgtctctctgcaggcatccacccacgcctggctccaggcaaccaccgacgcctggctccaggcaaccattgatctgttttctatcaatagagattaattgtgcctgttctgaagtttgatataaatggaatcatatggtatatactcttctgtgcctggcttctttagctcagcataagcctttgacatttatccatcttgtgtatgttgatacttgttccttcttattgctgaaaatcattcagtggctgcaccataatttgtttatccattcccccttttgatgaacatttggattatttt

SEQ ID NO: 54668 - DNA, 2437 bp, Homo sapiens
gtggcaacagcaactatattaaagtagaaagcctttctataaatgaaagtcagaattcaaaatttagaaggcaacattgtttgcttcagatctacttgttacaaattgtgggtttgaaaacatgcaaccttatctcatgatgcaccataactagtatttagttatactaataactccaaattatgtaaacaatagataccccgaaatcatatttgggtttgtttcagagatatttttggttcttatatttggacttaggtactcttgatctaaaaattcactcaacctccaataaaataatgaaggcacagataaaaaatctgatagagctgaatatcgaaattccttgcttttaacaggcgatacagcgcattcttactctcttttctcctagatcagcaggtgtccccgccgctccagtagactgagaaaaaggaaaaggagggggcgacaagaaaggaaaggaaattgtctaggtgtcctggtggtggaggtggggggtattttaatttcataattaaaagctctcttcttcggctttcaagtttttactcctatttgtaatgatttgattgaggactgtgcagcagagtttgggtatgtacatctctaacataaacggaaaggaacaaggaagggacggataggagacagcaaagggttgcggggagagagcaaaacgtaggcgcgtggggacgggaagggagaggcggatttggcagtcaaagagggacgagaggaacaggaatggaaagtgtggactggccgtccaatcctatgggggaaggggaaagggggggcccaccacgtcgcactcctccccacctccaggcttttcctgtgtaggctgaagccatccaggcgtgtacaaaagagtcggttgctgagccaggaaggctgtctccccgggctgcgcaagctccgggccgcctctcctgggctcaggagggcgggcaaggataagaaggcagaagccccaaggcggacagctttgtgggcgcctggaagaaggcgaaaggccaccagcccagaccccgagggcgcttgcccgcgggactcggcgccgcaggccagggccgtccgtgaagggtagtctgtgcctacgtcctgccctactggtaccactcggacactctatccccgtccgaccctttgcagggctcgacttgtctccccgactgcccgtccttagtccaggttctcctgcgcggcccgggtgcggggtctcctcgtcatctcgggcgacactctgcaaacaatatggcggtcgggcgtcgaccgtggcgccttctctccgggccctcggggttgacgagggggactaccgccggcgctcccgacccgcgacgcgcgagccccgggcgggcgggggaggcgagagcaagaaacctgtgggacctgtggggagccgcgtccgcggggctggcgcgcgcgggggcggcctcgggctcgcgcgcaaaggcgcgggcgcgggcgggggcggagtggcggcggcagcggcggctagaagcggcagcccagagccctctcgcggccgcggcggcagcagcagcgccagccccagcaacactgaggccgccgccgccgcctggcgctcccgccgcccggcccgacatgagtgaggcggttcgggtaccctcgcccgccactccgctggtggtggcggcgcccgcgcctgaggagaggaaagggaaggagtcagagcgcgagaagctgccgcccatcgtatcggcgggcgccggcgcgaccgcggtaggtggtgggccggggccgtctggcgccccggacggcgggagttgggagggacggcggccgggcgagggccgtcaggaggcctgcgtttaccctgggcacgccctggcactccagggagacgcactcaggccgcccttccttgggcagaaataaaagagttgtgcctcgtggacagccccgaacacttcgcgaggtacacctaccaccctcgggaaatgttgggggtggtcggttccgctggatgtttgggttattttctggggcttgggcccccactttctctaagagaatgacctgcatcttgagtcggcatgatctgttggatgagcataggtgtcagcaggcgggagtgggttttccacggaggtgcctgcctgcctgcctgccttggaggcgcgcagatttttgtccttttcttcgcttttctttcccttcccccttcagattaaacaggctctgcggcgagtttccacttaattgtgacctttccgttgctgtcagtgtagtgggaggtagatgcatcagtgatggttttatttttcatatggtacagacatgtgactcaggtggggggaggctttttgaaccttttatttaaacccaagttatctaagcttgacagggatgatttcccagctgtatcttcgtaagggttatttggagagcgctgtcaggcttcaaa

SEQ ID NO: 54669 - DNA, 784 bp, Homo sapiens
aggcagagctcaggcagtaatgctcgcctgccactcacctcctgttgtgcagcccagttcctaacaggccaccaacaaccatacccatctctggccctggggttgggaactcctggttattaaacaacctgattaggttattaaacagcctaattggatggtttaccctatattgttgatgaggaaactgggatttggggatattatgcaactcgaacaagaccccacagctagtaagtggggaaagcagaattcaaattcatatctgtctgactccaacaaaatgcttcttaaatgagtttcatgaaagtggtaacattggttgtcttgtctgtaaccacagccttagtgtctagagtggtgtctgatacaaagtgaggtactcagtaaatatctgttcagtgaagaaatggatgagtcatctcttaacagagtgaaatagatttgaatgtgtgtgtcctggtattttttaaagttgcatagcagtcattttgtgtgtgtttcaagacttagtatttttttttaatttttttccctagcttacctgtggcccatacctgcttcaatcaactttgccttcccccctacaagagcaaaaaggatctgaaacagaaattgatcattggaatttcaaattcagaaggttttggacttgagtaacctagaagacttgaaatataatcttttatatgtagcattcacttccctcttactgtgcctttagccttttcatgtttctgtctcaaaacactttgacaaagctcaccaactttaaaatattaag

SEQ ID NO: 54670 - DNA, 1665 bp, Homo sapiens
tctttgagagtatgaacagccccaaccagagcccacctaatcagtgctcagtgatttattaagtaaaagttacacaactgcccttgtttattatgcattgacctctgaggtgccaagagcctatgatcactttcctggtccaaggagatctaggaataaatcccccactttgtaccaagtgacctacttttcttactcaactgtcacttctgaggttccagtggtcaaatgaaaagttgggaagctctctgtgcacgtcacagctgaggatgcagctgccaagctctccctgctctgacccttcaaaggagggcattgggaaattcaaaccaaacacaaatcgtggccacccagggagactgcctgggttattgctctgttatctagaaccacaagggaccaagattggggtaccaaaccccacactggtgattctgagcagggagcttggcaggctgccagctgaggtggatgaggagcaagcaggttgcaaaggaagtccccccaggatgggcaaatctgggcccacccatcttctgcctgccacccctcagtggaagcctggcagagagtggatggctgtcagaagatgctgatggccctgtggcaagccccagcatgttcccgttaaagatcaaaggaaccatcacagaactggagagagaagaccatcttttgctcaggccctagctcatcctgtgaccttggacaagtaacctcacagagcctccatgattcatccattaagtagggtgagtatatgtagtctacctcctttctggcactttaaatccttgagtccatgggctcccagggtctgtgtacatcctcctggaagttaatagcttttcctgtcgtttttctttttgatttcaataacctaaaaagatttccacacaccaactttggttcccccagaggaccatgttatatggagaactgggttagttagttcccggtcacccagaatcacaagatgtgtcgtggtttcacggtttcagacgcagcatttgtaagcatgccaaacaaatgaatgaaggtgggcttgtttcctacggctgctataacaaattactacaaattcagaggcttaaaaccatacaaatttattatcccacagttctggagatgaaaagtgcaaaataggtcttactgggctaaaatcacggtgtcagaagggctgcgtcccttttggaggctctaggggagaaacagcttcctgccttttccagcttccagatgctgcccactggccttggctggtgacccctttcctcatcttcaaagccacagggtgtcatcaactctcctgcctccctctttcactcacaagggcctctgtgattacctggggcccattcagataatccagaataatttacccatctcaaaatccttcattcaatcatatcggcagagtcccacttgccatgtaaggtaacattcacagcttcgtgagactggggcatgaacatctttgggggccagtatttttcctaccacagaaagatttttattatctgaatagttgaattgaagacaaaatggacataataataaggaatggtcagaatggcatactgagtctttcccatgtattcactgattttctacaacagtacaactatcattcctgtgatttttaaaatgtaaatgctatttaaa

SEQ ID NO: 54671 - DNA, 1914 bp, Homo sapiens
tactcccctgtgtcccacccctgttgaggagcactctatatacatccacagagtgaaagtaaagttgaaaacaagtaaacaagggcaagaaagaggagatagtgatacatagatgtaggtatcaaaaactgtttataattggttaaatgtaaattaatattcctgttccctgatttccagtcttgtgtgagccttgttcaattattcaatctttatttcatttcccaaatatttattaaatacctttgatgtgctagaaactatgctcatagatatattttcaataaacttattataactaagtatctacttcagcccccgaaaatgaaggtagggagtggcaacaaatccccaggttctaactggttacacctcagtctcttacgagtccatcactcttaactctgaccagctcccgcatacctccacctgccatattggcctgccatggtaggccagggagagagaaaaaggaagaaaagagaagagaaaagaaaaatgtgttgcctactgcccctgcctttattgggatggacagctggagtaaacatcatccagaaagactgggactctgggtcctctcaaacccagcacacccgcaccacgaataccagcccccagcaagaaacctctaagcactttgtgagtattcatcgcctaaacatatttcatttccagtcttgcccaactgatctcagccttaactgtttaactgggctggtctctgagcagactctgtagctgccctgaaatcaggttactggcacagcctgtagatattgactgattcaaagattacagttgagcaaacaggagcatgttaatttttaatttcactttgttgataaatcgggcttcctctttgtcctataaccgataattacctggtcagaagaaacatgcgatacttgacctgcaatgaaagtccacttgtctggccttcctggccctagctgggtttttcaaaggagctcccatactggtttggcctcagtcagctgttaaagaattgagggacttctgagttgcgcaaccctgagtcaatgtgagacccaagctgaacagcatgggactcttaagaattaaagtggagacctaaggaagatctttgaggtttgggatttggggtaggaatggggtttttttctaacaaaggagagactgtgacagagaaagtgtttctttcatggcttccagttcacactaagtcaccctcattctggagccaaggttgttctcaaaggtgactttaccacagtaaaacatgaggacagaaaacagcagccgtgtgtccgcctcatcacacaagagccgtactgtttgctaagtctcttagttcacacaaccgtggtgccatcctgggaaataattaccagtactcccattgtatggagaaagaattaatttgcagtttatatctctaaagggtccaattacttcatatagagatctgtcgcattgtttttctcttccttttttttttttttccccctgttgcttttaggggccaaagcggtttcagtttgaaaccatgatgaatttaacataaatcaagaaaagcaacagaagcaacttttcccatctggaatggagtacagccttctattttatgctatttgtctaccctgtcactaactgcagagaaaacgttctaaaaactgccctttgtagcctcaagccatttccctagggctgtttgacttaaaaaaaaaaaaaaaaaaaaaaaagagccagagaaataaaaaatgtgggcagagcctgagtggttttaagtcaaagacctactgagcagggattcatttagtgggttattttaaataattcaatccagaaaaaattggttgaatatatacatatatgcctcaccaatttcattcacagatgttggcaagtgactgaaaacaggaagggaaa

SEQ ID NO: 54672 - DNA, 1497 bp, Homo sapiens
tcaaatgagatgagaaggtgctttgtcaacattaatgagctgttccagggtctgctggtgccagcatggttcctagcagtgctgctatctgcataggttcctgcccccaaccaactacacacctatttcccactctcccactatctcctgaaattctggcccatgcttctcccctggggtggtggcacattcccccatggccgcccttccccggagcagcagcagccctatccccagccaagtcttggcactggacccgcaggatggggagggcatgtggaaaatctgaggagatgtttttcttccttgggaaggacgccaaactgcagtttgctggcgttctgtaaagtatgcacccagagaagatttagtttaggaagaaatgggggaaagaatccctcactatttgcttagtgagctgggttggccaagccagagccaaaccccacatatttgggctgactcgctatgtttacaaaacaggcccatgttccaggagatgactggggaggcagcaaaacagtcaggaaggagggctctgtaggcctctctctggcctcctttccatcccccgtctccagcccacatctgtggcttgctttcttgggcctggaaggctgggggtgggtcaagggaaaggtgggccaccatgacctcttttgcatggtggctttctcactccctaccccttcaactccatgaagcccactgtcagaactgaccagaggacaccacctccagggaggcttcctaagccctgaggctaggtctgggctctttcccaagggcttcctcaggctccttcagggcagagacccctccagttttgctcactgcagtatccccaggatggtacttcaatgaataaataaatgactaacagctctggcctcctatatcccacgctggggcttttccctagttcagatccagaattccttggatctgaacagtgacatcctgggtgttgggttgtgtttgttttgtgttgcattgttctcccttgctttccagtcgtatctcctatgcttctcagcctttcattaaatgctgcatcaacaatgaactgcttgcaatttctcacctgtttctgcctcatgcctttgctcaacctgacccctctgcgcccacccctccctgccactcctagtcagccttgaagattcagtcccaacctcttttcatccggaagtctcccctaaccctccccaccctaccctctctgtctccccctttggttagaggtctcttatctcagatcccataaaaaccttgccacgcttatcactgtttacatagctgtccctgctcccagactccaggctacttgggagcagggaacgtgtcctaattgcatctatcccttgcccttagcacagcgcctgacatgcagcagctgttcaacacatgcttgctgaattaattcattaactaacatatgcagaagctaataatagcatgcaatgtcatggggccgagtgtgcatgagatcccagc

SEQ ID NO: 54673 - DNA, 1017 bp, Homo sapiens
acaagatggagttttctacacagccaggtactcctacgtggatgctgttccctctaactggaaaatccccagcatcaccccttcctgcttcatctggttacctggtttctcctggtgggtgtcctccttcagatctcagccttcagagactcccacactaggtcaggtttcccttctgggccctcctaacaccaatggcttttccttcatgacacctacaccagcttataattcaagttattaggagagtgtctgattaatgtctgactctcccactagactgtgagcttcttgagggcaggaactatgtctttctgtactcgcttgtgaatgtctgggggctagccagtgcctggcacacagtcagcactcggcactcagtaactgttaagtggatgcacggcaaggattatctgcatttctcaatcatcagcacccatcccctacatccgcacagaagttggagaatgggctgcaacccacagcaggaaaccagcctccccttgattaataaatgacaaacaagaatgctgccaaacctgcataccttgggtttatccgtttcaactcattcctaatgtgaactcacaatgagcacagacaaatagctgtttgtaatcctaacagctgttacttgtaaaaggttgtactgttacccccaaagcataaatcagaagatggaaactaaatcatgcatttatattaaaaacatggaatacattccaacaatgccgtggcttctccaaatctcaagatcaaaaaggaacgaagttaagttgaatccttctgagtttaaggcaccgcgaggttagttcaaacaccagtaccattgacctaaggggcaaattctccaggactgtataatagatttgacaaatttttgcaagtaaattctctgttcattatgaaaaccttctttcagaggcaagcactattttgataaggaattaatttagtggtaaatgaaagaatccattgcaattcagagccctgcctcgtgtggtcagcttgggaacc

SEQ ID NO: 54674 - DNA, 2132 bp, Homo sapiens
cgcattgcatccagtactgtcatacaagtcattcacataagcagaaagccactttccagtccctagataactatggccaagctagcccagccaagaacctcttctcattctgtactagaaggccacaaaagcagctcactcagaggggctgggctgccttgctcctcttaatccagtcaggctcactggccatcctcagtccaggtttttatctcttctcacttgagctactacaatgactcccccaactgacctctctgtctccctgagtcatccggccactttttaatcctctgctcacattgcattgcatccagagaaagacaaatttcagtctgtctcccttttacctaaattttaaaaagactactttcctcaacctccatcatttggctacattcatcctcatcacagccccagactgtggccaaccacatttctctctgctttcccaccacaccatagtcattgccacctcctgccttttttcgtgctctgtggcttccagaaacaccgtcttttcctctgtgtctgtccaaactccacccatccttcatattgccacttaagaagctgttcccagacaccctatcccttaagggtgctcctttcattcaactccttacagctcccaatattttaagcactccttttattttccactgtcctgggcataggccctggccctggagtagagcaggaatctgacccaaaacttctttggggtctcctacttaatatctatccctctaaatcctaatatgttctatgaacacaactgcccttgtacatgatgaccctaagaacagcaaagtttatatttggagaaactgcagacctctcccagaatgacacattgcccttcaaatctcacggagaaagagcgtgtgggccaagtgcccagatatctagcaaagaaaggcaagtcagcctcctcccttcccccaacccgccactcttgccagacagcatttaaaatgcacttcagcgcgttcctcttttatttggaaaggaaacaagtcttgacattctgtttctcccatttcattaaggacagaggtcatcccaggaaggggaagggtagtttccaaagagaacttgtgagggagtggaggtggggcaggggacgctctcgtcccttctcgttagcccactttaccctttgaagagaacaagcccagctttcacagtgaattatttgcagggtggcttctgccaggactgggctctcgctagctgaggcaatacccggaaggattacatgatagctcaaggacagacaaggtgtccagaaggaactggccggaggaggtgacactgagacagcctggagataagggggtagaaaagggagaagggaggaggtagggggtgtgtgttaaatagaaactcagaaaaagctaaacctgtacatttctctctctctctctctctctctgtctctctgtctctctctctctctctctctctcacacacacacacacacacacacacacacacacacaggcatgcacagaaacacattctttgctttccctccccatctgtaactccccaaggcatttctataaataaacgataggcccctgagcctgcaataggaccattattaactcttgcagtgttctggctataagtgtgtgaacacttttcctcacttcatggtttgcaaagccttttcccatatgtaatctccacctgactcctacatcacacacttgaaaagtcctttagcttctcctcatcattcccatatatagaattgggcaccccacacccacactctcaaagttcttagccttaaagctgtaagtttcaagttggctactccaaaaatttcttatggtttgagccacattatctattttcaaaattatcaaatattgtacatatttatggggtacaatgtgatatttcgatatatgtatacattgtagaatgatcaaatcaagctaatttaacaggctcatcaactcacatacttacgatttctttgtgatgagaacatttaaaatctatcttttagcaattttgaaatatgcaatatattattattaactatagccaccatgctgtgcaacagatccccagaactgactcctcctgtctaaaaatgaaacttcgtacacct

SEQ ID NO: 54675 - DNA, 5617 bp, Homo sapiens
ggtttaatcaaggcacttgcaaagagctatctttgacatgacatgaagtccctacgtgttgttagccattaatgatggcatggtttttctataccaagcattctataacaagaacccaagcctgacagtttgatcacaaagtcacttataacatcaggactacaaagccagatttgcttaaactttccccaaattatgattttttatagatcacatctgaacagaaaggcttcacttaagatcttgattctccggagctataattcatcttctttctccaataccacccacattcttaaaggttatttagcttttctccacaaggatacgtagaatggatctttttcccctccagaaataatttccccaggaaagaattgtaaaaccaacttaaaaacacaaaataaccttacgtttttccaccaacaatgatcagacctcccactcctctgacttgagcttcagagccctttgtgtatacttttcacacattcctcataccattaacacagctttccatcaccatcagccatccttcctcaacttttccttgcccaacatgaaagctagtggattgagagggaaggaagaagggaactgaaaaagtattacctttataaaaatagttttcaacctgttacttgatccttcaaagccaaattgggtagcatcatctgtacagaccccaacactaaattctcaagtgtctttcttttccatagccaggtctcaaaagctcaaatctaaacctactgatggagtagcaaaggcttcctaaaattgagcaatacagacctaggattgcatgggggaatatgacaagtcaagaccagttacattgttgcttaattcatcgataagaggccaagttctccattctcccccagctctgccactctgggaagagcccactagccagcctcggactgccaaagattgttgactctaactctgtcttaggagacgtctggtggaatgcacagtcctggggtgccatctgtgtctgcaccccatcaggcttccattgaacatgaacaattctataattctgaccatcattgttgtcccaaaagacttgcccattagcatggtaagaaatgcagaactcaattttctgctcagttggaatgacagggggtaagtcaatggcaaatgagaaggtatcactatctgtgccaccatacacatttttcatatagacacagtctacgtcagtgtagtttttccaagaatcgaaagtgatacggatctgaactttcttctcaaaactcacatttttgactttaacagtccctgtcactgttcgctcttgcaacgagcagttctccagacagacaaagttcttctgaaagtggctccggaaacttaagtaatcggttgaaggctgagggaaatctaaaatcaagtttttctcctcgtggtgttttaaggcagaggagatatcattaaggtccaagagatcaaactgcagatcccacgctggttcttctgggaggtcggagaagacatggatcgcagtgagagagaggcccttggagtcagcaaacacaacgcgcttcttggcttggttgtgtgagcacttccagtcattctgtgatttggctttgtgttttatattgagacatgatttcaggggctttaatttattcacaaaatgtcgtcgttgaaattcatcgtacgggcccaggaaactcttcacaggtggtgaatgtgccaagcaaagcctcatggccacatccacgggcatgaccgaacttgtcaaaggacgtggatctaaaacctggatcattctggaatgcaaaaagaagagggattatcacctggatcggaaatgctcttccccagtgccaaatacatatgtactatttttgtgctgactgaattatagccagtgcactagatatcaggcaggtgctatcatatgtagtaaaagagaacagtattaagtgatcagatcttctatgtctacctctacccttggccggctaaaggctattaattgcttaaaacacttagagggtgatgggggtctcagtttccccatctgagaaataaaagggttcgatttgattatctccaaggcagccttgagaactgtgtgctctgttctggaccagtggtcctcaaacctgtctggtcactatgtctagggaattcattttctttctttcttgtctttcctcctttcctccttccctccttccttcctttcttcctctctctctctctttctctttcttctttctttccaattcctgggactcagaactactgaggcagaacttctggggctagggccaagggatgggtatgttcttaaagcttcccaggtgattctaatgaccagacaggttcaggagccacagttccagaccctctgctccctctggctacgttggcttattttgctgctaaattgattgacacttctctggtaaggtaattcacttgaaaaaaaaaaaataacatgcaacagttttgagagtgagaaggctagagaagaagtcaaagaatcatctttgcactttgattatcatgctcttatttttcacaaataaccactgaaatacaagccaacaattcatatgcacttaaaaactatataattgataattcacctaaagagatgcccatgacaagtccacatttaagtggaaaaactgattacctgaaagttggagtgttttaaaatatacattttatatatacaaacttataaatattgaaaaactctataggaaatacacctttcctaataatttaataattattatttctgggtgataggattatagattatctattttcgtttttgttcttttttggcattttctaatagacatttataagtagaaagacaataaaaccatttaaagttttaaacatgactatgctcagcaatattaaaccaagaagcatctataaagaagacttttctctgacctttagccctcatcatatatttccaagcttatggtattaagatttttttccctatcttagccttacaagtaagaggtgtgtgtatactgtacacgacatttctcagtctggctttagtaactctcctcacagcagctctaaacatgtatgcaagtggtcattatcacaaaagtgtgtaataacactcgcagaatttactgtgttagctctggggtttttctgggagatctgcaaacttagaacaaacaaatgaaagctaaagctatatttgtgggtctaataatagttaataggcaggatttttagagaagtcttctgctaagctatgtctggagaagctatttaaagtagttttatgggaggttttttttggtttttttgtttttttttttttactttttgcatttatagaaagacagttttagtttgggtgatttccttggaactttaagtcctggacaagagttaaaagtaatcgtttgctcaaactcttgagattttgctatggcaaactgtgataagaaggacgaatgaatgcaaacgtcgtcctgtaatttttttcctccaagctaaaccacctaaccagcaatgtcagagtgctgttctcaccacttcagctgcccgagtctttgggacatttgtgcaggaccaaaagaacagccgcatccatgagaaaatcctaactcaagctgattcacgttaagataatttctgctttaagatgctgattactaaaataggctctgcttaagaaatagagccaaatttctacacctccaaggcctctcggttgccagattcaactacgcagtcagtccacttgtcctccccctggggtgtccatttccagagatgatagaactgaaacgccccccaacttccccacagctgcgcgttcccctgtgttcctagcgcgcagagttgcagcgaacctacctggtgcagctcattaggcagagaggcggcggaccctaaaagccagcacccgctgcctgcacaaattcgaaccacagctccaggccttgcccccgcggcggtcgctgggagagactgagggcccggcgcctagaggccgcttatctgctcccaagcacgtgacccgatccctgggaccaatcgccgggcctcgagccccagggcgcgaccaaccagcgcccagctggggcgccagccctcgccccggcaacgtgatcgccccggggcgagacgtgcagagagctatctgggcatcgcggggaggttctgggactccgcggccagctggaaccagccgcgtaacgggaaccctgggctaggggccgggcaggcacgtaccgcatgcagcgggcgccggccaagagagagcgcagccagcctcgcccaggcggggcgccagtgcctcaggcttggggcggctgttacttgggaatagctttgtgggtcactgcgggtgaatctgcacacagaagatgtggctcaaaccgaatgtgtatcgcatttgaaatgtttatatcgttcattacccggtgtatccgcatttctccctcaccttagcctgcgcgatcccaaactggctgcatgcttttcgattagtatgagttcacagatgcaccacacagtagacagctgccgggaattaccaacttatctaacaaatgttgttaggaaagcatacgagccccataaaacaccaaggtggcatttaattaaaagacacttcgtatttctgtctattcttcaattttctcccctgcggggaacactaaagccggaagtgaaatgacccttttcacacatacagccggtcaagaggcagcagtcaacccaaaccccttactcaattctgacgtcctttggcagtggtgtggaaatcaaaatgttaaaataaaatttaaaaaatcacgccgtatgtttcatgggccttctgagccactcactttcgctgaagtttcattattttgattagtttgaagaatttttagaccatcatttacaactgtaaaattaaatgtctaagtcaagtctaaattatttttataaaacccacatcctagttttgctcccctaattgagctatccattagtcaattaaaatatacaaaaattcctatgtcttttaaacaactgtcaaacagtggaattgttaaaattattagagtgaagaaaaaaatcacactgaatatcactgggaaagggacttcatgcctgggttttatttttgaaatgaaatatctaactaatggcaggtcttctagcccctttagctcaaccaaaactagctggaaggtctttggattgacacttactagctacacgaatctaggcaagttctaacctcagtttcctcatgtgtaaaacagagatagtaacgttctgaagatgaagtaagatggtgccaatgaacagactcagcacgatgcccagtgcctgtgttccacccgggctagttcccaagtttctacttgatctctcagctagagtttttactctatcacctcaaggcgcctggtgcctgagctaaaatattgagaatagctgctgcttgttgagcctttactctgtgccaaacactatgtgctatcaattcaatcctcacaacaaccctatgtgatatgtccaattattaatcccattttagagaaaagaaaacggagacactgaatggtcaggaaatctgcccagtggatcacttgag

SEQ ID NO: 54676 - DNA, 2676 bp, Homo sapiens
agaggactattgcttaaaacagggcaaaagatgattaggtatcactttatcttatcttgcttctactctgtcccacccccaaattcaaagttttaatgctatttacaaaatttagtcttcttcatagttgatactggaagaagttattatttcgcaaactacaaacagaaatgcaagatccaattggtcaaaatcacagtggcaacacatgagcaataacatttacacgtgattacctctttcaactttacaattgccttcatagcctttatttaatcttcattaaaactctgtgaagccactcctctgatttcatcttacaaaaggggaaactgagacctgataaggctgaatgactatagaaggttcacaattattaagtaattgggtcaggcttccaagccaggacctaacctcatgtgtataccttatctgagtagttagctgcttcattcatagatattaaagtaggatctaagcatgaacatcttgttggacacttctgtcttcttcacctccatatttaatcaatcaccaagtcctacctgctttgaccttcttactacttccgaaaatcgatgtctccttctccactcccttgtcactcatcatccctcacttgaattgtaatagccttcgaaccagcttttcccagtctatcttgtgtcactcaggtgcatgtttctcacaaccaacaaagtgtctaaaatgtagttctgaccacagaatcttactatggctgcccataatctcaatctactaaaaataaacaactgaaacaaactgctgacattcatagtcctccagaatctctgcctgtctcaccgacttcattttcatttgtcattccctatccctacttgtactcacaaggtgcccatcccacctggagcatcctctctccattcgcctttgcttgactaatgcccagtccttctttgaggctcagctcagatgtcacctgcccagatggctttcatgccctccctccaccaactcagggactttcctctgtcttttccataagaccttgtgactatttttatcatttcatttaccatctacttttataaaaatctgatttgtgtttatctcctccattcgactgtaagctccctgagggtaagggcaatgtcttattcatctgtgtttctccaacactgggcacaatacccagcacaaacaacacatgcctgttaggtaaattgtatatattagttatgaaaaatacttgctggtttcagaatcctgcacagaaattgagaagatgatgttgaaacgatgtgaaatgatgtgatgtgaaatgaatgtggtgaatcagcaggtgacaagaccatgaactgtcaaaagatgctttcagaaacagtctaaagaggagtattgacaaaaactctaaataaggagagtgtactattaagttggcagtcgggggaaatgttatttcaaaagtaccacagagcagtgccaaccaaaccacccaatgccccagactcaggaacctcagcaaaagcacaagttgtcctaggacatgacagatttgttttcagatcataagtcaaacaccaggaccaggactgatggagacttgggtttttttaagggataactcatcaggaattcttttaatatataaacccatttgtcatcctttgagtcttctttgctacttctggctattttcccacttccccttttccttgtgggccttcaaatacctcttcctcccctgttttccaatgtctccttgctttctgcctctcatgttattgcttgtggaagatcaccactgacattaaaatttcctggaaaattccactggctaatgtacacttctaattgtggaaagtacatgggtcacctaagtccctcccttaatgtgctatgttctcctgtttgtttccactgttccatctccctggaagtccttcacctggccaaaccatatccatccttcaaggtctggctcaaatgtccaatgttaaacttcccccaaccctaagacagagagagaatgccctgctcttttatctgtactccagagatgaatttgcttagacagctagaatagcttttgtagcactccgtgtttttacttgtttatgcaacaatctcccctatgagactatgccccactgaggacaggcaccaaatatcatccatctctgtatcccttacccttatcaatgcctagaaaatcgtagacactcaaaaatacttcttgattcccaggcaaactggccgaataggaacagctccaatctgcagctaccagcgagacctgcagccaccacaaggaggcaggtgatttctggatttccagctgaggtacctggctcatctcactgggactggttagacagtgggtgcagcccatggagggcaagcagaagcagggtggggcgctgcctcacccgggaagtgcaaggggtcagggaactccctcccatagccaagggaagccttgagggactgtgctgtgagggacaaagctatctggcccagatactacacttttcccgctgtcttcacaacccacagaccaggagattccctcgggtgcctacaccaacaggaccctgggtttgaagcacaaagctgggtgaccgtttgggcagacaccaacttagctgcaggagtttttttttttcatagcccagtggcacctggaatgccagc

SEQ ID NO: 54677 - DNA, 952 bp, Homo sapiens
taattggcctacctatgaaggaggtactgtcactcactccattttactgatgaggaattgggctcagagctgttaagtgctcataatcacaccacactgggcttgaacccaggcctggataccttcaaaaccctgtgtttgatcctgacctaacattgcccctgaaatagcaatagttaactttgttgatgacttactaagtgacaggtattaagcactccctcaaactgttttatttgatgctggtaacaacccaatgagataagaaacaatttaaatatcatcttcagggtatgaaactaaagcagagaaagttagaaactagctcaaatgccacctcctcaacaaagttttgccagattccccacactcttgaacacgattcctccctcctctgaaatctgaggcactgcaatgcatctccaatagcatcaccaccctctgcttcatatccttgctgcttagcctgtatcatctttttattaaaagggcaatctaagtctgactcaccgtcaattaccccaagcgcctgtccgtagtttcccaacggccattccctgacaattacttgcttcaagtaagcacttgcagtatattaatgagtgaacactggaatgcctgcaatgtgccatcaagggactcaactagtgatgagtcacagagttcccctcagtatttgcttagaccacagcactgggccctccaaccagggcagagccagttatctcacagccactagacttctggatcacattcaacattaaccgaggcactatgtacactgcctgaagagcagaaaaaagaaattcaatttctatttattataagtagctcattaggtagtaaaataaccatagtggtggagagttgtaggttttggaagccgttacacccagtcctgctcttcactgctccataagcttgatcccattagtgactttacttacttgaa

SEQ ID NO: 54678 - DNA, 2247 bp, Homo sapiens
aaaataaaaaattttatatatatatatatatatacacacatatatatatgtgtacatatatatgtatacatatatatgtatacaccttgttacaaaggtatatatatatacacctttgtaacaaacctgcacatgtaccccctaactctcaaataaaagttaaaaacaaagcactgttctaaagcatggctttgattgcatcatccactgcttaaaaatctcagagagttccttttaaaagtccatgaactaaagctactaaataaagtcctcactccttagtctcaggcccttccaacacagcccagtccaactttctagcctcatttcctgccactcccctccattctctctaaccacactgggctgctttcccttttagggactctccagtggccctgcctctgcactgttccccaggcctgcagtgctcttttctccttccctcctgatcaagtcctagtcatccttgaagatctgatccaaatgtcatcctctgtgtcactttctccaagtccctccaggcatgctgtgtggccagaacataccgtacacagccttgctatcacccttgtgcgttggcattgtctgttacatgtctattatgttactagattgtctttgcccctccagccatgaccatgctatttattttcatttgatgctccaagcccagcacaaggcttgccaaaaggggcaatttagcacacatatgataaataagtgaattccagactgtggttgccccagttgatatctgttgcctgctccacacatgtttactgtattaatcaactattgctataataatggtgcacagcaaaacacacacacatacacatccaatctccaacaatgaacatttatttttctcactcagctagggcagctctgcttcaggcagcaatttggctgagccttggttccaaattgcaagttgggttcaggtttgctctacacacatttcctcattctggagccgggagctacatgtgtgcacactgcacacattagatctgctaacattccactagccaaagcaagtcacacggccaagatcaatatcagtggagcagggaatataccctgtcctccacagtgtcaacaaagccgtggcaaggcatatagaggtataatattataacagggagccaatcaagtattgggaaggaatcattggaaataataatctaacctacaaaatgtaccttttcccattttggggtcgtcactcatctttgttcattctgctcagatgacatcatagaacctgctgactccccagggcacaacctgaagccagtaaactcattcttgtcttactccatccttgaagtttcatctaccatatgcctaaagctggaaacccagaaggaatagacctagccattgtattttttatttattttatttttatttctgctcccactctattgggatcagccattgtatttttaaaaacatcatttgcaaagtcactatattcattagtggaaactctcattgttagagaaataccactccactctgttatggtgaaaacacaatttctgttctttcacaaaatgctacaggctgtgaaatttctctttacccacccaatctctctattcataaccacaccttccttgcactagaggcctattcactatgattttagctttgcctaatctaaatgctgacaagccactctccctaaaccagtaagtagagggggaccagtagggatctcagatgatttccatggaggtgggagagaaagcagcaagcccctccccaccccctacatacatgttctattgctaaggattacatcacactataggtcttttccaggacagggcaatgccctctaaaagtttgctgtgacttgtctctgtgagttgtttagagacaggtagcagcacgtagcacacctccagcttgtaaacctctcctctccccctactcagccttcccatctgcttttagaaaccagccaagacatcatccagtatccacacagatttccagagaacagacggcagattctatgtcaaagcagacaacacacgtgacatagtcaaaagatcctagcacatagtcaaaagatcctagcagttaggagatgggggttctggccctgccactaactgtggtgacctgaggtaggccccttcacctttccgcacctctgttccctttctgagctcctttttctctgtttcagcccattgtttgactccttcataacttaatagggtttgt

SEQ ID NO: 54679 - DNA, 1185 bp, Homo sapiens
ttcattcacggagtctcaagctttttctttctatgagggggagttcttatcccatcaatgtattctctcccagaacgtgctcctttcccttcagcacttagtcctggacttttcccagcccaattatgtcattcctgagatggatgctcataaatgccagcaaccctagttttgttgccagtgcccattgccaggatctgcccacgtattccctctggccaagagcaaccccttctctgcctgcccctgcaggccgaggaaggccacggccccagtgcctgcccctttgcagaatggacccttctcattcacagcatcttacttgtgcccaggttttgtagcttgcagagttctttcatagacaatttctcatttgatacaaaaatcttgagaagcaggcaaggtagacatgagttttctcatgatttaaaaaatagaagttcaaaattaattaatttattaaataagttgcccaatgtcataaaactagtagtggcagatgcaggaattcaacttgggtctcctgagttgtacctgcccaaccaccccctttctttaaacccaaggctgcatgctctatctcttaatatctgccgcagatctcttccttgtcttggtgcaaaccttggattcagaacactggaagctccaggtaaatagcacttcctccagagtctcagtccctgggacccacacctgggaggctgaccttcccccacactcttctctacctggcccctcgcttcccaagggggcaagggtgatcaggccatttctaactcgctactgttcctctgaatggtggcatctcagtgttaagtcccaatttctgcccagcactaagccatgcttctaacaatgctcaataaatgtttggcaaattgatagaaaatctgctgtctgcgtattttctgactcactgcctcacattgccctctgactcatgtattctttaagacttgattttaggccaaatttctgacaagcaataccaactcttccaatttagagactccaatatgacctatttcttgctataatcagcattcttttcaaagggtacttatgtgtgcaccaaatactggaacccccgctttatccaatagtgtgatcaaggctatgatggagctaaagggatccaaagctgcttaatccaaatggattgagggtggaagagaagaaaga

SEQ ID NO: 54680 - DNA, 2081 bp, Homo sapiens
caacagcaggaggttgctacaaccatattatcaaaatccagaagccagggcaacaggacagaaactagaaactcaagacaccctctgaatcagagaaataggaaatggaataccctgatttctctttttctatttttctccaacttccccactgggttccccatggataaaacatagacagaagccagttggcaaagaagcttaggaaatgcagtgtacagggcagccctcttggaatttagagcagaagagaggaagtattaggttggtgcaaaagtaattgaggtttttgccattgcttttaatggcaaaaaacgcaagagttcaaagctgctcagccaagagctagaatttgccatgaggagagcactccttctcagctcatggaagagagcccagtaccttggtctctccagatattcaaatttcttatccttaaactctagtcttcccatgaatgggtcccccacaccagacccaagcccacttgaacttcccactcttaatctcagtttgcactttgaccaatggtactcacatttcatcaacggtactgacatttcatcatctttgtccttggaggccaatccagatgctgagcagctttgaactctgtgtgtctcttcaaaggctctggactctgtgcccatgtccaaacctctgacctttgcctaaccccagggatctgtcttcactcccctattgcagcagttctttcctcacaaaatcagtggaaccagaaatagaagtctgagtgcattaaagttataatagtagctaatgtcatgactaaaactcatgtatatctatcaaatataggatggaataaggagaggaggcagaatgatatgagcaaaatcctcatctgatgcaggaggttaacagataacatttaaaactgataaatcaagatggagatatatgtgtatattaattaggatctggaagtaagtgacagaactaaaaccagaaacaattaaaaagaaataagacaatcacctttgggcattgatgctgccagaaaaaaggatggaacaagggtctgttgtattttattataagtcctccatattctttttttttaatcatcatagattctgtgctcagtttttacactcgcagatccctctacctggaatactctgctcagatatctgcatgattcattctctcagttcttcctttgggtctttgcccaaatatcacctacttagtggggcctttcttgagcagtctatttaaaatagcaaattctccctctgctttatttctctagatatcacttatcatattttaacatctataaaatttccttattcattttagttcttttctgtccagctcaattacagagtaatcttcacgaggtcaggggttttgtctgttttcttcactggtaaatgcccagtagctgagcaatgactggcactattaactgactgtgtgaacaaatggcacgtgtaaattactaggtgcaaaagattgtaatgaccaacaaatgttttcaaaaaactctcacttctttttgcttgtttgttttgttgttttactttgaggtcattcttggaggattaactgtgcctgaagttttctaagtggattactcttgtgtccctttttgtcattcagagattcctttcagttcatcctgatgaagcatcaggctggtcaagtgcaaggaactgatgtgagtggggaaaaggaaaagaggtttcctggtggcacactttcttacccgtgaggatacacttttcccaaaagggtataatccaagaaaggaatgaggtcaagctccagagtaatgacataatcaaaagagcataatgagtgttgggtcttatttgtttgtttccttaaacatttcaattatttaagtcttaaaaactaaacaattaaaggttagacagccttgttgacgtatgggtcttttagataagggagtctaaaaactgcacctttcaaagaccttattaagtccattgtagtcaatgtgctcttagcccatttcttttgaaaatacaagtaattcctcatatcagaatccagatagtagcagcatcaaaaacaggccctctcttctg

SEQ ID NO: 54681 - DNA, 501 bp, Homo sapiens
gcaattacttttgtaccaaactaatatgattatcttcacacttaaatatttatctacactttttaattgttttcttaagacatattcatagcaatgtctttactggagattgcattaactcatttaagccattgaatgtactacatggcaaatgattgtttaaattgtatcactgccaagaacctaaccagctaatgtgctagcaggaagagaatgattagcaattaccctccagtaaaccacaatgtcataagattattgtttgttttactaaaagttgtcacatgattacaggtcattaggagccaatgataatgaaaaccctatacgggtttcataagtgtgtttaaatttcacaagctttgtatattccaccaaaaagccaaatgcttgcaaatgttctcccaatcttacttctcaaagactgctcttcattttcctcccctcatttctgaatgtcttcaaagacccatatcaaatgctgtttctttcaggaactca

SEQ ID NO: 54682 - DNA, 1279 bp, Homo sapiens
taacacatctagctcccagacagcatttctagacacaccctgggaagaagggaacccactgccttgaagagaaggactcaggcctggcatgattcaccacctgctgactaaagagcctttgggccctgaataatcagcagcggtaaccaggtagaacacaccatgggccttgggtgagactctcagatgtgctggcctgcagtgtgacccagcacattcacagctgtgatgacaaaaaggagagactgcttctgcctgcgaaaagcagagggaagagtaacagggactttgtcttgcagcttagataccagctcaaccacagtggggtagagcaccaggtagtaggcccatgggattcctgattccaggccttggttcttggcaggtatttttagacctaccctgggacagaagggaacccacttccctgaagggtgagtcccaggcctggcagcattcactatagctgactgaagagcctttaggccttaagggagcatcagtggtagtgtgggagtactcctcatgggcctgtgctggtggtgactgaggggagagactcctgtgcctggggaaaggagagggaagagtgggaaagactatgtcttgtggtttgggtgccagctcagctgcagtagaatagagcaccaggtacatatctcaggtttccaaccccagaccctggctcttagacagcatttctggacccacctagggtccaagggaactcgttgccctgaagggagggacacaaacctaactggctttgccacctgctgactatagagccctagggccttgagcaaacataggcaatagccacggagtagatacagcaggccttgggtgagatccagtgctatgttggcttcaggtctgacctagtgcagtcccagcggtggtgatcacagtggtgcttgtgtcacccctcccccagctccaggcagctcagcacagatacagcaactgtgtttgtttgggaggaagtaaaaaaacaagagtgtctgcgtgataatccagagaattcttccagattttatccgagaccaccaacattgtccctctgtgaatatgcaagaaccacagtgttactgggcttgcggtcccccctaatgcagatatggctgcagtgaccaaaaacttagatcacaatactcgagtctctttgaatacctggaaacccttccagggataggtacaaacaagcctacactgcaaagactacaataaatacctaactcttcaatgctcagaaaccgacaaacattcacaagaatca

SEQ ID NO: 54683 - DNA, 2996 bp, Homo sapiens
taagatgaatcatttctagcttttgatttaaagtgagagatacgcaacttttcctttcacttgaacacctagaaaaccattgcagagttcttaattggcctaatttcaatattattgtgtttaagggaacagataggccccaggagagggagagagatggcagagtagcctgtcagtggggcagtcagaacatacacatttattgattgattgctgtcttctatgggtgtggtttgtggtgcctcaaaacaattacaacagtgatttcaacttatcactgatcatagatcaccatagcagatttatgggaagaaaaatgataaacgcaatcatattggtagtgttctagtcctaggttcgttcatgcatgttcatgttattgataagcaccataacttcaatttcatatgtataaaaatgctcaaaaaagtgtacatcctcttttagcactgtagtgagtcaacattccccaacaaaaactggatttcctgaaaaacaggttaaggtaggaggttgggggggggatgcttttcagaatggcaaaggtcaacatgtatcatcttctgtaagtaaaatgtatgtataggcatacctttctttcagtttaagacaagggggtgtagtggggaattatcgtgtaaaactacaccagtatcttaagcatgaaaatcaattatatgcttttcttttgtttgttggtcaaagaaaaagattataactcagaaaactttcttggagatgcgtatgctcagtgtatccaaactttaggcatgtcaggtacaatattgatttacaaaaagttcctctaatcaatcctgagctaataacttactgtggaaagagtaattgatcagagccatccctccaattggagtcaacttccatgactgttcggatttcctttattttgggggcagttcatccaaacttctattaaacggcaactagttcacttttgagaagtggtttacaagaaacaacaacaacaacaacaaagcagttgcggaggaaagaaaagagacaaagtaaaaaaaacggaaaagaaatctcccaggagaaagggatgtggaagctgaaaacacggacaatttccacagtaagacttccaaaagaatgtgcaagatccgagcaaaactttcaagggctctttttcagtgtaatggtagtgagaaagttcagcctggaaagcccagggcttaaaacaacaacaacaaaaaacacaatatgcaggatcgttcggcttcagcagaacccaccgcaaagatggcggtgggacgaagccccttctcccgccgccgaagcctctcgcctcacatttcccacaaacccttcgcgccgcctcgctagccgaaacctgcccagccggtgcccggccactgcgcacgcgcgggacgacgtcacgtgcgctcccggggctggacggagctggcaggaggggccttgccagcttccgccgccgcgtcgtttcaggacccggacggcggattcgcgctgcctccgccgccgcggggcagccggggggcagggagcccagcgaggggcgcgcgtgggcgcggccatgggactgcgccggatccggtgacagcagggagccaagcggcccgggccctgagcgcgtcttctccggggggcctcgccctcctgctcgcggggccggggctcctgctccggttgctggcgctgttgctggctgtggcggcggccaggatcatgtcgggtcgccgctgcgccggcgggggagcggcctgcgcgagcgccgcggccgaggccgtggagccggccgcccgagagctgttcgaggcgtgccgcaacggggacgtggaacgagtcaagaggctggtgacgcctgagaaggtgaacagccgcgacacggcgggcaggaaatccaccccgctgcacttcgccgcaggtaaccggggccagcgtcccctcgcctcgctccagaccccacctgcgcagccggggcccacaggtctgaaaccagtgctcctccgcctcccgacctttctccaggactctggtcctggtgatctcgctctcttccagtggggactaaggagattaggggtagggtgagcgtgccacactcgctggaagttttttgttttgtcttggtttggtttttttgccaggtgttgggggtggtttggggttttggctttgttttgttttacagtatcaacaatacctgtaccaacttccggtcttgttaccctagaaggcctctacacacaagaaagagtaggggacgtagttgatagaccttatgatttaaaaggtcagttacctccaaaatttttcgttcttgcaagttccatttgggttaaggtcttgaaggactttgtaaaatacaaggatgtaatttaggaggagtagcttaataggacgttgacacattagcgttaattggtttatcagaatagccaatcattaccaagtttctggagtgactagaacgggaaataggcaagtttgggagaactgaaacctgacttaggctgggtgcgggaagccttagacacacacacatacaagttgggcggaaagtggtagtataagagaaaagatagtgcaagtactttagcttgaatctagaatttaagttgggactaaccttgcttcattctgaaatttagatcgtttgaattacattattttaatatttattaggttcactttatgatttaagcatattaaatttagtcgaaaaatttaaaagagccatagatgggatattcagcttattcccataaagcatgcatgctgttcacttgtaggaaagatgatgactgtttctaacttcaggtgagtcatgcgtgattgaaaatgggagtacctcctcttacctctgacaatcctggttttttgttttgtgtatttcatgattgtttaaaacaattttttgaaaaatcggggaataccttttaaagtactcctgttcttttggggctagattgatgaagagaaaaggagcagtgagaaatatttcctctttc

SEQ ID NO: 54684 - DNA, 708 bp, Homo sapiens
tcttaggctcaagtgatcctgccaagtagctatgactacaggcacatgtcactacacttggctaatttttaaaattttttttatttctttagagacaggatcttcctatgttgcccaagctggtcttgaactcctggcctcaagtgatcctccactccttggcctcccaaagtgcagggattacaggtgtgagtcaccatgcctggctgtttcttccttgtttgttttgttctgttttgtttgttttgttctgttttgttttgttttgcttttatgataaagactttaaaacaagtatatgtgttacaattctggaggcacaaggatttcattttggagcactatttagatttcatacaagttggaaaacaaagcagtggcctttggagatttcattcttaggcatgtgggtagaatacagctcctctctgttttaagtcagtgccagttccaggcttcctggccctatctaaggggttggtgcctgggaaaaggctgcagtaaaggtcagaggtgaccttgcacaagggtaatgagtcagtgtgtgtgcatccttcatgctcatgacagtagcacaagcttttaagaggagcagtactacccttatggccagatgagaagggccactgcctaagcctgctctggagagggtcctgcatatcacaaacacatttacaaaaaaaatattaaagagcacaaaagttcgtc

SEQ ID NO: 54685 - DNA, 1316 bp, Homo sapiens
agcccctgaattagtttcctagggctgccttaacaaagtaccacaatccacatggcttaaaccaagggaaatttatcctctcacagttctggaggttagaagcctggaatcaagctgccagcaaggccatgctctctctgcatgaagactagggaagactccttcctaagactattctggtcctggtggttgctggcaatttgtggcattaatcagcttgtagatacataattgcagtatctgcctccttcttcacgtggccttccccctctgtgtcttttctcttcttataaggactccagtcaaaaatggatttggggcttaccctgctttagtatgacctgatcttaattaattacaaagaccctatttcaatataaggtcacattttggggttctgagaaggatgtggatctttggaggcctattcaccccagtacagtcccttattctatactcttgtaaatagtttcttcattaaactccagttacccccttctgagtgtgcagtatggggacactgatgatacaaagtataccttagaatcaataaatacagtatttttgactaacaggaactgcactagaatcttatattagttaaggtaaatgataatctcagaatacaggggcttaaataagaaatacagttgaatctcactatttgcagtagtgatgttctgtaaagtcagtgtgaacactgacttagcaaatacagaaccactgctcctggggaatatagaagattaggttcctatgagcctttggtcacaacatttttcatcaaccattcaatcacaatttgttttatgggtttttctgtttaaggacaccttacttaatatatactgttgactcgttaacgttgaacactgtgactcatgcctgtgactcatgcctgaaggaagtttagcaacacatgtattttctctttaaagcacatcacagtttcctgtgcttaggaacacaagataacactttagcactgtgtttgggggccattttaaactgagaaattactaacaaagagcacaaaagtgcaaaaaatgtggctctaaataaaccatgataaagagacttatttacagtattagaactgaagcaaaaaggcagagtgatgccttctttgacctcagctgggaacaagcatgttggatgacaaatttttcaccactctctgcaggtgtgtatccaccaatgattgcaaaggcacaatgagtattgcttttggagttaccaataaattttagcaagtagggaaaatcacaaatacagaatccacaaataatgagtatttattgtacattttgtttttc

SEQ ID NO: 54686 - DNA, 1591 bp, Homo sapiens
cagagggagtgccacttctcagcgcagtaggtctccgtgagctccgcgttcccgtccagcccgtcggggtcgggcccggtccccatgggtcgctcctcgttggggaccaaggccgccttcctcttgccctcgttggtcttcctctctgaggggttttctttgggcggtgcgctttggggaggcggggtcccagcggctgggccggacgcacgctcccgggtccgcccccggttccgggcccggggcttggactcccccgcgaatcccgcgacggtggggcgtgcgggcggggacgcgcggggcactagccgcagctcggcgccgtggcccttcttgcccgcgcacaagcgggcctggagcggcgcggggtcgtgacagggcctccgcttcttgcgcagccctcccagcacctgcttccagaagtgcgcgcggcgagcggcgtaggctgcgcagcgctccggatgcccgcggtaggcgcactggtggcgcgccccgtccgggctctggcagcgcagcgccagctcgctgcccgctgcggcctccggggcgggcagcaggagctgccagctgcacgcgtgctgctcggggctgaggaagcgacccgaggagccgccagtgggcccggggaccggctccgccacgttgctagccgcccctttctccctccgagcagccgcgaggaggcaaccactcagcagcagcagcagcgacggcgacagcgacgctcgcagcttcggaggagtcatgctccgcggtttccgcgctccgctgttctcagaccacgtttgtcggggctggaccaggcaaagagcattccccaggacctgcggacagaggcagagactgccaccaactgagccacacgcagcgcttcgcccagacacatgcacctgcgaactactcttccgcagactttctagaatctgcagcctgcgaggagaccctctgaggagctttcctggggaaactgcttactgtctaaataatcactttcgaaccatgtatgcattgagattttcttccccttgcaaatacgatagcaaaacgatgcgtgataattgccccctctaccccttccttcattttctcccttctccaacctgcaataaactatctacaaaatcatttcagatgattccttggaaacatgcactttactacactttgaacttaccgagttctgggagaggcgccaaagccttattagggtagagggaacgactgcacgggggagtagtctgttttagccggctccctgtgaatgaacgtggtatcaatggaacagaagaggcctacccttcttcgcccctccccgatttctctcacactgggagacttatcaccgccgcgcttctctctctctctccctctctctctctgtctctccagatggatgatggaagcggtcctgtagtatgaaatacaaatcttgtattttgcttccaatgtttaaaataatcaggcaaaattaaccaagtttttcttctttcatgtacttaaccatccaaaaaataaaaattaaacaaaagatctaagttttaaaagttaaataaaatgaaacaaaacaaacttcagtattctaaactaggca

SEQ ID NO: 54687 - DNA, 1881 bp, Homo sapiens
cacatttagaatcgcttgaacccggtaagcgcaggttggcagtgagccgagatcgcgccactgcactccagcctgggcgacagagcgaaactcggtcaaaaaaaaaaaatcaagtgtaagatgataagggcctggcagaagtgtttaaaagcctaatgaacttaaaaatattgaaaagccagataagtcccccaaaggaacaaaaatttaaaaatggtagttttcaaatctggctggctgagaaaatgatggtacaaacaacataaacaattgagaaatcaaacttggcaaaatcgttggtcagaagaccttctctccaatacctaggcagaacttctggcaaataatgacaaacatctgagccatttcttcagtgtcatagcgactttttgctttcactcctcccactggcttcaccacctggacaagagcatgttaaggtccttctgatcttgcttcctagatgcagtacggtgggaagcagaatctgggtagtgtggaattagaaaccaagctttcgaagttccaggacttggactaaatcgcctttttccttctctgtcaaataaggggacccttacttcacctccttccctagttttaagactagacaccctctccacatcagcacaaagcgcttttatttaggcgcgtgccgccaaaccaaaggcgctcgcgccgagctaagctcctgtcggtgagcttacgtcacttccggcgcgctgacgctcagttgtgcgtgccgacgcccgcgtcagcaaagagcggagctgagggtacccggtttgaagtcgtgcgggtcggaggactgccgcctccgctaccgtcttggacccctgcttaccggccgccgcggggacgagctcgggtaggcggcagggcagatgcccgagggcctgcgctggaacgccccacgccgcaccggccgctcccctgtgctccgcggcctgggcctgcgccgctcagctctctggaaactagcgcctcagctgcgcggcgcgtaggtcgcggggagctccgaaccgccggcgcccggccatggcggtctccaggtgggtcttgctcctgacgagcaaactggaaggcgattcagggaaggcatggtctcctcttagagcccccactcctagagaagagcggttctcattgtcactgggctctggagctttcttcagtagacttcggagttcgccccgtggtcggcgggggtttgggctcgggttactcctgggtaaatcggttcaataatgcctttttcttgttaatagaccccttggcacgttagagctgttttttctctttcctcaccatgtttctgttctctggtttctcttccctctttcgattctaggggagtctcttatctttctcagtattctaaggctggtccctaacctccatttcatgggaaaacttggtagttactgtcgatggaggggaaacctgaattactattatctaagagaccgtctaattatgttaccagttttaatttacgtttttaggggtatgttctttcctgagatgttttttaaaattaagtataatttctccttttgtttggcagtaaacattccaacgtcagcgttgtaaccttaagccaattatcgtattagcatcattttccgtaactaaggcgtggaagataaatcacagatcttatattcttttgaaatattgcctgtcaacaggaaagcccaggaaaactatagaaaaactaacgacatttatttgtatagctataggagaaacattactttttcctccggtatgatagaatggttggaaagcttttgtaagcggaatttggtgaccctctgtacatgtaattaagggatagttcctctgtgatagtgatcggatggattcaccaagttcctt

SEQ ID NO: 54688 - DNA, 631 bp, Homo sapiens
cctaatattctgtgattgctgcacacattttgagctcatgtggccagacaaaataaaaatccaaccctaattaggtagtataaaatagtacaagtctacaagccctctgactcgttggaacctcaaagcataatatgtgttacggttgcttaactgtttttcttatccagaaacgtgtggttaacgtataccgattgataaccagaggaacattggaagaaaaaataatggggttgcagaaattcaagatgaacatagcgaatactgttattagccaagagaattctagtttgcagagcatggggactgatcagcttcttgatctgtttactcttgataaggtaaagaacttacacaatttgttgtatctttgagtcacaggcttcctgtgactgctaagttgaaagtattaaaggagcagcaaaatgcgtttactttagtatccatgagatcaccactggagggaatttttggtgcctagataaattctgcagcatactaggggatgtgtgaagttttgatttttttttttcattgatgtcttcagtgtcttgccacaaggtttctttccttagtccttttctgctaaagcacagcttatcactggagtcagtaagactcatgggtgaga

SEQ ID NO: 54689 - DNA, 1527 bp, Homo sapiens
aggtgcccgccaccacgcccagctaattttttgtatttttagtagagaaggggtttctccctgttagccaggatggtctcgatctcctaacctcgtgatccacccgcctcggcttcccaaagtgctgggattacaggcgtgagccaccgtgcccggccaagaacagtttttaacacaaacctcaagacttcaaatttctcaacataaccacatatccctacagctagagttctctcagttacaatttagtatttagatattcatctacctatacatatcgtcaagctcatttttaacatctcactctgtatggtcccttctttaggttacaacacccatcacatgaacatcctactgcataggatttcattttcatctgttcatctcaaggcagttccaaatggcaaaccattcggtgtcaacagtgcaatcaggtggccagctcgggaaaccatctgaccaaagaccccctcaaagccgtatgttctttttcccaaaaaggacctggttcagagctcagctacttcccccatactctgatttcttttttccttttcctcttttcagtaccgttcaaactcaagctctttaggaaaaaagtctccatttttctctccccaatcctacaatccttttagtctacataaattggaaaaacaatactgcagaaccatcaggactgctctccccaacaagaagcagcaccccagctcatcctaatagccaggatgagtcagctaaacctaggtctgctgacatacagctgcaacagctcagttgtagtggtgatgaactcagacccaccccagctgtcagcaattctattttaagcatcacagacttcacaaaatgactggattgccccagcaatatcagaaataaactagtttgtggccgggtgtgatggctcacacctgtaatcccagcactttgggaggccaaggcaggcagatcacttgaggtcaggagttcgagaccagcctggccaacttggtgaaacccccatctctactaaaaatacaaaaattagctgggcgtggtggtatgtgcctgaaatcccagctacttaggatgctgaggcaggagaatcgcttgaacctggaaggcagaggttgcagtgagccgagattatgccactgcattccagcctgggtgacagagagagactctgtctcaataaataaacaaacaaactagtttgtggtttgtgaggcatctttatctcttccatggcataaggagttggtttattattaatcaccaaaactaagagccacaacaataattgtggtttagactctttacagcacactgatattggcatctcatttcaacgtaattttgaccacatagctccctaacaaataggtcagccagtttcaggagtttagatgctatctattattctcaagtgctgaagaggaagagatgccttccctgcatcttctgggggtagtggagagaaaggagtctttagccttagtaagactatatcctgggtagctctgggggcttcagtcagacctc

SEQ ID NO: 54690 - DNA, 836 bp, Homo sapiens
cttaaacagcaccacaccatatgctctaaaaattatccctactttagagctaaggaagctaaggatcagaagagtgaagtcatcttggaactgaactccaggtttataaaacagtctacacgtactctttctactacaatcatgttgtgtgcctacaaggctccctgtcctccaggctactggccaccagtcacagcttccagataggctcctgaacaagtcaacatgaatttttactagtgagtgactaaccactcttttttctccactctttatgcctgtttgcaatgcatcaagaaatgaccaatggacatttgttggacctactaacaaaactagcagttagcaaagcttgagaaaaatgagttagcagtgaaactagcactgtatccagctattttaactttcaggttcacagtctcaggcaatcttgtactccagccagacaactttgtccaatgtctatataaatgtgaactttcagctccatggtactaggacaaggatgttgttactggcatgctgattactaaaactcttgagaggaatgtacacataaaagttcaggttacctaagtttttcctgggaagatgcctattctttgaatgagcttcatggaatactaattccacaggaatctgcacgagtatcatccccaaagcaggaatgtaaaatgctggattaaacaattttacacaaatgtatatattgtaagacttctcagaaccttaatatatcaatgtttctcaaatgattttggctaaggaaactttaattaaaagacaaaatggatatacaatgcacaaagtaagtgctcaaaaaatgacacctatta

SEQ ID NO: 54691 - DNA, 1939 bp, Homo sapiens
aaattcagcttgtggagctgtatcctgaaccactgcagcattcataaaatggcagaccaaggaatggctggttttggattgagaccaaccctagaaggaaaggtccatggcctggacagacaggcagctctctcctctcacaaaatcaagcttcctattaccagtgaccttcctagagaaacctaaagggcactgctctagccagagctgcctgagttcagactttttttggtacaggcagtctgtcccaaacattctctctgactttggctttcaggtcagaggacttatctggtttgcctcaggagactttttttggattcaattcaagggtaccaaaaacatctaggagatgccaggtatgatgctaagtactgaggttgcaaagatgaacaagccaaagaagaaccctgatccagaaaaaatcagactgtcaataactaataagcaacattaaaagcactatgttggaggtatctcctacaggacactggggagaaaaaaagggagcagatttgtccaaacatcagggaacaccaaagagcaaaggccatatctgacccagaggctgattacttttccagagagtaaaggcattccaagttcaggaaggtgcacaggccacggcatggaaaggccaaagggtcaactcacttggacaacggtgagcagagttcattagttagagtataggattgagagtggtgggtggtaagagttgaagcagctcatcaatccctgcctgcagcggagagcactcactgtaggtctctgaactggatctcttattcattttcctcttgaatgaggatacctgatctccaagatttactcaacacttatgtaatctacacactgcaggggactactatcatgagcaaattcttgttcttaaggagtttatatactagcactagaagattgtatagaataaattcacagagaactctgacttaggaacaatgcattaatgatcctaagaagtatttttgtaaacatatttttaaaagttggacttcacagaaagaagaaagatcactttcagagaagacatgaatagagaaatcaggaaaggctttctgtaggtggtggcacaggggccagaccttaatggtacaacataggtgaaaacattgaaaacacggagaagacattccaagggaaacaactaacctaagttaaaatgtagaggtagctctgcagatagatactgcctaagtgcacggattcctaaacactctgcttagattcagaactaaacatatttctttaacaatatttactgtgtgaggctgagacttgattctagcctgttttgtgttttctacgacactaccaactttctttgtgggttggttgcttggcagcaggggtgggaatagttgggaatggacaagaaaacaagccggcagcgtagaaccacctcagagttcaaaattggtaatctacttcctgtgttcttagcaaagtcttgcagtccagggcagtgacctggggcatttggacttaaaatctgctgtttacataatcacacattccctatataaagaggtccttgtgaagtctgccaatctgtcagttctagtcacagtcagttcaaacaagcacctgaccaaggaaactgagaccagactgggggtgtgggagagaactggtcaaactcgttgggtaattttatgattactgagcattacatttaagtcacaggcaaggaccaaggacgctaagattattcaacacctaataagcctaagtattgtgttagtgctttcacacactgcctcacataatcctcttaacaacccaacgagtagtattaactcagataagtaaactgaggcttaaaggttaaattacttgctcaatgtcatatagctagtaaatgctgatgcccacatctgagtccacaaacctagcttatgccccactgcctgttaca

SEQ ID NO: 54692 - DNA, 1549 bp, Homo sapiens
ctcagtctgccaaatttccaccttccatttcagttcctaaagtctattttttcctcaataaaagttctcatcaggaggagttatgacttctctgaactaaacaagcatttccccccatcccatcacctctgcctggtcatagcacagtgtgtacttaggtgaccttgaacaagatgtttctgttatttacgtggctgctcaagctttgtcctgtggactatatattcctaatgacttctttctgtacagtccctcaaactgtaaatgctttgaaagcaaagactaactttatagttcatcttcaatacaatgctgaagagacaagtgtttataaaagtgtaaactgagagtgtgctaagcttttaaaagcaaagatagatggactccatctgtcaaaacagaacaaaacaaaacaaaaagcccacccttgctatcacacaatgcagtttccatgtttttacaagaaaatccttcctgggtatgaaaatcacaatcaagtaaaatattaaaatatagggttcataaatcaccaaacagtgtgagcactataagccaggacctgatttttttttttcttaaaggaagacagaatgttactcaaaagatgacgaactgcaaaaggttaaatacaggctaaaacccttggcttcccaacttgatcagtttacgtaactcagaaggtggaaaaacttggaatctggcctaaaataacactgacttatttccattcaagttatgctacaagggaaaaaatgtgaagtttgaaaactttcctttccaaagccagatttagacaagttgaaggaaaaagaaataaatgctacactgcagcccactgcagctccacaatggcctgtttttgcccactcaaagtagattcctcttccttgttcctcaagcaggatctccttagctagctggcttgtgttcaaactgaatagtatgtggcctggcttgtgccaggttcacaaaccatgctggtattgcataaacttccacaactacatgaccttggttaagagcaccagagggcaagccagcctagccagtgcagaggacgtatagaatcaccagcagaaatagccatccaggaatacaaacttttctaaaagtgggtgggaatcattagtgcacaagggtttggtcactcttgtataaagctgtgtgcctattactatttctgttcacctggaccctgtgcccctagactgctgaagctgacactgtaagctgcccaagtaagctgagaatgacagcttcctccattccactgccagcatcattggcttctgaaatcagtttcagagccagatggccaaactcatgtacaacatctgtagctggctgccatcattgcctttgcccaagaggcctcaacagtggtagcacagctgtgctcattgcacagcagatgccagctcctttccctgggcccatattctctgtcccactatgagaggtgaggctattgcagtatcaggatcagctgttagtgcagaacaaggggtagaaggctcagggtggacaggcattttttggtagctccagt

SEQ ID NO: 54693 - DNA, 662 bp, Homo sapiens
ggcagagacagaattcacacccaggtttcactgactgcaaagtcagaaagactgagttgaaatttcatctcctatatggagaatataaaatatctggaaggatgttaataaaaataataacctttgttacctctaggtagagagtctctagtgatttttttttttttttttttttttttttgagacagagtctctcgctctgtcgccaggctgcagtacagtggcgcaatctcggtcactgcaacctccaactccctggttcaagcaatcaccacgccctgcctccagtgattttttttttttcttttttactttccttttcgtccttttacatactatttggatttcttataatgagtaaaaatgtatttttttctgaaaaacaaaggaaattaagctctaggaaaaaaaaacaccaaaacaaacaaacatacaaaaaccagttactctggggccaggcagggtggcacaggcctgtaatcccagcactttaggaggccaaggcgggcaatcacctgaggtcagaagttcgagaccagcctggccaacatggtgacaccccgtctctactaaaaatacaaaaattagctggtagtggtggcaggtgcctgtaatcccagctgctcaggaggctgaggcaggagaatcacttgaatctggga

SEQ ID NO: 54694 - DNA, 1352 bp, Homo sapiens
gcaatttgaatttgctagatttgaatttagaaaaagctagatacaacagcaatcaggtttcatttattcaaaacgttatcaaagttcagcaggaattctctcagctctgaagagggaaaaagagaaattttaagagatgtctatgttttaaaatcttaaaactttgcattgggtgccatgttgttgggtgccatgtagcagtgcttttactctgtatctgtaattcttaaccatttttaagttatggacccctttgaaaatttaatgaatgttacagctcacttctctccctggaaatacaaatggagacataaaatgcagttctgatggctcctgtacccttttacccacctctgcctcaaagctcatcaacctatgactctacacaccccaagctgcaaagcatttcatcacctttatacccatttagaaaactatgccttgtattagaacagcagaactaaattccataaggtctaatttcaactttgctaagaccttattaatgatatctcagactggctaatataataacatgcactgatttatcagtgattttattcaacttaaataaaaggatggcaggtttcatttcttttattgcgtataatcctcccacatgattaattggttaggaattccttactgtcctttgcaaagccaggctataacccacaaacaacatgactaatcaactaatacatcctctaattctcagggtacaatttaggaaaatcaggctagagtcagaaaaagctcttgacttagaatggtagttgttccttctctaagatgtagtgttctaataagtagtccacaaagtaatctatcctaataaggttttcctttccacacattaggaatcacacaaaagcatgggtgggtaagaaatgtcaaatcacttgttcaaatatacccaacacatggctttcctttctaaaattcctccactctaaaacccacctgatttacgagtcatgaaaattctaatctgccactattaaccatttccacctctaaatgattttccccagctgcctaaaccaaaaacctggcagtcattctagactcctccttctcttttatttcctacatgcaagtaatcaccaagtccttccaggtgagctcctaattatttcttttttttttttttttttttttttttgagacagagtctcgctgtcacgcaggctggagtgcaatggcacaatctcggatcaccgcaacctccgccttctgggttcaagctattctcctgcctcagcccctcaagcagctgggattacaggcacctgtcaccacgcctggttaatttttgtaatttttttttttttttttgagtcagagtctca

SEQ ID NO: 54695 - DNA, 3315 bp, Homo sapiens
cttcccctctcccctttttctttaactgagcctagaagcttacagccaaatcaacttctaagtgaaggataagtgtttgcctgggagcaaaagccgcctgtgaacacacacccgcactacgcctttccaacccaagatgcccaggacactgccaattgctatggctgtggactagatcagaaagcaagaacagaaataaggacactcttcatttcaacctttttgtctggggcacatcctgagtttttcattggcatttaacaccaagacacaggactcatttttcattaaagttgcaagactttcactttgcccagtttcaaatgatgtaattgatctgtattttcttaacccaactgatgaaggacactgcagctttaaatatttcagtgctagctagcaaatagactccattgcaatatggctctgaaggtcacgtcctattgtctcttacctccgaaaaaaaaaaaaaaaatccttcttctaggtaacatggagagggttgcccttagaatttccactcttccacctccttcccttacacagtagtgagtgtttattaggatctcacactcataattttcccagcaggggcaatatgctgattgttattaatgattctagcaccttagcgagacataaacacatgtgttcacattagtttaactgagcatacgcaaccgtctgaaatagcaccactcaagggttgttaacctctttaagagtaaagtcagggtggtttgggtgtggaccgcttgcaggcggcaccctgagctcaggattgcataacctgaaatgtgtagctactcaaaatgataggaatctcagcctactcatcctgggactatgccggcaccttgccacacacttgcagctttacttgtcaaaggaagtcaaaataagaggtacaaacaccatgaaggagaaaataaactaaaagaaaaaggcttcttctaccctgaagggacgaatacgattcctccagtaatcacaatgttctcccaacctcatcctctgataatggaacagccctaaagaactggaggcttcggaaggggaaagaggagctggacattgctgccctttttaaatataagcgggtggatgattaaaagtcagagaagtggcaaaaggagcggggcagagggaaggagtgtgtaggtgcagcagagtattacctgaaatggcaacagattgttaccattatcggtccggaaagcgttatcctccatccaggacttggaagtgagaggggccgcgcgagggaacttgggcggcgcgatcacgttgctggagaagggctttttgagcggcgagatggggttgagcggggaaggcaccccgacacccacacccacgcccacaccgaccgcccggcgagggtcccggcccgcctgcaggccgccccaggggttggacggtgcgctccaggctgcattcacgctttggtgcgtgttccagctggacgaggccgacgaggcggcggctgcggcagcagcggctgcaaccgccgaagacgaggacggcttgctggtcatgatgggctggtggccgtacgccgcggcggcgctcctctgcgcgtagggcgcctggctggggctggcgggtgagcggcgctgctgcgggggctgcgcctgtggtggctgcgctggctgtgccggctgcggcgcgggcgcaggcggcggcggctgctggtggtgctgggtctgcgccaggccgatctgcggggagaaagtgcctccgaagactgggttgacatggtgcgggaagttctggaagagcatggtcccgttgactggggtgatcccctggaagaagctgtcctctaccgcgttggtggtgcccgtggaccaggtgctgccgaaggacggcgacagcgacgcgcccggtgccgcgggctcctgaggcggcggcggctgctgaggaggctgatggaaactcaagcctggcaggagcggtgattccatctgcatcttgtccgggccgttgggggccgggggggcagcggctgggctgagggccggcactgcgctgttttcctccggcttgggggtctctgaggagaggggcgtggacggggcttcggatacgctggactcaggttggggctgctgctgctgccgctgctgctgctggggctggggctgggttttgcttttgtccatcagtaaatcatcctgcatggtttgcgcagctgaaacgggaaaaaagagagacgcgttattgtcaatgtgatcatgaatgtccctcgctgaagcgggcgggtgtttcacttgcgaaaatccatcgccaccgctactagccaattgcaatgcaaatccataatctcccatttagaagaacaggtcaggctgttgggtggggaatagggaaggtgtcgagcaaggtctctaaaaatactgtgagagcgtcttcaacctttcagatgtcttggttccttttctgtattagtgagagatgtgcttataagacagaaaagacagcaatttcgccacgtctcttttcccttcaccggaactcagagcgttcgccctgcaatgagaaactgattctggttcctgttttttcccaagcaccaccctcccccacttatttgcatacgtcaataaatactgctgcgtccttcagcaaggttaaaaagacaccgcacacacgaccctttcttctcccttccccagctcgaacactttttaaaaaaacaaaacaaaaaaaccagtattagccctcttgattagcaaactgccttcttgcgttggtaattgtttcatttagctgcagcgaaccacgagggaggaatccttggcatttgttagaaggactcagctgcacaatcattctctggcctcccagtagctgcagctactccattttgttaggagacagttaattttaaaaaaaacgtttttaaagaagtaaaaacctactgaaacgtttggaagtgcttgcttcttgttactctaaggattatggtttttctgcttattccccaattttcttgtctccaattctgccgcacaagagatttcttggcatcgcagtgcttcaggtctcaacaggagcctaagaatttctctgcagagtggagaaatgcttctggttggatttaaggtcagagagtgcgcgcgagcgagcgagcgcctgtgagatagggtgggggtggggctttaaaaaaaaccctcagagatttaagtagacagtcaagataattctggggttgtcagattttcaattttgaatcctcctgctgctgtcttggtcacaagactttggcaaatttagaatccattctcttatcactagtattagcagcgaaac

SEQ ID NO: 54696 - DNA, 2697 bp, Homo sapiens
cacaggtcgtccaaaaaacgcattcgtttgagccgacagctctttcctcccgccaaagctatccctcgaacgtcagaagctgacccaaggagtgactgatgatttctcctttttgattccccacccccgccactcccaatccacctgcttgaaggtgtcaacgcgactagaaacggttaacagtgaccagcagcagagagagaaacaaacatccctgacaacccacagctgagtaagcaagagctgtttattcaccaacgtgttccatttggagactgtcggcgagccctggaaagcccaggcacatttgagaaggttcctggagagggagagaatcatctttccttcccccaactccccagccccaaacacacagagagactcgggtggaagctgtctggtccaggcagtccctatttgcccgccccctcaagaagaacctcacgcaccaaaccaaccgacccctcgcggaggtggtgtaattcccccaaaatgggctctgccgcaggagaggctggctccagcgccgggggcttcggaaggagtttctgccacccccactgccgccactgaccgccccgacgccacggccggggccggggaccctgataagaaatggcccttcagccccctcccctcacctggctcggtcccacctgagggcaagagcggaggcaaaaacaaacaggcagggagggctgaccttgttgctaccgacagtggagcggcgcatcctgctgcttcctggaaagcggcccgaaagacattttttccccctggaggaaggaaacgggagggcgccggccagacggcggcaggcgcggaggcgttggtccgggcgggctgtgcagcctctagtggagacggtccgaagactacatctcccaggctgctctgggccgccctgcgtcgtaaccctggcgcgcacggaggcggcgactcttacctcacaaaggtagctcctccgccggcagcaactcggcgcccgcggtccatggaccggaacctcgggccgacggacgggaacccgggccgcgatcgccgcctccccgcctcaggctcctcctcctcgctctccgccgcctccgccggactcccgcaggccctgcaccgccgccgccaggctagcggagctgccccgggaagctgggtgacgggttcgcggctgccgccggactgcggcctactccgccgcctctcagtgctattgtccctgggcctggccttgagcgggtccactggggaaggccgtgtgcgccggctccgcggaagatgccggaccaagccctacagcagatgctggacaggtacgggcagctgtgggggggaccgggagccgccgaccctcgctctggccctgcccgcgcccgccctcgaggctcttggtgagcagaacccggcgtgccgggaggagttccacggccagggggccgtgagaggggcaaaaagtttggagtctagacctgggggaggacagagcgagcggcctgggtcgtagactttgggtgaaacttagctaaggagtggcgtctggtttccttggaaccccgttttgacctgagagggactcctgttaatccacaaaattagttttccttaccctcttcccctcccccttccccctccccaacttgtgaagtgtttgtcagcgatgtcactggcaagaaccgggttatctttcaggggaatgacccccttataattttaagtctctgtctgagaaccaatgataagcattcttttggaaagcctgataggctgatttcattctcccactttccctgaacccgcaccccccgtcccccccgccccatcccgtccccacctccgaactgtaaggtcagagtatccgcaagggagatttaacggtcagaccagagtagaggttatggaaaacagccaaatgagtccaacgctgaacatttagtgtacttgacgatcgttgagttcattgaagacgtttcagctcgtacaggagtccagttgcccattcttggggggccccagtcggtaaaactctttgtgaagtcgggtgcaccgccctctgctgttgaaattctggtccgtgggtcctaccatgagtttttggagactctagatccacatttcccccgagccaagtcttacttcctggcatagcaagttgtacaagctaattcatgatgtttgtggttgcttacaattctcaatagacaccacttgccacccatttcagcaggtggtaccaactctttgtactcagtaaaattccaactgtaaggtgttaaatgaaggccctcccttaattgagtttatacccagttaaatgcttttgggcctgccacacccagaacacaaatgacccaagggtacacatccttccagagtgacagacatttttttggagcttagaattttgagccatctcagttaataggaattatgtcactgatttttttcagttgagataactggtgattcatccagcccttgtttcaggtcaacatcctgacaattgtattgactgctttatatatatatgtgtgtgatatgtgtgtggtttataagctcttggaagcagaaacttactattgtttatcttgaatcccagaacagagcctggtactcagtaggtaatcagtaagtatttgttgtatgaactaatgcacaaacttatttgtcagtttccccagttgtctagggggtctgataatttac

SEQ ID NO: 54697 - DNA, 2843 bp, Homo sapiens
ataacataatggatatcctataattggcttttgtagagattacacccatttaatctcccaacggtgtattggagtgcctgcttccccattgcctttgccaacatgctgctatcaatacacagaactagttatatctgctgccttagcattgaccaaagctcagcagaatgctcactcaggtattttttttctcttttattatgaaatatttcatttgtggaaaaggaatatatcgcagtttcatgtgagaagagataaacagggcgaagtcaacaacacccttgaaaaagctagcataaaagggaaaaaaaaagtaagtttacagtggagaaatgtggcaaacactacaacagccaaataatcaaggtcattatcaccagtaatgattcatgtaggtattatgtacatttgatctgatgcaatgagaattgcactttgcctctctggtcttcttccctgaaactcctaactccaagagataatgagaaaaacaccagacaaattccagttgagggatattatacaaaatacctggtcagtactcctcaagattgtcaaggtcatcaaaagcaaagaagtctgagaaactgtcatagccaagaggagtgtaaggagacatgactaaatgtaattcacatgtctttattctgttccagaatcttatccaagataccacattacatttagtcatgtctccttacactcctcttggctatgaccttgattatttggctgttgtagtgtttgccacatttctccactgtaaagttacttttttttttttttttgcccttttttgccagctttttcaatggtggtgttgattttgccctgtttatctcttctcatccttttatttttaattcttttgggttcttttttacatttattgtgatactgatatagctggatttttatcatcagattttgtgcattctatttgtcctactttttcctttaagttttatgctttatttctctacctaagtggttattcttgaaaagtcttggcttttatcacttcagatattgcttttcccccattctttccattctcattttgtagaactctgagtagagttatattagacatttttcctttttttgttatgatagaatttttcatttcctgggctttgttatgctgatacactacgaacacttggctgtttaatatgttgccctatcctctgcattttgtgtaaactggtgtttagatcttgtcagtgaggttattatatatatatatatatatattttttttttttttacaggaatatctgatagatagtttgtgtgcttcttattgcatcacatcacaaggcacataatgtgtagttgttctttttatgataagaccgatcagtgtgtataggtgttatcagcctgatccattcagtaaagttgcctattcatttccacctagttttagcagagattgataatttatttttcattgcctctaggtccattgtttcattaagtaatacaaaacattgtcactctaatgttttcattctttcttcatttattggcttagaaaatttatgttatcaatcaagaagagattgctgagtcagagggtaaattgaacatagaattttgctgggtattgccaaatttcctgccacaggtgctgaatcattttgtgtattcacctgcaatatgtgagtgtgcctatttcctcatgctttgccagtaggatgtgttagcaaactgagattttagccagtctgttaagaaaagataacttattgtagttttaatacacatttctttatcagtgaggaggctaaaccattttaaagtaagaatacttagattgtaaaagggtactatagagtaagaaatatattttccccaaacttaaaacttcatggcttcaattttatgggggttttatatttttgactgataaatcccaaggtatcagttactccataaaaatactccccattgtttttcctctagccacatggccttctgtcactcacatgaactcaacctatttcttttctgcctgctcataaaatatatcattggtttatttcactacctaaaaaacaaatatggacttaagaactcaagtactctcttcatattaataaaagtttctagtaatatttacacttagccttcagagaaatgttttctttttactttgctatatagaagttcctatgtatgatcaaaataaagaaaaatttaaaaacctaagtcctattccatagtgatttagtctttgaataatctttgttgtcaaagtttatagttagagaactcatttagtcttttttgagacagagatttgctcttgttgcccaggctggagtgcaatggcacaatcttggctcactgtaacctccgcctcccgggttcaagcagttctgcctcagcctcccgagtagctggaattacaggctcctaccaccacgcccaactaacttttgtatttttattagagacggggtttcaccaggttggccaggctggtcttaaactcctgacctcaggtgattcacccgccttggcctccaaaagtgctgggattacaggcatgagccaccatgcctggcccttcatttagtcttttgtagccctcattggttaccttcttgtgaggcaaatgactaggataccttcagaataagagttccttttgtttactgctggatcatgtttggtcttgctccctaagtcttaaaagtagattagttttaagaagtatctttcaacagtgtgagactttctgggtacacactgtatatgaataaaagtagctgaattacaggtccaaaacataactatacaatctttttttaaaaggaggggaggataactgc

SEQ ID NO: 54698 - DNA, 2652 bp, Homo sapiens
aactaaaattcaagacccaggccagcattaccctactgttataatacaggacttgtgtccttctaattaccccaaggaaattctataaagcttcaaccagactaatcggctcactgctcccccaacacaaactgcccgcatatctaggctggattacgcccacgccagccctcactccaacctttctgccattccttccaaagccagcctacccccccatctctggccccacacactacccatactacccatcttctgaccctcatcaacacacccttgtagctatctcaattcccgtggcatcccaatccgctccaatcaagtcaaagttccttggaaggcagacacatactttacatagagggtccagcacagtgccctgcacttagtaggtgctggctattactgattaaaaccagcaggggttcaaataacgtttctagggagggcaagataatactgcctatcttcttccattcgtagtaaaaagtattcagcgttcactacaagcctgaaaacgcctagcgtacgcagatcaacggtgcagtggagagggcacgccgccggatggcaaaaaacctgtgtcctaatcctggttttgccacaatctcggcagttgctgggaaatcaagccatctctcggagctccggttgtctccgacgtaaaacaagggagctgctgtagaggatcccgaggtatcttttggctcctaaatgtcccccgataggaaaccccacactcgtcttccaaggcgggaggcaggcaaacttttttcccagcgcgggcattccacacggtcctggaaactcagtgcccggagaaaagggcagggctgagggcaaggtgagaagcggtccccccgaagtcgccggattcctttaccccacggctcgagtccgcctcaggttcccggccccctcacaggcggactccgggagagtgacgcggcgcggctcccaggtgcaggccgggtgactctgtccgcccctgcgccccccgcactagtggcacacgccccgtggccccgggtagcggccccggcccctcaccagcccaagggacgtccccgactctggaccaggcctctggctcccgcctggcgagccgctcttccgggccctggggcggcctcagcgcggcagtacgggccccaggccggcgggacgggcggcgtgaggggcagcggtggcggctttaagtgctgaatcaccactttgcaacccgagcgccaaaccgctgtgacccacggggcccgagggcccgggcgctccattccgcttacccacacaggcgctccggaggcggcaggcgggcgccgaggactgagcggaaggtgctgggcagtgcggggtgcagaagccacgctagccggtaccgcattagccagcgcagtcgccgggatcaccgcaaacgcttcctgcttgcgcttcgagccggccctgcgcactgcgcatgctctagccgcggcgccgcgcggtctcccgggagctgcggagaggtagctgctccgggttttgcctggagccggatggggccaggacgcaggcgaggacggtgaagaccgcggacagccgaggcctgagcaggcggactggagggacaggggtttggccggggcgctttaggagccagcacccagactttcccaggcggggagggtcccagctagatcccaccggccgcacttgtgagggtggcgacgtgtgtctgactgtgagggggcgaggggccgctcataaatccagtgagggcacacggggctatgttttctgaggcacccccactgactagcgtgccggaccctgcaggtgttggaacaaggttcgtggtcgcggcggcctcacgtaaaatgaatccgcggccggcgcgcggcccgcgggctccctctagagcgcggtggggacgtggaccgcgaaggcacagatgcgctggagacaaggctcgagtgcggcgtgggggaaattcagacgcaggggtcagcgatagagaggccaggacccagggggacgtttccatccttggggaagttagcagctctcttaagaggaaggtgcggatgggacgggcgccgcagcaaaacaaggcttcaaatccagagtagaaactactactcttgttagtactccgtactaggaatactactaatgtcagtcggcttcagtggttactttttaaacaaagaattttctccccagtggctttatggggctttgcacccacgaacaacttaatagttgttatgaatctaactttccataataccttatgggagtctttaaggaagaatgctattagggatggtgacttgccagcttaagtacttttaggtttctgattgacagacgatcaagactgcagccaaaaacggtgtccttagtccaagtattgctttaaatgggaattcagtaggagggttccttaatcaagttgatgctttatcgaagacgtacccacgatctttttaacagtgcggtttcacctaaaggcaaacctttggatgaaaacaggtaaaaattatggcaagcctcctagtggtgtttgcaagtgcatggttttaagaacctttaaattaccagtcccaatgcagagtagtcaatcaccttgaagcagctcctctgagagtgttaatgcagcctttctgaatacattta

SEQ ID NO: 54699 - DNA, 3076 bp, Homo sapiens
ttcccttgctgagtaaatgtagtggaggagttgggggtaggagaaaagggcagaagagaaacttgttaaggaggtagatgacatttgttcagggaagagataagagccttgtactagggtgatcatcggaggggagataaaatcaacaggactccactacacgtggaggaatcaaaggttctggttagcaccagtatccagatgagaaaagattagggtggagataggtcccattttgaaatgccagcgagccacctaagaggagatatcaatagacagctggctactcaaaatagagatgaccagcagaaggagctgtagatgcagttatttccttggggcgggttgtgcgggggggcgcatgtaggggattagcaagtggaggaacacaaaaaggacatcagagctttccactacaccgggttgttacttaatagactaacacgacatttaggttcccatgggttgtgtgggccagaagcgcagttccaggaaccgactacaacatagtgtgggatatgatgtttctcttcaaataacccgatcaatcttttattctttaattcatagtaccctcccttttttctctttttctccttttttgcttttgttaaatgcccaggcacgccacaatactaggccttatcaataccagctcacattcctttccttatttgaagggactaactttttagctcattacagacaccccttcccctttcctgtccgctttcttttaagtacccaccttagctaaaaaaaatcaaatgtttagccaaccgggattagtttagattatacgacccgaccccagccaatgggaaaaagatacaggggcaggacttgcgtcaaaaatagactcctgcccctttgttcaggtgtgctctcaaggcgactggccaaaaaggcacccctctgcgcaaaaataaaattgctttgctaaaaatcctttgttcaagtgttcaatttccttaagattttaaaagttattcataacaataggctcctgtttcagtatttcctggtgcggcgtaccacacctacagcggtcgagtcacgccaggcactgccaagacgccgaaaagttctcccgcagcaggccggaggtgaccgacggcgcgcaggccccagcgagcgctgcatgctgggatccgtaggccggggcggcggatgtttgcgcagcttccttgagatgccaccgcccgctgcgccgcgcagaaacggggagcgcagcgcacccgcggcctgcgtcactcggtcagtgcagtcgttctaaaatcgaggcggaccctgctttcttgcctggagtcacttagagatgatgactaaaggataaattcagagtcctccaaatggcgtccagtgtccatttcatcacgatttggaacctgtagtagccttatcgcttaacacttcctaattattattattattattttctttttgagaaagggcattgctctgtcgcctatgctggagtaatccagcgacataatcccggctcactgcagcctctatctcccgtgttcagcgatccttcttcctcagcatcccgagtagatgggaccaaaaggcacgcatcaccacaccaggctattttttcccctctattttttgttgagacccgttgggaggcgcggggaggggggtctccctatgtcgcccagactggtctcaaactcctggaacttaagttatcgtcctacctcggcccgttaaagtgttgggattacaggcctgagccaccgggccccaacattaattattcttcaagcctattctggaccgggcgcggtggctcacgcctgtaatcccagcactttgggaggccgaggcgggtggatcatctgaggtcaggagttcgagaccagcctggccaacatggtgaaaccacatctctactgaaaatacaaatattagccgggcgtggtggcacgcacctgtaatcccagctactcgggggctgaagcagcagaatcgcttgaacctgcgaggcggaggttgcaatgagccgagatcgcgccactgcactccagcctgggtgacaagagcaagactccgtctctcacacacacacacacacacacacacacacaaagactattctggtctctgcctccgggatggcggctcgctttggacctctcttctgtgcttctactgccctctcttacaattctctaataattataatcatggcgagtgcttaccatatattccaatctatttacttccacaagctcattaattctcaccctaaccctctgagatggttactattatttcctctctgcagctgagggaattttgggctagggacgttatgtaagttgagccacgctacgctaaaagttccacactcaattctagcgtctcggctctggactaccaagttccggagcaagcagacagaccacctctttacgttcccgtaggccacgctccgggggcggggctccagtgaggatactgcatcccatggtgccttgcgcgccagcgcagccattggtccggctactctgtctctttttcaaattgaggcgccgagtcgttgcttagtttctggggattcgggcggagacgagattagtgatttggcggctccgactggcgcgggacaaacgccacggccagagtaccgggtagagagcggggacgccgacctgcgtgcgtcggtcctccaggccacgccagcgcccgagagggaccagggagactccggcccctgtcggccgccaagcccctccgcccctcacagcgcccaggtccgcggccgggccttgattttttggcggggaccgtcatggcgtcgcagccaaattcgtctgcgaagaagaaagaggagaaggggaagaacatccaggtggtggtgagatgcaggtagggagagggctgacaggattccgagcgctgcggcttcgctgctgggccccctactgcgcggtccagggagagggattttatttgcatttcctgagggtcccagtttcttggttctccgcgttctgttcaataaaaatgacacccggttgctgtgtgtatgtggtttttaggagaaaataacatgtttgatttg

SEQ ID NO: 54700 - DNA, 483 bp, Homo sapiens
ctctgcctcctagggtcaaccaattctcctgcctcactctctcccaagtagctgagattacaggcacccaccaccacgcccggctaatttattgtatttttaatagagacagggcttcaccatattggccggactggtctctaactcctgacctcaggtgatccacctgcctcggcctcccaaagtgctgggattagaggtgtgagccactatgccttgcccttttttcagtcattgtgactttcacgtgtaggtttggtttttaacatctttgctgactcacttggtttacccacgtggtgtaccatctagtggtaatagagagtcacttcattccacaaggtttaaatcttgtaagataacttggaatgctattatagggcaacttaccgagatggaaattatcaatgaattttaaatgtatgtctaaccaacattaatattatatcaagtttatgttacattgttctatatgtataattt

SEQ ID NO: 54701 - DNA, 4178 bp, Homo sapiens
ggagagggactacatctgtccttttcactgctggcacacagtagttgctcaacaaaaatgtgcgaagtgaaactcgaacaggcggtcaggctcacagtccacgcctcttcctactgtggtcccgctgtgtttggacaaatagttccaaattataaactttaaaacctgagaagtctcaatagaaaaagcagggaagtctttccatttccatgattaatggaggaccttagcagaaacggctcaccgcgaggtgtgacgaccgcaggagggcgtcaatcaagaaaatgcccccttgccccggaggcgagtggagccgcacagagccgaggccatacgggccagcagtacggactgcttcaatagaaaacacgtgcaaaaccagagagccagactgcgcacagctgcgaccctcaagagccagcagaaaagacacggagcggcccccactggattgaagactgcacagcctctgcccggcgctgtaggacccgggcctccccttgattgctgctcgcagcggcttctgccagcatcctcgcggaagtggcttgagtccgaggcctccaaatgaaaccaggtggagcggccaagagtccgcagcacctgaactccagccatccgaatcccgccgggccgcagctaagggccgccgagcagccctaggaacccagggcactgtcccgctctgagctcgggaaacggccggtgtgacagccagcgccactgttaatccagggagcgcacccaccgaggaggcgtcttaggccagcggcctctgctcccgccgagtcccgctgctccccgcctggaaacagctgctgccaccccgggcccaggcctggacggcgcccccgaatttcggcagaggtgcctcggggccgcggacagggccgctggagcccgcactccagaaggcggtcttcctcgcgcctcccccgacggacgcggcccagggcttccctcgagggcgtcctcggccggggtgcctggagtccccaggggcgacagccgcggcggggcaccagggcgccagttccccggagcctggtagcaagcgcgtcccgggggcggggagcttggccggcggggcgggccggggtgggggcgggcggctgctcttggggccccgcgccattggccgcagggcccggcggcaggaaggggccagcgagcgcggccccaccccgcggccggcggagcctatcgccgggagcgcggagcgcggataaatgtagcgccgcggcgcgggccagcagctctgcgaggggccggagcgcggcggagccatgcagtacccgcaccccgggccggcggcgggcgccgtgggggtgccgctgtacgcgcccacgccgctgctgcaacccgcacacccgacgcccttttacatcgaggacatcctgggccgcgggcccgccgcgcccacgcccgcccccacgctgccgtcccccaactcctccttcaccagcctcgtgtccccctaccggaccccggtgtacgagcccacgccgatccatccagccttctcgcaccactccgccgccgcgctggccgctgcctacggacccggcggcttcgggggccctctgtaccccttcccgcggacggtgaacgactacacgcacgccctgctccgccacgaccccctgggtaaggcggccgggcgagggtgggggcgaggaagcgccacccggcaggtggcagcgcccgggaggccgagggggcgaagggggcaggcggtagacggctgtggcaaaagcgatggaaaagcagctgtcgggcacgcgcggggacgggaggcgcgcggccggggctgaccgcaccgtgactcagattggttttcctgcaccttgcaggcgtcggggcgcgcgggccggcggtagacctcgcggcgagggcagccgtggaccgcgcgtgttacccggggtggggctcccttagcgggagggacggggaaaggggcgtcgaggcgcccctggccggcccccgtggggcagggatcgcagccgggcccgggtggctacggggctggacctggttcaacaggcttgtgcagtgaaagagcctgaccctttccgttcatacaggaaatcttgagttctcgataggagtaaatctggtttcagaagctgttaagtgttttcctggctgcatgaagcagacccttcccccggagtagtgcacgctgctgattattttatcgacatcctcaatacagacaaattcaggaaacactcgacttctgatagccgggatccgtttttctgatattgttcatttcctctgtgtgggatgtgactttatggcagctaaaataaccagttgcttcctattttttttcgaggctgttttgcaccagtctgaagcctgacgcaagcaaaatctcgaaaaaacaatgctagctttcaaagcgttgaggtgcaggcctgcagacggacggacggaccgaccgacactactttgggagtaggaagcagcagctcctggtcgccagttaggaagggaagcagggacacatagggcatatattccagaacttcggggcttgtcccctcaatgtgcggcctaacaaataagccgcccgtggtccgcgctgtgggtgacccttggcgccttcgaggtctggagccctagggtaaataaggaaacggggcgcctctagagttttaaatgaactctgttattggaagcttcagtagggaccctgaaaacaattaacgtcttaattagcattttaatgtctccattattacggcgcgggctctagctcagccctttaccttaccttctcaccgttaacaggggagggggattgtatttttagttcatctttttatgtttttgagttgttatcctgtctgtctgattccagcctcgagggtttgatgatgcggcccgagcctggctgtggtcgcctgtcggggctggagcgggaccctcagccgggccgggcctgggggctaacgttttcacagtgcgccctgagtttccttgggttactgctgggaccgcgcaggaggaagcaaagagtttttcgagctagaccaacaggaaacacattgacggaaatgttgccatagcccatggggtggctttaactggccgcccccgcgggctgggtgtgaaatcagaggaggccgcggctcccccggccaggattggaggctcctcgcgcaacctaatgcgggtgtccgggcccgagcgcttcccgcgcagccaggccttgtcggtgcagcagccccgctcctccccaacacgcacacacccggtgttcgcaagtgcggctcaccaagggagatccaagggggcaaaaagttatgtataaatccgagagccactggggaaagagggtcgtggtattgtaagcccagccggtagtgcccattctttttggggttaaaggtatgtctggatttagttctaggtgtgacggctgtgtgtctgtctgtgtgtgtacaaggctgtgtgcatctgcggtgtcagtgtgtgactttgggtatgtttgtgtgtcggtgggaacgtgttaggtccacgtgccggtgggtgtatgtgaatgtgtctggttgggtggcctcctggcctacctttgtcatccctggggcccgacagctctggggtctggccaggccgctccagggcagtgggtgagcgccgctcttcccgctcgcaggcaaacctctactctggagccccttcttgcagaggcctctgcataaaaggaaaggcggccaggtgagattctccaacgaccagaccatcgagctggagaagaaattcgagacgcagaaatatctctctccgcccgagaggaagcgtctggccaagatgctgcagctcagcgagagacaggtgagctcgcggggggcctggggccgcctccggggaagggaaggcttctggggtaggggtcgccgggccaccgagagagaggcgaggagccaccctgccctctggcacgtcccgacgcgggctcgttgcaagttttctttctctctttcctgtaggtcaaaacctggtttcagaatcgacgcgctaaatggaggagactaaaacaggtatggacatggttctgtttctatggaaataaatatttttatcacgttatctcagtgcaaggctgttatgggttgtatgcaaaagtcatttaagagactatttaacctcttcaccttgattaaaaa

SEQ ID NO: 54702 - DNA, 4263 bp, Homo sapiens
gatggaataggatgaagagacattttgatttattcctctcacctatccatattttatgatccttccaatctccattttcatttcctttattcaggagaaccctcaaagcaataaaaaagaagaactggaaagtttggacagttcctgtgatcagaggcaagatttgcccagtgaacagaataaaggtgcttctttggatagctctcaatgttcgccctcccctgcctcccaggaagaccttgaatcagagatttcagaggattctgatcaggaagtggacattgagggcgataaaagctattttaatgctggatgatgaccactggcattggcatgttcagaaaactggatttaggaataatgttttgctacagaaaatcttcatagaagaactggaaggctatataagaaagggaatcaattctctggtattctggaaacctaaaaatatttggtgcactgctcaattaacaaacctacatggagaccttaattttgacttaacaaatagtttatgtactgctcttaggttgttttgataaagtgacattatagtgattaaattcttccccctttaaaaaaacagttagtggttttcactatttataaaaaattaattttgaactttttgttaaatttttaagttatagctttaaaggttttaataggaccttcttgaacgacttttctgtaatctgtttatctcccacttaatggaaaggcaaaggggtaccccaaatccagaggtgcctacatttcaggcagccttggagtattttaaaaggaaaacattctttacttttatatgacattcttatactgctgtctcaaatccaaaaacatttcagagctcttgtctcagagatgtgtgttctttttgtcagagatatggttgatgagaatcttaaatgcttgttttgcactatcacttagtacctgtttgaccaaggtgttaaggggatagtacctcccaattcaagcagagaaactgacctgactaaagttaatcgcagatgaactagaagtcacaggttaattaaatgtaagtagattgtagatactgttttatatcaaacaatgtttataatgtgtatatagaattgttcactgtaaaaaaaatggccaaaatgtgttttttttttaataagtaacttgactataaaataaagccgtccgtgggacgactgacctcgttgcaagtctaattctttgattttaaaaagtctgcacaccttttcttgacctcctgggtgcttggcgcggtgctgggctctggggacaggaagtgactggggctggatcttgctggggctctcgttccgagtcccaggaccgcgggtgggtgcctggaacgtgggttggggcctctcccgggccgtttgccttggggctctgctcctgccggcggattctgagcctgatgggttcgagtcccgggcacgccaggcgacgggaagagccgaggcccaggcccgctgcgccgtgaagcgcggggccgtccggaccccatcgattctcctcggcagccgggctggccctcgccgtccttgaccggctgagtcaacaccgcgtcatccctcggcggccggggctcgggaacccgctccgcgcggcggggcccggggtggggaagtccgagtggggggatggggggccctggccgaggggagcggggaggtggtttgcgctgagaactgttctcgaacccggggaacttcagaacctccttcagggcttgtggaaacccagccctgttcctggagttctgatctgttaggactggactgggctgggaccgggaatttgtatttccaacaagagctgaggtgacgccaaagctgcgggcccggacaccacccctggggaaccactgatgtgagcgcacggggtgcggaagaagcaggtgggaccggcactcctcctcccacctgctttcccgggtaactttggccagcaagaggctggggcggagggctgagaggagggaaaggcgagggggaacagaggaacgaggggcttatccaggctagtgggagtgaggtttgatggctgagcagagggcgcagggtggaggaaggggcaccatgaaatggagggagaatggggtgctgaggttaggtgggtgtgggggcccaggtttctgattgttcagggtattgctagtctgtgccagctgcttgcctagctgagccatcaggtctctgacattccaggaaaaccatgacagagatctgttggggagaggcctggaaatctctctctagccttggcctccatggaggaggcctctagttgtagagttgggtacttctggctaaggacctgtgaaggaatgacccgacccctggcctggcttctagggctgtggcgcccccagatatggacactcagatgaagacagtgaaaaagtcattgctgttagggagttgtcacatccggcttccttagattctaagaaggcccctggaattgcaggggaattaagatttctgagaaaagcagtactagtccttaagcagagaggtgtggatagacttggaagtttgaagatttgggttggtgttttagttcttggcctcaaatcatttgtagaacgaagatggtctagttgaaccatatgaaccccttccagctctcaaattcccaactcagttcatgccgtccttattgttctccctactccccatgtctcctcagccttggcacccaaagtggccacccagtgggagagtttcccttcccatcagctgtaggctccagaccctgcctaaaagattacatcaaggtttcaaaggtcataatccatctcgtctgaaaatgggactgtccatatcagatttttggagaatgggaggcttatggatgtaatattgaattaaagtaatcctgaaacctgtgtgtgtgtttcgcttctggagataaaccctagttaatgtttattcttgagagtaactgtatcatgactattcagcagagaaatacagactaatgtattgattcacactagaaaacttgaggggtaaaatctagttttaaagttgacaattccctgaaaccaggctgctttccaatttcaagcttatcctaactctcaccaagttgctcccattctgaatctaaacatgtccttaagaatcaagagcatgttaactggaggaggtgcagtattctcaggacacaggtaggcattcacttttctgaagtaccccattgcaaattgccaatgaagatttagaaattcctcctacgatccgggcatttttcatttgtttgtcttttggctatttcatgttgaagcagcacgtatgacctttacagcacaactcctgtcttgtttttaactctttttatcaggagattcaacttgaaaacggttatcatttagcagaaagacaaacagaaaagcacatttttgtaagcaaaacgttaatgatttgaagaattgccctaatttcaccatgacagtgtgtgattaatcccctgggtcgtgtacttatactttaagttattcagttcattggtctttgatattcagaaccctttctaacttaatatgatattgattttgttggatgatgtactttgactctttaaacaacatcacttttagagatgactagcctactgtgtagtattttatttagagaactattgcataacatttctttttcttactttttatggttttctcagggtgaaagctgataagacatcttgtgggaaaagaggaaaccatctctgatagtgaaagtaccttttctctttcaacttttctgacaagcttttgtgtgtgtgtgtggttttcattactgtgaatattcatcttagttaatgggggcaggacagggattcaagaaaacttatttggacttggggaaaacgcattttgctggggacagaagagacttactaaaattcccactccagatatattggcatgtggaagctgatgaacccaaaagctcctgattttgattttttttcaagatctaataatcaatgatcctttaaatctgtgattggagatacttatgtgactacttacaatatggggcagaatgtgaataccaaacaatcacccaggatgcttctaaatgattgggagttcaagccaggcactttgggagaccaaggtgggcagatcacctgaggtcaggagtttgggacaagcctggccaacatggtgaaaccctgtctctactaaaactacaaaattagctgggcgtggtggcacgtacccgtaatcccagctactcagtaggc

SEQ ID NO: 54703 - DNA, 1297 bp, Homo sapiens
agaaaaagaaaaaataaatgattaggagttcagtattttgtggtcaaagtaatcaggttgtactgacatttatttttcagtccatagaggttttaggaagtcccagttgggctctgtatatgtctaatctaattttgtcccttgatatgtattttttggtattgttgataactccaaataagaagcactttggagactcctcccactcacccaaagatctgagaccccaggtctacagaggagcagctaccccttcacatgtggctgtaggaaaaccagaatcaccccgttgtggatacaagcatggctagcagcaggggagatggaactctctacccctctcttgctggctggggccccgggggacacccgcatcctcagcctccggtccctcagttcctagagcggagcgtggctcccccgagaggaggcggcgtccctggcacgccgtgggccccgagtgtcagtcagaaaagctagacaccccgagtgattcccttcttttgagacagctcttgggttcgcagttgcaggcgggaaacctcttcagtcggatgtacacaaatctctctggataacacagagggctgctgcgaggggaccttggagctggcagagacatttcctgtctgcggaggatcttgactttggagcatccggccgtcgccgcgagcggccgaacactttcctgcgtcgctgctttaaaaaaaaaaaaaaaaaaaagtcactgccaatatcaggcgactttccacatgaaagccaatgaggccgcttcccacttaaaaaacgtttgtttaaaacgtattttctaagcattccttagactcccttttattttggagggggaatttggtatctttgaaaaaccttaagtattcaaaaatctcattctctctgaagacaacttcttagatgaacaagtacgggaaacagttaacagcagagggtccctcccctgctgctcgcagacgctcgcagtaagatatgctcataatcttgtttatgtttttctttcatggtttatgcccttccatccttcttctgctccccacttttccttccttattcattccctttctcttttttcccctttcccttttaggattcctcatcttcattcagtttacttccccatttagaatagaaaatgactaatctctactctttagatgtcactattggggccaagattttctttaaatttatagaaatgttcaacttttagctgaggtgagaatcctgtttgagggaaatgttgctggagtcctaatgcgttgctcccatcccgccagggata

SEQ ID NO: 54704 - DNA, 2084 bp, Homo sapiens
tgcccaatgtcacacagctgtcaagtgatattaatccaagaattaatgtcttcggacactggtcttcagagctcatgctctaactattgcacaataccacctcccaggatgtttgtggggaggaggctggaggtaggtttcaagtaaaagctcactaagggtgagtgagttacacagctggataaagagcttggttgactcaaagggaagcttttcaaagccctggattaatgtagagcagaaagtagttgttcctcaggctaggtttccattctgttcctgtttagtcttccttcctccctgctttgatcatgacaaactggtttactcagtgtcccacaaacatgtcattaagcacgacttttttctacactgatacctttgtccaagcctccctgcctctctctcccacctccctgctgctaaccccctttcaagagctctcaccccttctcaacccagctactctgacctgggggcacctgagttcacggactttggtatgaattacacatcgccctgggcctttttttttttttttttttttggtatctctgccatcaagtgtcttaacttctcatcatttaattttttatgtcgcttataatttatttccaagttgactggccgctgtggacttcttgcaggcggggacatgaatccacctggagcggtcttcatggtcaactgggatctttattcgttcctaaaataaatcttactatcacatgcaattttgcttttcgtgagtgcatgttttcctttctctgactccccacgacccagagtacatcaggcccttgttaaatgtccccgtggctcttattacagattcagggtgatgatctgagtgtccaccttgctgattactacggtacccccgcgtgtggcacagggtgtggcacacacagaagacaaggagatatgttaaagcccaaaggccaggcacaagacgcccaggagggactagtcgcgagagagggcaggaggccagctgggtacccggccgccgcccgtagccccagctcacagcccccgctcactcctgcaggtgcgggggcgggaaccgggtcgcgcgccttctgcccggcgttccgcgcgcccccgcgccgccggcccgagcgccccgcccccgccccgccccttcgcgctcgcgccacttggagctcgcccccgtcgttcccgcggcgccgcgcctcgctggctcctcagcttccagccaaaatggcggagaacagcgagagtctgggcaccgtccccgagcacgagcggatcttgcaggagatcgagagcaccgacaccgcctgtgtggggcccaccctccggtaaagatctcatcccaccgggacttcggccccccgccccacgccggccgctcctcacgagccgggcggggcgtccgccgccggccgcgcgcgaagctccccgacaggtggtgcgcgcgggggcgggcgggggcgctcgcgggtggcggaactctagccggtacccgggcgggaccgagaaggcggctgcacctgtcggcgcggcctgcctccaccgctgtagctgtcaccccgcagccggtgggtgtggctgctgcagggtctctaaccccgggccccgcgctgcggccccgcgttctcctcctggctgcggcccccgggcccgaggacacttctggggcctgcccccgtctcgctcgtggtggggctgagggctgctcggccgcgggcatgccaggctagggtcgacagcaggcacccggcgtgacggaggtgccaggtcgcgcgcgggtggaaagcctggcgcgccgggctgccgcgggcgtgggagaattgaaattgagcgggagacgccggcccgctttccccctactcccccgcgcggccgcagtgggcgagaagagagcgtgggctggagaagagagcgtgggctggaggagagcagctgcttgctgcttgggaacacgctagggtgaccctgcgctcgcgggatctaagctgctttggaggcagaacagcttttacttatttacaaacatttcattaaaattgcattaatttttccgtttaaatcgagttcctccccattcattttaagaa

SEQ ID NO: 54705 - DNA, 1020 bp, Homo sapiens
atgggaatgattggcaaaggcctgctggaagaaatgggacttgaaatgaacctcaaacaatgggcaacggatgtggggtgaggtttggaaagttcccaagaccactctcaggttcaaaaatttgctagagggacttgcaaaattcagcaaagttgttacactcatagttactgtttgttacagcaaaaacaacaacaacaaaaactttcaaaaaactacacagattaaaatcaacagcagaaaaggcacataggacagggactaggagagttccacgagtgagctttcagttgtcctttctcagtggaattgtggacagcacttactgctcccagcagtgatgtgtggtaacacgcatggagtattgtcaatcagggaagctcatccaagctttgatatccaggaattttattggagtttggtcatatagccatgactgactacccatgtagacttggctgactgcccacattgctgacctcctgcccctccacagctaaaactgtgtggcctcaggcctcaccgtgagtcacactgttagcatctgctatttggcagtcaaagccttccaggtaaacaaagaagacacttaccaggcagggtatgccaaaggctttcctcccaggaatcagtggcaagggtagtcctttactgcatggtgaatagaggggtacgctctctgtggagacagcatgagctgagagacagtaggaatgaatatgccatgtttaggaaacattgtggtgactgcaatatgggcttgtacctgagaatatgaaccctggagccggactatcaggagtcatatcccagctatcacttgtgctggttgtggaatttatggcagttcagtaatctgtaactcttctgtaaaacaagggtaataacaatacctactttgtagccttgttgtggggattaaagagttaatatataaagcatttagaacatgagcgtttactttacatagtaaatgctgtaaaaatcatgagtttgttcattcattctttaaccattcat

SEQ ID NO: 54706 - DNA, 730 bp, Homo sapiens
ttggaagttctcacctctcccaagggtttgttgtttctcccatctgttgtttgttttgtgacctttctgaactaaatctgtaagtctgtgttctttgtcatatgtggccactgaagtctttgcttggttagcttagtggtcatctggtgattggatacagatctgcttaaaagcctggaacctgtaagtcccctagtctttgccaaagggctccgtgcacatgttggggtgtgtcttaaacactgagataggaagttaatcactctgctttgacttttacttcctgcttgcacatgataccagtgggctaggggacgtccccaaatgctgctgggaccttgatcccagccagtgtccaggctcttgatactgtcgtgagaaggaattcaaggatgagtcagaaaatagtgaaagtatggagacttaattgcaaaacaaaaaagtacacattcaagagaggggagtgcaggcacacttgagagagagagagtgagtgagtcatgcacaaggtggggtggagctgctatctttatgaatttctttaaccaagggatgaaatattcatgatgattcctggaaaaaggtggaattttttttggaactgtggtgccacctgtttttacaccaaatatgagtgttcctaaaattgtcatggcactggtgggtatgtgatatagtatgttatgagtgtacattgagccctgggtgaaacttaggccaaatctatcac

SEQ ID NO: 54707 - DNA, 1594 bp, Homo sapiens
atgaagatatatgccatttctttcacgataaattgttaagtctgggcttctcaatataatacactgcaagaggactaagcaaccattagccataggcattacacatttgaccactcttatgttctaccactttatagggaaatctgttatgaataatttgtagttttctattgattttttccccccttagccttcgtctccacagacaggaatttgttgtaacatagattgcagactgggtgtggtggctcatgcctgtaattccagcagtttgggaggctgaggcaaaaaatcagccaggtattgtggtgcacacctgtagtcccagctagtcaggaggctgagtcaggaggattgcttgagcctgggagtcaaggctgcagtgagctatgattgcaccactgcactccatcctgggcaacagagcgagggtcacaaaaacaacagcaaacaacaacgtagattgcattgcacaaaggtcattacatgcctttacgtcaggggttccaacttgagaaccatgggttggttttaggaggttcaagcagaattttgtatgtgcatttttctgagaagaaagtctaatgttttcatctcaaaggcagcatatgtgacctaaaaatagatagctacacaccactactccagcaaaactgaaagctgtccagattaagccagatcaccaagagctgccgtattttcagatgtttcttcatttactcgacaaatgtttgagcacctgctttgggcactgttttaagtgcagaagacagtggtgaacaagataggcaggatccctcctctcacagtccccctttgttggagggagatccacaacaaagagtgctaatttaaatagttttagatggaatttcaaatagcttttagatggtatgagaaaaataaaacaggttaatgtgatagtgactggaggtgaggtgggccacttcagatttggtgatcagggaaaccctctttaaggcggtggcatttgagcacataactgagtgaaattgggaaatatagggaaatagcattcctggcagagggaagagcaagagcaaagtcctaaggtgctgttaggaaagagaaagggtaatagtatggctataatgtagtgtgcaagaggaagaggggcaaatgaaattaggaggattatcagagccaaatcatgtaaggccttgagggttttgttaaggagtttggatcataggtatgatgggaaatcattcaagggtttcaagcaggttagtgtcatactctgatttgtattttgagagtttattctggctgttttaaggagaatagatttaaaagggacaaaattagaatcaggaagagcaattagatgattgttttggtagtctagactacagatgatagaattgctgtagtaactactgatgattgggttcactgtatttcatagtaggtcatagtagctcccagcagactcagagatttctgctttcagtattacagatagttgaatttaccctgagcaactggtttgtttttatttcaagagaactgtgagttgtacaattaatggtagtttattctgtattttggagacagaaaaactcaggaatat

SEQ ID NO: 54708 - DNA, 1451 bp, Homo sapiens
cagaaatgagaccgggggctgaaaggagaaaagcggaggtggactcctttgctgtgactccagtctagtccctgtaccctcaccccaccccaccagcaaaaaaaacaaaaaaacaaaaaaacaaaaaacccgactccccatccccgcctcttagcaatagggaggctgttttgtaaacatcttggaaacgagttgtttttcagtgaacccacccccctccccgcccaccaccacccacgaaagcttggcgagattcctagatcaaagttcctattggcctggtaatttattgaccccccaccccccgccctgcccccctacaagatgttctttaatgatcgttcactctcacatttaatcctttcctgccggacgcccccgccggcctcgatgtacagatagattaaaacgtttttttccctgcggcaatttccagcgtgcaggccccgctcatcttgtgacccggcttgagctgaacttggcgaggtggccccgcagagttcactcggatgtcacggtccggcctgcaggggtcacaggcgggtcaggcccgaggattgggaatgggccccaggtcacgtccccattcgtcggctttgcacaccggccggaggcgctgtccagaaaggggcggacccgggatttctgagaattacctccagcgcgattggcctggcttcctgcagtggccagaggttggttcgccgtgtttacagccaccaaatcgtttgccggagactgaaaccctgcccagagcctctgaaacactgggcaggttatggggaaacgctgaccccccgaaacactccctgtggcggcgactctggcttggagagtcgctaggattgtgcgggtccctccgacctctgcagatatttcctgatacctccgggtttggggactaccgcgagaagggcaacgcatttaaactctcaggagcagagttttccacctccaagggacgccttccaaggcgtgcggcgtgcttctgccagagacagtgttcagttttaaacaaatgcaggtcattctgtttcattttcggcgccgcaggtgcgttcagcgcccaaacccaggtagcgtgtgaccctgactggtcccgagccgggaagctccggcaggtggagagcagagagagcaggtgcgcgtcccgcagcgtctgagctccgggcattggcagctcagtagcagctgattgtagatgggcaaagtacagaagacttcccagtacggatcccttcacccctcccattaggggtcggtagagccctgagtttagggccgagcaccccctcacctggatgaggacagtggctttactctgggtgggacttgggagagaggaggaggactccagtgcccggtgtaccggacacccaggtaacgcagtctaccgtgcctggagctgggaagagtagttgcaaccggagcccccttttgggaactcacta

SEQ ID NO: 54709 - DNA, 858 bp, Homo sapiens
ggaaagatgaacctgaaaaggtaacactgagaactgtcactctaacctctccagcttatctaacatgtcataaacataataaatctgtgttgtccaatagtgccagaactgttctctgaagttacggttttagataagacaaagccagtcactccagttatggacagctcttgactaaaatgagaccagaaatcattggcgtgtcacctttacttagaagttgcatatggaaacagtattaggaaaggcgcatctctggttaagataagctgagcccaggttttctttattcaaaatgaggcaggaggagcagatttagcagactgacagataaagtttttatctatcccaggcaatagggtgtgagcctgacatgactgataaaatggcccagtcatgaccctgtgaaccttggctaacctccgtgaaagcgcagttttgtcacatttctgaccctggcatagccacagtctgaactgaaggccagactctcaatccagaaaggttagccccagtgacttgcttatgcaagcacatttttggttttggaatggcacaatctgctcactgaacctctgatgacttgtaggtttcaaactttacatttttcattacaattttagaatttggcaatactgcagaaaccaggtggtctaaataggtgtttgaaaagtgttctgtctacagttacatattctacctgactatagttttttaggtagaacttgggttgttcttattgttggactgctctgaattttaaaggatgtttatgtaataactcataatgccgttaaaaaatgagacatttcaggctatgtagtttcagccaaagctttagtgtactatagtgtgcag

SEQ ID NO: 54710 - DNA, 1069 bp, Homo sapiens
ctgggattacaggcgtgtgccaccatgccaggctaatgttttgtatttttagtagagacaaggtttcaccacgttggccaggctgatcttgaactcctgacctcaggtgattcacccaccttggcctcccaaagtgctgggattacaggcatgagccaccatgcccggcctgatttctaattctaaaaaccattctcaggtaaatgattaaagcttttaaaagttttgtggttttttcaaacagaagaagaaaatgatgcttattaaagttgaatgactcatccaaggccatatagctggtcagcagcagaactggggtttgaacccaagtttttcttcctcaccatacagaatttactgtatagaaaaatagctgaataaatttctcttgttattttagccaaatttcatatgcaaaatcccaggagtggcctactattctgatgtgtcaatatctatctttcatcatgtgaataaacaacagagaaaatccattgtgctcttatgagtttggaaaacaaagtgttatcacagatattcttgtcctcagttccaatgattttgaacctgttattcagaacaagaagccgcctgattcaaatacaaaacaaaacattctatttagtgcaaacacaaagatctgaaactccattttaaagtcatttctgtacagtaagaatccagcctgcatctgtcagtggtagagagaatagtaaacagaggagtccctgaagaggtcacagtgttgacaaagttcaacatgatagtggagtctgcacaaatacagggaacaaagcttggcccttccacacagctgtgaggccttgacttcgttttaagtcaacgtcatttcatgtctcacatatttcccagtgtctgcatgatgaaataccacagtcaccaggaggtccacttttctgcagtcttgtgtagattttcctgccaccccaaaacccaaggaatgtctgccatggagcacaccaccactgcctggtactgagaagtctttttggtgattcaacccagaccatatttcaacagatggttcccatacgggaaggactgacct

SEQ ID NO: 54711 - DNA, 560 bp, Homo sapiens
agccaaagtatagactggcttttaagacatgcaaaggcaccaggcttccccgggtgggtgaaggtgcctggtgggttccagacgcctggggctctggagtccctgcactgagaagagcctgtctgcctgcatgcgaaactcgccctccctcacatagttcacattttcccgtcattgcagtgtcactccagtggcattgtgcaaaatgagtacttttatttttgacctttgaaatttcattttctcctagtgcctagagacagtaaagctgggctatgagtcttcatgggaaaagaaaaattcccttctgtttccccaaattgcagggcatctatgtctggtctcaggattttcttgtatcagcaactgccactcagtcccttctctttggggaggaggggaggacaggtatgtgtggtttgaaagaattctcaagacgattctgataaacatcatctgcacccattgaaattccagggtctaaacagaggcacaactattcagtctctttgacttaagtcacaggattctgggtcaaggtttctagtctgaaacctcaa

SEQ ID NO: 54712 - DNA, 724 bp, Homo sapiens
accagtaccactagcgctggaccctggggggctgctgctgatgccaccactgcagccatttggaaactggatgttgctactactgctgtggctgcagaaataattccctttatcttgcttcatgagttgccagctcccaattctgtgtctgaggtgggcactctgtttctgccagtttggaccccatgcccttgccctagtgcaaaggatgctgggaaattcaatatttggctttggggagaaaggaaaacactgttccaaggttcatatggtgggaaattccccataaaatgtcaaaagggaaatcagacactaagccatcctaaaagctaccaaatgtttaccttattgagaaatttggatttgttgcctaacctggacacatccaaagtaaggatacaccttactgtgacctttcatgagatatgtgaagtcctatctgcctattccaagctgggtattttattgttgcagactaaacaccaaatctttttcctcagtgaatgtttatttgattcagtttaaatattggagcttataataaacaaaatacatgttaatagtgccaaaaaaaaaaaaccctccttggatacctaaatgaatgagagggctggagatcgaggattcctgagagcagtctttgattcatggatggaatcataggtatttggatggaaaacactcctgagatggtctaacctacctcttcacctgcacctgtaag

SEQ ID NO: 54713 - DNA, 1495 bp, Homo sapiens
gctgctgacctgaggatcactgacttaactcatttaagacttgcaaaaaccctgtgttaaatttttcatcctttggatggggaaactgaggctcagagaggtcacacagtgtcagagctatgatttgaatccgagactatttaaaccaaagctcttgctgtgatactgccttcctctgaggtttcctctcagtttcaacttcctatgtttctagtttacaaacaacaaaacccacacatctgagaccaaatcaaagctcttcagaaaaatcccaagaaaatcccgacatgtgcaacttctgcctggagcggatgagtctggcgctgaacaccaagagggagggtgatagaccgcggagccgactggcttgcacgaggctagcaaagggattgcagcttcattaaggcacccctgcaactgacttgaacttttctttccttatcctacagtttatttggcattctctgggtctcttaatccacagtcatttgggtagcaaaaaaaaagaaaaaaaaaagtggaaatgagttttcgtcaatgttgacttttgtggtgtccccaggaatggttattttcttccctttctccctagtgtgaattctcaagtaagtagcaaatgatttcaaatgcatgccgattgcagtggccagctgccaggagagaagtgaaaataaactggtgacaggaagtgtctcagttcacggaaagggcagcgaggatatagtggagcaagcccatgacactcctgggtccacatgctgaaagacttacccggacgggctgtgtagccacaaatctcctagtaattcattaagtaaggggaaacgctcccagaagcatttctctcctctcctaacaccctttgtcttttaatttccaaactccgggttcattcctatgtcaagcgagcctgggtgagtctctctaaacaactccttcatgcgtgatggaacacactgccacagactaatgctttgactctaagtgttttaacaggctgaggtttccaagctttaggatcacaagatggatatatgatcggtgtgaactagaaaacagcatcaaaaacagcatgaaggatggtggaaagaaaagcgagttacatggaactttgcccagtgcagggcttacaggctggaagaaaagtttcaaggataaaaaagtatattcgaagtgagtaataagataaaataagatgatagagcaaggtcaaacgtatcaataatatcaataaatgtaaataggcttaatttacttactaaaaaagagacttccacattggctaatatagcaaaatttaacactgctctacacaagaggaacacctaaaacaaaaggtcctgaaaggttaaaaaaaaaagaaagaaaaagatattaaaacaaatgcaaattaaaacttaaaagcagttacaattttgatatctgacaagatggaatttaaaccaaaaagcactaaagaaggcaagaaggagactttaaaatactaaaggtaaca

SEQ ID NO: 54714 - DNA, 433 bp, Homo sapiens
gcccctccacccctgatttctaagcctgcataactattaggaataaatttcttttctttacaaattacctagtttcaggtattctgttataagcaacagaaaagggactaagacaaacatagatggggccaatcaaggacagaccagaaacatccggggttggggggaggagtctagatcccagacggtttcctggaagttcatgaatgtcagagtgtgccgctctccgacctttgcttctttgcctcctttatttcttctcctcctccagtcctttcctctctctctctagcccctctgctccctcctttctttcccccggcccgttgctattgaattcctggccgtcaatgaggtcctgggctcggggggccaggctggggctccccggaattccagatcctcgcaaggaagtgagggcggcggcgcgggg

SEQ ID NO: 54715 - DNA, 1372 bp, Homo sapiens
cctagatccttaacattctgaactttgcttgacattagctctgcacatatgtgtgtgctcattttctgatagttttgatgcaggatttttcttggccccttcgacggactcacgacaggcgtgccctgtttactcagcccaccaaagtcaaccctttgcaggagggagtacatgagtgagcaagtgtgggatccattcggttgctctgggcaccagctgctccaggcaccagcagaagcaagcttcatgcagggcctgtgaccagaccaggcatgagtgaaaaagtgcaggatccagctggccattccagatgctggcaggagcaagcttcatgtagggcccatggcgatacccaggtgggggtgcctgctaccctggtgccccagagggagtgttacagtgctctcttagctctgctgtccgtggtcagctgcgtgttagcagctcagttggctccttgccttgtcacatggggcgactgccctctgccagtgagggcaaagggctagtgtgacagactctctggatacctacactcggtgggtcccgatctcttgtctggtgtccaggaaaaatgaggtcatggggatgaattgaaggatggtgaaggtagagaattttattgagcagagaggggagctggaaaggggacaggaaggacaggtagccttacctgaagtcaggctgcctctctcaagtcaagccatctctcctcgctccctattgagtctggggtctttataggcacaggatggtgggggggtggggtgggttataggtagttttggaaaagacaacatttgattggttaaaaggcactattcagaaagaaccaatagggagagaacgggcaaacagaaatagaagttctcactttcggtggtgggtttcaggctttttggcttgaaggtgggacaggacctgcctctgtctgcctagaatttctctgcctcctgcctctatcctgcctcttagtttcatgtcatgtggaagaggaagggtcctggtctggatgtgggttctgctccccatcagtgactaaaagcatgagtttgccctgaattcgcaacatagatcattgccttctaggttctatcagtgactatgaccttgagcttgtcctcaatatttattaaaagcttagtggaatataaccgtaggtcaatttgataatataaccacacagaggaaaacaaagaactaatccaagaaacttttggacaaagtactctaactgcacaaacttggtgggatgtagtccaaagattacaaaactgaaaaaatctttaccttaggcagtttgtggtcagtggtgattgtggggaagtaattattaaactattttgagtatattgtagtcaatgaataaata

SEQ ID NO: 54716 - DNA, 1692 bp, Homo sapiens
acacacatgtatgtatgtgtatatatatatatgagtttattaaatattaacttacatgatcacaatgtcccacaataggcgtctgcaagcttgaggagcaaggagaaccagtctgagtctcagaactgaagaactctggagtccgatgtttgaaggcaggaaacatccagcatgggagaaagatgtaggctgggagtctaagccagtcttgccttttcacgattttctgcctgctttatattcactggcagctgattagattgtgcccaccagattaagggtgggtctcttttccccagcccactgactcaaatgttaatgtcctttggcaataccctcacagacacacccaagattaataccttgcacccttcaatccaatcaagttgacactcaatattaaccatcacagagatggttcaacacaatccatttgagcccaggttcacagcttggtcagtgtcaatagactctgacaggcacacttcctgggaacagataaaggatctgagcttccaagagttcagagtccgagtaccagttgcctctggttgactcctctcatcctcttgggacctggtggggtgaggaaactgaccttgagtgaccgagcctcatgacgtgtcctggaatgtggatttctcatgctatcccaagtgcttcctctaaagtgagtttctagaaatcaaatcttcattacacagagtgctgcttcccacagaaatgtttccataattctaaaaggaggtccatggcagtgtatcctaaacccagccgctcatcagaatcacttgcagggctggttaaaccacagattgctgggtccaacaccctcagtttctgacctagtcaatctgaagtgggccctggaatccatatttttaggaaaatgcccaggtacctctaatttggaaatgggtattgaaaccacaggacaggtgacctttaagcaactttcctactctaggtgtatctccacttaaaaatagagaattaaaatatagacacacttaagaaacaggaggaaacttttccttgctcaatctagtcatataatggtaaacctcttctgctaagattcaaaggctgcaaggtaagtaatacttaactgcttctgagtgcattaaataatcgagccacagcttgagtcttgaggttggaaaggtactttcaaatgtcacagacactgggtatttggatcaggaatgtggtctgggtgccttccagacagagcctgcctgtgccaggctggcagggtctcagcacggcccaaaccctgtctcccctggcttctgagagctttgtttctgccatgtgggaaggaaactgtctggttctagaaatacaccaaagcaccaaatatatctgtggatgctagaagtctggaatcagagacgattagtgctcaaaagaaactagctagccactgtctagttttcttctcttgccattttagaggtggggagctgtgagctccagaaagctttgacacgtgtctgggaagtgtcagagatgggtctaaaccaatgactgagtctagtctctccagcttatctctgtttggttcaaacattactttgtttttaggtatctgtgaagataataaaaatcaagcatgagtgaagtaagaaggctaactcaggaaatttaggacaagctctttgtggcaaaaatatacctaataagttttgg

SEQ ID NO: 54717 - DNA, 709 bp, Homo sapiens
taaaggctgaggaatccagaacagactgctttggatgctaacctcctgatacggctgccttctgggagtcaatgagcaaggccacattgctctggggaagaagggatagtttctgttaaagggtgtggctattctccctgtcaatcatcctgcaaagggggcagatgtaacaggcagacatcagacgactagagggagaaggccctggctcgctggagaactcacggcagttgggcctggactcagatgaaaacgtgttctgggtaccacgggagtttgggggagagcatggagaacccagtcctgccacaaggagacaggctgcgagtagacaggaaggctgactgtcagggacccagaacaccagcctgaccccatgagctttgagaatagccacatttcgcaaccacgttgtcaccctttttactgtattttcgtattcttatcccaaaaactgaaagtgaaagctttttaaaagttgctgtttggtttctgctgtaaagtggtgaaatcagggcagggcctgtcctgtgtgcttggaacagagggcaacagcagcctggggcagctggggggctggcggtgatttgcaacccagcaaggagggccgcgggcagaggggcatccatgagctggctgtgctggcaaatgattcagatttgtggaacacacaggcatcgacctggattctcagaaatggttggggaag

SEQ ID NO: 54718 - DNA, 1802 bp, Homo sapiens
aggcggctttaatgattaaatgaaagaatgaatacaaagtgcccagcccagggcctggcacacagtaagcactaaacaaatgagagctatcagatgatttctttctttttcttttcttttttctttcttttttttcttttctttttttttttttttgagatgactggagtgcagtggcacaatctcggctcactgcaacctccacctcctggattcaagccattcacctgcctcagcctcccaagtagttgggactgtaggcatgtgccaccatgcccatctactttttgtatgttgagtagagatggggttttaccatgttggccaggctggtctcgaactcctgacgtcaggtgatccgcccacctccgcctcccaaagtgctgggattacaggcgtgagccaccgcacacagctagatgatttcttattacagcaccagggcagcctccttgcatccccccagggagttcccaggctgtggagctccggagggcagggcccctgtgactggaggaagtgccctgtgaggctgggaccgccctggtggaatatttcttccacgtggctccattccaggcttctgagtttccctggggcagctggcatgtgagcagtgactgctcctctctggcaggcagcctggcagcctccaggagctggctaatttctactatcaacaaggggcagagaagtttctgagaagggctggcagaaacgcctccaccctggggacttgagagacacctgggggagcacagggacacagggcccatcaggtggacccctctccaggagtgtctctgactttggctttccaaccttggctgccctatcgttccaggaagatgctgccaaacaggttctaggagaaaggcattttgggcaagtggcaacaggatacaaagcgaggctgtttgggacatttctgaaacagtcactgatatcactgataaacagaaatgccccagcaaaaaggcaggaggggtgactgctcccctctccacacccagtgccccactggcctctgggaatgacctttcagatgtacaggctcttgaatcaaacccacattttccaagggagctgcagtgaagtccagtccatttgaatgactcagccagaatctgcttcctaaaagctgatgctggggcgtggtcatgtcccagctctgctcactgccagggctgctgggaagggctcccaggagggccaggcacctggcttgactgccttggtgtttgtgttgtgtgctgggcatattaaacacattcacgtctgttccctacaagggaggctgggcgcagtgctcacacctgtaatcccagcactttgggaggccagaggtgggagatggcttgagtccaggagtttgagacctgcctgggaaacataatgagactccatctctacaaaaaatttaaaaattagcctggcatggtggcttgcacctgtggtcccaattactcacttaggaggctgaggtgggaggatcacttgagccctagagatcaaggctgcagtgggccgtgatcaggccactgcactccagcctgggtgacagagcaagaccctatctcaaacaaacaagcaaacaaacaaacaacaacaacaaaaataggagatatgagtatgctcattttacagataaggaaactgaggatcagggttgttaactgacttgcccgagatcatagagccagtaagtggcagagctgagcttcagacccaagtcagccttgtttccaaacctgtgctctttttttttaaattttattattattatactttaagttttaggg

SEQ ID NO: 54719 - DNA, 1884 bp, Homo sapiens
aaaataaaggaatatgttaaaattaaataactaagtacatgtgaagcatgtagcacagtgcttaacagccagtaaaccatcaccatcaatataattgccaataatgataatgtctcctttccagaagtttttgtttttttgttttttgttttttgagacagagtcgctctgtcacccaggctggagtgcagtggcacgatctcggctcactgcaacctctgtctcccaggttcgagccattctcctgcctcagcctcccaagtagcttgggactacaggtgcccaacaccatgcctggctaatttttgtatttttagcagagacagggtttcatcatgttggccaggctggtctcgaactcctgacctcaaatgatctgctcacctcggcctcccaaagtgctgggattacaggtgtgagccaccacacccagcctacactcttaattcactgaacgctggccccatttacagcctagactataagctgcatgtgggcagggccaaacttgctttgttccccaccctatacacagagctaagcacactgcctggcagagtaccctctcaatcaatgcttggatcaatgcttgttgaatggattcatgcttggaatgaggaaggagctgctaaacataggagggacagagacagggagtgtcctagcaatgaattcagtctgttaggaggggtaagcaaaaacataacattttatttattgaaagaaagagagagaagggcaaggaattttttttttcaatttataagctgcactattgagatgaaaaagatgatgaaggtcataaactaacaaacggaggtgaaatgaagtggacctcgccctgccagtcaaatattagatttttaatactttacattacaagaagttatggttctagtctccactaataaaatggctcaaacttgactatcagtggaactgattcactgctaagctatgtcacctctgagcttctgagtcacagcatgtcataaaggctttcattgctctgttgcaaactcaccccaggggggatgggtttttttttctttttctttttttttaagttcttttgttcttggtacactttcttcctttttcagactggatcctaatgactccaaccactaaacaactcaatctgttcagagagagaggaactgtttatgtgagttggttgtgtagtcagaggttgtgagttgtttcttcatccatgctgagctcagtgaagacgcatggaccatctggaatccagttaaatcctgacctgtctctgcctcagctccctcatagggaaaatgaagatgtcaataatacctacttcctaaaaacgaaatgaaggcggggcgtggtgcctcacgcctgtaatcccagcactttgggaggccaaggtgggcggatcacctgaggtcaggagatcgagaccagcctggctaacatggcaaaaccccttctctactaaaaatacaaaaattagccgggcattgtggcatgctcctgtaatcctagctactcaggaggctgaggcaggagaattgcttgaacctgggaggtggaggttgcagtgagccaagattgcaccattgcactccagcctgggtgacaagagtgaaacactgtctcaaaaaaaaaaaaaaggctcggcacggtggccaactggaagacctggtattgcagaggaccaaggctatttcccacacgtctttggctctactatggttcccagcacaactctggccacatggacctcagagctgggctccactggccaagaggccaccaggctctttcaggctgctgctgggctcctgcgaggtgggctttccatcacaggagagctgccttcctgctgatcactgaggacgaggcctgcactgcagcaat

SEQ ID NO: 54720 - DNA, 1661 bp, Homo sapiens
ttaaaagctacagaatgtacaaaaaaagctccccaacagtttagatataaaaacaattacaaaggcacaaaagggcaggaaaactcaataaaactatgaacttcacccatcccacctcccagaaacccagtgacaatcaaagcagcgtcaggctggttcaaggagtaatggtgtctccaacaatttaattgctcttcttcctcctttacccatttctcacaggcagagaaaaaatgcatctaagactactgaaacttactttgaaccaatacagatgtttgttgatacctgaaatttagtgattcgcaaatacgttttctgccaagagcttacagaaatcacactcttagagctaaaacatcaggtcattccatgagtctcaagccctggagaaaattaaatgccttccccagaaacgggtcctctcccctgtcctgcgcaggtaacaaacgctgctggagagacttggcttcatcagctgtctaaatgcagacttttcaagaaggtgactcaagaaactaacattccaaaacaggacttcagaaaaagaagaaaactttttcttacccttaaaaatgacagaaacaataggatccggcttgccaaatttcgttttagggatattgctggcagattccacaatcactcgcagcatggttcttagctggtagaaagcaagtttcagcaaacgaagtggagactagggcgctggagctccgggtcgcaccgccctgggagagaagttctctcccagtgaagggaggatttctcccagggcaaggaaggggaaaaggcaaaatgggtggacctctggcggattttactgaaggcaacgtgtaaactgataccgaactccccgcgtctacgcagtgccgcaggcacagacttatgaattcgggaaatgtggaagtgaaaaggacaaaccctaaactaaaaataattccgtgcgacaaatgaaaccaacatgaatttggagctaagaaatacgggtaggtcaggaaaccactaaaatgttgctgccttttagcaatggttcgtgaaactgaattaattgatttttccgtcactgctttcattcttttctgagtttcaaggagttttaaaactttagtcattatttgcttttgacttttcgctgttacttctcacgccattgaacacacccactcagtaaccctatgttcagcttttttaaagcagctaaagggtgcctcttactggacggcaaacgaatgacagcgtttatttcaagtaaacgcgatccaggcatgggatatataaataattacatatatgtataaataattatatatatatatatatatatatatatatatatatatatatatatatatatatatatataaaggactgaacatagaatttcttcaaaaccccttcagaggtgagagctgggcgcctaagttttcccggctcttcaaatgctgccaattgccttcagtgaaaatggagaagtgactccccactgtttctggacctacagctgcccatggtgtctttctgtcccagagggtgcatgaagacagtgcagcttggctgagatcacaagaggcggcctggggttagtcagccagatctgagtgtgagactctgcctcaccaccctgagctacgtcatcttagcaagtttcttttcttttc

SEQ ID NO: 54721 - DNA, 730 bp, Homo sapiens
cacctaaagacctgttattaagtagtgataaaagatctccactccctctctcccccacaaaaaatatggactcattacaagttgttttaggatctacctccagacccatggagtttctttagtaaagcctgaacgacacaggccaaaataatctccaaaggccagctctgacccttttaaatcaattttagctaaatccgttcacaaaaggcttcgcacatccagtgtccctgaaaaataaaggaggttgggcaggccctgcgggggctcgaggaattcgctaagtgagttttctggcttctggatacactttcaaagggccagagggcacgaggcttccgccttggccgccacctccccggccagctgcggtgttcgcggccagtgttgccgggcacttcctggttcccgcgcgccccgggtgcagctccctgcacccagtgctggcgctcctcagaagggagggggccagaggcgagatgtcgcaaccgcctccctccctctttccccgccttggcactcagtcgcctcccagatgagcactctctcagaccgctgcgggccgccaggcgccgggaatgtcccctgaatgcgcgcgggcagcgggcgacgcgcccttgcgcagcctggagcaagccaaccgcacccgctttcccttcttctccgacgtcaagggcgaccaccggctggtgctggccgcggtggagacaaccgtgctggtgctcatctt

SEQ ID NO: 54722 - DNA, 425 bp, Homo sapiens
agggtccacctggaaaaattctgagacctgaggagttggggcagctgtccttttagccacccacctctaaacagcagtttactctcgaagcaccttgtgtctaaacccacagccggccttcacttctccccattacagacctcggaacacctcctggatgcaagagctgtcgtgactcacagtgaggtaaaagggcactctgagtaacagagtaacagagcaaatatgtaatttacattccatcaccaccctcaccttaaggccctgtgtggtctggccccgctgccgttctcaccttcatatttcaccctcccttgtgtccacattggccttgaggctgtactgcgcactggccaccatactgctgccccagggcctttgcacctgccacttgttctccttgatctctcttctccagatttctg

SEQ ID NO: 54723 - DNA, 2153 bp, Homo sapiens
gagccgccacgcctggctacaagtcaataaatagtatagcatcacagagcgaataagcactgtgaagaaaatgggacgggggctatggtagtgatgggaatttagatcagatggggaggggcctaaggagacctttctgaggagtgacaaattggatcaaaaggtaagcgacaagaaagggccacctgtgtgaatgggggaagggacacagaagagatgttagtgcaaggaggctgacacgcttgaagggagagtggcgtaagccgactattgatggagcctcctctgcactaggcactgcctttaatgctgagatgaggggtacccggctggggcctgtcagttgaggccagagaaattgcagggttagatcacatagggcctaggagtttattctgttctccaagcccctggaggttggcaactggaggctgacgtgacctgatgaatgtgtgcaaagattaccctggctgctgggcagggaatagactctgaggagcatgagtgaaaatggagaccagttgggcagctgctgaagtgtgacatggggatgggaccttggaggtgagtggcattagggagggattgtgagaaatgacttgtaaatataccttgggaaggtaaaacaaagatgatttattgatgggaaggatggaattgatagaatgtgagggaaagggagaactcaaggggaatactctgattttttagcctgtcattggttggatggtgaagcaggcaacaaaaatgggggggcctgggcaaagattaggggggggggagccaagagtttcatttggagctcatcagtttgaaatctcagtgagacttccaaattgaataggcagttggatgcagagatgtggagcttgggcctggagatgcacattgtttggagatataaatggtgtttatagacctatggttttataatacatcccttggagagatagagagaaaccagagccaaagaccgaacccagggtcactccaccacttggaggctgggccagtggctggaatgcacagcagcacggggcctggtgtatagtaggtgttcaacaaatctttgttgctgaggaaatcagcaccagcagtagtgactgcttatgcagtttctggagcagcttgcttctgaagtcagattcatggatatcacaagctcgaagacaaacgaacagagatgttttgctcactttagttaatagatttgatcaattaaacctgtttttggaagtgatgtgtggctatcttattgaagcggcattgctgtctggggtaaataaccggggtttgtcatcttgcgccaagaggattaaggacacggacatatgtgggtgggttaaggaacagaatgtttaataggcagaagaaaggagagaggagagcagctctctctctcgtgagacagaggcatctgaaaagggaaaagtggtggaccacagcgtattttataggcaggcttgaggaggtggtgtctgatttacatagggctcacagattggtttgaccaggtgtgacgtttacgtagtgcacgagaaaggctggccaccccacccaaatctgattatgcaaatggactttccacttggccatcttgtcttctccttactgcactcatagctggcaaaaagagaagacggagccgccattttgaacatgcttagtcttaggtagtacattccaatggacacaactgctggcattcacccatgcaagcttccaacttgcttgtctatgtctgcagcacgattttacagctgctttttgttagaaaaggatttaggggctgcttttcattaaaaggaaaatcttaccaaggacttccataccctcactatctgcccgagtaatttctttttaactcctatatcattatggttctctgaggttgtcaaactgaagctgcggagcaaggctctgacagcctgtggttccgtgagagaggaaggcaaagctctcccatgcacatcacctgtctcctctgtctttggtggagaacactagcatggggcccccgggagcctcccacggtccctggatattccaacacccaggcggagatctgtgaccctttcctcactcccagtgcatttcatagacatcagcctggcatcaccggtttcacagctccccagagctctaagggacat

SEQ ID NO: 54724 - DNA, 6699 bp, Homo sapiens
aaggctggagcagcaagccacatcagtctgttaacactgacattcaactgtagagattgatcacatttaattttaaaataattcgacaacaaatttcatgatcgcttggccctgagttactttctctccataagcgcacctcattttaaacacatccgtttggtgagatgcagtgtgtggagcaggggagaggctgaggatgcagcccactcttggagtggccttcaaatccctctgtccaagtcagtgtttaaagcaagaccatggtcagggaagaaactggcacgaggaatgaaagtagagtttgttaagatgaccccaaaacaagcatgtaaaacagaacaaggtaggtgcatcaagccatgccatttgcgagatactcagaaaacaaaggcattgtttgtgcctttttacaagccatgggttaagaggtgtcactaagtgccaaaaattcaccctgtgcccctaggccagtcacttctctatgggccccagtttcttcacttctaaaacaagagacttgaacccagtggtctccatgggtcctcccattctagacccagaatctaaagctatgatttcacgaccagggagataactaagcagccatcatatcaaacacttacaaagaactcatgtctcaggcactgttctgagtgctttctgcctgttgactcattgcatcttgtaacacaactctatgaggtaggttctatgatcgtttcactttgcagatgacgaaataggcacagagaagtgaaggaacatatctaaagttccacaagtagtggtggagttgggatttgaacttaggaggtctaattttaaccgggcgggcttaactacaacactgcacagcttcttttttgaaatgtaacctaagaaggaatttatccttaagccttccatattatagtcatctcacttaatatctatagcaatcactttcaagatggcagtactttttcgccctccaaatgaaatcctgataaaataccaatatacaagagacaaaagcaaactaatctggtttgatagggggaggaggcaagaaacaaaatgctcccttctcattgggtcctctctgaccctgtgcctaaaggcattgccaacagaatcctagtccattaaggagcacatctcaaaatgctatagaacatatgtgtttcctctttctaaaaattaataatcttgtacctctggtattgatttttgtaatccattatcagaaaagtatattttactctaaataaatcactttgggatgttttgctgcactatttgaaataatttttattatttccaaggataataaataaaaataaagcttctaagctttttctctaccaggtatggtggctcatacttgtaatcccagcactttggaaggccgagatgggaggatggcttgagcccaggagatcaagaccagcttgggcaagctggggagaccctgactccacaaaaaatacaaaaattagccaggcatgctggcccatgcctgtagttccagctactcaggaggctgaggtggtaggatggcttgagcccaggaggttgaggctgcagtgagccatgatggcgccactgcactccagcctgggtgacagtgagaccctgtctctaaaaaaaaaataataataaattaaaattaaaaattaaataaaatttaaaaatgcaatttcatccaacacacaactttagaggaagtccaagagggtggtgtgccatatatggagagcaaagggttacaataaaggacacttctaccctggatcaccgagcagagagagtctccctgaacaacccttggtcctatctcacagaagagctcaaacaatactttgcaaaagctggtctggattaggagtccctgcagttcagggccacctgatcctggcctgagatttggaagcctggcttctgacattggctctaacaaacttgttgcatgtccttgggcaaagttctcttggcctcagtttattcatctacatattgaaccccctccaaaaggttaactctccctctctaagattccatgatatgtgtcccctggcctgcattattctctagctaccaagtagattcctgatttgaaacttaggataaatggggaaaaaaatgggaaaaagagcatgtagacactgttttctcatgattaggccaaattttaggatgttcttctacaagtcctcaacatcactcccctccacatctgattttcacagcttagtggaaagggaagaggccacagccacagcacactgtgcctggctcagaatctcagcatcagcaggccaggcacttgggaggcatccacccctatgcacagtgttccctccgtccttggatagggctctctcggcctctgtgggagccccagatagtcaagctgtctcagggattcagcccaaagagacggaggaaatgcagagctaggtggagtggtgatgtgaaagacaggaggagaaagcatggagaaagcacacaccttggcacagtggctggtggggaaaatgacacctgacaaaccgaaaggtccttttgagcttaggccaggtttcttgagctgaggtttggggagggggtaggtagctgctcccaatcttgttcccctaacctcaggtggtgctgcgggttcctgacacttccagacctttccgcaggccattcttcctaagggtaggtacctctggagaagaaacccagcgatttggcccggtaggcgccccattcccaagacagtcccacagagctgactactcacttcctttctggagaaaggaggctacgccccagtacttcatcttgaacttggcagggtcctcggtgtctgtgaaggtgcccaccatgtctgcgcacacgtcccagttactgcaaaagccaaggggatcctcagccaagccgggcaaagggcttcctccctccctccacccattcggtgctcccttcccttcacaatgcccacgtggcgatcagcaggcagggcccttggggaaccctggagcgcaaagggcgcagctgccccggcggccactgacttcaaaagacggactcggcccttggctgtggcgctcatctggccggtctcgtccacggagaactccgcgacgatgttgtcctgcagaaagaggccctcggggtccttcttggccatggcgtaccaggtcccagagaactgtgagaaggatgacagcaggggtttggcgtccgggggcgcacggcgggccgcggggagggcggggatggggtggggacctgggccgcctgggccccctgggccgatacctacgcgagccttgtcgaagttctccttgactcggaagctgctcactcggcagtcgcgctccgcgcggccgctgcccagcgccgccaacagcaagagcgcccacacccacttcatcttgcccaggaatccgccctgcgggagacgcgcctccgtcagtgcccggcagccgacccccgccgccgtatcccacctcaccccaccccaccccaccccggcccatcccgccgccggccccgaggccccggccgcgactcaccaccgggaggggaaccgcgcgcaagcctggccgccgagtccgggcgcgcgtggagcgagggaggcgagcgcgccgcggccgccccgctgctttatagcgccggggggagggggtcgcgctttcgtaaccgcgcggggtgaaagaccgaaggggaggcgccgggggcacttgcataacgcgccctgactcaccggagcccgggcacgggcagggtccctgtgggccggcctcacctccaggacagcctcgggcacagtggagcggccgcgcggggtggcctcggccaggccaaatgcgccagcggccctggctcagttaccctgcactcgtgccagcggccgccagctgcggtctagggtggcctccggggccagtggctctggcaggaggctcgagtcaacctggcgggaagaccgtggcctcacagagcgagagcggacccgcgaggctccctggtgcgtgagtgcccaggccctggccatgccaaattggcgcctccgtctgccttctgaggtccacttgtgcaggaattttggaataattcatccaagtagtttttcattttataaaggatgtattttactctctttcaggagcgttgtggtgccctctggtcaatatttgttctttagtttcaacatctttaaaagcgttaaaaccctccctgttaaatattctccagaaacgcaaccctggtcaggacaggaaatattttagcagcctcggtggtcgcctgcttactccgtggcacttccctgaaaccactttgaaaaacacctaccgattgtttatgatgcaattttatttcaaacccatgttggaattttcatttattttcaaaacagctaaggtcggttgttttgttggctggggagtagacaaaggagagaagagtaaacaacattctataacttcagtagccaattgaatcaaaacagtgtgactagtttaggtattttcctgtgtgatggcacaatttactgaccctgtttttctctttctgttcgaagttagagttccactcgtttgatcaaagcagccaatcaaaggatgagaatgacggaatgagaattcatgatgtggcaaagaagtatctcttcttgagattctttccatacaatatcgattgtgtctccatggcctaaattggaaagattcgagatcaatttgggccattttgctgcagcccgacctgaaataagaggagatcggggaagaggaaggtggctgccaaacagaaataaggagttgattggttctcagaccaatcctttatctatagggcattagggctaattctgagcatcctgaaaagatgacatctgtggcttccttcccccctgcttctccatctttttcccaccttccccttcactcttgcacccatttgagtcccagcagtgtctggggagccaacggtgatgcatttaactcctaaccgccgcagagctaggaaagcctgtttctggacaacaagctgactaggaaatcttctgattgggccagttttatagaagactgtgtaatcccaaacagctcaaataagttctgcttcagatcgtctcctgcaggaccctatggggtatatatctatgcaccctgggtgggaaaggattttagggcacctctctatctcctgcccaatacttggatcccctcttcggcattccagaggagaggtcttccagtttttgctccaggttctttagtgatagagagctcctagcttagcccagttgcctttggacagttattcctgccagaaacgttctcctaataccccctggccttgcagccatttctcctagaacacattctggtggcccttgcacacactgtaggttgaataatgaagggtatttcagttcatttcgatgatggttttgatgcagcaacaagttttcatttatttgttgggtgtttaaaggttgtttcagagtaaaaatttgaggtgaaaaaagaaaaaagaaagttggtgtaaccattcctctgcccctcctcttttaatgataaatcatggaccttagtgctccagataccagcagaggaaaacagtttactttggcattctttctaggatttcttcatgattacaaataagttaattcaggtcaactgatgttcttaacttcagtactttggaaaaaatcctcatacattaacttttcaaatatgtgtatatgtaaagtcaaaaggaaaaatgttcatagtgaatatctctgtgagataggattagggacgctgaaagattttttctttgcgcctttttgtatttttaaaattttctatgatgaaaacgtgaatcagaaaataaagcaaatatttcctttacaaatatttttcttgctccttttcctgtaggtaaaattatgttttaaattacatcttatagatcgtatataatgtacacaaaatttcattcatttccttgccatgcttcatggagagacagaccatgtttctttcattcatctttgtacctgtccccattctccccacttttccactgggtatatcaagagacttgttcatagtaggtgcttaatcaatagatataatttcttttactgaaattagtcactctatgcaaactccataaaacatttatttttaaagacctgttcagagttcaccctttctaatatataattcctcaggatttagtacttgtagcacaggtggctacttggcctttcaccagaaaatttgcagtccccttccatgttgtaaagttggggactaccagtctgccagcccctgccttccccgtccccacttcccgaagctctgtaaggccacgagccttctggccagcggaaggggctgtgtcactcccaggcagagctcagaaaagctgcccgttcaattgttcacatcctctcttttcttctcttatctgccagggtccccactggtgactgactttatgtgaatgagagatgagcttccactggatgaagctactgagatttgagaggttacctgtaacagaagttgctgttaccttaaccttcacagcatcaaacacatcactaactcctaaaaaagactgaaaagggttttaccataactcacagaactaatgcaagacatttgtgtccttaccctcatgaaaattaagcactagcaaccagctccattttatacaaag

SEQ ID NO: 54725 - DNA, 1051 bp, Homo sapiens
atacagttgttttattattttggattggaaaaaggtataagagtaaacagtatttgtcacatatgtttctatatatttctttatatatagcgttttctttcacgtctattaaatagcaacaagtgtccaggtttacattaagcaatatgcactaaaacaattggtgcataataaatttgatgtatttgatttgttgtagattatatactctgcacaatctgacacttggtagagacgaggaagtctctgtcccaaggaattatttctctgaattcagcagtctgatttgcttctttaaatgacttaatgtgctataaatattaacttgtctaaaagtttaaggcattttcacacattcctcccctccccctgctttttttcctagtatagcaatcaaggttggcttcaaatattattaatttgccaagtatgtatctgagtcacataataaacatcactttgggaacatagcaatgttcatcagtgaacaaataaaggcagtgattccctgatgtcagtatgccactggatcaccccaagtccaaaaggaaggccaccattgttccaaaatcaggggcaggttaagtgggatcaaaatgactccacttacttttcccctccctggtaatccagaccaggttgaaaataacctgtatccagatttgattcagagattctggactgatatgtacaatagacttctgtgaaatgtcccaagtaagaaattgattcggggtccaggcacggtggctcatgcctgtaatcccagcactttgggaggccgagatgggcggatcccttgaggtcaggagtttgagactagcctggctaacatggtgaaaacccatctctactaaaaaatacaaaaattagctgggcatggtggtgggtgcctgtaatcccagctatttgggaggctgaggcaggagaatcgcttgaacccaggaggcagaggctgaagtgagctgagattgtgccactgcactccagcctgggcaacagagtgagactccatctcaaaaaaaaacaaaaacaaaaacaaaaacaaaaa

SEQ ID NO: 54726 - DNA, 1757 bp, Homo sapiens
ggttaaataaatactatacagctgtttaaaaacattagcatatctgtatgtactgcaatagaaaaatgtccattctatatcaaatttttaaaaagttacaaaaagtatgcatagtataatagatatgttaaaaacatatgcacattatatacatacatgtaattttatgtacgtattgtaagtttgcaaaagccaaccaaatttaactgattatattacctgtgggcctggaatacttttactttctattttaaacattttcaaattgtttgtattttaaacaatgagcatgaattaccttcaaaatcagtaaaaacaataaagacattttattaaagatgacaaaatagatatgtttcaaataaatcacctgtattagtcaactaaaaatttaaaaatactgcaaaattatcagacaataacactataactcacaaagtagttacattagcagacaactcctctccaataatgattattagtctaaaaaagaaatggcacaaatgtggcctgtcaatacagaatgtcctttagttaaacacaacataaaaataaaacagcattgatttgttacggtagttctagccttttacctgttggactctgatccctgaatcaacatgtgtgtctgaactttgctcctaactgaatctattctgacaccaattctagcaaaaatggcaaaagtgggggagggcattttgtattctaatgatctacatacaaatgataaaattttaatcttgaaaacaagattcctgactcaatgacagccatcactggaatggccagtgtcccaaattgataatgtgagggaaaaaaagaattaaaatcttctcttatttttatgaaaactcattaatatgagataaagaaagcagagaaaaattaattaggcctagcaaggttattactattgtattactctgctaatgttaatgatgccagagaacgaaacctacaaggcctttagaagtggacagctgttatcttgttcccttccaagagtacttcccacatgccagctttcttacaccagttttctgataccagtcaattttactaaaaaatcaagtcagtttagagtaacattataaactaactgtcttaaaaaatacccactaaaaaagtggccagatatccctagagaatcaagtctacaagactggactaaatgacctttaaggtcccttataaccctatgaatctatagtatcctggttccctgagggttggcagtcactacaaatcattgctatcataactgttacaacctgccaggggcgggaggagtgttactaaggaaataacaattggaagaacaggcaacacaaaagaatgcatcactgtcaaatctattcagtgattattggtaagtagggatcagaatttaagtcactgactttctgagttgaaaggggaacctggaggtcatttaatccaacacttatccaatgaatgaactttcactgcaacacctccaataagtgccaatccagtccatgctggaacactcgctactccagaggcagcccatttctccattccttttgtcagacagttctaagggacaagtttttccttaaattaaggcaaaaatctgtttttgggcagttctgccaacccagagtcataaaaaataagtctcctacatagtagcagccttgcaaatatccatacagtaatttccatgtctacttcctcacctcttccctcccatcctttcactcttctcccaggtaaacatctgcagttcc

SEQ ID NO: 54727 - DNA, 1970 bp, Homo sapiens
cacccttttttaggtcaactccagctgtcttaccacatctgttcaagccatattgtcctctcactctttgtcctatgtcctcacgttctttacatcttgatgggggacagctgtagtgtgtttagagatatattctaggatcagcctactagatttcactgcttggctctgcactttccatttgtctttctttgggcctgttccttaacctctccaagcctcagtgtcctcatttataaaaagaggctagtaagatggctgacctcatacgaatggagattaaaagagttgcctcatctaaagggttttaacggtgtcttgtacagtgaaacccagtaaatgttacatcatcatcatcatcttttccctcgccccaggacacgacttcctattcttgctcccactctcccatttctttattcgctggccgctccatccgacccatacctatcttaactcactggttgaactaaaaagctctcactcacttcaggcctacgaatcaactgacaagagcggggagaaactcaaaaacggagatgccaggtgtctccagaatctgtcatccaaaaaaaaaaaaaccaaaccaaaacaaaaaaaaacccgacgatcagctagtactatatgaaaaacaagttttgaggtccttctccctgatgccaaatatacccacagccctcctcacacaccctttcccttcctccctgtgtgccaagttcgcccccggagtcgtcgtttccttctttcccggcagctgcagcgacgacccacggcctgagagagccgctgcagcacaggtcccgtgcgccctgccgcacagcctcgccacaaccaccaccgccgccgccgccgccgccgccgcccgcaacccgcctctccctacgggtcccgactgggcaccacttccggtccgacacggccacgtgttacatctaaatggcaccgtcccccgagtgcgccgaccttgtgctacagccagaacagctccgggaaacaagggcagcgggagaaacggcccggaaagggacgaagaggcttccagctttcgccaagtcgcggctcccagtttttccctgggcctccttcctttcccctctagggaatccggcatctagtaccgctggcactgcttgctgcttagcccacgcctctcatttgaaaatatattttgttttaccgtgcctatcacctgccgtcctctctctagtaaccttagtaacgcctcctcggaggatcctctcagagcagctcatcagcgcttcagatcagcctctccctccttcccccagtaaaacagttctcataattagaacaaaaatatctctccatcgtttcgccacccacacaatagataccattccaaaagcagtgctgatggcagaagagctcatcgaatttgtgaggaaagaaagaataggaggagagatttctcagggttgaggattctctgccgacaagcgacctggcacatgcgaaaagggatccaaaatagaatcttaaaaagaagaagaaaaaaggcaggaaaagttggattattttaagcgccactaggttcttcctgtgctttgcgttttctacatcacgacgccccactctttccactctagttgtttggttcatgtcttgtctctcgctggcattagcagctattcattttttgcttcctcctcagtacccaaaacggtgccttggaaatcacaagtgctaattaaatatttgttgaattgaactggcacgcttctggcgtttacagtgggccctttttagagaaaaccttggcacttaatgcacagtcattttacatcttttgccctaaacagtagataacgatatccttatcagttcaagtctctaaccctgacaataaattatagatacattctgctttatccattgcactgaatgtgatcttaaaaggctataagataaattaaattattgtaaattaacttattccaaaatgcaatcag

SEQ ID NO: 54728 - DNA, 1297 bp, Homo sapiens
aaaaaaaaaatacaaaaattagccaggcttggtgttgcgctcccgtggtcccagctacttgggaagttgaggtgggaggattgctggagccagggaggcggaggttgcagtaagccaagatcgcgccactgcactccagcctgtgtgacagagcgagactttgtcaaaaaaagaaacaaaaaaaaaaaaactggaaaaacctcacaaagcgtgttcaaaattttcaaactttctacttgaaaaacacagattgatattatctggatgtgattttaagactgcttactctaattaattcctctaagaaaggcattattgtttaattacatttcttaaatccgtatgagctgagtggtgttattatggctgctcgccagaacgtggttattatgccattatgtgacctgggacctgtgctgagaggccacccagtgtgtggaaaagggtactgaaccaggggtcttgggccttgcgacctcaaggaaagtgtttggtagccttctgggcctcagtttcctcttctgtcaaatagatcttacctgctttactactttcacagaattgtctaaagaccaaataagaaaatccaggcaggagtctatgacatgtaggctattatgaagccaaagatcattattcaaagaataagctagtacctgcctggaattcatagttcatataaatgatttttctaaatctccctcttggtaaggaaacatactcccgtggttgcagaagaaaaaagcctcccctctcctcccacagccccttttcttactgaattaataagtgcacagccctttggggagggtgtagacagatcaggcacacccctgtgtccacctccaccaaaattctaggggaaaatgcctggcttcttaggaaaatgcttccctaaaaaaagaggagaaacctcaagtgttcccatggaactggggcagagggcaaattccgcacaacctctgcacaaacccacgggctggctgcttggcaggcctacagggtccagatctctgatctgtggctcagagtaacgaggtcatttggatggtacattggtttcataaacccctccatgatgctgctgctgttgtgaggatagttgtcacttccaactcatattattgcagactctaggctacacgtagttatagggacaagaaagtccacagctcctccactccccacaccaacggctccaggcagacttgctgcaaggagcagagaccccttggtcaccacaggtaaaggggacagtgttttgactgacttggcaagcttaccatgtgcaaccctg

SEQ ID NO: 54729 - DNA, 873 bp, Homo sapiens
aaagatgccccttgtgttctcttccaattactccttgcctccaagggtaaccactctcctgattctagcagcatagattagtttttgtactttatataagtacagtcatataggatgtactttattgtgttttggctcctttccttgaatattcatccttagttttgcatatgcatttgtagttctcaccagaggttttagtccttgaaatgtagttcaacaaacattattcagccaggaactgtgcccggggctggggacaccaaaacaaataagggcaaattcctgctgtaagaaatatttaatccagtagtctcgtaatgatcagaatttagtgtaaggtgaattcctctttgtccaacaaatatttattcagtgtccactagaggacaggcgctgtatcacaggtgctagggataagaaatgaacaagcagacaaaaaatctagcagaaatcctctcttttcttcccgtgacgtgcatgggcaagttctgcccactaatattcatttcccactatgtcctgcatctgatttaacataaagggaagtagcaatggaaactatttcttctggcaacttggaatatgagaagtccctggtccttgggccatttttcaaatcagtgagtgtgggaggtataatatttgtgtgtaccaatttcttccttattccattctctccactgctgatgctgcctatactgaatgcaatgaaagtctggaacctaaggaagcctttgggtgttagcttaccttggagtcaagctgagcagtcttcttgttttccagagccatgaagtgagaagagacacaattgccaaagctgtgatggaaatcatacagctttgaatttgttttagtaacatggaattc

SEQ ID NO: 54730 - DNA, 1862 bp, Homo sapiens
acagagactgttcttccacatataaagcaagcaaagagatggaagaagaattattagctaaacaaaaagaggctgttagtgaatcctgggccaaagaatatattttaccaggtctaattacatcagattacttgaatcttacatctggccaaattaggatatttccatttaagaaaagaaaaccaaagatcaataatgcatgcctactcttgcaaagaatgcaaagaacatataaatgggttctggtcagtcttatagatatattttcctataattacacactaattctttcttaaaaatatttcccaaaacagcaaaattctaccctccttggtaagcagcaaagggacaacacgggaaacaaaacaaaacaaaacaaaacaaaacaaaacataaaaaccctagaccatttaaagacaagcatggtgctttgtaaaatcttcggggtatcacagaggtgctgaatgcgtggttacatcaatgaaaaaacgcccactctttgagcctcctgaaaaggaggccacaggacccccgggcgccagggcttgggaacccagcgcccctccttgtctgtgccatgacagacaggttcagtgtgacttgccaaggatggctccaagcagctgggccatgtagcctgaacgcagcagagggttggacgccttagagccagctgtgggcaccacagcccgaccagggaggcagcgggtctccccaggttaagaggccagcggaggacgcgcgcggtctccttgggggagggtgcgggtgggccgggcgcgcatgcgcatgggcgccatcgcccgccggaagagcggcagcccaggcgctgctgctggcgccagacggcaccggccgctggtagagcgcgtgccgcgagatgcggcctcaggacagcaccggggtcgcggagctccaggagcccgggctgccgctaacggacgatgcacccccgggcgccactgaggagccggcggccgccgaggcagctggggcgccagaccgcggtaggtgctggctctgcctttcctcgccgtgttgctcccgcaccgagccgggtgagtgcgcggtgtggatcgggctctggtctcgctcgggggtcccgagcgggcgccggcgggttggggtccccgcaacccgggcacagtgcccgccgcgcctccgtccccaccctgcccggggctcgggaaacccctcgagctgtcagctggggggctgcaaagcggaattcccggcgccccagccggcgctaagacggaagaaactttccgattgttagcagtccttttgggattccgaggctgctcctgtaattagtgtcggggcagggctgtggagtcagactgcagtttggcgtaccctcccctaggtcgtaggtggggggtcagcgagagaggccatcctgcagtggggcgacgttgcgaggaagctgaccctgaaaagtgatcccggtggttaagggttctctccgaaaaggaagctgaaaagcatcgagtctagaaaaaatgttcgtcctagagttttagaatcttggaaaggcagagataagtgggaccgctagtttttaacctttagggatacaaggactttttagcaaacgatgcagaacaaggcatatcttgttaagaagctcacagccccgtccccaaagtcagggacccctcgtgaagaacactttatgttcagtccccctccttcgacacatgagcaaagtgaggcccaggaaggtgagggcttttgggttttcgtttgctttgtctcctccaagatgtggaacgtgggggtgagatggggcgcatgtccagggagcaccagggttaggatcccagcttgccatataccggcctagggccctttccact

SEQ ID NO: 54731 - DNA, 960 bp, Homo sapiens
atttttcagcaaggatagcggtagtattttaaacagaacagcttttaagattcagaaatcattagcaggaaagtgactttaatgaagtggtttagtagttcttattatcaaagaatgttgatttggacatccgcctggaccacacttagggaaaaaagaactgtcaaaataacaggctaggtgcttatgattcccttggcttagagctcagttttaccagtagatgtcactatagtcagacattattttaaagcctcaaaaagagaaaggtaacctcaccggagtttaaaggatctgagggggaaaaaagcaaacaagttcttctatagctaaacatgtgctcttctttttttaaaaagcacagtaggcattgaataaatgtttactaagtgaaccgacaaataatcaatgcatatggaatagtccgccctgaaatctttgtgattgagttatgctctgataggaatcagaggaagagctttagagtctgcagaacaaaaatgatctctaagatgcaagcaggcaggtacagaagtaagcaactctgcccagagtccattcgtgagaagggacgtggggatttaagcaactcaactgtgcagactgttgcgcgccaccctacgccaggcactgagctagggactactagaatcggagagggagtcgcggtacatagagccgatggcgaagtaaagcagaggtcatgtgttctgtcctccatcctggagtgggggaggtgcaggttttcctggcttcagaggtagatcaaagttctaaaatcagggtgaaggagctgagaaacaattcccatcagctctccttcaacaccctctttcctttttttaaactgaggtttgcctgcataaggcagaaagagattaggaaaacagtttgcaaacctggcaaattattcagaggtttgatatattgaagatatatgacaacatgtattacagctat

SEQ ID NO: 54732 - DNA, 978 bp, Homo sapiens
ccacaggattgtttcttggggctgttgttgttgtctatgcagaatggtcttgtataaagagatgcataacttagtttactgaagctgaattttccatggaaattatccagtgctttcccaattctcaggcgctttatctgacagtctttcttcctctagataatggctggcagcagcccacagagtggaggttatatggtgcacttctgaaaaagtcttgaatggagccattgttcccctgagatggtctgtgtgtttcactgaacagagagcagggtgtaaaaaaggcaccttgtgtgcaactgttggcgaggttggggagtgaattaaaatctccagaaagtctgggcagtgctgttcagaggagcaatgaacactctggaagtactgttagctcagacattccaatgtggtgaggcagcctcggggacacgacttccctccaatctcgtttagagagggagccatggggcgagcaaaggacactgatctggacctgctctctttgcaaagatttgaggaaggcgcccctttctagggatggggccacagtgattatcacacttggataactttcctgctcaacggacctagatttgccttgcttactaatcatgcaatgactcatttggaggattcaatgttaactgcttgtgcatctaccagtttgtagctatctattcccatgtgccaaattaaaaaaaaaaagtctttgggggtgccaggtgatggatgaagtttgatattatttgatcattaaatgaattataaaaccataatataatactgtatattaaataaatagcctaccttgtttattgtcagtgatgctacctctttcctcagccctttatttacttgttcaggataacatagcctcagggattgagtaaattaccacttctcactgtcctagtgctaaaatgccaagatcttaaggaacaaagaatttctttagagccctctgcagagaccttt

SEQ ID NO: 54733 - DNA, 561 bp, Homo sapiens
gggccaggggtctgggaaggggtcgcgccgccagcagccagctccgggggaggcggccgggtcctcgctccgcgcccgccttccccgcgcggcaggagccgggggcgggcccggcacaggccgctcccccgcccggccgcccgcggtggcgctagcggcctctcacccggggcgggcgagttctgggaaagcccggcccagggcgggggccccgctgccgcccgcgcagccgccgctgtccgggcagcgcgcacatctcggcgggagcggactgtgaacggcgcgggtccacacggtaacgctgggcaacgtgggcaacgcggcgggcggcgggctcgcgcggcgggaggggcagcggcggcgcgcccgggctctacctcccgggctctgcctcccgggctctgcctctcgggcacttgcctggctcctgcgcgttcctgggcatcggctctgcagctgacacacagtagcggggacacccgacgccgctagcgacaggcgcgcggacggctggtcccagagggacgctgcgcttggggacgccggcgagactcgccagga

SEQ ID NO: 54734 - DNA, 741 bp, Homo sapiens
ggctggaatgttggtcctttaccaaatgggacatctagttagtgggtcaaagcagttaagagcagggagaccactgagggtgattctgctagtcctgatgatgtatgcaaaggatctgaattgaggtggtgtcagtggcaatacagggagttattagttgggaagaaccttttagaaaacttattagaatgtgacagctgattggatatttgggggtgggtgtgttgataaagaggactatggatgattaggaagtttcctttctgggtttctaggggaaaaaagaggtaccggttcataggaaggaggaagttaggcagaagagctggattagggagagggagagaggacaggagtctggttttctacatcgtgtgttggctctactgaagaggaagttgaaaaatcaggactgtagctccaaggaaaggctgtgtctggaaagaggcatttggaagtcatccacatagaggtgatagttgaatctgtgggtgggaggggaggggatggccaaggagtggctggtgctattcagaatcattagcattgttggctgtaactttagataagcagtgtaaacaaacccttgcccaagtgggaactagttccactgccttcctggtgctagtatgtaacttgttaaagcaaagttctgcaggatgaaaagaatctcctaacaatttcaggtttaaaaaattatatttttaattacagaagtgatatacaaatacattctctctc

SEQ ID NO: 54735 - DNA, 829 bp, Homo sapiens
tgccttcacccgtcctggattctggacctttgtcttccctggtcactggaacctgattgtctttgtttcaactgtccaccaatttggtcccagactcttggattgcactggattggtgataccatttattccttttcctccctttgacctctcggctctggggccatagctcatgtatgacacttgctctatggagaaacttaaaccttgttttccaagcttagacccagaatcatggccaatcttctcttggccttatgtgctgtgtgcaaaaccttatgctgttgctgcttttatttcttcctggatgagaaagacatgacccgtggattatcatcatgaattctacaggcctcactctgttgtactttagtcagatcgcaggcatgaggcttattgcatcatatttgcctacccccataaaattatgaaatctctggagacagcagttgtccttaattatctctgtgtctccagtattttgttcagggcctgttatacaaaagaaggcctttaattaatgttttcagtattaattggaaattgacactctgccagaaaaggtcaacccacagcgtcagggaggagtaggaccattggctgttagagggcagcagggaccttggaataattccagaaatggtatctcagcctcaagttatttgggggaatgtcccatggccatttgacagagtcagtgaggtggccaacctctctgcttggggaagactttctagataaccattaaggcacaaaaattgctgtgttaatagcctttccccctcctttaacctgtaaaagataagtctgtgtttgctttgtcagtgtc

SEQ ID NO: 54736 - DNA, 670 bp, Homo sapiens
aaagagctaaataaataaaaggggtacgggatatccttattagagagaagagtgtttagtaggaggttattatctgttttcttgagagaattcctggcttagagtaaagacagatgttataaaaactgtaccctggttgatttgattgacacctcaagatgttttgaatctagttacacttacattactgtcaggtgatttctgagatgttgctttgttgcagtacaagttcagaggacaaaggtcttccagggttggaggggtcagtgtgaatggagcattggaggttgtgccgccttttctgagctgtgcatggttgtcttttttcctaccagtaggtggaaatagaactgaatctttcagcacttgctctttcagctgaatcctggcaggattcctttaatttctgccatgaaggaaaaaaataaaaaacctcaggagaattttggagtgtacagttggaggactgttattctgcagactggaatacttccagtctgatggtcagataatgatttcagcctcctagaaggccagggtgctggaagcagctgctggcagccgtgggtgtcccatgagctctgctggacacccaccttgaggggggcttttcctatcctgaccacacatccttttacaagactcctcccgtcccacccgtttaaacctt

SEQ ID NO: 54737 - DNA, 1891 bp, Homo sapiens
tggattctgaactaggggccttgaggcgtatagagatgaataggccctagactgtgccctcagtagcttccattctagaagggagatgatagggacgtaagtgcttgtcagatggatggtacagtcagagatgaaaggtaacatgttctccttaaagtctaggatacaggttttcaaactctagcaggaatcaaaatcacctgaagggcttgctaaaacacagattattgggtcccagcccagagtttttgattcagtaggcctgcgatggagcccaagaatttgcagttccaacaaactcctgggtgaggaggatgatgctggtctggggaccacactttgaggaccatagctctaagtcttcaattatttctccactgtgccctttctccattgcttgcagcatgctaagcagtgccctgtgctggggacaaaatgtttattaaagcttggtccctgttccagtggggaaatagtaggagagtaaacagtgatttctgtacttcacagaaagtgctactagagctttgcttaaggtgtcattggatcaccaaaaagaacatgattatttcttgccggaacccagggaaggccacatggaggaggtaaaattttaataaaagggatgtggattggaagaagttgtatggaagggcatttgcagctgcgaaattcccaagttttcaaatgtcctggggcatcctctaacttcttctgagatgttcccctgaagtgataaaggttcagcttacttcccatagaagcctctggcacagttctggttaattcgcctggttttagcaaagtctttatgtttgtctttccggagttctgtttggtcagtgtcttgctcgtgcatggtctgaatactctcagtagaatggaattctctgcacaggcatttgaatggaatgtggaatcatgagcagagcaaacagcagcctgctaccaaaattctcctccccatccctgccatttaagtctccaagctgctgcaactaccccctccaacagcctcactgtttttgttgactcttcaggaaattcgacagttcttatatcattgcattttgtttacacacagacacccatcagacatgaaacttctagtatcttcaaccttttagaacactgcttgtagattccaaagttagaaaagaggctcatgagactagtaaaggggtttccaaaccatagcgcagagctcttacacttcatgctgtgagaggcccctgcgttgttaccacctattaactcacaggtgacaccgttaaaataaatgtcattgtttttctagctcagggcactttaagaaccacattatggggaggataagggtgctattagaagcacatatatagtcactaatgcgaaatggcagctgatactgaaggagaatagtaataagagagagggaacaggagaagctaatgtattagagaataatgatcatcaaaataatcatcaaaattaagtttaattataccctccatctgccactgaagaaggggctgggtatgatatagggtaaaatcccagcacgctgggacgctgaggcgggaggcttgcttgagctcaggagtttgagaccagtgtgggcaacatagcaagaccacatctctacaaataatataaaattagcccagcatagtggtggtgcctgtagtcccagccactcaggaggctgaggtgggaagatcacttgagcccaagaggtcaaggctgcagtgagctatgattgtgccactgcactccagcctgggcaacagagtgagaccttgtctcagagaaaaaaaaaaaaaaaaagaaagaaagaaagaaaaagaaagcaaggaagtatggattatagaacagtaacactaaaagggaccttggagataataactggcca

SEQ ID NO: 54738 - DNA, 705 bp, Homo sapiens
tgggagcagagtgaaatatagatctccttcatacatagaattaataggtgtctattgaccagaaaagccaaaggccatcttccagctactcccatcttaaaggacaagataggcaggcatcccactgaaagatgaaagccaatggagtgtggggtcccttggcatatgaacttcccagctacttcccatgagcagcagacaggcaggtcagaaatggcagtgcaccaaacaacctcagaaacttgtacactgcatagctgtcacaagctgcttggcagccttccctggcaggaagctgccaaccagacagggaccatgcaaagcagcattccactgcctgggggttgccagaactcaatctgacagcagctattgtccctccatagcaggtcctgagacccaaggccagcaggccaatgaccttcctccttgatcctcagccttctccattcctacccacacacacacccctagacaggcctaagaggaatactgtaacctccttgtgtactatgttgggtgccaagttggtttgttttctggagttgcccgaacttcaggggattggttataaatgaatgaagaataacagaaggtgtgggaacactaatggcttcatgtttttcagccattcaacacattttttgagcccctattaggtgttaggtgctggaaaaggaacaaaacataattcctgccctcatg

SEQ ID NO: 54739 - DNA, 1741 bp, Homo sapiens
cttggcctcccaaagtgctgggattacaggcatgagccaccacgcccagccaatttttgtatttttaatagagatggggtttcaccctgttggtcagtctggtctcaaactcctgaactcaagtgatccacccacctcagcctcccaaaatgcttatcctagaatttcctgaagtcatatggctccagacactttcttcacaaaatatttaatacttaatatctgggtagaacatgtgccctgaaacacagtttgggaaacattaccacaaaacattgctgatctgtttctgtctggggtctttggagcagaaagggataacaacactttccagaatatttattgagcatctactttgtgcagaacatgtgggaataattcaaaattggcagatcaatctgctcatcaagatttcaaaatcaaatgctgcagagggttgccgcatatgaataagcaggccagtcaacaaacaagacaaattaagtactaagtgcagcttggaagtgctgcagccaggctgctgggcccttgtttgactccccgaattgaattccatactctcagctgtcagtctcaagttcctttgctttgctccaccagtgcggttaccactccccagttacaggatctcatttcaggacattcactgtttatatcttaggtagttggtgggacacatccagcatttttatcctgtgctgaacaccctagaatttttgcctttcatgtacagctctgttagtttttactcagaattaggatctgttctttgcctggaaaagatgatgaacttttcaaaaagcaagaaagatgatgaaacagccaatgtcatgtgatgtggtttaatcccagcccatcaaatgttgtaaccacagtccagtgtacctgatgtttcctggacaaaggccctgggttctcagggtggctgccctttttgaacctgtctatgactcacagctatttttccaggacttccccacctaccaagccatgtccctgtgtccctacctcctcagagagccctgacccagacctcttcctcttctgcttcccacccttcactgccaactttccttggatgttccattgatatgttctttctgaacatttttcttgccccttttcctctgcctctcctttctggcttctttgaaagaaatgaaggatcattcttttggagaatctaatccttggaaagtccctctctgctaaacagtgaagggaagctggccctgtaataaaaaggccaacattgtttccacaagtgctacatcttgaagaaggagctgcttattattttttaattatcagtattagttgacatttattgagcacatactactcctctccaagcaccggagcccttcatatttatcgtcccttttattagtttatgaatataaagagactttatatttatcatcgcttttattagtcaccacactccttatgataccgggcattttattatccccatcttatgagcgaggaaataagagtctcagggtaggtaggaaacttgctcaaggtcacagaaatagtgaaaggcagagccaagaaatgaacctacattcctttggctccacatcctgtgtttttctgtttcccagcacaagtgacatgagtgagaggtgcttgacaacatcttgttttgagttatgcataaaacattgcagccaactccatgttggtgctgcccttcccagaagactgtccaagtgccttacttgcccagggcatc

SEQ ID NO: 54740 - DNA, 792 bp, Homo sapiens
accccctggggtcctgtcctcacaggccctttctgctagggtcgcctcatttggcaggcagacccttcaagacagctcaagccccacctctttgcacagtatcccctcctgactcacaggaaatagtcagcatgttgccctcccaactctgcaagcacaggacatatctactggaatcctctctccctttgccaccagggagctccagctagcctcaaatctttaggcaagagtcatgcaccagttcacgtgatctacagactgcccgggacacaggtcaatgtccccagggaattcacttactgccccctgcacttggggtgacttcatcctctcacagaaaggtgagctctcccacaattccccccagagaaatattcccaagctatctgctcagatccactttctctgcatgggctgaaagagagtgggagaccactgtgggcaaagcagttcaggtaacaccttgtgagggcctctctttagaaggtgtggtgcattgtcatctgtgggtctcagcaggagtttcagaatagggaaagtcccacttaacatcctgtaatgcaaataatactttacaacaaggtcccccaaaatgggctggtggcttcatgtcaaagcttgattcagtaaaaatcaattctacagaagaggtgaaaacaatgggcttcatgttgatcactaagggactggattgatccaagagtaatatttaaaagatcaagagggccagatgggccaagtttccccaggcagtcctcctccaccaatatctgtacaaaccacattacc

SEQ ID NO: 54741 - DNA, 766 bp, Homo sapiens
tgtagatcggaaaacagtctccaagggattaagtatcttacccaataattcgtagccaacaagtattaaaggcagacctcagactcaggtctgtctggttccagggctttgtctcagctgccctgtttgactgcacagggtcagcagccaacaaagaaaacaagccctttaagcacactgtcagaagtttatttaaagaagaattcccaggaacttagaccacatgagaacctagccctacaaaccttccatgagaagatgaccgagtatttccaatgtgagaaaaagagattatcttagtaaatactaaactaggttatttgccctcagtcctgtgttgcaagattacaaagggctaagttcatggaatgagaaacctaaaatttttaattcactaggagctctcattccagcagtgggaaaaaatagttatgctgtctggggattatgaataagttgtgccgttgcccggagtgaacataaacaatccattctgaacataagagaattcttagatcttccaaaaagaattatgcaatactctagagtaaatttcacttataaattgcatagcaaacctatctgaacaccatgaaagttgatttgttttaagtttttgcctcactcctcagtttgccttcactttttctttagattctgacaaatgaacaagacatcaaacctgttaccacagactattttttgatggaagaaaaatattttatatctaaagaaaagaatgaatgtaggaaacaaccattccaga

SEQ ID NO: 54742 - DNA, 1689 bp, Homo sapiens
atcctacagaagagcgctacagcatcagttattcaatcccaattcacagcaattcaaagggttctacgatccccaaacaggttaagaaccactgatctagtagtggtaagtggctattcaaggctagtttaacacacctgtagtttaacacattcaaagcaaaatgctggctgtctttaataaaacttacatttatctacgattttattacttacaaagtgctccaacaaatcacctctaacagcctagttgagtactgactgctgttatcctcacattactgatgaagctgccaaaagacccataaactaaggagggcaaaactgaattcggatctttggattccacttctcttgctggtgactcattcagaaatcccaaagttagtcctgaaccccaggactacctcttattttctgggagaaccaggacaaatcacttgcttttctatctctttacccttcatgggtaccgtgactcacattataaactcgctgagggtaggaccctgcttctcatttgtgaaaaacgagttcgaaagacggtcttgaaaaattccttcaaagtatgaaatcccacgcatgcaaaactccgtgcctgtctcttcgtgatactctgaagtggtgcgcgcacacagtgggtaaccaaggatgagctcggtgtaaggaatggaaagcccccagtctaaaccaccgccccctagacacgggtgaaaacctgcctaaaagctaactcaggcagtgactctatcacccgaaggggccctaggccgcggcgaccgggcttttgaggacacttaccgccttcatccttaggccttaaatgaatgccggccagacaagttcaccagaagcagggttactacagaaatcccggggaatgacacacgtgccgaagtccctacactaccagagccggaaacggccttcagtccctcccaatcctccgccgccggaagtgagggcgggacttccgtagacaggttcgggctcgcgccctctcgcggtgactgtctcgcggccctggaccggttgccccccggcgtgcgcgcgcggactggcacgagggaagccccgagggcgtcggtgccaaaggcgggaagccgggcgggaggggcgcattttgcaaggttatctgagtatgattctttgactctcgccctatttatttcttttaaaaccttggggaaatcgggctcctcctctcagaatgagaggacttggttttttcggtcacctcattgcattttgtgcctctcctcacgttgcttatctcatgctgttatagatactgattttcgtagtctttttcctccatacagtcctgagggcagaaagaagcttattttttgtgtgtaatgcctgcccctcgacggacattctggccgtgtttgtagcatggcgaatgatttctcatcagccttggtcacttaaaagtctgtgattcttagtgttttattttgcattttttttttgctttaatttttaaccattagctgataaagaactgtatccatggctgggtgcggtggttcacgcttgtaatcccagcacttagggaggcagaggcgggtggatcacctgagttccaggagttcgagaccagcctggccaacatggtgaaaccctgtctctactaaaaatacaaaaatcagccagacatggtggcgtgcgcctgtaatcctagcta

SEQ ID NO: 54743 - DNA, 2258 bp, Homo sapiens
ctttcttttgtgttagatgaagtgaagaagggagggtgttgaccctcctggatgaagtgatgaagccctgaactgtggcaatgatgccggagaaggatgtaaaaatcgtaaagtcgactggtgaccaattagagctggaaggacttacccacgctaacacctcccaaatatgggagtattttactaccataaatgaaatacatcaagtgaatttttgctaagcgagcaatacccgcgcttcggtaagaactgtcacgcttagagcgggccaaccagcttccaccatccagatggcggatcctagattggcagcctgcgtctctctagctaccgtctctatggttcggggaatctccaggtcggggcttgaccggtccgacttttgcgcgtgcgcgagtcctggcgcgtgcccgccctcaagcaactgtccgacccagcgggtgggaggggtgggtctgggaacgttgcggcggctgtcgccgcggccccagcacccagagctgttctctggccaagcctgcgcctgtagtccttctttgcctcctggggcggccgccacccacccccagatggtgggtccggaggatgccggagcctgctcgggaagaaaccccaagttgctcccggtgcctgcgccggaccccgtgggccaggacaggaaggtaatccgggccacgggcggctttggcggaggcgtcggcgctgtggagccgccggaggaggctgacgaggaggaggaggctgacgaggaggaggagacgccgcctcggcagctccttcagcgttacctcgcggcggccggggagcagctggagccggggctctgctactgtccgctccccgctggccaggccggcgccccgccgccctcggcagccccacgatcggacgcctgcctgctgggctcgggctccaaacaccgcggcgcggaggtggctgatggccgcgcgccgcggcacgaaggcatgaccaacggcgactcgggttttctgccgggccgggactgtcgcgatctggaagaggctcgcgggctggcgcgcgccggcggccgggagtcgcgccgccgccgcccctacggccgccttcgcctggaggggcctggcgacgaggacgcggacggcgcgggaagcccgtccgattgggcctctccgcttgaggacccgctgcggagctgctgcctggtggccgcggacgcccaggagcccgagggcgcgggcagcgactcgggggacagccccgccagcagctgcagcagtagcgaggactcagagcagcggggagtcggcgccgggggtcccgaggagggcgcgccccctgccacctcggccgagaggactaatgggggtgcggagccgcgcctgggcttttctgacattcacttcaactctcgcaacacgttccaggtgagccgcggtcagagcgcccgcgatcacctgcccccggcggggccgccggtgcccttgcccgccgcggagcagggtcctgcgggggcttcggcccgggctcgacggagtggcggcttcgcggacttcttcaccaggtacagcgcaggctgcatgggactcggggcgggtccggggccggggccggagccggggtcttggtgggagtcggagccggagccggagccggagcggagagcttggtcggccgcttccgtgccagccccacacgcgtcaggacttagctttgatttgtcactggaggaagaggaactgggtcggctttgtgtttctataggagaagttgtgagctctgtggacagcgagtctttctgttgccttgtccgcgggaggctgtacctgccattcatacctggcttctgagcagtcaggttgggccagctgtctagtgccacatatgcagttgccttttctggaaaagcagataaccatctccgtctccaatttttaaaaattttactacaaacatttaggttgttgggggggtggtgaggggaggcggtatgtgtgtacgggtgtggttgtgaaagagagaaggaagtcattttgtagagctgtttatttgctgtgcttgcatagcgtctaaatccattcaagtggtttgggaattcttgaaattagaagtggttgtgcttcatagtgtttaatcgtttgtttcagtggtctttattaaaatgcagtttggtgtttagaattttatcccaactttttaagccaaagtagggcttttactaaggaaagccttttttctaatctcccagataagcctctcctttttttccccaataactttag

SEQ ID NO: 54744 - DNA, 1619 bp, Homo sapiens
attttgtatagacacaatcatacaagttgtgggagtcaaaatgaaggaaacgggtggttacatggtaggtatatttaatgccatacatcttaagaaattggaggtgggaaagggagccctggagagggagacaaaggaaatagttgaaaaggaatgcaaacaagaaaaggaggaattgaaagctgaagtgaaaaccagggacaagaaaagctccgctccttccttcactgcccactcgaatgaatgaatcctgtttggtttcctgaatcttccttctgctggccactccgcttggtccatcacttctttcagcttgcccttatcctaaacagctttctttaacccagtcataatcttaatttcctgttccttctctctcccgtcccacccacaaaaaagccctcctctttgtcattttgggggatttttcacttaagatgtgagccgcgcgctgcgggtgcggcgaggctggccctataaaaatgtttctgtttctgacatcctcgtgcagatacgcagacgtctctacctacaggatcatgggctagcgggtgctcaatcacagcagccagcgttggaaggcgccttgcaaagtattaacagcactatcaaactttaattgcgtagttcggaaccagatatgtgaggaaactgggttctccacgatcggccacctcgcccaatctcacaggatagttacaggctgagttcggcagcgggacccagtttcctcctgagagaggtccaggtaaaggtttacggttgccacaggtcagtcctgacgaaaaccgcaagctgcgccaaatctcgcgcagcggggcgggagggcgggtggggaatgtaaggtatcgcgagatgacaggattttcccgcgaaggagaagcgcgcttttttccctggcgggggatttggctagaaggctgggccggcagcggttgtgaggagttagctcgcggcattgcaggctctgagaggaggggacccggttcccgggtgagtgtccaggcatgccagcggaacggcccgcgggcagcggcggtgagtgaggaaaaccttttgggcgcgggtggcagcctgcggggctgaggtgggcaagcatggaggctgcggcggagtttcggggagggagccgaccccgggcagggactgaggaggaaaggagggttgggaaactgcaacggtgagtggaggacaccccggaatcgcacgtattagcatgccggtgaagatttcacataggcaactgcattttcccgagcatcccgagttgtaaactgtggtccaggcgacttgtagacattgtgaagacttacggtgtcttctgagaggtgatgctggcgtcccctcggtcttcagcttttgctccagtgcatctcgggtgggagaaaggctgtttcttgttggagttgagtagttggtaatttttttaaaactgcaatttgaaagctttctcccccgtcaggctcggaggctccagcaatggttgaacaactggacactgctgtgattaccccggccatgctagaagaggaagaacagcttgaagctgctggactagagagagagcggaagatgctggaaaaggtaatttaggcatcaggttcgtcgtcgtgaaagcc

SEQ ID NO: 54745 - DNA, 18456 bp, Homo sapiens
tagctgtgctgaatggtgatccactggaccccactagggatgtgtgagcagttctgataagataaattcactctgacatttgagtctaagtctttgaatcccttcctctacagtgtaccaagcagttctggcacattaactttgtttagtttaggccattttttattctgtgtttcagccaagcaaccaccaaccaaacaaactgttaggctttttctagcccatcaagctacaacattgaatttggaatttctgcttagtgaactcatgtcaataaactggcctgatctaactttgtattccattcaccattatcccacactcttagtttccactcttacacatattccccagattactatctgcatgaattggaaatatcatgcaatcattttggtgtttaggctaccccttcatgggttacccttccaggcctgctggggcttgagtctaattgtaggtctagaagcaaagaaggttggttggggccctccagtgccatacaaggcctcaagggaggccattacaggttcttcaggcaaaacaataataacctccacagacagggctgaagggctgcttctactggcaaaggagacacaacagattttaaggttcagtctccccagctgcattgagatctgctctgtgtgctcctattccaatgttcacaattccattccttccaagtccaagccctcactttagcagaagacaccctgaaatgttcggaattcaatttgtgttgtaattttgccacttacaggatgaaagtctgggtttgattttcagcaatcttagccttgtagctacaggagataaggatttctttctcttttttttttgagatggagtctcacttctgttgcccaggctggagggcagtggtgcgatcacaacccgctgcagcctcaacctcctgggctcaagtgatcctctcacctgagcctcctgagtagctggtactgtagcacactccaccacaactggctaatatatatatatatatattttgtagagatggggttttgccttgttgcttaggctagtctcaaactcctgggctcaagcgatacaccctacttggccttccaaattgctggaattacagccatgagctactgcaccctgccttaagcatttctttcaaggcagacatagacactttcgggtcatttatgtggagcttatgtggaaattgaagccctgagttgagaatttgaagccctgagatcatccttttctatccccactttctccagagcagttaggagcagccagccagtcattatattcattatttttactaacatgtcctaaggtatcaaatatgtggcactcagaccttgccctttataaatatttaattatgagattccaatggcagtatcttgcatatttctattgccacattatgccatgaccaatgatttcattatcactggaaataaagtcattagtgcctttaaatctaatcagataagagaaccaatttcagacagaccagaactaatttagaaaactcatccttaagattctgttcctttagaaccactctacatactaaaatctgtgttattgaggtttcttcagagaaacagaaccaatacgaaacacacacacacacacacacacacacacacacacacacacacggattggcttactgtttgtatgggctgacaagtccaaaatctatagggcaaccatggaggctggaaactcttcggcaaaaacacgatgctgtagttcctaggtggaattccttctacttctgtagaaaggagcaacacaactagaggtataaggagtcctaagttcccacttatatggcattagtcaataaaatgggtctaaaattttgggggatttctaacaatatctttgtggagctgtaaagtgaaaatatgagtttgacaataatatctcattgtatttctcaagttaaggtggcaggttttgctcttaaaggcctttcaattaatagaatgagccttgtccacatgatcaaggataatctcctttgctgaaaatcgagtgactatagatgttaactatatctacaaaatacctctacagcaataccacattactgctagattgaataacctgggtactacagcctaaacaagttgatgcatcaagctaaccatcacaaatgagaataatttaaataatattgatttactattactatcctaaaaattatattacattcaggttatttcaaaattgctgcaagagtagatttttaaatattcacaccatacaaaaataagtaggtgaggtgacggatatgttaattagcttgatttaatcattccacaatatacatatatgtcaaatacatatataaaaatattgcattgcaccccataaatatatgcaattattatttgtcatttaaatacttttatgagtggttttactttcttcactttgcattttttaaaaaaaattaagaaatttttttaattaaaaaaagtgcaaagtgaggaaagtccccttgtcccttttgttatgtgtgaatacagagagaaggagccatgtatgaaccagaaagtgaaccctcaccagacacggaatttgccagcactccatttttgaaaaatgcaaagtgaacaaagtaaaaccactcatataagaaagtattttacactaaaaataaatatatagattatagaaatacttatgaagaaaaaaccatagactgtcccacgggccgggcagctgctcatctcataggggacccatttgagcataaacttccacagaaaaactacaggaaaactaagaaacaaaaacctgtctagtgcagctacatatgattctggtgactgttggccttattactagtagtctgggtgctttcattggtttataaatggagccctattataagggtctattatggagctcttcaaataagacattgttacctttttcttttcttcttcttttttttttttttgagacaagatcttgctttgtcacccaggctggagcgcagtggcatgatcatagctcactgcagtctcgacctcccaggctcaagcgatccttccatctcagcctcctgagtagttgggtccacatgtgcatgccaccatacccagaaaatttttgtatttttagtagagacagggtttcactatgttgcccaagccggtctctaactcctgggctcaagcgatccgcctgctttggccccccaaagtgctgggattgcaggtgtgagccactacacctggccataggccattgtttcaaccaagcatggtaaatatgaagacccatattcactcaaatgtgtatgcccttagaagggacaccatgatcccacatcccagatgacatcaccttggcccaggagttcactgctggagattacatcacctcagatgacatcactcaagtccaagacctaatcattggagatgacttcacccttttatcagggatgatttcatcctagatactaaaacctctgccccagcaacacccatggattatctttctcaaggcacaaattgaacacaggacatttatcgcttttctttctctggtattagaggtcctattatgtttctgagcttgttgactgtttagcctatgatcctggtattctccttgctgtctgccaaaatgtacatccttaacactcctatgcctaaaggaaaatcaggtagaggtttagaggtttgctattgactgaaagtttgtgtccctccaaaattcatatgttgaaacctaatccccagtgtgatggtatttgaaggtggggcctcttggaggtgaatgggataatgccctgataaaagaggctccagagagctcctttgtccctcctgttatgtgtgaacacagcaagaagtagccaactatgaatcagaaaatggccccacagcagatgctgaatctgccagcaccctgatcttggatttccctgcctcaagtgctgtgagaaataaatttccattgtttataactcatctggtctaaggcatttttgttatagtagcccaaatggactaagacagggttaatactatctgccattctaaaaattagaggagattatggctttccccagggagcacctgcctcatctcagttaaccccttggtccctggagagagaaccatgcactcctccatgccttctcccattagcacttctccagctttcaccatggccttctgccctgcatctctaactataacccccttttccccttagttacacacgacaaccacatcactttacatatactttactgacttactggttcatactctccaacaatataactgctggacctgccacctaaacttgagaaatacaatgagatattattgtcaaactcatattttcactttacagctccacaaagatgttgttagaaaccccccaaaattttagacccattttattgactaatgccatataagtgggaacttaggactccttatacctctagttgtattgctcctttctactgtcataacacaatattttctgtgctgttgagggcaacatatgccctactttttaaaagtccccactattatcaccttaaagttcccttaatgtgatgtcaaaccatcagaggacaaatcattctaattgtgcttttaattttttatgttttacaaagttttaacatcgggtcctcactgatcagggagagattgcttctccctcttggggttaactaattcctagagatagtaaatgactttcctgtgagcatgccatgcagaccaagcaatcctgagtccatactctcacccatcttctctatccagctcttacactccaagacacaatattcctgtcctaatcatcccagggcagctagggtcagttcctacaccccagagcctgctgagataattcaaactagccagtcctaaacttactcagcttacctacttggtcttgcccgttccttcccacagaaactgcaacaaaggcttttgctcctgcttctcctatgcccctcttctggctcctgaccaacatgggtgcttcccatgtggcctgcatcatgtggggaatcttgtttgtagggaatggtgagtaaaaagctcttccttcatgacaagaatttctgtgtctgtgtgtcctaccatacctgattaaaaccaatctcaggcacattttattgcaagtagtttttaagaacaaatgggttaagttttctacatgtaagttcaagcctttgtgaagagggaaaattttactttttcctttccaatattctgatttgttttctcttttctttgtcatgttgcacttactaagtcctccacctaatgtagagtacaagtgatgagagcttaccttgttcttaaaactgttgggaaatttttctatccttcaccattaaagataaagctagttcagactctttatagataaactttattacatacaggaaatccccttctattttaattttgctgagagtttttttcccccataatgaaatggtgatgaattttttcaaatgattttcttgagtatattgaggtgaatttatgcttaaatttatcatttagttaacaaaggtggacttcaaatatggattttaaaaacttaacatgcctttctgttgataaataccattggttatgttgtcttgttcttgtcacatattgctggatcaatatatgtaccttttgttaacaatttgtataaacatgctcttgagacatactggtatgttatttcatatgatgcctttgccatgtttggtgtcagggtgggaatggtgttctacaacaaatcaggaagtgttctttcttcctcctcttctgagagagttgtaaggctggtgtttttacttccttcaatttgatagaatttgtgaggaaactcatctaaagttgaagttgactttgtgtggtcaattttgattataaaatcaatttctttaaccaacattgctttcagatttcctattttatcctgtgtcatttgtgtggagtttaatacttaatgcatcttgtggcctgtcctcaattgaaaagctgtacatgtagagaactcacttcttgtagtttctgcttctcaggtaatcccctctaagatctgcttgatttgagtggcttttgaatgcattctatgaactattttctgatgaataagttgttcagatttaataattgttatctgtgagaaagtgaggctggactagtgactgcaccattattagaaagtgaaactcttatactgttatcagtgaacagaaatgagagggcccctcttgcctacaacaccctttttgctcaacagccccaaagagtctgcccttaaatgagtcactgggaattaggctgggcagctccgccgctaattccaaagactatttatattggaagcttcccaagccctctgataggcattgatatgatttggatatttgtcccacccaaatctcatgttgaaatgtaatccctaatattggggatggggcctggtgggagatgtttgggtaatgggggtagatcccttatggcttcaggcttggtgttgtctttgtgatagtgagtgagtttgtgtgaggtctggttgttttacaatgtgtggcaagccccccaactcccactctcccttctgttctcattttcaccctgtgagatgccagatcctccttttgccctctgccatgattgaaagcttcctgagacctccccagaagccaagcagatgctggcgccatgcttcctggacagcctgaagagctgtgagccaattaaacctcttttctttataaattacccagtctcatgcatttctttctttcctttcttttttttttttttttttgagacaggttcttactttgtcacccaggctgcagtaaagtggtgccatcttggctcactgcaacctctgcttccagggtccaagtgattctcatgcctcagactcccaaggagctggaattacaggcacgtgccaccatgcctggctaattttttgtattttagtagatatggggtctcgccaagttgcccaggctggtcttgaactgttggactcaagcaatccacctgccttggcctcccaaagtgctgagattacagatgtgagccacctcacgcagcctcaggtatttctttatagcaatgcaagaactgcctacttctatgttgcatccacatacaggtaggaaacctgagactctgtggtggtcaaacagtctgcagtttctacagtctcattacaaactttgatctggctgacaccaaggatctgtgacacagttctgctgagaagtctgacagctgctttgctgaaaatgtttgtggctctggaccaggctcagaatcagtacaacctcatctgtcatttgtagtgtaagaagggtctgagcctcagacccaggacttgttgcctgaattcctcagctgtgcttttttctcccacacctttccacatgccaaccctggggatctgcttaactctgtttttgccccctgtggctgctgagcagaactacctctgtactttgtcctcaagcagcaaagtcccacacccaagcttttgtggaagatgccaatgataacattagcaggtgaagcccaaagacagcattttggcaaggaggtgatattgggataggataatttttcttatgaagtgtttgagggccccagtggccatcaggtctcctgatgagttggaatagaggcaaagagtcacaaatctaagtcttcctccctctttagtgagaatccacagtaggtgcttgtaatcccagctgaggcaggaggattgcttgaacccaggaggcagaggttgcaatgagccaagatctcaccactgcattccagcctgggtgacagagtgagactctgtctcaaaaaaaaaaaaaaaaaaaaaaaaaaaaaaaaaaaggaaaagatgagcctggaatatcttgctgtgccaggaagtaaggaattgcttaaggattgagggggacatgacaaaaggacacagaatccagtcattagaagataatttgagcaccaaagtaaataatgttataatggattataacccattgaacacaactgaattcgtgattccgtaatgatataaataaatacatgaatacattaaaaacttgatgaggaatatatagttatgtagtatcaagaatctgcccacaaagtatttcttttttttttgagatgaagtctcgctcttgtcacccaggctggagtgcaatggtgcgatcttggctcaaaaatcaaagtaaacatcaaccatcatggaacagattgaaattatttgtcaccagatatgatgcaatgagaagtcaaagcatcatctgtgatattcctgccaaatctgcatagtcaggatctgattatgaagaaacatcagataatcccaaattgagagaaatttttaaaactccaaacctatgcttttcaaaagtgacaaggtcaaggaggttgaggaaagactgaggaactgtgtcaggctgtggttgactaaggagacatgacaactagttgcaaaatgtgattcaggattctaaactggattctgaaatgaatacaatgaatatcattgggacttattgaggaaacactaatggaaatgaggattagatggccctaatgcatcaatgttaatttcctgaattttaaagttatattttggttatatagtcaaattgccttgcttataagagctatatactaaaatatttcaggtttagaacttcaggtccaaaattactctcaaatgttcaaaatagagaaaattctctgtttgtacctccaactttttattacatttatagttattaaaattatataaatataaaatacatatgcatttgtgtatatatgtgtatatatagatatgcatatatatagatatgcatatatgtagataagtgatacacataaaaccaataatggactcatatctaatctatgcaagcccttcacaaaagatttgatattgccaaaggacatttgaaaaagcacccggcatcatgaaccttcactgaaatgcaaattaaaactacaataagatattattacacacacatcaaaatggttaaaatgaaaaaagacaatatgctaagggttggcaagaaagagaagcagctggcactctcagtacaattgtaaatttattaaaccatttggataattctttggcagtcattaataaaactgaacacatgcacatgcagcaattatgctcatagttatagcaacagaaatccttatattgggataacaatgtattagagtaataacagcattattcacaatagccacaaactagaatcaactcaaaagtccttaacaatacaatgaaaagataaattttggaattgttataaaataaaacactctaaactaacttacgtactgctatttgtgacaacatgaatgaatctcacaaacacaaaattaagtgaaaatactagatacttaaaaatacataatgtgattccatttatattacatttgtatgcctcacaaacaggcaaaactaacctatggcataatactggagttatctagtcggggaggaaggtaggaggagacataaagggacttctggggtcctggcaaaattatttttcttgacctgtgtgttgattacacagatatgttcaattcatgataattcattgagctatatacatttaggatgtttccaacattctctttgtatactacactccagtgaaaaggtttatttaaaacgaagcagtttgcattcacaatttcacccaagctgaggtttgcattactctctcactgtggagggcttcagccaggtgccctcctgaccatccatttgggcaatgataggaaatctctgcaatgtgagaatcactgaactgggaattaaaacctggattcttaaaaaataaagattatgtactaatgcactagcgaccgttcacctcacttattcaccaattccttatttctaataataaagtagggattaggctggtggatctctgagatctcttgtctctaattatctatgtttctttcattctttgaaaggaccaggcagaagtctcaacagaaaggaggaacagagacccatttttcaagaaataaagtgattgttttaaagaaaggcattgagatcattttatctaaaagaaggtagtgcacttcttttagagttcagagctatgtgagccaagcagtaaaataactatttttctttgtctcagataaattattcaccaaaacctcgactgactcaaattctaaaggttacaaaaccacaccctaattgtaatcaacctatgttgcaactgttgagttggttaatgtgtatttgaaagtcactgattatcctgagtagtgaaatattgcctcatagtacatggtaagtaaatgttggtgactctagttgaactgaatttcttgcttggagggaatgatgtcagagttaggagataggtttccagcctcagccctatcattttcagcctctgtgtccttgaacaaaatactgaatctccaaggcccagcttccttacctctaaagtggaaataattttaccacaggcaagggtaattgagagaatcaaaagagttatgatgggtataaaaattctctgtgaattgtcagaatccctgtaaacatgtttgataaaacattgtccatatgggatttgacaaaacttaatttttccttactgcagttagaaataactgcactaatccagtattatttccaatagccaggatgtagaaacaatctaagtgttcattcacaaataaatggatgaagaaattgtgttttatatttatatacacaatgaaatattttttaaactttaaaaggagatactgccatttgcaatgacatggaatgaacctgaaggatattatgctaagtgatatgagctagatacagaggaaaaaagattgcatgatttcacttatatgaagaatctttaaaaagtcaaatacatagaaacagagagtagaatggtggttaccaaaagtgggagccagaggaaatggaaaaaagtgtgtcaaagagccaaatttgtggttagataggatgaataagtctaaagatctaataaacagcaagaggactatagttaatatactatactgaaaatttgctaaaagagtagattttaggtgcttataccacaaaaaagaagttaattatagaattgattaatatgtaaatttgtttaaccatagtaatgattccactgtttatatgtctaccaatgttgtataccttaaatatatacaatggaaataaacaaataactgtactagtcatttagaataccacaatgacatctttacagaatatgcctttgtacaagcattgccattagtgatctagaaatgtatgtatcattttagtgatatatagagcctcatgagcgctaaatgtcatctccagttcaggtctgcacaactgtgtttgttctgtgccatgggtctgtttaatgatttccctacctcccattcaccactgaagcacatgcctgttgttctgcctataattccccttccttgctgtgcaatatttcattccattatttctgacacagaccaaaaaagcaatagaaacagcagtgtctggaggcaagtgggagctggagaagccatagtttctgagatcttacccacttaattctctgagattggctctttcctcagttatactgagtaggtttcagctcttcagtgacagagaggggagaaaccctagcttttatttcttctcttgagaatgtacaaccctgttattttgtgaacagtgtggtgtagattcagagtgagaaatgtttttaggatttattttattttgctaaaactgttctcaaggcagctctggtgtaagtgagaatataccacagcgggcgtcagaagatctcagttcaaatcccagcctgccatttatgagctgtgggacactggacaggtcatctgttctcctagagtctccctttccccatttggaaaatatgaaataatattctcagccgtccagtgtttttcacggggtttaatggaaaaaggtgtgtatgtttacttagttaattgataaccggtttagccatttaagatgaatgagtttgttagctgctttatgtttaggcagctgtaatgttagtactacattaaaatatttcaaaaggatctcattttcaaggaaaatgatctagtgtttgagaaagcattatagtgttgcagtcttgcagatccttagctcagctaggtccgagttgtcttatgcaggaagaattaggcacacagacactggagagtgagtggagtagaatttattaagtgaaaggaaaactctcagcaaagagagaggccctgaaagcaggttgcagattgccacttcacagttgaataccaggacttttatagaaaagctgatgaggctgggatacttatttgcataaggcgtgaattcctggtgtttccaccccttccttccattgcgcgtgtgggctcttagtctaagccactccatattgatttatttcccttcctgcgcatgtgttaaaggtaggaatttttcactgtgggcatatttaggcaagctccctgtgcaagttcccttatctgcacaaaacatctagtgtaagtacttggggtttttgtggattgggcaatgacctggaagggttggaggttctctggggacccttcccttactgcctgcctaatgcaagctggctaactcctctcaataggataaacattattttatgtacaaggaatataatacacagattgccctcaaagtcatatttccaactgctcatcaatctaaaaatccaaaattttgaataattttttgatgaaataatttatttcattgtttctcaattttggctgcacagtggaaccacctgggctgtttgaaaaaacctaggcctagccaggcacggtggctcatgcctgtaatcccagcacttagggagaccagcctggccaacatggtgaaaccctgtctctgctaaaaatacaaaatcacctgggcgtagttgtgcattcctgtaatcccagccacgccagaagctgaggcagaatcgttcgaatccaggaagtggaggctgcagtgagttgagatcttgccattgcactccagcctgggcaacaagagcgaaactccatctcaaggaaaaacaacaacaacaacaacaaaatcctgggctctgcttcagactagttaaaccagaatctccagggtggggcaccggaaagaacaagaaaaaagaacaccttatttttatcttcttcagtgagccaatgttcattcaaaagagagattaaagtgctttttgctgactagtcacagtcagagtcagaatcacaggtggattagtagggagtgttataaaagccttgaagtgaaagcccgcagttgtcttactaagaagagaagccttcaatggatccagctgtggctctggtgctctgtctctcctgtttgtttctcctttcactctggaggcagagctctggaagagggaggctcccgtctggccccactcctctcccgattattggaaatatcctgcagttagatgttaaggacatgagcaaatccttaaccaatgtaagtatgctttatgttcctccagtaatgtacaaggtgtatttaacctcacaattcttaaagttttatttcattttaaagtgataaatgataattgtatatattaatggggtacaatattacattttgatacatgtatagattgtgaattgatcatatcagggtaattagcatatccatcatctcaaatatttgtcatttctttgtagtgagaacatttaaaatcctcttttttagctgttttgaaatatacagtacattaatattaattatagtcaccttgctgtccaatagaacacccgagcttattcctcctatctaagtgtaactctgtacctgttgaccaacgtatccccttatttggcccatctccacctgccagcctctggtagccaccattctaatctctacttctctgagtttaactttttaagattccacatagaagtgagatcatatatgatatttgcctctctctgcctggcttatttaattaatatgatgttctgtagattcatccatgccgtcataaataagaatattttttcctctttaaaaggctgaatagcatttcattgtacatatatgtcacatacaaaatccattaatttattgatgaacacttaggttgtttccatatcttggctattgtcaatagcactgcaataaacatggaagtacagacatgtcttccacatactgacttcaattcctttgggtatatactggtagtgggattgctggatcatctgatagttctatttttgttttttttaggaacatccatactgttttctcaaatcacaatgctaatttacatacccaaggttcactttattccacatctttgtcaacacttgttatctttttatctttttgataataataatatcttatctatgagttgtgatgagttatctcattgtggttttaatttgcatttctctgatgattaaatttgttgagtatttaaaaaatatatcttggccatttgtatgtctttttttgaaaaatgtctactcaaatcctttgcccatttaattaattaattaattaattaattaatagagacagggttttgctctgttgtaggatggagtgtagtgatgggatcatggtccctgcagccttgagctcctgggctcaagccatccttctaccttagacccccaagtagctggggctacaggtgtatgccaccatgcctggataattttttaatgctttgtagagatgtggtctcattatgttgtccaggctggtcttgaactcttgggctcaagcaatccacccacctttgtctctcaaagtgctggaattacagacatgagccattgcacttgacccctttgctcgttttaaatagaattatttatttgttattgagtaatttgagtttctaagtattttgggtggtcagaatctcatttgtctagttttgctttcatggcctgtacttttaggatcatatccaagaaatcattgcctagaccaatgtcatggagtttttctatatggtttctttcagtagtttttagtttcaggtcttatgcttaaggctttaattcattttgagttaattcttgtataagggtgagattaggattctcttttattctttgcatatgaatatccagttttcccaacaccttttgctgaagagtgctttccccattgtatgttcttggcacctttgtcaaaaatcaattgattatagatgtgtgggcttatttcagggttctctacgcttttcctttaatcagtgtgtctatttttatgctaatgctatgcagttttgcttactatagctttgtaacatattttgcagttcagtggtgtgatgcctccagctttattctttttgattaatttgctttagttatttggggtcttttgtggttccatacaaattttaagattttttttctatttctgtgaagaatgagattaaaattttgatagggattgcactgaatctgtatattgctttgggtaatatggacatttttccactattagtttttccaatccatgaacatgggatatctttgcctttatttgtgtcatcttcaatttctttcatcaatgatttgtagttttcagtatatagatctttctcttccttgattaaatttattcataagtattttattttttgatgctactataaattaattgttctcttaatttcttttttagatattttgttgctagtgtataaaaatgccactgatttttgcatgttgattttttatccttcaagtttactgaatttgtttatcagttctagcacttttgtactgaagtctttagattttctacatataagattatttcatcaggaaacagacaatttcacttcatcctttcctacatgaatacatcctttcctatacgaatattcctatatgaatattttctgtctttagtctaattgctctgactaggacttccagtactctgttgaacagaaatggtcagagggggcattcttctcttatttctgatcttagaggaaaagcttttagcttttcaccattaaatatgatgttagctgtgggcttgccacatataaccgttaatgtcacatagaaacttctgtattactggaggccagttattaaaggttatatgttataggaacattcctcagcattcctcctgtaccagcagaggctgattattaaagtatgctattgtaaagcaaatacttcctgtggagtatgtttttcttttttgtcattgtcagaaatagtggaataaaataatgcattttgccagaagagaaacatttcaagtggtaaggtagaatcaaaatgataaaggcctgctgctttctttgcttcacagtcatttgctatatttttttgcctgaaggaaaatggtagtggaagtgttttgtgattaaagattttgagaagtcagtcactgtatatgctatgtattttgcttagattagccatgatcattaaacgtcttaaaaaagcaaatcatgcctgatgtcaaagaaatatctatgagttcatcataaacataaacgaatgaaagaaagaattaattagtcagggccatctgggtggtaacagaatatttatggcctctgtacaaagctgctgtctgtgacctatgagtgtatagcatggaaaacatttttcctctgtgagatgccacacatcctgatactatctctgttggatccactctccttctgtggtgattataccagtggatctcaaagtgggctgggcagtagaatcatttgggtgatttaaaaaggtgtagattttttagtattgatgacaggactcctgcatcaggatccctatgggatgagctttgcaggagatcctgaagcagtgtcccagcagctgattattggtcaaaatatggacattaggaactgataaactgctcaggctcacagcttgactaagcaggcttcaaatttggaccttctgtttatcagctgtgggacactggcagtgaatttgaaattctttaaaatacaatctgtcttatctgtaaaatagagtaaacaaggtgttgatgtgatgattaagtttaatagcctgcatactacttgcttggcacattgaaggcactgtatatgtgcagctaaaacaataatcatcatctttgtctaaaatatacaaatatttgaagctgtatttgacagaataatcataacaacattatgatgataatatcagtctgaatcacggacaatatatagaccaaatactgagttttgctactatttgaacctccttttctatgtttagttctcaaaagtctatggccctgtgttcactgtgtattttggcctgaagcccattgtggtgttgcatggatatgaagcagtgaaggaggccctgattgatcatggagaggagttttctggaagaggaagttttccagtggctgaaaaagttaacaaaggacttggtaaatgtgcatgtatcgtgtgtatgtgtacatgtgtatgtactgggcagtggctatagggatggggaggatggaaaacaggcttgaagagctcctgggacagaacttgacctgtccacgtggctgccgagtgtcagctctcttgtccttgtttggattctccctcgtagcttctgttttctgttctgctaggaatccttttcagcaatggaaagagatggaaggagatccggcgtttctgcctcatgactctgcggaattttgggatggggaagaggagcatcgaggaccgtgttcaagaggaagcccgctgccttgtggaggagttgagaaaaaccaatggtgggtgacttttttttttcctgaaaaatgttttctaaaatttattttaatttatttttagattgatacataacttttatgcatatttatggggtacatgtaatattttgttacatgcacagaatgtgtaatgatcaagttaggtgtttaggatatgcatcactttgagcatttatcatttctatattttgagaacagacctgtgttctagctatcttgaaatacgcaatactttgacattaacacactgctatgttctctaatgacatccctggaaacctcctaggggcagccagatctttcatgatagtggttgtcagtcctcatatggagggtggaggtttgaagcagagagccaagggaggttttgtgcacctatgcttgttgtgtttgtacacaatgactatgcatacgctgtgagtataaaaggctcatttaatcctattgtgtcccaggcttggtttgttttcaaatcattacagcatgaatttagaaggttttgtctcatttttttcaaattattaaagagcaatgtttttcccaaagtgtaattgtgggttatctatt

SEQ ID NO: 54746 - DNA, 1039 bp, Homo sapiens
gaatggctatgattaagaagtcaaaaaacaatgcatgatggcaaggctgtggagaaaagggaacacttataggctcttggtgggaatgtaaattagtccagctactgtggaaagcagtttggaggtttctcaaagaacttaaaagagaactacaatttgatccagcaatcccattactggatatatttccaaaagaaaataaatcattctactaaaaagacatgtgaacttgtatattcattacaacactattcacaatggcaaaggattggaatcatcccaaatgcccatccacagtggactggataaagaaaaggtggtacaaatacaccaggaaaccctatgcagccataaaaaagaatgaaatcttgtcctttgtagcaacatagatgcagctggagtgaattaacgcaggaacagaaaaccaaatattgtacgttctcacaaggaggagttaaacatcagtactcatggacataaagatggcaacaataggcactggggactactagatgggggctgaaggggaggaagggttgaaaaactacctgttggatactgtgctctctactcgggtgatggaattatttgtaccctaaacctcagcatcacacaatatacccatgtaacagtcctgcaaacaacaacaaaaaaggtaatccatgtgtgaggtgtgtgaaaactgaagtgatgaaatacagcagcaagtggggatgtacaccagggtccaagcttgatgataaaccgggattcagaaggctgcccccgagtactcaaatgctcaggacttcaagtgcaattaattggaggggacttcagcaaagtcactgccacttgccttaaagtcatactgcttcttactaggtctgtctgggtgggaatgtaacttctttggacctcaattttcttatctattgataaaagagattggactaggtgatttccatcacttcttcccactctttgacttctttataacttagtttgtctgttttgctattttcagggcacgaccataataacatccctgacttctgtg

SEQ ID NO: 54747 - DNA, 1712 bp, Homo sapiens
aaccctgggaatgtggaaggatagtctgcaataattccagagcaccttgatctccctccactcatgatcatacatcttggatattcaatctctacagctaaagtgtgtggtgagtctgtggacatagagttcccttcattttttcctctggcttttgatccctgctttggatctggcactgtatacactgagatgtcaagaactaaggccttcttttaaggatttcacgttttagcaagatagaaaagtaaatacacagataatagaattcccggtgatctatgctccagtggaagcatgaatatgatgaggaaacctagagagggtgagtttctattgactagggatcacagaaatcataaagaggaaatgacatggggcatagcttctgaaggaagcataggagtagagctttttaggcagatgtgacagcaagagataaagcttgaaactttgtggtgtgttggaaattgatgaagaatggatatgcctagagctgagagtggaggagatgaagaatggaaggagtgatatagaacatcagactgggaacagaatgtgaagagtcaggtcaagccatttggcctttatcccataggacagatgggtgttgtttaaagttgtaaaatgagagactgacatgtttagacatgtacttttgaaagtacactaggaaaaaaaatctttggctaaacattgtgccagaagtacaaaggggaacacactatatgagccttctcttttcagcccatcttccctgtgaatgcatttctagaaaaagactgatggaaacttgtagtgtcaaaagagcagttataacgtgggaacacttagtgaagtgcatggcatagagctgatactccataaatatttgttgagtgaagggtgcctagtaaaataagatattaagtagataggaagtgtattcatttttgtttttctgtgtatccagccatccttccagtcattctgccttcgatccatccatctatttaatcatttatcaaatagttactgcatactctttgtgactgttcatgacctaatgttcaaggaacaaatcccctatgtctcttattttcaggaaaacggatgtgtatgggagagggcctggcccgcatggagctgtttttattcctgaccaccattttgcagaactttaacctgaaatctcaggttgacccaaaggatattgacatcacccccattgccaatgcatttggtcgtgtgccacccttgtaccagctctgcttcattcctgtctgaagaagggcagatagtttggctgctcctgtgctgtcacctgcaattctcccttatcagggccattggcctctcccttctctctgtgagggatattttctctgacttgtcaatccacatcttcccattccctcaagatccaatgaacatccaacctccattaaagagagtttcttgggtcacttcctaaatatatctgctattctccatactctgtatcacttgtattgaccaccacatatgctaatacctatctactgctgagttgtcagtatgttatcactagaaaacaaagaaaaatgattaataaatgacaattcagagccatttattctctgcatgctctagataaaaatgattattatttactgggtcagttcttagatttctttcttttgagtaaaatgaaagtaagaaatgaaagaaaatagaatgtgaagaggctgtgc

SEQ ID NO: 54748 - DNA, 743 bp, Homo sapiens
aggccccctctatctttaacttatctatgattccttcattctataaaaggtccaggcaggagacttagttcatcaaaagggaggagggcaaatcagggacactcacctctcaaggaataaaataattgctgtaaagagagcaattgagcttattttatccaaaataaggtggtgtagttgcagttcttctagaatttggaggtatgggagttaggcagtaacccttcaccctgggtacagaattaactaagatctagactcactcaagtactaaaggtgtataaaactatactctctgaccccctttttagtcgattggcactgtaattattaactaaattaatatttactttgcaagtcactcactaggctgaatcacgaaatatcgaaacacagtacacaatcagtcaatgttagcaaacccagttgaactgaatgttttatttcggagaaagggtgcaagactcagatgttatgggttccatagcacctgcagacaccatgtacttacttggtcaagatattgaatttctgaggcccagattcttcatccctaaaataagaatacttttacatgaggcaaaagtaattgagagaataaagaggaatatgatgtgtatgaaaattgtatgttaattgtcagaatccctgtaaacgtgactgataaaacattgtgtaactgcatgttaatttttttaattttaatttttatgggtacattgtaggtacttgtatttatgggg

SEQ ID NO: 54749 - DNA, 2106 bp, Homo sapiens
ggatcacctgaggttaggagttcgagaccagcctgaccaacatggagaaaccccatctctactaaaaatacaaaaaattagccgggagtggtggcacatgcctgtaatcccagctactcaggaggctgaggtagcagaattgcttgaagctgggaggtggagattgcagtgagctgagattgtgccattgcactccagcaaggcaacaagagtgagactctgtctcaaaaaaaaaaaaaaagaaaatactagatactaaaaaatacataatatgattccattaatgttaagttcacaaacaggcaacactaatctatggcataatactggaattatctagtgggagaggaaggtaggaggagacataaaggggcttctggggtcctggcaaaattatttttcttgacctgtgtgttgattacacagatatattcagttcatgataattcattgagctatatacatttaggaagtttctaacattctgtttgtatattacactccattgaaaaggtttatttaaaaagaagcagtttgcattcacaattccacccaagctgaggtttgcattactccgtgactgtggagggcttcagccagatgccctcctgaccatctgggcaatgataaatctctgcaatgtgagaatcactgaactgggaattaaaacctggattctaaaaaggaagattgtgtactaatgcactagtgacagttcacctcacttattcaccaattcctcatttctaataataaagtagggattaggctagtggatctcttaagaccccttctgtctctaattatctgcttctttcattctttgaaaggaccggcagaagtcttaacagaaaggagtaacagagacccatttttcaagaaataaaatgattgttttaaagaaaggcattgagatcattttatctaaaacaaggtagtgcacttctttgagagttcagagctacataagccaagcagtaaaataactgtttctctttgtctcagataaattattcaccaaaacctccaccgactcaaattctaaaggttgcaaaaccacaccctaattgtaatcaacctgtgttgcaactgctgagttggttaatgtgtatttgaaagtcactgattatcctgagtaatgaaatattgcctcatagtacatggtaagtaaatgttggtgtctctggtggattgaatttcttgcttggagggaatgatgtaagacttggccctatcatcttcagtctctgtgtccttgaacaaaatactgaatctctaagacccagcttccttatctctaaagtgggaataattttaccacaggcaagggtaattgagagaatcaaaagggttatgatgggtataaaaattctctataaattgtcagaatccctgtaaacatgtttgataaaacattgttgatatgggttcttgacaaagcttgaattttcctcattgcagttagaaataactgcattaatccaatattatttccaatagccaagatacggaaatgacctaagtgttcatggacaaataaatggatgaagaaattgtggtgtatatttatatactcattggaatatttttaaacttaaaaaggagatattgccttttgcatcaacatggaatgaacctggaggatattatgctaagtgatataagccagatgcagatgaaaaaagattgcatgatttcatttatatgaagaatctttaaaaagtcaaatacatagaaacagagagtagaatggtggttaccaaaagtgagagggggcacaaatttgctgttagataggatgaataagtctaaaaatctaataaacagcaagagtaatatagttaatacactaccctgaaaacctgctaaaagagtagattttaggtgcttataccacgaaaaaagaaggtagttatagaattgatgaatatgtaaacttgtttaactgtagtaataattccactctaggtatgtctaccaatgttgtttaccttaaatatatacaatagaaataaagtaaacaaaaaactgtgctaatcatttagaataccacaatgatatctttacagaatatgcctttgtacaagcattgccattagtgatcta

SEQ ID NO: 54750 - DNA, 1047 bp, Homo sapiens
cccaacatggtgaaaccctgtctgtactaaaaatacaaaaaaattagctgggcgtggtggtgggcacctgtagtcccagctacttgggaggctgaggcaggagaatggcatgaacccaggagctggaaattgcagtgagccgagatcgcaccactgcactccagcctgggtgacagagcgagactctgtctaaaaaaaaaaaaagaaaagaaaaagtcttatactgaggcattgtgattgtgatactttgtctcactgagtcaataattgctcatttcttaaaaaaaaaaaagcaaagtttagagtagttgatctcagatatcccttctatctacacattatctataattctttctttctgtaaactgaaaggtctaggaaggagccgcagctcagcaggagagaggaggagctgagctgggacccctacctcctgaggaatgaaatgattattataaagacagcaaccgagcttattttacccaaaataaggtagtatatttctgttagagtttagagtttcatgagtcagggaccaagttattgcttttctttgccctgtataaaggcttctccaaggcctttgacttacctaagtactaaatgttataaaaccaaactcttctgacctctcaatctagtcaactggggctgtaattattaatgaaattaatgtttattttgaaaataatttactagactgaattacgaaatcctgaatcattgtacactatcagtaaatattggtggacccaactgaactgaatgttttgcttgaaatgaaacctttgagatgcagggcttatgggttctagtcccagctctagcactagcagacagcatgttcttggctaagatactgaatcttcaaggctcagcttcctcattccggaaatgggtcaattttattgtaagcagaggtaattgagagattcaaaagggacatgaggtgtaacaattctctgtaaattgttagaatccctgttaaaaatgaccagtaaagctttgtgcaactgtgtcttgacataactttatttttcttaataa

SEQ ID NO: 54751 - DNA, 2764 bp, Homo sapiens
cttctcctacattattttacttttaacataagtgggatgataattttatgctatggtcctaaatataattagcctcatgtcatctccaaagaatagacaactaagtatcttatgttaaattatattcaccacttttcctgtcttctacttgaaatgtaagaaataagaagtaacataatttgttatgcttctcacagctcatctcccagaagaagttacttacattttggaatacgttttaaagataatatgtggatacaggtgtacatgaacatctatatatgtctgtgtacattatgtgtatttacccattttatatatatgcatatatatatatatatacacacacatatatgtaacttatgcacacatacatatagggttaaatgtttattacaatattgggctcatatcacacatcttgtattaaaacttgttattttcctatcaagtaatatggcagcaaaacctctaaggtgatagaaacatagggaaatgattgagagagataatagaagagaaagtggaaatgagtattacattaatgggaagatccaaatggaaattatacattatacctttcaaccttcttcattgggaaatgcaaatgtattaatgtagtgttagtagaggtgctggcaaacacccctaggtgagataaatcaagtagatgtcaagtctgttttctcctagagactgtagtgaataatctgttttcctgcctatttcacctcctaaaggctgcctgcattccttggctcatgaactcttccttctttcactccaaacacttgcttctgttgtcacatctcctactcctactactgactcttattctcacatctcccttacattagaaatgcaaaatgctttttccctggtgtcacaaagaaatagcactcaaacataaatttaattttctcggcaaggcaatttttactttctgcagaaagagtgctccttgcagatggaacaatggtgagagcacacctggacagaggaggagaagaggttattattcctgatggagatagcctttactgctgtgtcattcccctattggctaggttggactgcacagtctaagcaattccaactggctattttaaaaaagagcaggagtatgagccagagtggtgaggcatgtagtttggcaggaagggcagttacagaactggtggctcaggatgagtcaggatggagcaggtgaccaggggtgagtcatatcaaagcaggtgaccaggggaagagatgtgaactactgattaggactggtgggaaagttgtttactgaaattagaagggagggggcaaagggaaccaggaagttaaactttaaaatggagaatcaataagagagctgaacatactgacatactgattctttgaatagaaacttggggttcactatatttaacagttcttcatcttgaatttttacagttccttctcttcaaacttccttaaaatgtcttggcttagttgttctgcatgattctctaaaagaaaaagcttctctgaataaggtggaggagaattaagggaggttttagtaagtgctgcctgtatgagtctgtgaaccagcccacggatgcatggtatgacaaaacacccaacaagaatgaatacgcctactatggctgtgagagaagtaagaactgaggctatgattttttttttccatttactgaatgatttttctaggcaccttttaaaggggtcacttaccgctgagtttttggttaactcattggacagagcagttagaccttgcaatgccttgttatacttccatcaggggcagtattgtttgggatgaaggtacaatattgagttttaatcatgatgcaaactcctcctccttctgctgctgatataatgtctaaggctattctattttcccaagccatctggctagtagcccctaattgcattgctatttctttagcagcatctctagtgtagttaataaaccactgttgatcataatagatgtaattcatccagtctacatttttattaatttttacccactagaatattgactgaaatcctgaagctatttgatcatgggctttaaattcatctggcactcctcattgagctctaatagcatttacataaacatgggggtcaaaggacccatatagggcacttcttcttttatgattttctctctttttttgtaatcatgttgatgaaatgctagagtgaaagggatggtgaattggactagagcacaagtgctgctctaataacttggcagagtatccagcaatagtcccccatgataccaccacacttatgctcagggatgaacaaggacagactgattggtaagctcttggaaaggcttggttacactgcaccctgttaaatcttcaaggaatgctaactttttcccctgctgtgaaaggaatgaggtgaagttaacatcaggggctggaggccagaaggcccttgagggctgacccacagggctcttaacctcagagaacagcagtaaaagagccttgcatgactcatcgccccaggctgtggggttctggaagacagctaccatacagctcatgccaggtccctgagaggaccacccaagtggaaagggaacaatctgggtctctggcctgcctatcgcacaagcgttacagtcacttttgtttatcgtgcaaacagaatattttatccattccagccaagcatttgcatcctgataccctgtttcaattgctatagtttgttttaaatagttaacctctacaac

SEQ ID NO: 54752 - DNA, 2017 bp, Homo sapiens
ttttatgatattgcttcaaacatttgccttgcttccagtgtggggctattgtgaatagcactattatatacattcctatacatgtctttttgctatcacaaggtattgttgcatttctgttcagtacatacctacaaccgcaattgctagatatgcgtgtatttactttagataaattctgccaaaggactatccaaatggttgaactattttactaatttttccatgagactgtgattgtttcgctttctcatcaacagacaacataatgtgtccttttttcatttgaaccattctgatgaattatataataatatctaattgaagttttagtttgtatttccataaagcttaatgatgctgagcaattcaagtttgcattgtcaacagtgatccttcatttgtgaaagcctagtttattttgcatacataagcgcactgttggctttattttttaaaaaaacaatcactggtatatagaagaactgcttgttcatgcaaataattgtttcacatggaaccttttgaaagtaaatactaacctgattccagatacttgaggtattttagtatgtatttactcaaaacaatgtgcttgtgcttctcttatataactatagtaaaaccatcaggatcagaaaattaatgttaatgcactggaactttctaattcttgttcctgttggtgttttaccaaaagtcccaaaatatatgctttttgtccctctcataatttagttcagaatccagaatcgcatgccacaactagctgtcatgtctctttcatcaacttcagtgtggagcagttcttcagttattatttgacttccaagacattgccactctttgagagtataggctgaatacttataaaatgtccctcaatttaggcctgtctgatgttttttgatgactaaattcagcagaggaatctctgctaggaatatcacagaggatacttttcatttttgagtgatagacaatttcaatgtgtttcatcagaatgatgtcatttgattactaggtttagatagtttgtggctgtcttctccattgtaactaggttcttctcaactatgtaacttagatgtattctgtgggtagattctttgaaattttgtaattattgtaaactaaaaataaatcctaagcctgcttggacaagggaacctcagcaaaaaccttaaaaactattcctggccacgagaggatgggaggtcagacatgcctctttagaccccctctcttttgtggtttacacaaaacaactcatcaacattagtgttaaaatagaggtcgtaagactgatggggtggactttttgtggcaataagataccaacttataaataggacctaaggtcatggcaggcaagagttaggtcattcacctctacacttaaagaataaactgtgttctaactggcacaaggttttaatttttctctagcaactatacaagcacgggcctccaccagatgctcaccccttcccactgttccacaagccatagctacagctttcattggacaagagactgatttcagtaactttattctgataagaggaccactgaacctgctgtactggttctgactgtttatagaggctttgtgcttgagtgccctcatgtccctgctccattttttcgcctatggggttaaagatgagtggatcagtgaagtagaaatggagattaagtgtctaaattcatgcctctgttttggtattattgtgaacactaataatatttgaatttttttcactttatgttttcaacttagagtcaagtatgaatatatactttcatattgctaatcatatgttctgggttttattcttctgtctccaaacaagaacaaaatccttggaaagtctcaacagattacattatttttctaatttatatttcttgttttacacttaacataaatgcattggtaatttgattctatggccctgaagtaattagcctcattttatctccaaataatacacaactgaactgattttctcaa

SEQ ID NO: 54753 - DNA, 880 bp, Homo sapiens
aactttttatttcaaatctaaatcccagtaaagctaaccaaaaagtaaattgataaatggaatctttttatttattttttcaatttgtaaaaaatgaatttccttcctttggaaataatgtttatcatttccaatcatcttccaaatttaattcatttgggcaaaactactcttgtggattctgggatattattcagtatagtcatcaagataagtatgttttaataaagttttaaatttgaccataagttaggccaaatctgtaattttacaggtaaagaaattattaaaaaggcttttattcggtgaaggaatctctaaaatgaaattgctgtaaccaagtgactagtgaacataaatggaaagggtgcccaaattcacatctataggtcctaaataagagtgacacgaaatgaaagggttgtgaataaagttggaacattgaacaacaagaaacctgctgagttagctgcttctatgccagactcctttaaacattacagggctctaaagtttcagaaaaactgttgttttagccaagggggtgaaaggtaatttgggaagccttggtgagagagagagagagagagagagagagagagagagtgtgtgtgtgtgtgtgtgtgtgtgtgtgtgtgtgtttctcaggtacaatctgatatccaggtttttttttttttactgcatttgggagagtgaatttaaaaaggtaattttatatcccagctgataatcagattgattataacaagcacttcataggtgagtaaattggcagtgggagaaaaatgattagcacaaatttcaaagctaagaaccaatacaggggaaaaaagatgacaaaactgaaaacatagccaaattacatttaaagaagaca

SEQ ID NO: 54754 - DNA, 977 bp, Homo sapiens
tgtctaaaaatagcagtcaaataacttaccctttgcaattggctggaggaacataaggcagacttacattggtgaaagatttgcagatgtccttaacatctatctgtagcatatttccaataataggaagaggagtggggccaggagggagcttccttctcctacagctctgtctccagagtgaaaagagaagcataaaagagagacacagcaccaggaccacaaaaggttccattgaagccttctcttcttattaagacagctgtgagcttgcactccaaagtttttataacactccctgctaatttagtgtgtgtctctttgacatgtaaagtaaacaatcacctagatccaatttatactttttttctgagtggactttggcccatggatagaaataaaatgttcttttgtcctactccttctttccagtgccaatctaggagattctggtttaattgtattggattggagcccaggtatttttaattaaaagtccctggttgttccaatgtgctgtgatgatggagaaacactgaagtaaatgattctatgttagaatatactcaaaattcaatattctcagattaatgaccagttgggaatttatgaccttgagggaaatcagtgtattctatattttgtgtataaaaaatgtacattgtaatgctatatcaaaaaataggagacttagcccttgataacaaaagcctttcaaatatttagtatagttcacttaaaatacagctgcctaaacatgaaatagtgaatataactcatacatgttgaattaccatacatatatcaaattattagctaataaatgtatatttatatatatttaaatgtatataaacaatatacataaatatatatgttattacataataatatttgtgttattattacattattataataataggtgattatttactttacatgtcaaagagacaaactgaattagcagggagtgt

SEQ ID NO: 54755 - DNA, 1125 bp, Homo sapiens
tcatatttattttaaattggtcagcataattattctaagctgttttataaggaaaaattgagtttttgtcaagactccacttacacaatgtttaaccctcaggttttcagggactctgataattcacagagaatgttcactcccattatatcacttttgattctctcaattatcttcacctatggtaaaatcatccccattttaaagatgaggatatcaagactcagggacttatcatctgcgccaagaacatggtgtctgcaagttgtagagcagaggctagtacccataacctttgcacctcaaaaacttctctctaagcaaattattcagttcaacattcatgaatgtgtactgtgatacaccatttcattatttcctctaatcagtgactttcaaaataaacattgagttaatcattgcagcaccagttgattaaaaagggggtcaagaaagtttgattttgtaaccttttgaacttgcatgaacccaggtcttagtgaactttttatactagaacaaagataagccgcaatttgatgcctgattcacattgctctaaactctgaaagaaacacactcctttattatggttaaaatgaacactggctgtctttagatcatctgctttattccctaagagatgcaggtctctactctcctcttccttcctatcataagactcccacctgtatcattttataaaatgagagaattacagataattaaagatagaaggaacctcagcaacccactcttctaattccctactttatcgttaagagtaaggaactcatggctcagtgaggtgatgcgttacctatgaatgagaagaagacatttttttcaaatccaggtttccaattccctgttcagtgacttttcacatcaataagattttccatcattgcctaaatgaatggacaagatgtcatcagcatgaagtgctccacaaaaagaatcataaaccttgcttgacaagaggtttttttttggtttaaattttattttaagttccaggatacatgtgcagaacgtccaggtgtgttacatctgggtaaacatgtgccatagtggtttactgcacatatgaacccataacctatgtattaagccccacataca

SEQ ID NO: 54756 - DNA, 692 bp, Homo sapiens
attaaaaaagaaaaagaaaaaaaatccccttactatttcagtaccattttaattggaggcagaataggtgccttaaaagaacatagggaccaaatggcagttttctagttgatgggacagtatcgaaactaaacaactttgtctttggaggacattttactcctaattgttgttgaaggcagagttttcctgttcacagaagcagcatgaagcctggtctctagcagaggggcacaaaaagggaggagaatttggaggctagagtgttttggcagaggaccaacaatgtgcttcatggagagaattcccatcccactaggtggcgctgttgaccttgaaatgccatgtgatctctagactaagggcacagggtgaccatgacatgtcatgtgctctccataccaagggcagagagtgaacttcaaatgccatgtgctctccagacaagggtagagtgttacctggaaatgccatatgctctccagaccaagggcagagagtgacttcactgtgatgagggaccctctattcctagaaaattacaacggcattcccttgagctacaccttcagttactatggcatttcctgatcttacctaacaagattacttccctgaactgtaaaattgctgtggcattgcatacaaagagagagaggatgggagacatggtggttgcagacaggaatgga

SEQ ID NO: 54757 - DNA, 1575 bp, Homo sapiens
gctgtcagtcatgattctggttattgtcttaacatgctgcacgtaagagaagtaactaaatttccttgtcaattgggaactttcatcagattttcatcatagctattctgtttccatcatccacagttctgctttgaattcgaaaaatatttgcgatcagcgatagtccaaatttgcttttcatggaaaaaactcttaacaggtcctcttgaacacaggtttctgataactttcagatcaataaactaccccagcctttaccactatgcaatataggcatgtaagaaacttgtacttataccctttaaatatattaaaacaaatgttttaaaaaaataaactaaacacaaattcctagaactctaataaacttaagggttcaaaaaactgctaagcaagatcaagcaaaacaaaaaatctatgaaattaagataatatttttataacttttatttaaaacactgttggttgtattctagatttaagaaaggtttctcacagatgttatctataatttacatcagtttggtaaagcacacttgtaaacaaaggtggaagcatttggtttttctccctacttgatccctccaaaatttggaaactattcacaaatattctaattttcgtttacatatcggctctttataagcaggataaaatcggaaatattggttatattatcaaggctttgactgaaacatcatatttaagaatatgcataaaatgcccggattcaagagtttccagccttacagtgaggggagaaaaatgtcacttcctggcggacctgacaaccttagaacttttcggggagaagcttggcagggaggggacctggcagctgctcctgggcaggaaccagagggcaaagtccgtggcgaccctcgggcctggcggggaccttacgcttcccggcgtctttccctctgccccgccggctgctgagggagcggcggccgccctgcgcctggaggtcgttccctcgcctcctccgggccgcgggtagcgagaggcggcggcggccggagccggtgtgggcggcctgaggcgaaagcccggccggcccctaggggaatgaaacaaccaccggctaccagagcaacaacggcctccgcggctgcaccgccgacttcccggaggagcgaaggcgccccgcaaaaacacgccgcagagcggaacccgggccccgccgccccagcagggggcagcagcgacgcagacaggaagcccaggtcctgggcgctggacacctcggcggcctccgcgaccaatgagcgccacaccaacctccaggcggcgctcccaccgcacctgccgccgccgccgccccggggcgagaactgcgccgtcggccctgccacgctgacccgtggggccccggccgccgccccagggtgacgaggaggagcaggacggggccccagagaagggcaagagctcagagctcgggctccagtgccaggaaaaggccaggagcagaagatggagagatggagaagcagcaggtgcggagaagcggcgctccacgggctgggtcagcatccgctggcggatcttagatgactttgaagatga

SEQ ID NO: 54758 - DNA, 1836 bp, Homo sapiens
cccaatggatgtctacacacatacacacccctgtaaccgtctagatcaagatataggatatttttagcctcctgggctctctcatgtcctcatacctctgtgaaagctgtacttctttcatgaattttggacgaatttctatgcctaataacagtttcagagactgagaaaaggagactaaattctaaggagcaacaaattccaagggcagatggtggcaagtagataccatgggtcatcctgattcagagcttgctgaccacaaaaatcacaggaatgttgagaaatagaaatcaagatctaggttttatggactcattgctattacatgccactgcttctgggacgtgagtcagcaaacttgctttctctccactattccactctgatccttgacccaattaaacaatcccaactatattttgctcaggaagtctctctcctttgagcactccttgttgcagtagcagtaaacgaagtgcttgcctctgcctctaactgctctcaatttgtactttgagaccctcctccacaagtagcaattattctgacttctaaagtgcaggtcaaatctgcctgttcctgaatttcatataaatggaatcatacagtttgcacccttttgtgtctgtcttctcacaaaataatgtctggacaattcatttatgttgttgtatggatcaacagtccattctttttcattgctatgcagaattccattgtatgaatacacccagaatttatccattcttatgttaatggtgactgaggttgtttccaatttaagaatgcctcctttgcccaacaccgctgcacctgggaagttaggcattttctctcacccttgggattaagtgtgcgggtggtcaagcagcagcgatttccaagcccccctagcagctctcacagcaggtgtcacaaaagagtttgcaccactccaaacagtcaaaacgggccatccccccacccgacccccgccttctctggattttaaagactgtgtaggaggagaaaatggggacgggggtcccctggttaattcatttatcttaagttcccgtaaccaaactagcccctcagtttacgcctttgaccctcaaagttctttccacttcgtaccgtgagatcagaatccctgaaagaagcttcttgccctacccggctgaccatccttgggcactcagctgtgctgggatgctgttgccctatttcccgcgtagaaacaactgctggtggcgccgccggctgaagagtgcagaactgtggccctgagccaagctggggcaaatatgggagacgcgggatgggagagagtggggagagaggacgctatgaggattcttggagggagggaccagagcagaggtggtgagtggcaggaggaggcaaatgtccccgcaaccaggaagttcatcgggttgaagtttcctctgccgtcgcctcctgctcgccagcagagctgagcctggtgtgctgcctttctggaaagcctgccaccaccaccctcggcgtgggatgccggcccgcgaggaacctcggggacacacaaatggccgcacctgaatctggctgccattgtgactctgccgcgcacgcgcagctccatcccctttgaggcgcgcatgtgctcgccaagggggcgcttctgtcaggcctctgagcccaagccaagccatcgcatcccctgtgacttgcacgtaaaagcccagatggcctgaagtaactgaagaatcacaaaagaagtgaatatgccctgccccaccttaactgatgacattccaccacaaaagaagtgtaaatggccggtccttgccttaactgatgacattaccttgt

SEQ ID NO: 54759 - DNA, 670 bp, Homo sapiens
atctcagaagggcctgggtgggcatcttctctaagcatcatgcctcaagcatcccaaacggattccctcattttctggctgatgaagccatctggctgcctgcccatgacaagaaggaaatggcagcatctctacatacctgggcagtttgcaaaggcactgattgggctgagaaccagctcaatgaggtcgggctctcttatgcaatgggcttttcacatttcacacttaaagacctggaatccactcaatccatagaaaaatcaccaggaaagaagagaggctgcaaaagggtagaatgagaaaaagccaggagggacatgaaatctccattaggtaggagaatccacatctttttctagaatgaagagacctgacctggataaaactgggcacagcttgggggagaaggctgcctgcccaacagaagactcactgtggcctgttcagccctacagtgccacctgttggcttcaaggttttttctctcacatatccagccaacactgcgaatccagagaaatctctcttcctttcttctcaactagcttatagtgaaaatactagcttcctttgaactccaggcaactacaaaaatttccaaatttctcttcttacagtgaaccctgtatcccaaatatttctggaaaaaaagtgaaaattagctaaa

SEQ ID NO: 54760 - DNA, 2244 bp, Homo sapiens
gaatagaaaatgatgcatccctttatttccagggcagctgcttagaaatctccctcatgaatgtttgggggcaacaccttacaacacaatttggaagagctattatctagggcctagtatgttggttacaggagctctccaatcattccttgaagagaacaccaccaccccatcagtaagctgattagctgtgtgggctggctgaatttaatgggcaagaaagaagtgtaccataagccacagcaaagtcttctccattacatttgtctatgtgcttccacacttctgtagcccccagttctcagaagtgatggggatggagttcctcatggaaactaaagttagcaataattagcatttagtgagcacctaccaggggccaggcactgtgctgagtgctctgtgcacatcccattgcattgtctcaacaacctggtggtaaagaagttagtattatttccaccttagatctcaggagactgagtttcagagatgttacatggttttcccaaggtcacacagctagtaagaggcagagctggaattcaaggctcaggcccctctatctaccaagcctttaggaagtatcaggcagtatcatataaacaatgaaatctgggctctgaattttctgattttgaccagggtcccctcaactcaattaaaagagaacagaggaaaggtgctagctttctgctgaactgacattttcttcgcccacctggtacacagtaggcactcaataaatgattatgctgaactgacctagaggaaaaaggccactgaggacctccccctccactgtgtgcactgggaggaagggcagcagagaaaccccctcacctgccttaccagttggcaaggctatctctgttcttatctgactgggacacagctctgtaaagacctacaagacagatagcaacagacacaccacaatactttcaagtgcataggacaaagaaatccagggcaagccccagagaatgggtgatgacctcagatgcaaagtatgtagtgagccaattctggaacttcagcgaatttcacagactaaacagtgggagggagcgagcacttgggacttgtgctgactgagcaagcaaagttaccaggtgactgctgggctcacaggagaatctttctttgtgggaatgcactagaaatacaccagcaagctgagatccccccatacaagcagcatggccagttaggcagctcctctgccttaggctgttggttttcccactgtttctgggttcagcctcaaagagtgcggggtggaacagaaacaggaccctctctgctgagaaaatctgcaaagagacaaattttgatactcggcaactactgcagccaaagagtctgggccaggggctagaggaaaggcttaaacagccacctggtagtttcagactcagaggagggagcaggcagggaacatgagagaagagagacattaatgaaggaaaaatagccaaggccatactaaaaatatttcccaggcacatatttctcccaatgcatagcagctctttcaattaaggatgtgtcatttcctgggttactaagtccagatcatggaatattccactctgggacagtaaaagagggtcatgttctcagcctccccagcaccaaagcagctaaaaacagggatcacaggcccccagtgtttccaccactcctgagctgcttggaagcttcctctcagggtgtgtctgtggaaagcctagggggaccagtatgacaccgtttctcaggtatctcaaatgtccccacagtcgcctggaagagaatcatcatctcaagccagtaagcccttgcaagaaccagaatttgagggaagaagaaacattggtggagactgccttggttactatgataaatggccagtaacctttaacatcttctaaagccaaagtcacacagaaaaaagtctgccctaccagactcaaagaaatgttaaaagaaatcttagtgtcagctgggcgcagtggctcacgtctgtaagcccagcactttgggaggccgaggcaggcagatcacctgaggtcgggagtttgagaccagcctgatcaacatggagaaaccccatctatactaaaaacacaaaattatccgggcgtggtggcgcatgcctgtaatcccagctactcgggaggctgatgcagaagaatcgcttgaacccgggaggcggaggttgtggtgagcagagatcactccattgcactctagcctagg

SEQ ID NO: 54761 - DNA, 1536 bp, Homo sapiens
caaataaaaaataaaaataaataacaaaaaataaaaaacaacacaaaacttcagcagttatcaaagagtagttaagtaaattttatggcacagctacccaaataaataatatatagtaattaaaggctatggtcatgaagacagagatttacagatgggtggcctggtacccttgcctacatgtgccgcagccaggatggtcattctttcttcttctctccatcaccatggcaattcctaggagcagcagaggatgcagagccccaaggaagggtctttatttttccgccttggctcaatttttccctgcaatttcctgtttggcaaggaatacccctctaagcccatttttcatctttaaaatgaagaagataaagccttctttacaaggatttgtgtgagttactagagtgtcaagtacagtgcctggctcgtggcacatattcaaccagggtctgttcccttctccctccaccgaaacacatttccaattagaatggaagtcaatggaaaattcaggttgaaaattcggatgatttcactttctaaagaatctttcaagaatgcatctggtttgtacataaaaggaatatctctaccctcatctgaatactgactggtctttccagaaagcaggcagattcagggcttgccttttagaagggatgatgtaattgtttgggctttgtatttatcagtctccaaggaaactcaataatgaggaagtacaaactaggtgtgtaactatgctgacctcagataagctggggtgttggttggcattacatgaaccaacagatctttttattatagatgaactctgctcttactcatttatcctctactttagaatggctggaagtaaaagactggaaaaatgatgggtgagaagtttttcttacagtaataaagcattactagaatcacaagaaaaatacaagggtttaaagtatttgagaatttttgtaatctgaagagaactaccttcaaaagattaatacaggtaactacagatttaaaatgaaaattcaaatatactacaaatgaaaactataactgaaatttacataattaccttatttacatgaaaatgaggatttcagatagaccaagttaaaacgaaatcattccttgtgtgttataaaatatgtaaaaattaaaatttaacaattaaaatttaacatttatggtaaatttaatgaagtagctgagaactcccaaggaaactgaaactaactgtggcatgttttaaattagtttgcacaactgccagtgtatagaccaagtgccattttacgaactttcctgagaggagttgtatagaagaatatgttcacatcagttttgaaatgatgcaaaatgatccttaaaatgactcttgggatttttaataattatttttactatcttaatggcaaaaattttatgtgacttcgtttttgaaattttaatggattctatttgagaaaatatgacttatatccaaccacccaattaacacacactaatataccaagtgagttcaacttcatacaa

SEQ ID NO: 54762 - DNA, 2291 bp, Homo sapiens
tagtataggtttatactggtttaatctcccaaaatgactagggtcattccctatagacggctggttttctgcagactgatgcttctaaaaccagtggttccaaattgacagatcattgatgcttgggggaagccaatcaattactgcaataggtccttaaattcacctgcctacagagcaatacatgcggactcaatacatatcacatctcctacactgatgtacaaccatttttcaagtgaatacagatgctattagaatgaacaagatccaaactcattttgaaatagtactcacctcagagtactatctctaaccaaggtatctggttagattttctaaactaaggtatactaaaaatattactgtcatcatcccagggtaagttcacaactttttttttccacattacaagaccttcctggatgggaattccaagtccgcaggatcaaggtggcagtaacacccccaggctcccagtgcccacagggctctggccaccctttggagaaggcccttgactctcgggatccagttgaggaagatcttatgaacacctgggtgtctccttatggctgaaccacaggtaacaggttcttcaaggcaccaaaccaggacacacaagttgggtcctaaacctcagtatctgatgcagttttcagcagctacagtttccgattagccctcagcgcagctagtgtggtgccgctattatggtgcattccccatcagcaccctgaccccaaaaaatgaggacaagttgatccttgaggtcccttctggcccgcacatgctatgactttatcaggcaaaactctcctggaatgtggcaggatgtggaaaccagtaccgagatcctgacctcctaaccttcctttctggctctcccatcatttgtttaccagagatctgggttttaggaaacgaaagcagcctcctgattcaaggttcagatcgtcccctcatccagccactgggacaggactttttatccaggcaagcacaggccgctctcatttcagtcaacaatgagagttagcttctgagtcatccagtgcatgcaataaaaaaaaattcctccgttttctgacctgttgtcctgagaagactgatctggtgcatcttcatacacacttcactgttactaaaggacaacgcaggctcagtttttaaacggctctaagcatcattttatttgggattggcaagcgttcttgactgacaaactctaactccaaggagagcagcctgaatcaaggagaataatgccttatggaactcatttatcatagctaaatctagcagtttcaaagagcagtccccttaggatgaaatccaaaatctttaacaaggccgctaaagccagtgcctccctccccacccacatcatgcctcttccccactgggctccagctacagggcctcaggactttcacacctgcctttacctctgcctgattaacttctcatcttccaagtgtctgtgtaaacaacccttcttctcaaagaggccttccttcacctccaatctaagctatacccccacagtcatcctttttttttttttttttgagacggagtttcgctcttgttgaccaggttggtgtacagtggcgcagtctcggctcactgcaacctccacctcccgggttcaagcgattctcctgtctcagcctcctgagtagctgggattacaggctgcaccaccatgcccagctaattttttgtatttttagaagagatggggttttttcaccatgttggccaggctggtctcgaactcctgacctcaggtgatccacccacctcggcctcccaaagtgctgggattacaggcgtgagccaccatgcccagctcagtcatccttttaatacacttggttcttcttcacggcactggtcactttatgtttgcaaacctccttggtgggttagtttgtttaatgttgaaaggcctactcagcagtaaggtgcatgagggcaggattttgtctgccttctgtgctgtgatattgcaaaaattttaacagtgagaaaattatgacagttaaagatctggcctaaccaatttcatcttgcctttaacctccaaactgtctttggtcattcctgggcatcagcaaagctaacttccggagaaattttagtgtatagtttaaatgatggtagcactttccaaaactaaactgtctgaaaaactaacgaaagaccaccaggttaggaggatgagaggggcctgaattctgctaagatgtaggcatagttaaatgattaccagccattattccaga

SEQ ID NO: 54763 - DNA, 4757 bp, Homo sapiens
acctgtccactgctgccagtcctgagcacataagaaggtgtttgaagtttaactgcacttctaactggtgtaaataaaatcggatgatgatgtagctctcccactttcttcaacttacatttaaataactacatacctaaatgacactactatcatacagaactggatgcatacccatgacaaataaaaagataaccctcctcctcagtgataatggcatgtttctacttcatccctcccctgttccttctttctctctctgttcattcacttatcagacatccttatgtacattctgaaagacagtgtaacttgttcattaagatgtggtttctggagtcagatggccagggttcaagtcctgcctggcttgtgagctaagtgtccttgggcagggtatttcacctctgtgtaaacaaggatgcaccaaggatgaaaagaacagctttgacatcagaaggctgttgcgaggattacattaggcaattcaggcagagcccccactgtcagggctccagaaatgtgagctattgtttgtagattccaggaaccacacaaggcactggaactcagctgtgaaaagggtggtgcctgccatcaagaagctcacagtctcctggggggagacaagcatgtacaacagctgatgagtgttgtgctagaaccaacaaggtagtaggggcctaaaggtggaatcacggaacactccctggaggaggtgctgcttaaaactgtgcaaagccacaaaaggaaaaaagcaaaaggaaagagcatgccaagtctcaaaaaaaaaaaagaaaagaaaagaaagaaatttagcaagcgaagggagaggaagaggatgaggctgtagatgtaaacacagactaggagaccaacaaagaaattgaaacatagcatctgacattgactgcccagtcaactgccaagaaacaaccactgagccttagctctgctgagattaaggtgactgcatttgacagatactctaaccgacgctcaaagaagcaaacccattcaaggggtcacccgttttgggcctctaggtcagccattctgtggctggctttccctagcaggtctttcagaaggcagtcctacttaaaaatcacatgttctactgacagctagatggggttcctttaactctctggctcaagattgaaagctagaggcctgtgaaatggacccagccaacagtcttgttttttttcttacatttaaattacatgccaatatttatatatcaacaaaatcactcaaacccctagattcgcagcttctttagaaaaatcagaaaatctggcaattctgggcctagattcccatatggcaacaatcagcaccaaatgaggagcctctgatcctctatatgagacacatgctctccatttagccacaggctctaccatgctctactgccccagccacagaaacccagtacctgttaccatttatgatcattcttgcagctattaattttctgactatctcacctactcaaaactcatttattatggtatataagtttctagccattttttcccattctaatacacacatataattatactttataccacaatataactaccttcttgactcttctaatacagtatggggaaaaaataattgagcagagcttactgggtgaggcaattcaaaccccaactctaacgcttttcctctctactgccttaaagggtgccagtttttaggggaaatcattttggaggtctggtccacatcatttgttgattcaaccaacacgctgagctctgcatgctacacactgggctgagtcagagtttactgtgattactcaggggagcaaaacgttgtccctgtgctagaaatggtttggactagggattataatttgccttctgtaaaattactaaagcagaaatggatgcagcaagaaaatgtgattctcaaacaagccaagcaacattcttatttaattctcataggcaaagaaacagttttggtgggcaaagaaagaaaagatagcagagatcccactggggacccactgggattcagcgatgaggaaaaatattatttaccaggcaacttcctgctgcaaacaggccatatgcttcaattctaggcaacataaacccaatgccaagttcttaaaagttgcattttttaaaatgttcttttacatatataacatacagaatttaacaaaaatgagtaagtatgagcatattagtcctttttagtaaattttctttttaaaaaaacaaattttaggccaggcatggtggctcacacctgtaatcccagctctctgggaggccagggtgggtggatcactagaggtcaggagttcaagaccagcctggccaacatggcaaaaccccgtctctactaaaaatacaaaaaattagccaggtggtggcaggtgcctgtaatcccagctactcaggaggctgaggcaggagaatcacttgaaccggggaggcagaggttgcaatgagccaagatcaccccactgcactccagcctgggcaacagagcgagattccatctccaaaaaattaaaaaaaaatttaaaaactcttgtgttgcctcctagccccttgatacaaatgagtttgtgaccactggctcagtttaaaagttatggaaagcatgattatatgtagaaatactttatgactaggattaccaaatgccctgatttgcccaaaacagcttaactatcaagaccaccccatttcattcgcagaagtactccagcctggataataaacagtactgttgcctttttgacagaggtgggggttttaaccaaatatttgtcaaatggtttaaatggttctcaggcagaggtttttgctttgttttatttttttctttttcttgagggaaaaaccgtgtctattcagaaggcttatttgtggacaggactacaggtcaatttcctgactctttatggaacgttgttaaccttgccccttggagttggctctaaacctcaggccagaaatcaaccccactcaccaatactcagccaactgtgatatttgcaaggatgaggcaatggttttcaaacaggttggtcatcagatcccatgggggcagggattcaaaatatagatagagctccacaacccatctcagatccaccaaagacagcctatacagtgaaacccaagaacccatacctttttaaagcttcccagaaaatgttaatgctcatcaggtttggaaacaccaagagagatgatgactatgactatcttttccccttaaactctctccctgaatgaagttaaagtcatcaggtagacaaaaagtaattagaccctaaaatctcagctcctccagaaacaccttcaagggcagaacttatactcctataaaatacatacaaagcccttgaaaggaatatccattagaatagtattcctctatctcttaccaaaacagacttaaaaaaaaaaaaataggccaggcagggatggctcatgcctataatcccagtactttgggaggccacagcaggaagactgcttaagcccaggatcttgaaactagtccgggcaacacagtgggaccctgtctgaacaagaaattaaaaattagccaggcatgtagtcccagctactcaaggagactgaggtggaaggatcgcttaaactgggaggaagtggaggctgcagttagctatgatagcaccactacactccagcttgggcaatagagcaggatgctgtctcaaacaaaacacaaacaaaaaaatacagcccctgtaatgttggttaacacccctgaaaatgctatgcaaatgaagcattgcataagtaattttgttgttttttttaaatagagatggggtctcactgtgttggccaaggtggtcttgaactcctggcctcaagcaatcctcacacctcggccttccaaagtgctagtttcacaggcatgagccactgcgtccaaccagtagaagtataataactccaaacaagatatctaaataactcgacgtgggtcctattttcccttggccagaaaactcacagctaaatgtagtgtgcaattacagaaccaactgatttaaagttcctggcacttctctctctttcctcttccatgttccaattttttgttaaatcttatatgtgttcttgtgttttaaatattgtaaatgtgtaactaagtgaaagacaagcctaagacaagcctgcaagtaagtgaaagagacagcctaaataacgatagtaataattatatacaactgggataaagaaatgtgagattcaagttcaatcgcaatgctacatgcctttaagcataatctccgctgatttaacagttgtgtcaaggtatttgggtacaaatttaacagattctaaactggggataaagcaggacccagctctgtaggatgccatttacatgtggaatttgaactctctttagtcagaatcttctgactcagtatgtttgtgagccgaggctgtggcacagacttcacagccatattatggctgcagaagctgtatgcatttacacagggtgacctgaaaacataacactgttttaaaatgttcttggttagtctataaccattttctcagggaaatgaggcaataaaatagggtagatgcttgtagataagttgcaccttaatccagcttcacactatgcatggtgcaaaaagaagttattagtgctaaggggtgacagttcaaagagacgtgctgctctctcagtctgaaagaccgaccaccatttct

SEQ ID NO: 54764 - DNA, 1411 bp, Homo sapiens
gtccctgccctggacattgtaccaggccctcaattaaagtcctggaagcttcccccaggctttcctctgagacctactggaagcgaaataatcctttaaaagttagttttctgacacaaccacttttgctccagtctctatcctatcctttacaaggaagttgagtagtaagtcagccagtgagaaattatgtaaattcaaccaaattacctaacctgtgagcacctgagcttttctgtttgcaaaaggcaaagaatgctagctttcctctcctctgtggagcaagagttaaggcatggcctaagaatgtgccagtcctatcctgatcccagtacacagcaattccttggtgcttttcccagtcctggtcagcctaggagaatatgacccagacgcttagatgacactctcctctcagtcatctacctggctgcaataccctaaagccactgttcttccctcttgcctcctcaaacaaaccagcaaggttggcatcaggagtttagggaggggagactatctggtcagagggtgataatgtagtatgggctcaggcattcacttacatgtcattctctttggtttgtcctcttccccctctctccttaagtcagctgtgagcagctgaagtcgctaatatttcccaggtatcaatttcacagaccaagggcatgcagcacaatggccattaaaacataatgaccctttttggacatttcctgcttttcataatctgacagacaaacccttctctttcaatctttacgacatgatgtaaaatctatctgaatccggaaataccactcttaaaaatcagaaatgaccctctggccacagtaaccattattaagcatcccttgggatacttgagaaaaagcataagcatttgccacagaaccgctcagctcttagcaaagggttccccaggactccagagacaaatgagcaactcctccaactaagggcatcccttgatcttggcctcaccctttcctgtcttttatcagttgctgggagagaaaaacagtcaacataaactgagttgcaatgttggcctgggtatttctctgaaggcttcccttgaaagtaactagagggaaggagaaattaacatggaaaatttttttaattaaaaaaatacctcaaggaaatgggcaagtgttgatttgaagcaggaactgacagaaaaaaatatcagagaacagtggcaaatgtgtggctggatcatcagggaacacaaggcaagagcactaaacgagaatgtgggtaaaagaagctagcctatgtccacttaaagttggaaacctgggttgaaattttaagttgataacgatactagatgaaaacattaaggagctaaagaagctgttcacacacacacacacgtgttctgtatgagtctgttcagaaa

SEQ ID NO: 54765 - DNA, 3474 bp, Homo sapiens
ataaaaaataagttaaaaaataaaaaaattgcaagtacataagattagcattatattaagaagctttagcagtttagcaaaagactggagccaataccacaataattcatgcaagagaaagcaaacatggttatttaaataaaaggcactcctctcccagcctaattttatggtttgctttggtgtggagactcaaagtctatcatatacaaaactataccagcaaattgcccaggatgataaataatgtagcatacctaccaatcagaaagtgtgtacagctctttgtcagtgctcacatttcctcactatcactatttacggagcactctcacataccttaactcacagccaagggctggtgctatccccactgcagaggtttttttttttaagtagcctcagacagtggaagattcaccccaggtacagctcaagcaagaagacactggaccagcaccagatctcagatggccacaccagggtccctttatgacaatgactttcccattcccatgaggtgaacaggctcacaatttttccatgtattaataaggagctgaagagaaacaaataaattactgtcagcatgaaaatgttacctcttctgagtcacttccacttttcaattaaagcacctgccaagggcattataaagattagtttccatcactagaccatgaacaccttgagaatggagctgtgccctctcatttctgaggcgtttgcacagtttctggaatatgatacgtgctcattaaacacgtgcacacgccataaataaataatataaataataaatgagtgaatatatgaaggtaaaaaccaatgaattcacagtgtggtgttttccaccccattccatcattcactcatgcattaagacttttaaaagcagctaaagtgaaaggcagtaactgcccttttaacagattgccaatacatcctccactacttaaaaaagggtttcatgtcatatataaatctcagaagtggagagggctgacaggttaattatagacacaaagaacagggacaaatggactatgaggtaagcgagttgaaatgtgcagacacaatgtcctccctggacaagcatttattaataagcctgcaaggatttacccagcccggccaggtacaggtctgctaccaggctcggggacgattctggggaaggcacagttcctgcgcttgaggaattaggctggtggctggaaaggcagtgtgtacctttgagaataatcagaggtctctgtgggacgaggcaaacaggtggaagataaggcccaaaaactggcccgcctactcttttaggggggtgagatagagaagacctcctcactgggccaggccaaccgggaaagaagcatgggtaggactgtggctggcagacaagtcaagaggaggccaccaattcttctcctgcacctcccaccaaactccttcagctgctggacgcaggagcttgagtcaaaaggatccataaggatatttccctttcttctccacccttcccccaaccccaagtgaaaaagaaggatgtttagaaagtctgggagacaagctgaagggcagcttcagcaggcagatgagcccaagaatggaatgtgccgcctacaggcaaggagtggccatgggtggggagaaaggggacttctttttctccctttcctcattcgaggtacttactgagtctcttcttggtgcccaagcactgaacgtgacatctcttagtgggacatcaacctgtgtttggccagattaaatggccaaagcccagacctctgaacactgagtctgggtctccctgggggtttcactttattaggggggcaatggttctggtggcccctgattcaacgtgagtccttctaaagatccgaagcccctcttagatttcaagcacctcaaccccaccccaggtggacaccccatcgcagtatctactcatgccctgagaaaaaagggctggtgcggggaggggaaagagataatctgggaatgctaggaagaatgacggcggggccacgttctgcagaggggagaatgaccaagagggtttacttgagtttgtttgttgtgtttatttcccgaatccagcacattctccaaaagccattcgaggggcgagcctcggccgtgggtcaagtccaaagagcgtgtttcggttgtttttttaggttaatcccacttgccccccaccccagtaaacttcccacccaccccacctcactttccaggtctttcctgttgcgttcggctgcactgcgatctgggaagaagggagaagtgccatctcccagcgcgcgggatctgcggggaccctcgtcccctcgctggttgacaaagaactaacacccgccccgccgcgcttccggggccaaagaacgaaaactgccttctttttttctggcggacacggagcgcgcccgcggcgggccgaccagcccgggagcgcagcctccgcgaaggggcggcggggagcggcggggcccgggcgcgcggagagcgctcaactaacagcgcacctggacgcgcccggctgcggttccgactccgtccccgaccgcgcccgcggggccccagtctccgcatatcacctcccatagcgccccgcttccacgcacgtcccagctgctcttacccgggaaatggcgagaggctgctcgaagtccttgccgcccacgaggcggaagccccacggccccgggccctggaggtctatctgctgggtggtcatggcgcggctgtggcgggcgacgacccgcggggacagacgggcaggacgcgcggaacagcttgcagggcacccccggcggctgtcggagaaagagcggcgcggcgcgggcccggggagcctggggctggcgggggcagggcaaccgcgagggccagggcgggggcggctccgcccaggccgcgtagccgcccgccgccccgcccgtcctcccgcccgcagccgctccccgccctgcgcgccggcctgggggccctggcccggagtcccgccgagagagcgcgagtcagatgcggggccggggctctcagcagctctgcccgggaccccacaccgcctccctccctcctgtacgcacggccgcaccgcggctctcgggcccggggcgggtgctaggtgagagggaagcaggtcctgacagcgagacaaactcgcgcctcgtgctttgtaaaacgagaaatttgaagtgctgtgccaagtcagccctctgaggtcggctccgacttcccatttgctttttgtaatcggtaatgatgtttaaaaggtgctttcgaacgatctcatttgatgctgaggcaaccgggacgtttagtcccattttacagatgaagtaactgagtctgctcagtaggtgagaagacttgcccgacgctacaccactcgtcagcatctggaccactgcccgggcccagtgctgcagaaccccatcctggaacttttataatgctaatgag

SEQ ID NO: 54766 - DNA, 1119 bp, Homo sapiens
cttctcttaccttaaacaccattacttaaacacaatttattcatgctttccagttccctcagaccctcgactcctgcccagtgctagttgaatggccttaagcaacctctccaaacttcagtttgccttatttttattattataacacattccatgaaagtttgttaacctaaacagcctaaattcaacatctgggtgttctagggcaagcggggagaatgagaagagggaagcaaggagggtggaaagtgcaaggggtgggacagtggtctctccagctctcagtccagttttacaatgtgacctgggtgggaagtggttgatgccctggctcccccagcttggcctctgcagagctggcaactcccacacccagggtgcaattaccaggaccttttagagccactgtgtggagactacttcctggaacaacagccccatttcctaaagacagtaagtctaggattgtgctcagctttacaataagtctcgttgactctgcagaacaagtcctggacttgcccaggtaactcaagagccctctgtggggctaggcttctagctgggaccaagcgaaagcgtgtgactcctgactgggaggtccgctctggtatctaagtgaggccaggctctgcgcagccaagcaaagaaccgccggaagctctggtttcaccgcggccgagcgcagatcgcgcaccggttctcacgtctgcaaacgtgcaactgcctgccgcgggcgccctgatcaaacaagcaacttgcttccctttgctgtgaaaagaaccgaaactcaggctcagagcctcgcaaaacaaagacatctttacccgcccagtgctatcctgtgtcacccccctcccagggtctgcgcgtctttgatggagccccacgcgcaactcgtcgcggcgccgctccaggcagctggctgcatgcgagacccggcggggagaggttctcccggccgcgctagcgactgggcagggaattgagctcccaatccttttctcctgctttctgctccagctcgggaaatcttgaagtgtccactggggattgggtgcctctcggattccagttgcacaaagcatgcttcgtgggcgtctggatataaagacacct

SEQ ID NO: 54767 - DNA, 813 bp, Homo sapiens
cctctgtgacttctgagacatcaactttgttcccttccattagagtctgatatttttagcatgagatacggttgtgctgtgcccccctggtcgcattggccccctcctctgggacttctcctcccactgtattcttgtcaagaccttggctagcaaaacttcagcacatagcctgctttcaactacactgaagtttatactgggacaggacaatagtgttccattttcaaagtgtgttacaataactctccaagtccagtggaccattgagctgttatctgtccagtttccttttccccttcttagagcagacaccccttcgcccagccactcctctccctcattctttgaggttttggttgagctgccaattcacccacctcggcctcccagagtgctggaattacaggcgtgagtcaccatgcctggccaaaagccacaaaggtttttacaagtaaagttgcctctttagtcaaagtgattagtctagggaagagtaaatatccaggctgggcctgccagcatctggagttgttttcagggaaagccaaataggaaggtccttttgccttgagaatttggagtcagagagctggaaggaggctggagcagcttgcagccatgtttcccactgctgcattcagtaggtgaaaatgtagccaaacaaaacgccaagaataagacaaatactgatgagaaagtttgagtctctggattaactcctgactgagactagttctaacgccctttggtatgtctcagccaatgcagtagtgttaggttttgttttgtttttgtttttttgtgagatgg

SEQ ID NO: 54768 - DNA, 1827 bp, Homo sapiens
ctttctgtctcaagttgagtcactttccctccttctcctttctctaagcctatagtttgttcttatgcttctcagacagatgctttaaggacacatagctttccagtatattgagattttatttgattagcttccttccctttaggaaccaaactgacatcacaaaatttctgtcactttcctcaggccttggtttcctcatctcattgtaaaagactggaggctcttaacctggtgatctgtcacaggtagacttgggtgtgggccttttgaaatgatgcaaaactgtgtgtcactctcctccccaaactactggcctagagtccttggctgacctcagattctcaaaggttctgtgatccagaaaaagttgtcagttactggagtagatggtctctaaatattctctttaattcaaaaattctaggaagtactctcacaatttgtaaaaacacttaaaaaccaaggctagatgccagtcaacaaatagtgcttctgtcacagagaaactcagtaaatatttgatcatgcaaacgatgggatttttcaagatgatcttccctttgctttctttttcttttttttagtggaacaaccagtttgatctgtaactgactgtgaacaatgaattgagataactcactaccatcagacctgtcccccttactttcctttttttttgtttactttttaaaatttttttgaaatagagtcttgctgtgtcacccaggctggagtgcagtggcatgatctcagctcactgcaacctccacctcctgggttcaagcaattctcatgcctcagcctcccgagtagctgggattacagatgtctaccaccacgcccggctaatttttctatttttagtagagacagggtttcgccatgttggccaggctggtcttaaactcctggcttcaagtgatctgcccgcctcggcctcccaaagtgctgggattacaggtgtgagccaccacgccccagcctactttcttgattgttctaaatgttgttggccaaaattgcgcccaagaaaatccaagaacttggttgataattctgactgcttgggcattttgtacgcacatttttcatccaataagttaagttgtccctcagaacaaaaactaaaaggcaaaacttctatttttccattgtgaaggtctgtaagttgacaataaacccctgacttaaatttttgtatgtgttcttctttctcatttaaactaaaattcatgcaggatttttacctaatcaaaggatatcaaagctaaaaagaatggcatttctcttgtctgaatcttttgtttacggacagagtagctgccaggaaagagaagtgactcaacaaaagatacttggcaagccaatggcagagctagagctagaacttgggaccctgactctcaatccagtgctcttccccaccccatcctgatttccctgaagacccctgcattcatttcattcactctcttctgctgttcagagaaaaaacacacctaaaaacatgggcaactgacccaatgtgaaacagtttaggagtgaaaagtcaaaccatttcacaggaagtgtccacacatctgcagagttgagggaggtgggcaggtgactgattcaaagggtcaccgtgactcctgacataacttctggtcccagccccttctccagaaacccccttttctattcacctgtggacaccagaagcctcacccaaacaaggaatgcatcattctctatgcacacctttcatggtcctacctctgggcctttgcttgagctatttgcctcgagtcccaccctcctgctgtacatctgtgagaaaac

SEQ ID NO: 54769 - DNA, 703 bp, Homo sapiens
aaaaataaataaaaaataaaataaaaaagatagaaacaaatattaatctactgtactgaaaggttataaaacagtacatactttgggtgttattcccccattcccctagctcccaccctaaatcccagacttacccattttccctaaaagagatcatcttcagcagcgctacttaagggttacatggcaaagcataaactcttacgcaagatacagcatttggctagcatgagaatttcgacatgttgaccttagtgcaggaggccaagatctggataaaaatcacttcaaagtttgttcttctctttcctcttataatattaagctttcataatctaggcttggaaatgtcaaaactaaaagaacaaatgaaacgtcccttggagaactctcttaccctctgtgggtttttcctaactgcaaaagtctttgggcttcaaaattctttagtgaggcgcactactgcagcactgctgaacacttcacacaattcatccacctacatgtgagcagcagcactgttctatatttcaaaattaatgtcactaaatttggaggcctttgtaaatggcataaattattgttaagctaactttcgtaaagtttcattaaccatcttttcaaagaagaattgtgtaactgtccacaccatagctaccaatgcatatggactcaggtataaggtttctaagcagaatgcaca

SEQ ID NO: 54770 - DNA, 824 bp, Homo sapiens
cccgcatcagcctcccaaagagctgagattacaggcatgagccactgcccggcctctacaccttctattaatagttgctgttccttgctgccttctcctgggaggctaagtcaacactggggatgatgggtatgcagttagaaataccaaggaatgggaaaacagtgtaaggagcatgtctgcatttctccacactagagccagccaaatgggacaagtgtgctcaatatagttaagacacattaaatgaaatgtttctcaaattgtctattacctagcacctgaagctcggccttcagtatttctccaaaggccctttaaaacaatgctagagtgggctcagctgtgcagaaatcttgtggtttctgctcatggtggaaccacatgctaattgtgctcctcagagctccaagcagcagacatcaaaccttggcagcaacactcagaccttcctatgccagtgatttgcaggaagctgtaacactgcatgggatttacacagggtaaacaactcacttaggcctctgaaggtccagctgagctctaatgtttacacaatgattcttcttgggctttggcaatctgtccttggtagctcgatttggggacagccactctcctacaactgccaggagccacataattgccttttcaaccacagtgactttaaatgagcttccaaatcacttttttttcctgtttctttttctttaatttataaaaatctcaaagacaactgaagaaagtagttgttgaaagttgttctaaaaaattgcctgactaaaatgggaggatgggcaaaaatcatttgcataaccacttgc

SEQ ID NO: 54771 - DNA, 786 bp, Homo sapiens
caagaccgccactgcaaagtcagcatcgtgctggtgagcctgtcaaggcaacagaagggaggcatgtcggccagagacagtgcaccttccagtccatcccgctgtcagctcacctcataaggcatggggcagtcacacggcgcctggccatcaatgactaggttgccaatgacgctgctgcatggattaagacacaaatgtgctctcacagcatcctcctgtctgctccacctgggagatgggcttgggggagacttttgtaaccattttcagaggaagaagcaagaggctcagtgaactgctcaggctcattcagttctcaagcggagaggctgagactggagctcagctatcccagctctggttcagtgacctcaggccaccctgatgcccttcagtcactcctgcctgcttgtttgcagacaaaggtgagtctcaccaaggagagagtgggactcactccacctgccaccctcccccacacgccttaagtctcttgtataaatgagttcacatggatggggtccatgaccccacaggctttaaactaatagggcccccacccctccccatgctcctcactggatgctaaacacatgcctacagccactccacaggcactgcccctcagagttccctaagtgcaacttggtcgagactgtccagggccccacaccgtgggtgcagaggggcgaccaggcagggaggcaagaacaggagcatggcaggtcccctctggccaccaaggaacccacccccacaccacctgggccctgtaccccagcc

SEQ ID NO: 54772 - DNA, 1150 bp, Homo sapiens
accaaaggcaaagcaaaagagggagcaaactactctactagcctagatgaaggaagcattagattagttcacatccttgggcaattatggccaatcagtttacttttgctgcagtcacccagattaagaaatgccatgaaggtgtaacacatatgtcaaattttatcaaattgtatactaaaaatatctgtggtttatagtatgccagttacatctcaataaagagagggctaatgtgcatgtaaagtgtatagcacagttctttggcaatagtagtaggcactcaaaaaatcattaaccatgaaggtgatgagagtgatgatgacaacttatgacaaagctttggcattcacccaggtggcaaaaaataaaaaataaaatgccagagtggggccttcagggtgcgtgggaaatctgggtaaactgcccagtttggtagataagagaaagatgagtttaaaatgacttaccagaactcatggtggtggcaggacaagtcgtctgcaactggggctctgaactgctctgtagaaaaacaaacaccacacaatgcaattgatgaatggcaggttcgcgataaatcccaatggttagtattaaaaatgcaaacactgtaacccttgataaaacagagctgaaccaggagtcacctggccaggcttctggtttgtggtcacccacatattattgtgaccttgggcacatcactcaacctcactggtttcagttttgttgcccatatttggtgctgatgttatccgacatccctttcaaacattctattaaaaacctcaagctacacgagtgcacgtggtttaaagagagggtaaaggaaaggggaaaaaacacattttaggagaaagaggtaaaatcacaacacaaactgatttgagaacttactgatcatactgaatgcttatatatagcttactatgcacaaggaaatgttctaaatgctttgaatatattaacgcatttgaccctcacaaccctaggaggtaaccactaatgtcaggttagttacacagatgaggaaaccgagacacagacaggtgaagctgtgtgcttgctgcagtggaggagctgatactggaacccagacagcctgactttctggcccaagttcctatgcactgtgctctaccacctg

SEQ ID NO: 54773 - DNA, 1805 bp, Homo sapiens
ttgtatagtttaattcgtcttaatttaaaaaacaagtacaaagcacacagcattcttaggctggagaagaaatgaatggagatgtcttgtgaaccaaacaaaaaggatacctcaactcatacatgataagtaatcaccgtcatatgcgggtagccctttgcacatttcacatttctcaatatagaaactactaacttctaagtgtcagcccccttacttacaaactaacctaaaatagacacagtcagggataatcttcaaaatatttaaccatcattttgccacaaatgtctaccaactggagcagacaccagttgtagcactctctgggaggcccctccctgtgcctgctattaaccatttaatggctggatgctgagagggtagaaggagaatggaccctgggtgttaagagactactttgatattttaagagctagtatgacgatagtacgtgacaatgacaatgcacaggtgagtaccagctcttgcacacgaggactttttgagtagcaggttctgttgtgtgttctcactctggtgattaaatctgcagcaggtgatactaacaaacaagggatagtttaaaataaaattaaaagtgctgaggatgaatgggctgactgaagaaaaggaactgcagcaacggcagcagtgccaaggacagtgccctgcatccagtcctcccctgttgtggcaacagcagcaacgtcctatccagactattccagggcctgattctggctctgatcccagccagctcagcctcctggaattcctgccccagttctgagtgcagttctccaaccttccataaactccgtgaactacccaagatcttgccaataaatccctcttcagtttgagttcaccagaggtggtttctggttatctgccacccaagaaccttgaccagcagaagatgggagggagaagtccccaaggtttcatctgaagaggagaatcttcattcctctctcctgacatgaggctgaccagatctgaatcccaagtggctcggcagtggttgtgtctctacaaccttaagtgctcagagcctgggcagtgaggacgcatccatgaaactacacaaattgagcttgaccggaacactgaaagctttgaaaatcatagtctagtccctgctgtttatttagagataatatgggccattacaatcagatgagaacttgagagtttattttacataaaaacctctaacacttaatatttatttaaaaactaagctgtaaagagcctgatttggttgagtacatgatggcacgtctttggaatgcctcttacaagtcccctccaaatgagccaggcacctttgggtaaaagccaaaaggaccaacagtgtaccatctagtggcaaaatgacacaactgcaagtgggcagtaaattcccctagtgagttgcaggaacctatgcagtgtcacagcttgggtgtgccagcggggagtcaaaccgccattccacgctttgagctgcttggacctgccgtacttggtcaaagtaccatggcatcaacacagacattccacgagaagaacaagatgtgaagtggccagagttgttaagaaagcatccagataattaatcattccatattgtcccccctaccccgccaattccatgaccctataattctaagataagttttgatgacacaaagtgattaattactaaaaagccaaagttatactcatgcttccagctgaaaaacaatcaactaaatatgggttggttactgggaaaggaaagaaggtccttatatgggtagtttagggatatatgacta

SEQ ID NO: 54774 - DNA, 2438 bp, Homo sapiens
actgtagaggtggggccctggggcagagagagcatgcaggctgactgcctgtgagcgggttgggccacaagaggggcagtggtgcccagtgctttttataagaccaaaaaaaaaaaaagaaatacgcctcaaccatatataccctctctgcccaggagaggagctcccagcaaacttgttctgctcatttggctgtgaaaactccatagaagccttgctggcagcaatcataggtgacagtttctacatttgtattctcttgcttatgggtagcaaaaactactgctgagagagaatctgattttctgagtacactccctaaatcacattttgccacttttgtccacagtgaagctttttttctgcccaattgccttggtggatgacaagataaaattatcagaaaataaaaggtgtcgaaaaatcctttagaactcaaagacgcttattataactaaataaagacactacgatatcaaccactacaatggaataaaaggtgacagagttagggatgtttagcatttccaaactaacaaatgttaaagagaatggttctcaatacaaaatggccttgtcgccacaattcacaacttgtatcaatagaacacaccatgttggaagaaaagaactatgtattctattccaatcagtgtaggatgtttacagcaggggccagggagggagtgtgttgagatcttaagagacgaattaaattattcacacacaaccctgttagcaaagaattctaggtgctcaggcagtgacgctaccactgtacagcttccctacatgcaaaacgggaataaaagcagcactaacctccctgttgtgaggattaatcgagataaccatttacccacatagcacagtgcttgacacacaggaagaactcagtaaatggtcacctattgacataatttgtttatttatcctgttctaactccaaaaatgaagtgtgagaagagtcagaagtggaatcctggttaataaaaggctctagttagtcactgttttactttaacaacaatgtactggaccctgcatggagacaagggcattgccaggaatgaaggcttttgccttgggcagagaaaactcaacacaaagcttgtagtgactccatccagcaccctgcatttgtgcagaactttacaggcgacaggacagcagtgcccttggctgtctgctaaacaggccagtaattgagttcaatctcaaaaaaacaagaacaaaaacaaggcaatatcatctttaagaatgtttcatgaggccaaaggactcagagcatcatagaatttcaaggctagagacttcaccactatgtaatatatccatgtaatacaactgtacttgtacccctaagtctataaaagaataaaatatccctaccaaaaaagaaaaaaaagcatttcagggctggaaaaaaacacagtttccaaatgtcatgggctttacagtcctgatcaatacactgagatgagaaaatgcaatgtccaggtacacgtcctccctaaaacaaataactctcatcctgccaagcccttccaacaggacaaggggcaagccatgtcagcaggagatgttacaattactatgtctgtagtcctgctctgctttctagatgttacactccctgaagacagtcatctatgtgtgcttgtatgatgtttgttcattcacgagggcactcaaatatttctaaattgcttttaaaatttcattgtggcattcccttcctctcttaaaaaggaaaagccagcagttgagaattaaaatctaaggtttcttaacatttatataggtccaagtgtctctaaaactaaagtcatatatacaagtactgagttggcgcataaattgctatctagctatctagagaaaagggctttgttatgttgcccaggttagccttgaactcctggcctcaagtgatcctcctgccacagcctcccaagtagctgagactacaggcatgcaccaccttgctcaggtcagctttctcctaaaaaaaaaaaaaaaaagaaagaaaaagaaaaaaaatccttaacttaaagcaagtccacaaacaaatgtcctttggtgcttctgagctcattcattcagtaaaagttcactaaatgtgaactaaatgtggggcattgaatagtggatctcactgtttaaatttatatcttgaatatctagagagcaaaccatcaaaaagtctgacagagggcatgttaagaagactatagagatgggggaaaggataaaggtcccatacaagaatccccacctcacctcccctgcaccttttttttttttttccaagtatgcaacaaaaatccttcaggaaaaacgtaactttagaactcttgggttggttcccaatatgcttaaagggagctctggtatttgtggagtttggtgaatatattacacttctggaggaaatc

SEQ ID NO: 54775 - DNA, 3473 bp, Homo sapiens
atggtgaaaccctgtttctattaaatacaaaaattagctgggcgtggtggcaggcacctgtaatcccagctactcgggaggctgaggcaggagaatcgcttgaacctgggaggtggaggtcgcagtgagccaaaatcacaccattgtattccaccttgggcgacagagtgagactctgtctcaaaaaaaaaaaattgtagataatatgtgccatttgtatgaactacatataatatatatatacacacacacatacatatttataaatatctagaaaatctccagaatagtatagaataaaatggtgctcaggatttcttccaaagagaggtacctagatcctagatatgagagaggtagaagatttacttttcactgaaaacatttttactaatttttaaattttgcacatggtcaattttgtatatcacctacttatttaaagcaaattcaaaaacaaattaaaactgttttccaacctaatgcacagttttggggaagatggatagaataaaagtaatcagaatggtctcttatgacagacatcctctatccattccttagagagaagtgaataacttcctgcaatttttcacagtagagattctgaaatgcttagaaaaaaaaacaaaaagccattcactttcctcagcccagacatttgtttcttaaaaatgcagtggacagatagcaggaaagaactccctgtaaagattataggaagagagagttcaatgtttgtgcatgggtatatgtgagagatcataagaaatccttaaaaaaaataaacatggcaggtaatgaaccagcaccaccactgtgtggctgaaatagaaatgggtatgtcacctccatgccaccaaagaaacggagtctctcgtgtcctacaaagcatgcgaggcatcttgccttgccaaatttaaacagcgatattatttttaagctactataattagtctccatttgtctgtgaatcagcctttatgaggcaatagcatctaagccccatcagatgaaacatgaagccacatcatgtctgtttattattttgaaaagagagggtgccaagtttcctgtaacacccaattcaaacactgaaatttggaggacagaatgtcctgttgtccacgtttgaagataggaatatattttcatctaatacatcagagccccaggttcagctggcaacaggaaggaattgaattccacagctcaaaaataggacttaagtactaaagcacctttctttgctcatataggataatatttatgttttaacccctcatgtggcagcatgttttaaagtgcccatgtttgtgaacaaacatgagaacgttttaatctaaagataactgcctaggtgacaagagattggcaagtgttttaaagctatgtttacactccctgatatatggttctcctaattaagtttctcaagagcaataaagagtttctattgcaaacagaaaggtagggggaggggagcattcctatttaagcctgagcttcccgcaaatgacatggctcccctaaggggttctgaaatcaggtattggaatatagtagaatcttctggtctccaaaggaagtccagccagagagcaggtaacactaactttaatgcagttagaatctgtaagaggtttaaactggctgcctcagtaagccccagagacccaatgagagggcacaagctcaatgccatcattcacaaagaacatcagttagcagtatgccagcagatctggcacatggtggtgggggtggtggtgcagaagagggagataccctagtcacttgtcttcagatttattacagtaaagccttaatatcttcatgccctcgataaatgtgtataggcacacctgtatcttttatagcaagtaccatgggttctagtttcagttataacatttactagccaggttcccttcagccaaccactttaacctttcagaactccatttttccccctcaaatacgaaacaagcaataacaacaaatagggaatgaggcagtggggagtaatacttgccctgtatctaacctcacaggatttctataagaaccaaaatgaaataattaataatagtttcacagtctttaaggtttagcaaacatgtatataatgttttcttatggctgggatgaggtgcttgacaattctcacatctaacaaccctctgtaaaggtactattattatccttgttttgtagataagaaaattaaggcccagagaggttcaataacttgctggaagttatgatactaggaagggggatttgaactttagcagcctgactcgagtttgtggtactatataccacaatatgcagcctgtcataattatcatatgaacattaatattatataataactaaatttatgtttatctcaatttcacaaatgaagaaaatgaggctcagagaggtaagtcacaagccaagatcatcgagcaggcaaatggcagagccaggatttgaaacttaagtctatgtgactgcagaccctgaactctcaaccacaaagttaataaacttcaatccacaaatattgactctgcatctactgcgctccaggctccgtgttctaaaacactattctttttttaaaaaaagataaggtggcagttattcgcccaggagctaaaaggttttcacatcatctccaggccagatcagccccacccccactctccagggcaaagtcccagcctcaaacagcaggtgcccagtgatagctgatgccaataacgacaatgatgacagaaatattttaaatgttgggctcttgctttaaaagggaattagactactcaatttccagggcaaaaacgtcctacagggcaaaatgctgtttctaaaacaatgtgaacaggtgtggcctatctcaacaggtgaaatatttgaggaacattgttcagtcctaccagcctttcaactcccgaggtaggtttggcccaattcaacctggttcttcccgggctttcctgatagtcttttatcccagggaaacccctcagttggtcaccctagagagcaaggactaggttttatactcttgaccaatacaaacacacacagtggttctagcacagtgccttgcaaataaaaggacctaatgtcttagtggattcaatggatggaacaatattttattattttcaaagtacactcatttccacttcataagtgttgccaagcagcagtccctgcactgctaaaatgatgatgtgagaatcattttaattagcactttcattgtttgtatgcaaatgcacattcctaaagtgggttctttagaaagctttcctaaatcgacatccctcacagtgatttttctccttaaatctttttccatagacagtaaagagataaatttcaatccagcctgagtcttaatgatcctgaatctttaataatggaattaaggtgcttttcttaagcaccttaagaaaagcaccttaagaaaa

SEQ ID NO: 54776 - DNA, 2915 bp, Homo sapiens
gctaaaagaatctgaactgtcactgatgaatcactatcagtaatccttcagaaacctctgagaaaaggaaaggtgatgaaattgaggaactaaataattaacactaagaagggtctagaagtatacactaagaagcttgggatcaacatcctgaagaattctagcctggaatattaaatagatgaatacctatgaaaagaaagtgatgactctattttggtgtcactccaaaaactgacacaggctcactgtcaaaaggtatcaattaatttccctttttaaaaatagaattagaccagtagctcagatgagcgtaacttcacagacaggatcccaacacagttctgggacccccacagagccccttctctctcatttataaccacagttccctggcaccacacaggaaaattatgcacatctggaggagaggagagcttgaggttagggtgcaaggaaggctgccacttaggatatcccctaaaggtcacagccaagcagtgtgatggctgacaccttagaaatacatgcttgttaaggcctgctagtccaagctggatcagtctccagactgtcattctcaaaactagccagcataaagaccactgctggcaggaggggaagggggatgttaagaatattttaagtgtggtgacacccttctcactcagtgacctgtgactgccaagccaagatccctgaatggaaacgcctggttggaactccttcttagctcatcagtgagacaagcatctttggagctattttttccaaggaaggggacgtccctgaaggaaatgagtagatgccaagcagagaatatagcaaatcaaaatacttcctgacacagccaaatccttggctgatgtacttccagctcaatgcctggaactcaagaccagcccagggaggatcagacacaggctcccatgtggctagaagcgaagaaggtccaaagtggcttcagaaatctctaagactgaagacaccgggcttgttccaagccataggatttccaagctaaagggaagatcgtacatcatcttcttactttaaaaaaaaaaaaaaaaaaaaaggtgaggggaatatacaagcgctaagggaaacaatattgcagagctccttaaagtggtgaaggatttaaagactgttcttcagagcccttttccccaaagcgacatttttagccatgcactgtttagttaattaacagaggagaccaaaggttcaaaccaatcagccccactcccagcattcagtcctggaactgaccctgaggtacttcagaccagggtgatggggagagaggtcagatgatccgtggcgatctggaaccaacctcacaaaactgcgtcatccatggacaggctgtaagggaactagccacaccccagcctcagtcacgctgcaaatttaaccctaaacagaacatactaaacatcagtgttgctcaaaagctcggagacgcactttggagaagggaggtgtacaaacaagcatttctagatggccgtcttgtatgccatcttccagggatgggtccagaaaccagcagatatactttggtttgttttttttaactgacacaaaatggttcggagacatgcccactctctctctctctctctctctctctctctctctctctctcaaagattcccttttcaatgctctgttggttcttctgcttgccccaagaaagaaacctccatcgtgcactaccagtcttcaacacatgctaaatcggggcaatgtggagacaggggaggcagtgatggcagccaggaggggacgggctgaagcaaaagacactgaatacttgaaaccacaaatcctgaatctgcaattcctctatttacttagaaacagttgctgatgcttaccctgcccaaagataaactaggacaaaccggaaagggaaggggaagcagtgaggtaaggcctgttgtaaacctggctccatgcacgcagaggaaaagctccccgcgtggtcagaacatagttttcctcccgatgagaaaagttagataacagtacgaatagtgatattaggctgtatccaggcactaagcagacgcagagggctgctgtcttcacacacataaaagacatttggagaacactgtggtgtggtggaaagagcatggcatttggagtcagaggaggtgaacttgagtcctggctcagcctaggacaagctgtgtgacttcaggccaggcattcaacccctctgagtttcaattctctgtgaactatgaaacaaatgacttagactagctgatcttgtaggtgtctttcagctctatcattctgttatgctactaatgatgcaacaaaagagttatgcatccactcagcaagcatttcatgaacacattctgcatgccaggtcctccgctgggtacgaggcacaatcttgcacccaaggaaccttccaatccacatatgcgagagacttacaaatgagtctgtacagtacaaagggagagatgcatgcacagggtgaagggttccagcagaggagagggcagacagcaatcagaaacagttgcccgggagtgattcctgggctaacacttgaggtaggaggtaattaggccaaaggaaagaaaaaaaggaatagtatgtacacatgatagtatgcactcaggaatggcccagtagggcatgtggggtgggaggagtgctaagagatcaaaggccttataagccaaactaagaaaagctactgccaagcacccccggggcccctgtacctcccctgctgttcacctcaacaactccctatatggccacatcagggtcagaaacagctcctccaagtccccttatgtcaacagccaagcaaccatcccacccctgcccccagccctctccttttgtccctgagtctcatctagctccacctgccgccc

SEQ ID NO: 54777 - DNA, 1427 bp, Homo sapiens
taccatgctctaagtgccattataagctcttagccaatgactgctaacacaggcccacagcaaaacaccccctgcagcctccattacaccatcctgtgctgagcatgttctacaaaatgttttgttttctctgctaaagcctctgtgccatttaatttttgtcctggtcacaattttgactcatcagagccaagagatggtgttcaactggctttggacccaccacaaaaaaaaattaagaaacaatataacccaggattgtaaaatccaagtattagggtagtccaagtctcatgagcaccggtgaagacgggtaggcttacagacctgagagctctagtcatcagaaatattctgcgggatgacaagaagatgaaaactctctgcctggggtttactctgtaccatctactaaacagagctacagaatttcctctcagtgcggcaagttcaggataataccatgagctggtgagtacataactcactatatttagttcttctttcgtgtttattactggcagccatgagaaataaacgatgacattaggaacccatctctactgagactctgccctttgaaccccacagaagttgttacatggccagtactccaggtttacccagcactgagtatgtgcagtatgtgacagaatagtggaattctagaatgtcagagcttgaggaaggcccagacatgatctcatttatctcagaaacaactaaagctcagagacagcaggttgctgtagagttggtggcaagtcacgtataccaacagtctgatgaactctcaccccaaaaccaagaagccaaaaatgaaaaaggttgaaattcagtctccatctgggctagcatttagtcttcagcagtctacaagaatgatttcagaaaggaaacgacgacatgagaagaaacagaaactgtggatcatgatggctcataaaataggaatgactcggattaagttcagttattcaagttttaggttggttgggctttcttggtggtggtggtggtgtgaaattccttttctaaaatctacagatgctttagaaggtaccagacccaaaaactaattctttgtttcattaaaacactggtgacttctgttgtccagttttatatttttgtctattaaaaggaaaaaaacctaagaaacattcaactcctttgagttcagtagttcacttctatttgaaaaataaaatgaaaatatttaagagcaaatgtaattagtaaatttgtataaatgttcccaacatggtatttttgtgagtaaatcacattatacaaaggacattatatgtttcaaaactaatataatgacttgatatttgtaaagaatactttttaaaaattacattgttgctttctttccttcctcttagttaaaaacacacaaattccattctttcttttttttt

SEQ ID NO: 54778 - DNA, 1218 bp, Homo sapiens
ccgggacaacagtgcgagaccctgtctcaaatagaaaggaaacaaaaagtgtaaaggtgcttctgcttcctttttaaattaaaaggattagcaactcatataagagactatttccaacttttgagtccatgttgggacaattctggaagttgtaaattttattgaagttaggctgccttgaacatagctatcttccccagtctttcacctagatctaatcagaaaagccatcttttacagcaggcacctacctgccacacagagctatccagaagcacatttagcatgggatgtgtgactaagcatggtaactgggcaggggaatgtcatctcctaaaaatgtagaagtgttatacatggaaattgtgtacgtgcatatgtaccttaaaggggttcctgaccctttacccaaaaagcctaaaaaccaatatcttactgattataatagtgaatgctgaattatccaaagttcaacaagcacaaataatacaatcatttttttcaagcacacctctgcaggaatcattttttatttaatcactgccataatcagtagactagagaaattctctctgagtgagaaaaacatggagtgagtcatctctatgttgataaggagacagcaggatgagggcactgctgtgaagtaggcatcaaatggtgccttgtctaaattagtcagtggaacaatcagaatgatttcttcccatgacgagcagtaatcaccggagatgatgctgatctccttgttttagtgacgaccccaacacaatttaatgtttacttctccaaaccagggcaaaaaaaaagaaaaaaaaaggaaagacaaaaaatgtattccactctctatttgtagtcactagatggaaaaagagaaagtatcttgtttttacatgtggctggcaaatgtgctacaacttcctgtttgtttaaaaagtacaaatgcaaatgtgtaaatctcttggagaaacaccaacacctaagagatgtcgctgttgtgtgaaatggatatcatgtcattgtaggtcacaataactttggccagaaagtggccttatgaacctctggtgatataaagcaatatggcagcccagggagatacttctagacaatgacccctgagaagctgcccccaatagcacacactccaaacagcagtgtggtgactggcatcattggttctggacaccgaattagaattcagttgccaccctactc

SEQ ID NO: 54779 - DNA, 2292 bp, Homo sapiens
gctgagaaattgtgaccaatatcggcaagactccctggggacctccccagccagtcagaaagaccagcctcaacaaggcaggtgtgacccacctgttgagacaccaggaactggtcacaggccttttcccagcaaatggctgctttcctgagatctttcaaacctaggcagggaatcaccatctgccctgggcactgcttcaaacatcagaaggcagctgatattttctgccctcacacaaggccccttaaggtagtcaaaaaatatggacaatttcaaggtaaccaacagcttggccactgggctaaaaagaccttgctgaagccaggcatggtggtgtgggtctgtagtcccagctcctcgggaggctgaggcaggagaatggcttgaggccaagagttcaaggctgcaatgtgctatgatcgcacctgtgaacagccactgcactccagcctgggcagtattgcatgaccctgtctctaaaaaaataaacaaataataagtaaataagactgcgatgcttatttacttaccagcagtaccaggcgggtctttttttctgcctttgactggtactcttgcctgaacattctgagtgtcagtcttctggatgttactcttccgcagaagcattgctctgcccttctaggagccgacaggaagaagctccatgcacagacctgcaagtcccagcaggctgtttgttctggggcctttagccactcaaagaagtcatctcactgaacgtgaatgttggacaggcagctcacacagatcgattcgactccaggaggcacagacagaagaaagcactctctttatctaagccaaacagtcactgctccttcccttggtttaaaaatcctctctgtgctaaaccacctccacctcaaagcagtacaaaagagcaatttcttggagaacaaaaattaaaatatccttccccaataatatttctgtcagtaaaatgtggcctagaaactcaacctcttcttccttctcaacgcaaatttcctttctatttatggaaaaaatacagtctgaatgaattgccacatttccccactaaattcaaactgcctcaaattatttttgaagatagggtatgaagtaaataagcactgaatctgagaactctgacatatttctttatttttaacacaggaaaatgatctgggatttgtgcagaatgaagtaacaccaagcacatgctgactccagcagatcagccccaggccccctgccacagagcatttcccccatcactcaccttccagagtgtgcttctcacattctactgcctcaccatcctctgttctatgccccagatagaacagaccagtgtcgcctgaacattactgggtctccatgtagcccagtgtccacttggtggccatacaagcaagcaatccaactcaaacataataaaaattaacttaaaatgttaggggatctcttgtggagcaccaaaaggagggaattaaattattaatgcacaggaaagtatcttcaaaatcccaatgcacaggaaagtatcttcaaaatcctttctccttctctaccacttgatatcctaaacacagacagctcctctggaaacttccttttacttttcatctcctgtgctgataaacacttcttgcctctccctcctcctctcctttggcctccattctctcttctcacctacaagtattggccctttcagatgccagtaggtgcttacacacatacacatacacacacaaacacacacacacacacaaacactctgaccatccctacttcctagttctctaattcagcctctactcattgccctgactccatatgaaaaaggcccaggcactaaactaaccaagagaaacttctccttagaaggtagtgttactaggaaagttgagtaatagacaatagaattctcttttgcagagagaagaggagaaagtccatgaacactcacagtggcatgtggcaagaggtggtggatgctggaagctaatgcctagtagtgctaaatgtcaccactcagatcagctgggcccagcttcagaaaagatgctctttatatccaagttaaacctctgctgcagacagaaccccagcacagccattaataaaccacaccaccctacctccaaaagtttctcaacacactgcctggctatatccatctctacattacctgggataacgcagtaaatagagaggggtatttcccaggtctctgtctatagcagagattcatcttggtgctgggagaagttaacaattacctgaatatgaggaact

SEQ ID NO: 54780 - DNA, 2626 bp, Homo sapiens
actcaggcaaatagctcctgttcggggaaaccagtaaatttccaaacagtaagatttccacaaatgatattggcaacttcgggggtcagggcgaagtagtggaccagttctcatcgaagagcagcaagatgagacaagtttcacacagtggcaaatgttccttttggacttgcttcaaacctgtgtgtgggctgattctccgaaataaacaaattctcttgtataaggttatgcggtgactgagagggtgaggattctgatggaaagaaatcacccataagtcacctttgcctaagcaggagggtcagttctgcctgccctgggtcttgacgcagtgaaacctcaacagggatgtggggcgcatgtaacccagatggacgggtatacgctaccgttaagttcaactgcacccttgactggtatggcatttcagagcattgagacacctttcgatccagcaaagagccaatcctggctccaatcagcacccatgagccgctgagggaggcacaatgtcccaagcagcagttggccaaacacacgtgagggaggtgcagctgccgagcccttcatgtttaccaggaagaaagagtgttgattttgcagatttttgataatgttttcacagccagtgttattcccaacccatttttaaatgcaatctgaacaacacccctttccacactggattccttgtacttaaatggttccagctacctcaggcctgagaaacctatttctctctatagaccacacatcagtttggctgagggaagaacagagggaaagcaggattgcaaggatggcaggtgcagggctgaaagaagaaaattaaattcaccagacatgggacacctgggctgaggacctttacaccaaggagcttaagatctcccttggccacatgggaccatctagaaaggactcttttaagtctaaccatctttgggtctgtggttgtactgtattgattccatgttctcattttaagtgagctaacgaaatgcagcaagccatgaaaatttaaaaggactagaatgaattgagaagttatttagactgagagcaaagaacaggcaaagcaagtggcaatcttgttggatagatctggcatgctaccacacaagcaacccaggctagaaagagccattgacaaaatgctgacagtctgcccaggcccttttgaatattgggttcttggattatttcctaattttttttttttacacaatcttgaacattgactattatgtagaaaaaaagaaacatctgaggggaaaaaatacatcctcgggagacacaggaagaatgccgtttgaagtaagaatcttttttctctctgtctctgacacacacaaactcatacacacacattcaactagccttatgagtcatcttctgccatgactgatgccagctaactctgtcctgccagcaacctctgccacccactgatgcagtggaacagtgtttgaccagctcccttcctgatgctggtttatttctggctaaaacctctggtttcacttaggacccagacttgtctggggttccccctggaagtactatttgatggcactgatactcaaagccctatacctaaaacatctttgcatctaagagatactgtggagatcaagccaattctagacccttattgccatggttttgatatctgtcaaaccaggtatcaaacagtggtcactccaccccagaaacatcacggtgaaccaagttatccataatcatcgataactgtatgcccaacaccatgcagaccccacaaccttcatgatgcttacaatataatttcagagataaaatcagcccaatggaagctaatcagacagccatacaaggcaaaagaaaaaccagaagacccatcatcattcatagagaagttgtgagcaggaaccaagtatgggctacaaaagtcacttcgacttcagattcatactgggccttgaggcagaagtagagtgtatatgaggcagaatatcgatggaagacactgcaggtaaaaagacctctttacaggccataatggaaactctgaagctggctaaccaagaaggcaaccattaagcaagccccactcccctcccacactacagcttcatctctcaaatatggggcataggctttcaggcacagactctaaagaggacagatgtccaagcaggggctcgtgggcactgggtagctggagtaaagtggtatccacttgtcagcagactgaaaagcaggtccaattctcttggattatctccctaagtatgtttctcagacccctgcatcagaatttctgcgatctctccagacctgagaaattaaaacctttgaggggatagccagggaatctgcatctttagcaagccactcaatatgacaggtaaaacccactgaccttggtggagggtgggtgtggatgtcaattcagggctatcgtgtggccagacagagctgagttggcattggcgaccctaggtcagggactgtgatgtctggagtagggtggaggcagctactctgctcccttgggtccctcaggacttaatatggccactggcagtcaccatttctcggggtgactttaatgatcccactcaatatgatcccaaaaata

SEQ ID NO: 54781 - DNA, 2349 bp, Homo sapiens
taaaagttaccagcccacacccatttctcttccccacgctccacaggtatactggccacaacaggggtgaaattgactttcttttcatctggtccattgtcactcacctcaagtgactatttccaagaccatcttccattaattctggattttcaatgcctctctgacacagaattaagacaacagccctcaaccgacaaacaggccatgcgccaaaagttcattttcaagttggagggttggaactcaggttgcattttcccatggacgtgacatggagatagttgttggatccccaggtcaagccacaaagctgtctctgagagggagaggcagaggacacaagagtgtttggcaatgggccatagggttaaaatcccagctttctaatcagtaaccaacaggagacaaaagcccaagttacttagcctttctccgagcctcagtttcttcgcctgggaatcctaatactgaccttccagggttgagaggattcaatgaaaatgcacacagttgatattcaacaagtggctgcattgttgttgaactcctaaagtagaggccatattctatttttgccctgaaacctatgcaattgaaaagaaataaaatacatctgaaattataacaagactgactgcaagaggattaactgcctcctaaaggaccaaggaaaagaaggaagggtgttgggctcaggggatggcacaagagtcgggtccggccctcacccactcctcacacctttggccttccttcagctcacttgccgcttctttgggaaccttccttggacttccagcttaggtcaaatctctctagtacctgcttcagtagccccatgtacttgctcttcatagccttacactgattataatgttaccctcatttgcttaatgcctgttttccccacaacctcacaaagcccatgaagtcagggctcaggtctgtttctgctcatcaatgtatcttcccctggtactttgtcctgtgcctggaacacagtaggtactcaaatatttgtagaatgaatcacaccagagcagctgggcagggaagaggacgttgtgcacagctgactgcacatatgtgcagataacaaattggcggtctgtgactcagggctacccggaaaagcacacaactctttttctgccccaataaaatcaatctgctgctgccatatcactcagccaaaaaggctgattattaaacgcacaagttattaaacccaaaggcatcctcttccaatgggtgcacatgccccaggctgctcaaagggcatgtgctgaatgaagcaaaatggcacaggaatccaggcaggtctgagatgtgctgcagttctccctacctcagtctcaaagtggagggatgccagcctcaccacagctggcagcctcactataccttggagctctacagcaaggtatggaaaataatgctgccagctgcaatgtactgagtgtctacatgtaccaagcaatagtcctgggtgatcctcaaaacctaatgaggtagttatggtcccctttctacagatgaagaaactgagactcagggagaccaggaacatactcatgatcacatagtgaataagtagcagagccagaactattaatagaacccaaatcagatcgcaaagtgtgtgctcttagccatattcagctatccatcaccatattaggtataagtttctctaagagtctgtgaagtatgtacagaccttggagactcaatgcaacatgatataaaacagaaaagagatacaattctagtgtggaatcttctactactatgtgacccagagtaagtcatttcacctccctgggccccagggaggcttcctccccactaatgttaaagaatgaactagatggccattaagagaagagataggatgctgttgagcacacaaaaacacgtgccagttagaacctatcatgaaaccacatctgcctggcctttacctaggacccagccacactgcctctcagcaatctctcacccaaaccggaggttagccggaaactttgagctttctggtagggagggaaggaatgacagaggacacttacttttctactaggccccctgaaactggcttggaatgaatcaaagataagtaataagggaaaggagactgtttaccatacatttaaatatctaaacctccctccctcctgcagagaactgaaaaaataccatatgctgcaaaagaagcaggtgtcagtctccaagtcttccatgggctcacacccatcagcagtcttctgtgcagccccacctccctctgggatgtgttcaacatacacccaagaccaactgcagggactgccttcagaggccaag

SEQ ID NO: 54782 - DNA, 1165 bp, Homo sapiens
gagcaagactcagtctcaaaaaaaaaaaaaaaaaaaaaaaaaaaaaactgtttccacagtaccaacaaatgagaacccacacagcagctattaaaacactgagaactccctggaggaccctacaaagacggtcagtttggaaccaaagcggagattccatttgtcagagaagttgaaacctttggctcccatgttagacaatgcaaatgacctcttcagaatgtaggaggccaagagagaatgactcagaaaagggaagccagtcatatactccaaagccagagatgaaaggctgagatgagtgtttgctgtcatgattcagctcttaaacagattctgacagccacattcaggtgcctgttaacaaggcttttcttccttaaggaatatcaaaaacagcctgcagaaacagttcataagcatacactgtcaagattctggacacttaaactaccaagcagtttgccgagggcatcactgcaacgataaaacattcaaaaagctaacattttattgtccagttcctgtagacatacagctgaggagattagggaggaaaagattgcaggttgaaatcttgtagcccagaggtcccaaaactctaagatgtttaagaatcacctggagtgcttgataaatgcagaaccccaggcccagcccctaaaaaggttaactgtatgaacgcaaaaaaggcactgccccataaggactccatatttcagtaagcaccccatgcctttcaaaggtaggtggtccctagacaactcttgaggaaacgctgacctggtccaatgggctatttttgtaagtaagaaaaatgaagcccaaagtagtgcagtgacttgcccaagtccaacttcctaagtccaataatggctccacaaggaagaaagctagaaataagaatagatgcctcacattataacccaaattgctgaagagcatggtcagcccctagggcagcagacagcaagctaggtccttaaacagagcctcttcccaatgaaagaacctgcaaaagaggtcccctggaaggaagactgataagcgaatagcaataactggattcagcagggcccctgtgtttcttgccacagaactctgtctacaccccaaacactgtcacctgcactgccacttcctattcacctgactgtgaacacct

SEQ ID NO: 54783 - DNA, 1267 bp, Homo sapiens
gaaaagagagaagatcccaaaaactttcagtgagaaatcaggttatccataaatgatcaagaatcagaatggtatccgaattttgataccaatattagaacctagatgacagtggaatgatggcttcaaaattctaagggaaatggctttcgacttcaaattctagatgaatcaaatcaccaatcgaatatgaatgtagaatatgaacattttcagacctgtaagcttaaagtgatcaacttccacagaccctctctcagaaacttgtggaagaataaatcaacaaaggaaacaggatcccacccaggataaggtgagggaattcccaggatgagtcatgccacaggcctagaggtcaatgggcaagaacaaaggagacagaatggaggcctataggagggaagtctccaagcgggcgtaaaaaaaaaaaaacagtaataaaataaaaaggaacaagcgcaggcacggtggctcatgcctgtaatcctagcactttgagaagttgaggagggaggattgtttgagggcaggagttagagaccagcctaggcaatgtagtgaaaccccatctctaccaaaaaactttaaaaattagctggacatggtggtgcctgtagtcctagctactcaggaggctgaggcaggaggatcacttgagcccaggaggtcaaggctgcaatgagctacaatcgcacctctgcactctagcctggtggacagagcaaggccctatctcaataaataaataaataaataggaacacatgttataaaacaaatgtcttaagatgctgtcaaatactttgagaattagcaataagtacatagaaactaagtaaatagaaaatgtaagataattattaactcaaaaaatgtacaagaaagaaaatattatagtatactatatggctctgtcatgaacactatttacacagccaaaataatgtaagcaccaaatatcaatgtaatcaaaaactgtgatatatctataatgagaggatagggagaaagggaagtattggggggcagaggagaggatctaatccatagtaagacatcaagacataacatctaaaagtaacctctaagctgggcatggtgactcacacctgtaatcccagaactttaggaggcccaggtaggaggagtgcttcaggccaggagttaaagtccaccctggcctcaagcagggtctcaacatagcaagaccctgtctctacaaaaagaaaaataaggaaaaataaaaataacatctaaaatggacaatc

SEQ ID NO: 54784 - DNA, 1615 bp, Homo sapiens
agcatgcactggtgaatttcaaagccatcttacgacagcggatgcatggggatgcagaattcgacagcacattcccccatgaaggaaacataatgacttcaagcctctttcccctctatcttgaatggcgctaccacgtatcaaggaagccacatcggaaagcagcgaggtggtagcaggggatgcccggggaattcggagaaaggagttgcttgctgtccatgtcggtgatgagctgcctagcaagatgctgtcagccactcggggagaagaaggggcacgggcggcacgggcaggcgccgtgtccccggcgcatactagtccccgttcattcaggcgggtccggccaaccgcgtcgtccttgcgcccctcccgccgccctctccaggggatgctgatgaatgaacacacctgagatgcctccatcccgccgctcgctccctccgccttcctctggctgctgcagaggtgcccctcctcggtagtttcactttacagcacaaacccattcgggctttgatgtctcctccacccacccaaattgcagccaccctgagacgggcggacattctctcctagcagaggccatgatcgtactaccccacacccaccaaaaaaggaaatttaaaaacccccaaccctggaagcccccagatcctccgcaccctggggaactttccttgaaagactggggattcgccgagcaggcaggatggacggttcggccgcgagggaccaccgctttccctgtgcccatggggggatgctctgggggagggggtcccccaagtccctccaacagctggccctttaaatgcgcctcctccgagcgcggaacaaaggcgccgcccgcgggggccgagccgcgcacacccccggcgctgccgccgccgagcgggcaagcgcggccgggcgggcgagcgcgggcttaccttgctggtcgccgggcgggcgggctgcgcgcgtccgccccactcgcactacacgctgcagctggccccgctctgtttttctgggactcagcgctgacttcaccgacactccgcggacaaccaatgggctgcggtgcccgccccctcattagcatgcctctggaaccgtccactctggcagcgcccggccagcgggcggtgccgggggcggggccgggcccagccgtgacaggaaggggcgtgtgcgcggatgggaggcgaagaagtgtccggcgcccggctcctggcattgtgagcccgccggcctccgccggtaacgggcgcgcgggcctagtaaccctttccgtcctggccgggccggacgctggcctggcgcgccttctggtccttcggaagggtcgcccacggggagcttggaaggaaccttagacgtaaaataacagtgataagttatttaactcctgggcctcagtttacccatctgtaaaatggcataatagtccgacttcgtaaaatctagtgaagattaacatagttaacataggtgatgcattttgatcagttcctggccgtcgtgctacataaacgtttgctgttgtcattcgtgtgctctgtaccagccagtgtgcttaatgcttcccggatatttcctcatttgatcctcttagcctgataagagagga

SEQ ID NO: 54785 - DNA, 1465 bp, Homo sapiens
tgtgtctcgactctgtgtgtgtgtttagactccatatcatcagttgaagaaagttttcacgttttgactcaagacatttctcaatatctctttacagactaaacagaatgcccttatctaactgatttgaacagagaagtgaacctcagtcccagcacagttcacccacaaacacatgctcggtatatggctcaccacttaaatacaaagatccgatgggcctcaccacctcagagggcaggggataatgatgggggaaggacgaggtggggtatgtgggtgcgtcctgctgtaacaggaagaccccagcatacacagaatgccatactgcaaagggagtctggctttgaggaggggatgatgaacgcctggagggccgcggggaactagggacccaggcccctgagagtcagcgtgcggccagctaaaacccgcggcatcccggcgctgccaccaccgccacccacgccacccaccagtgcaggctccatactcttggaaagaaggggcccgcggatgcctgaagtctccacttggcccagttccttacatggtgtacccaggggaggccggggaggtcagggcccgtagccatccgtagatcccggggcggccgcgcaccggcatatgggagcgcgccacggtcttgcagcgcgccctgggcggcccgatgcagccgccatccctcggccgaggcccacacctacccatgggccagatccccgggccccggcacctgctccggcagcgtccccgctccagcggcccggcgctcacgcccctcgcgcttgagcctgggcgcgcaacagcttccgcagagacgcgggcgcctagccatccccgccgctcgccgcgtaccttcctcaccaccgccgccttcgccccctggcactaccgcgggtccgcactccacgccgggctgattccggcgctcgctcactctcttttttcttccgtccacgtcccgcacgatgacgttacgtcagtggcgtaagagtaaacctgggcagccggccctacgctgttgacgtggggcgagggcctgtcctggagctgcggcgcggcaatggcgtaggcccctttcgagaatcaagccagcgctccacgtggcgggccagcccaccaggccccggcagcctggaagaggcgggactcgagttcagggggaacgcccacgtcccgggaggggacaggggccggagacaggggcgaagacaccttcgaaacgccgccccactgggccttccagggaggtagaagaggtgcctggcaccctcagctgctggtagatttcataaggtgtgtttgtcaatgttaaccatttatatcccgggcacacctcggaaataggttggatcaacttacatatgtttgttacttcaggcacatcctgggaatagattggatcagtttacacacatttgcaaactttggctccttaaatggaagcattttggcactgcaa

SEQ ID NO: 54786 - DNA, 1579 bp, Homo sapiens
agaaggggcggggcaggtccaaaaaagagtgtcccagcaatatcggccagatgatgccaaagaggactccttgggcacctataggacgacacgaaggtcttattctactggccagccctgctctagagaatcagaaaaggcaattcctaggaaaaaccaagggaatgtcctaggagtggaagtacgggtgggaggcacaaagactaactcttcttacatccaaatgttacccgttgtaggccccaaacccctttaggattcagtctgagcaacgaagctcaccttacgctgcctggaaggcagaaggagaaaactgtcctcggatggagaagatagcagtccctgtcgcagcagcaatttatatcgcaggctccaggagtcaagtcacagacacagatcggtaagactatgaaagtacgacacagagtgagtgggatgaagatccccaaactctcccaggtgctcaccctccttcttccgacagccccactcctgctttgtggcagctcaactttgctcacagaattttagatctcagaagtaagtttccacccccacaacgttttccctcacctgggaagaggtccacagtcctattcccaggggccgagggagtcacgagagtagggaccactgtagggagtccaggcacggccgggcgagttgcagtcgcctctgaaggggactggagggttccgccatccgtccctcgctgcagctccaaagacgtgggcactgcccctgatggggaggaagagggctgaggccggacgccatcggggaacaccagaaagaacacttgcaggagcgcgagctgtggggtgcgcatggggcattcagggcctccgggtccgacgtaggcctccgcggtctccaatcgcattgccagagcgtgggtgggaggagtcgcatagcgtctgacgccatccgcgtgcctcttctcattggctcatgagaaggctgagagctcttcaaccaatcgaaagtggggttgttacagctctttcagtgtccttcggtctgcgccctcctccttaacgcgggccgggccgtgcctccgttgcctggcaaccgtcagtgacgaagaagcccttgcgccttccttccgctaggtggcggtaggagttcggcggaccgagaggttccgcgcccacttcgcggcccagaggactgagcccggcctccggtgcaaggaaaccccagaggccggaactagaattgcaaattttttttcaccccggattccaacggtgagaaaccctttctatggaagaataatgttctcaggtgggggaaacacacctaaggtcacataccttaaaaaacagtctcctctaaatatggcttttttaaaaaaaaaaaaaacacattagaaataatgttcattcagctccttacattttaacattgagaaattttgaaaaccctaaagaaatgcatcaaatcattaaagatggactgcatgtttgttgttagaaaaagcagtgagagaaaaataagaaaaaagggcaggaaaaatgtgagaaaatagggagagaaagaataaaaaaaagaaacattgtctaggaggtgagaaaat

SEQ ID NO: 54787 - DNA, 1288 bp, Homo sapiens
acacaagacgactgttggggcataatgcctgacacagaacgcagttaaacactgtggaaagcctgaatgagtgaaagcatacaaaccaccaccgtgcggctctctacactagcaagtttccgaagttcgccccagccggtttccctgaacaagttcccaaccgcatcacgtttagtttatctcgttattttaactcggagcgaggcaatgggaaaaagaaaaacaatgagagccgtactctgtttattaagcgatgaatgacgacacatgggtgagcgtgtctggcatgccctatttaagactttaaacatagtacattagtacgctaacagcaagctctggaaataaaaggaaccgcttgcatatttagggggctcttttgtaagccacaaaggaaatcacctgaagtcaaagctcccctcttttcctagcaaggcagggacgacggcaaagagaaagtaggtcccggggcgctgcaacccgtgcaacttgccggctggcgtcccccggcctcgcgcctccacgccctgcgcgggcgaccgctcttgccacaacggcgccccgcagcgtcctccccggggacgcccgctcagccgggagctcgcggccggtactcacccgctgggtatactcttcttcttcaccaggacgagagggatgagagacccacgccccaggcaaccccgctctcaggcctcctccagaacagaccccagggtacgctacaactcacacgctcacgggcagaggcgaggggcgggggtgatagaccccggcggcgaacagacttggcgcaccgaagattcccaaaggcgcgtgctccgctccctctgggtcctggcaggccaggggcggcagcgcgcatgctcctgggtcgccgctacttgcagcccgcgggcgccgtagggctggcgcagggtgcggtggggcggttggtgatcatcctagcctgcggtagatggtgcgccctgccttccctgcccagacgtaagaaaagtgcactgtccgtccaggtgaatgtcgggctgctggtgaaggtttctctgattcttccctgtcagacattcccgcacttttgtggagctctgctgcatgggcagaactagctgggctgggataaccggagccggggccgcgcaggccgctgggacttgtagttcgggggcctggccgaccggtttgttagccaatttgggaatgagtagaattgaaaatcactcgagagcagtgtttgatttgcaagaaatacgggtcggcatattattaattcagtgcctactgtgtgtgc

SEQ ID NO: 54788 - DNA, 1512 bp, Homo sapiens
gaagcggttggtgcaacgtgaagtaaggtaaaccgaatccatgccgtgaagacttttaaacgccaaactgaggcgtcggaactttgctccgcgggcatcgaggagccatcgaaggttctcagcaggtgagtggcctaactggattggtcactgcagtgatccaccttacaatttctccggcgctctctgccgacctcagccggcgatcaggccggcttcgcagtaggtggcggctgagcgccccggcaaccgaagcgccaggccagcccaggccacgccgcgccgtgcgggatgctgaccgtacccaggcgggagccgccgcgccgccgcctggcgctgcacctgggcccggcccggccgccaattggacggctcggggcgaccccgctgtatcgcgagacgagattggcagcggcggggcctcaagtgcccccgcgctggctttgtatgcggagccgcctgccggtcctttaacaatgggcggcgcgagcgtccaggcgctgggctctagctgaggccggcgcttagcggcccactgtccgcagcatgagcggggccggcgtccgccgcacgacggcggggctggggctgtgagggccgcggttccgggtaagggagccagcgtggggccgggcggcccggcaggcctggggtaggcgtggggcagcggaccctcccggggtgaggcgcagagcctggctggcccggccttttgttcccctttctgaggccgcgcggaacgtgcgtttctcggggctcccggggaggagcaggctcccgacgtccatgcggagacccgcggccaggcagacgctcacccccgggctttgccatgggagcgtttcccctcagcggggctatgagcgtgtcacctctccccgctcctcagggagggcgggagaactccagccccggacgcagggagccccagccgggcctcccccagctcttcccgagctcgcacctggctccgcgctttggcaactcagggcccgagtggatccccttttgcccgacacatagtcgagcagtgagtctcagagtccttcggctcttcctgcgggggcagacccggcttcgcgtgtggcgttgggggaaacgactcgggtcgggctgggttgaggaagagtcaagtgaagatgagcagccacaccgggtggcctgaggtcacaccccccggggagggggcgcagagggtcgcgggggagccggcagtgaccgcgcctggggtgtgtcttacagactcgagttgccgcgtcgggctgggcgcgccgccgggtcccatggagctggaggggcagtggtggcgaggacagctggccgccgatattcaccaagcgcttcgctacaaggtaactccgaggcccggcctgccttctccttctgtgtgtcgcgccagttgttctgaatctcggctctctagaaggtctagtcaggttctttactcactatcttccgggccagaaaaggcgagtttgctcatttgctcaaggttaattaacttcttggctc

SEQ ID NO: 54789 - DNA, 1697 bp, Homo sapiens
ttaaaaagtaattttaaccactaggaaatgttaatgattaactcacatttgtttctgtttcactccatgacaaagtctataggacaccctgcagagaggaaaactcacattaatatacccataattttactttcagaagcttctggtaatcaaagacttattatgaggtgtcttcatgttaccactgcgcagtagcaaacttaaaatattctaaagattaatctattttctcatttttttaatgcttttgttaaaatctcaacaagtactaacatgttatctaaatttaaaccttaaaacaataacacgacccaatatgtgaactctgcctattaattctaaaacttttaataatagtttgcttatgtttgagacttaaaacaataacatactgcactacacccatcttagatattttctaggatcaaagtctatctggagcagggcaagctgtggttgagggtggttgggtcagcaggtaagagccttatgaccagctctaaacgcctccacggtgaggagcacctcgagctaacagaccaagcaccaaagggtggaacagctcaaggttgcatttaggagactccagcctcggccgcccgtgactcctcgacgagccccacctctctcggttccagcatccggcccgccccttcctcccaggctaccacagtatcgcccgccgagctcccgggctgcgggaaatgacggaaacaaaaacttggtacacaaagaagggctaggtcagaagtgaggtcccaccctggcaagaagggcgacttttctagaaaaacttagcggcaagttaacgggaagcgcggcgacacagttcctacgattgtggggggcactctgccgccaggcagtctcatcctttgtcctttgagaggcctccttgaagccgaaggctcttaagtgtccctgggcaacccttgactcgatctccattacgggccctcactgacagcagccatgacagttgcttccggatatattgaatcgccgcggccagagtctcccggaagtgacgcaacgcggagggatccgcgttcggcagtgggagaccgaagcgaagtggttcccggaagcggctgcagctgggctgctggtggcggggcgggggtagagtggggagagaggttgtgggtcttacaaccaaccaaccccaacacgttttacgtgttaggcaggcattgtgctgaacacctcattggcaagccatttaatcccttccttacaatcccagcagtcagaaatgtatcacttacattttatatatggggaaactaaggttaagagagggcaagtaaatttgtccgagatcgtatagctggtacttggtgaacgtggtctaacccagacaccgcgttctccctggtgactccattttgtaaaaccagagctgttggcgcatggcatcctcgtaagcccctttaagttaggcactctgttgcccagagaggggccaacttgtagccagtatgctctttatggtgaacacaaggcccacgtgtgtgcctgggtccccttggctgaacctcggatttcaattggtttctgacaccttgcctttgcagcattctccgtctgcagcgctggttacctgaggaaactgtcaatgattgctaggctctggggaacattttagctccgtttaggcccttttaaatccaggactaagacagttggaggcctct

SEQ ID NO: 54790 - DNA, 1039 bp, Homo sapiens
tttctttgttgaaagttggccactggaatctaataatgtggcagctgctagtcaaagtcctccacattcccacagggtttgctgttttttgttgtttgagttttggttgttgtaggctgtactcatgccaagccaaggatcaacctaaggtgtaaacctagggtctcctcaggtgttttctgagcctgtgtcttttcctgggcatgtgtggtgactttcttatttcccctggatatgcagttgcctttgaatgtcctagtctttaatgtttggcttccaaaagggcaaaacggaaaatggagaggaaaaaggcgctggccctttaagtctcctggcagttgcttcagcctgagggggagggacttgcctgccaccttggaggaggggttgggtggtggtggtgcaacaatggctgtccacctctgtgcggacactcctaggatcagaagtagcaatcagcagtcagaacacagatccccagtatttggaggatgagtacttgctccttattgccacccaagcccagcaaactgcaagcaagggactccaggaagaagtgcacagctgcctggctggaggctacagggtgggggatggtagctattgcgaagctaagagctgaaattgacagaaactgcaatttaccttgcaagccttctacagatgtcagagttccaaaatagttacatcagacatatcctgccagtaccacttgttgatagattcctgctgcttcctatgttgccatcttcccagaatcctctcctaaaaacttttcttcttaattctttttggtttggttttgttttttggaggggaagaaattttatttatctgtaccccatgagttttattagtgatttttattattattttttaaattaatctttctgtgtcaataattgtataggcccagtcctcttaactccctttcctgtttatctagcaactgtttgaattattgtgtcagactttaagctaggagctggatgttgatagtttctatttttcagttactcagctgcctgaggaggttggg

SEQ ID NO: 54791 - DNA, 1971 bp, Homo sapiens
cacttattccctccccacattttaaaaggaagataatttatgtagaattatgtagaaagtgaggtatcaattagtaggttggatttataaagaacagaagaggagccacactggcctttggggtaaagccaaccatattaactgtccagccctgttgtcaggtagaggaagtattcgtttgagggagatgtgagcctccctcattgtgaagatagtttttgatcaattattcaatatatacaggtttggagttcagtatgtcttctagaactactggcggcagcttctttcgttgacgtgggctacaatggttgctaaaacctgcgtgccagaagccagaggtggggaggcgccatttgctaaaccggaactggttaaaatctcagggtggagaccattcccagtcagcaagggcttgggaagtgcatacagttcctgctcctggtgtctactctgaagagcacagagtagacgtttgtctgccatttcaccggcagtaagatcagcagctgctggtgagcaaagaggtagtagtgggtcactggactggtgggcgccggggccgcgcgctagatggagaggtcagcggcgaacccagctccatggcctagtctcgtcagaccgagcgcggaccctgccggcctccgttctcttccgcttgtctcaggtaaagcgcagatccctccgccgcagcgtgcgctcccggtagcgctgcgatcagcttttcggcaatacccggatggaagtgtaatggccgccatcagggactcgcaggcaatgggtactacgacaggtattccccgtcagcgggactgcccagaccttttaggatgtcagaacttctagagggccacccagcaggcaaacggcgagtttgtggaccgtcagggtcccccaaacaggtccagggatccgcctcttgtgagaggaagcgcgagttaaatagtcccggccattcagcgcttccgcttaacttgccgcaaagtttttctggagaagtcggggtttttttgccgagcgcttttgccgactgctagagcttacccttactttcttaacctggggttgttttacttccgggctttttgaactctacactctcctacattctaggagctgggtgggagtaggagacggtgtgcctccgcgctccccgcggggcagccgaaccccggaggaaggggcggatcgggcgcggtgtttggggcgaagctgggcgcgcggcgctcgaagcactcactcggcgggtttcgtggttggtggagacagcaagggcgccccgcagaccgcacccctcgagctataggttcgcaggcccgactcgacggcgtccctattgctggcccagcgtatggtcattgggggccatttcttgcagagatgccctgctccctgacgcgctcgctcttctccagagttggccaaaggtgctcttccccgcagaccctaaccacacccagtggcagttggatttctttgtaactggctttctcacatgtagggttcattttgactctattcgttacatggtgtcctctttgtcaagtagacagtctcttcctaggtggctgtggtaattgaaaagtacatagagcgaaatgtatataaggaaaaatgttttaactcttaagtggaccgatcaaacagatgtagctttaaagttcagaatacaacagttaagactcagttttctttttaggtttaaatttgagagcaagtagtgtatgtgagctgttttagtgcaaacattgttgagtatgttgtcaaacgtctaaaaaaccctagaaaaataaaataagtcaatgttcaaggaattcataagaatgttggaatttgtacagttgtcgcagtgataaaacatgaagacaccaaactgtcaggataggaattctattaacttgaaagtgtgcatgttagatctagttactggtaattgttgaattgctttttctgcagcaaggggtctgattt

SEQ ID NO: 54792 - DNA, 533 bp, Homo sapiens
gcttagaagagtatctgacatagagtaaagggctcaatgaatgttagctattacaatgaatttacagtctctgcaattctcagaacaatctaaaggataggtattcttatccccaggtcagaaattggaggctcactcaaattacaaaactgttccaagttcacacagtgcttagggagcaaagccaggattccaacccaggcctaaaggacctcagagtccaaggtcttctcaccaagccacacttcataatacaaataaagactaagggccagaagaatgaccacatgagactgggaaaactcagggccatgtagttttctgagaaatgtccccacacctggaatcattgccaggagcggggaaagttcagagaaaggtgtgcccagtgacagccaaaaacttgcatgaggccatgtgcccgaggtggggccgaatggggccttgaaggatgagcaggatttgggtgagagaataaggatgaaggagtgtgtcttcctccatcatctgagagaggggcttatgtgtcagcc

SEQ ID NO: 54793 - DNA, 668 bp, Homo sapiens
aagccagcagggtgggctgggaagatactatcattagtcccatgatgaggtatagagacagagatcatccaaggtgttgcaaggaagaaaaacaaaaacaaaactgggtctggtgcccaggttggttcaaggaatagtaaaatttccaaaagcacaaaccacctgttatccattattactatcatttcataaaagaaaaggaagggtattttactacccccaaataatctcagaataaaggaaaaactcactaaaggactgttggccactcaacactaggaataaaaggcgtagttgaactttgctctgtagctggctgctgtgcacaacccccaacacttcatgctccttattttctcatgcggccatagaccagtgaaaactctgtcacagtcttgtgttagggaaccagcgtgttcaagcgtgcttcctccgttcagggtagcacctgtggcctggcttcaagtaaaagtgtaactgcaagtcactttgagctaaagggcccctgacgtcacccggggtaatgactatggtggccataatttccaggctgagaagaaacatggtttgtcatgtaaaagtgctttggtcatccaatgggcagaatgtatgaaacagaggctgttataaaaaacttgagctccacagctgctgtaaatatgactggc

SEQ ID NO: 54794 - DNA, 3340 bp, Homo sapiens
actccaacgcatcctaccaggctcctttaagcctactgtcatgacattgctaacagctaacagcataacctgttctccaactccctatggtcagggcactcaccatcctttgcaacctggacccaccttatttgtccaatcataccaggaccttcaggtcccacattccctactctttagtttctgctggacagaaaactctcctcactatcccacaaatggaccgtacttgtgttaagctttgagtgacagcctctgtatttcctccctcccagcacataacatgtttcctccaattctccagtattttataattttacccacctctcaaagcctacctcttaaaagtatcttctctatgaaacctcctcctgctactctaagtctcttcttacattccttctgtcgcttacagcttccattgtatcacccccgcccctcatgagggtgtagctatttgagaccaagggcaagaatgaggtgccttcttgtcccgtcagtgctgatcacacagcagcactcaacagcatgttcttgaaatggttgaacacagctgatgttgcctactgatcccagatcattgatgcatttcacattaccttttaccaagcacctcctaggcataagacctgtattctactgtgaagggttgtccctctgccaatccagactttctcttaaatattgtctcaaaagcttcaattctctggctcattgttatctgtgattacttgtctgctacatgtgtcacatcaccccctgaacatttggctaagttctaatatgtagtcagaatagaaaacactccctgaacagaggggaacatcacacaccggggcctgtcaaggtgggggactaggggagggagagaattaggagaaatacctaatgtagatgacaggtcgatgggtgcagcaaaccaccatgggatgtgtatacctatgtaacaaacctgcaccttctgcacatgtaccccagaacttaaaagtataataaaaaaaaaaaactgttaaaaaatgtgaaaaaaaaactgcactcccagaactttaaaagttccagtctctgaaagccatgatgccattacaatgagacaaaaagaagaccttcaaaagcaaaatttggggaagttgtcttttccatagctccttgactcacgcccatggggccgcttctggtttattctttttgagaggcttgttatggatattgttacattgacatgagggcattggaaagacagatctaatccccccaaacacacttgtcatatacacccacaaaataaatgagacaataaaacaatgaataacaaatgattacagctatccttaaaattaaatagtaacctgcaataaaatgggtgaggactcagtttagagaaacccttccttagaaaagttggttgcattcagattctaaaagttgaccttcagtagaatctaagcccttggcatttgttttattatctttccagagctttacactttattgtaagaggcagctaaagcaagtctctcttgttcctacacatttctttaagaactcagttcacttccctatagcaagtgccacccaatgctttccctaaaagctcagtccacttccctatagtaagtgccacccactggaaactagcaaagcattccaggatttcagtatttctgagatgccataagagcactggggggaaaaaaaggagatgaagaagggtattgggtggggaaaatcttacctcaacttctgactggcggggacggttattttattaagcttgtccattctgtttggtaattgtaagagacacgaataactgtccagtggtcacgtcagcagttcctggccctcctagggagcagcatggtaagcctctggtctcaagggttccggccactcaagtctgatttctgagagtgcaggctgctggcaaacacccctgctctagggagaagtaaaacttgcccgagcacatagtcaagtttcatgtttctacataatcatgtgatctggatagccagccagcttggtgattactccactttgtgtaaactttaataatgaaacctattgggcaggcaaatttctttccagctgctttcttttacaatcagatttgtaaccaggttaggacaagtttctggctggtcactacttcctgtttgtcccaaacacatatagtctgtttccagcaggtgcatgctataactgggaacttcctgggctcaaggaaaagcagagtaatcaagtccatctgaacctctcttggagactttctgcttatttgcataaagttatggataagctttttctacttatagaaccattatataaaaatggcatttttgtgctttttcctaccccccgatgcgggcaatacgtttaaaaataaatatcaggttgtcagtggcatggtggtaacagtttactcagagaattagagtatctctttttctggagctctatttaaaatgggatgggcaattctctgttcatctgggggtagggatggatgactcaggaaaggggagatgaactctatcgtcagatgtgcagcctccttattgcctgatagagtcaggagttacctcgccgatagccagatgctttcaaacaaaccaggatgtacccaaaagtcagatgagaacaaatctaacagtttcacaacaatgcaattcctacatcaggccattctgaagtcctaaaagcagaatgccattcccctccttgcatttgcctctttctgtcctgtccaccacttgctcatcacacccagtgacacgccagacacgaggccatctcaaggtcagacaggtggggtgaggctgggaggagggagccatacctgtaggggctgaacctattcagagaactctacttccctcctggaagactttatatttccttctgcctaatctgaaaaatgctgatttacctgttgtttaaagagcagcccgcagtccagggtcaaggaggaagaaaatgggagggaagtgaccttttgtacctggacacacttttctgcagccattgagaatgccctgctcacccttgtggaataaagtacacgtttccaacatttatcaagggaaccagtcttctcctgggtcagaatacacagcaggacaaagtaaagagctctcagttacctctcctgttgcagacccaagatctggctgaagacagtggggaaagaggagaagacagaagaggagaaggaggtggaggaagaggaggaggaggaggaggaagaagcggaggaggaggaggaagaagaagcggaggaggaggagacagaggaggagggggagaaggaacagcggcagtggtagaggtggaaaccgtg

SEQ ID NO: 54795 - DNA, 553 bp, Homo sapiens
tctgccactgcaagagagattttctgtgattcagcagacaggcctgctctggcatcaggcaccaacttaaccatgaccttgggcaagtcttttagtctccctcacctcaacttcttacctctagagcaagggattcaaaggggctggggctccatctgacttggaatctggacattgccaatgtgcacagaaaccggttagtgccagtggaaacattctcagagcttttagaagagaagtcttgaattctctttactagactgcttcccaaagaagtgctcagtggctgtggcagtttacagtgccttggagggagtccaagtcctcactgggactggaaagtcaggcacagttcactctcttctctgctacccacacactgatggcttttcccttgccagggccagtttaggcaaactgccacaggaagttggcaaggtgtgatgttggtgctatgcagtctggttctatgcagaactataacctgtttccaagaggctcagcttcacaacaactccatgggggcaaagggtactatggtcattcccatttt

SEQ ID NO: 54796 - DNA, 1459 bp, Homo sapiens
tggaaaagctgcactggggaagttcagaaaattagggacagactcccagagaagaggacatacgtgagctggacctttacatccaaataggtttcctgtgtggctagaggagcacagagaagatgttccattccaaaggaacacagagagctaaggtaccacaaggtcacctgggttcctttactccaccctttttccaacaccctagacaccctagaaagatttcccttcctctctcactctctttaccattctgagccaaaatagaacccaaacatgggagcgacacaaaagcactgctgaatgcagactggtgtggaggatgaagaacatgcccaggctttaaactgaacacgcaaagagcctgggccattggaaggacccacaggcaccttggaaatccccagctgcctccaccacaacatcaggtgaaatccattcctcttccagtataagcattcaaggccaaccattccttgctttgttagcttttctttttggctcaattactgtatcagcacagaatcattttctattttcatctccagggcagacgtttctccaacagtcttttgagcctggggaccaaaacaccatttatagctttgcttctatgggaaaaagtgcttttaagtaccaaacaactgacttacaaataaatgattaaactcaactgcccttaagcaatgagcttcctgtaatgttttgcacagttcagtgccaaaggctaatgtgtgtgtgtatgtatgtgtgtgtgttttaacatttctaaatatgggcgccaggtgttgcattttcagactgaccgagtgtaacttttttcttcttaaagcaacagagtcgtttttttttagtgaacatgtatctgtttaaaagaaaaggtgaaagaaatggcaggggccacaaaagaaaagcaacactgaaactttagtggagaaagatatatttgcaccatataagaaaagaggttaacttatttttaaaactttattattacagattaaggcaagcctgcaaccatagggaaagttcaaagatcaaaacctcctgcacagcttggttttactttgagtccagcgacccaaagagatctccacgatgaggtttctagtctctttcaaagcaagcccagatgaacaaaaattttaaaagcatgctgtgaagatagtacataaactgtgtccccgataaatcagtatcagggtgaccccatcagaaggagtgaccatgcaaattgcttttttgcatcaaaagaagacgacagggcttagtgcttgattcatttcaatctcccactccttgattcctctctgtttcttttctatacccttgactgatcttctgttctcagtcttttcgtttctctctcacttcctctaacagcaggatatgatatagtgagaattaatactcccaaacaaaaaaaattaactatagttttttttatcctttcaaaaca

SEQ ID NO: 54797 - DNA, 721 bp, Homo sapiens
ccccagcggcggcacctaccggctttgcaagggtcgtggtaatgctccagctgctgctccgtgccctcctcgccgtccagctctgagtagtctgcggtggcgtccgggcgctccccgagtcccccggcgccgcgaggcagcggcagcagcagcagcagtgacaccagggccccaagtgcagtcgcccggggcatggtggcgcggggccggctggggcagagggagttgcgtgcacgaaagctcagctcggccgaaagacggcgcacactgggtcggtcggctccggccgggactcggtggttacacagggctgctgggcatggctcaggcgcggagcaagcggagcgcggcgccccctgtcttcgtcgaggcaaccgggaagcagccgctcggagctacttgcccggcggccgaggctgcggcggctgcgagtgtggcggtggcggcggtggttggagcagtggccgctccgcccctctccaccagggctggaccacacagccttcgcccggggccctaagcagccaatcactcgggcgcccgaggcgaggcccctcctcttcccggcaccttcgcaacttcggaggcaggcgagcgaggtgaagatgctggagccaaaggccggggccagctccgcacccacccagcctaaggcgcctgcccggggcgccacctcggcctctggctcccgagaatgctgctcctgaagatcgggactggg

SEQ ID NO: 54798 - DNA, 2880 bp, Homo sapiens
aggtaagaagtttctggctgtgaccgaaggtagaacagtcaaaagtttagagcttttattagctaaaataagatcccagctagccaaggatccagcgaaaagttttgttgattacaaataaaatcggatccattaaataggtaaggacgactgcttcatttcctcacttaccagaaatgacataagactccctcagatcgttctgatttagtacaaacacagtctctcatagaaactcctatcattaatggtaaaggtataaaaaacaattactcgtcaagcaaactctcaatttacctgaccttcctgccttgctcaagtctaccactctgaaaaccacagttacagccctaagtgaaagccatttgaagagtcgttcacatgcacgttttgatgtgagaataccaattaaacaaactgccaatcacctttaggccaaatgcaaaagggactgtttctggccctgacctgaagactgggaaacgtcaagaccctttactgtcagaagctgccttagttagagactatcgggatgggggtctcacttaggggctggaaggtgaggagaaagttacaagaaaggcctaggaattgaacgcgtgtaggttgggtgcacttacaagtaagtataaactgctcttcaattcaagtttattaatgctgccccaccccagggttttaatccggtctgggcagaagcgggcgataaaagccaaaggagaccataaagtgtaggatatttcctggttagtggctgccgggtaatcacgatgcatccatcttcctcggcgtcgcagccctcagtagccagaaggcagtctccttccctggggggcaaaagccccgagcccagcctgcccgttgccccgctcccgcggtggatgaacctcaacccttcccaggctccttcctggccccagggtcccaggaaccccgagaccctggggtgcggcgccactgaggcccagaccgggggaaggagaccctgtcactcgggagcggagccctgtcccgggagcgcacggaaatgcctcctccacgctcccaaggttcctgctccgccaggcccaaccggaaggagtcctcgggccgcagtggggcaccaccgggccgccgggcactccaggctgcgtggggcctgcctcagtgggcaactggggagctagcccggggcggccgcgccggccggggcgcctcaccgtgtgttcgtgctcgtccgcccgggtccggggcagcagcagcagcagcagccacagcgcggcggccgccgccacgccaagagcgccaggcagcggcctcatcctccgcgcccctccggcccggagccggctcaccgactcctcctcccgccgccgcctcctccgccgccgccgcctccgccgcggccgattcgcatccacggggcgcggacagacgcacggggcccggcccagccgctgcctcctctgccgccgccgtcgccgtcaccgcccgctcctgagcctcccccgccccccgcgcctcctcagcctcttcctctgactcagccacgtcatccggccaccccggcacgcgccggaagtgcctcgcgacgcggggccgccaccgccgccgggccgagggagggcccggcaaccgccgcctgcgcgccggctgcccctcggctcctgggagccgcggcgctacgggcctgccgagcactcgggcgggcgccgagcaggctgggccccggcgcagtggcctagcctggaccgcaaggccgaagccgcctccgggccgcgtcccggtgtttcgggttgtgtaaccttggccaaaatgcttaagcttttttcctggctgccaaatggggccgatcgtctgacctgctgcctccggaacttgagggatcagatcaaataaccctttcctggcgctcgtctgccgctgtgaatgaatcacgggctcctgtaatcaccgttaggagagattgttaaactcgtacagggttggatgttttaaagttactgaatatttactggacccctactgttcaatcaagacatgctaagttagcttgccattcttgttcatttatgtgtttacttaactatttctgggtctcctcttcccagtcataaatatctcttggagtgtaagctcctcggagcagagatcctgtttccgtatttcctgtacctagaacagtgccagatccgtagtagacactgaaacaaaaaatctttaaaaaaaaaaaaatatacgaatgtggcaccaccatttacacaggccactaagccaaaaatctcgaacttgtcagattgtctcttctcagccatcagcagtcaacaagttctagcatttggtctcttaaaagtggttcaagagtttatttttcctctccttcctctgccagtaccaaccagtcttccgtatcactatgtattgcaagagtctcacaagaagatatccatcactgactgatcttcctcccgtttaacatccccaacaggtgccagggtgatgttttttttattctaaaaagaaaccagattatatcgctcactcccttgcttaaaacagttcttcaatgttaggtaaataaatcatggagtcaccacgagggcgttcatctgccaggcactattctgaacgatattggctcattaaattctcacagaaaccctatgcagcaggtacggtgaaaatgttcctgttacagatgaggtaactgaagcacagagagcttgagtggcttgctgaaacaccagacccactcagtctggctccataataggtctttttgctggtaatgatttaccaactatacagccactttaaaaaaaggaaataggtaagtactggcatggaatgataaccaagaggttctgttaaattttcaagttgaagaaaataagagtttaa

SEQ ID NO: 54799 - DNA, 917 bp, Homo sapiens
cttaactacaggcatgcaccaccatgcctggctaatttaaaaaaaattttttagaagtgggttttcgccatgttgcccaggctgatcttgaactactatactcaagcgatctgcccactttggcctcccaaagtgctgagattacaggcatgagccaccatgcgtggcctatgatggtcaattttgggtgccaaattgactatattaggaaatacctagagtgagggtgtttccagaaaaggagcatgcgagtagaaaagatccaccctcaaggtaggcaggcatcatctaatcagctgagggccctaatagagcaaaaacagacaaaaggcaaactggtctctccccaggggctggcatacactgccatacactcttctactcctggttggacatcaaactccaggctctccaccctttggactacaggacatacactagctgctctccccttgggttctcaggctttcgagctcagactgagagttacacaatcagcttcctggttctgaggcctttgggctacgtactttggacttctgagttgatgctggaacgagttaagagttttggggcaactggaatggaatgaatgtattttgcatgtgagaaggacacaaattttggaggctaggagcagagtgccatgatttgaatgtgtgccccaaaatttcatgtgttggaaacttaatccctccatcctcatgaatggattaatgttgctatcgtgagagtgggtttgttatcacaggagtagctttgttgtaatagcaagacctctctggctctcctgctcttgcccttttgccatgtgaatactttccacaatgttatgatgcacaagatgccagcaccatgctcttggacttcccagcctccagaattgtgagctaaataaacttattttctttacaaat

SEQ ID NO: 54800 - DNA, 553 bp, Homo sapiens
gaagtaaaaatgataaggggctaatcttcttaatatacgaagatgtcacgaaatctcttttaaaataccccaagaccaataagaagacaattcataaaagaaggaatacaaattacctccccattcaaacaaatatcattcattctcactagtcatcatgagaatgcaaatgaaaatacaatgctgtcttgctattttagcttttcaaattagaaaatgctgtgaagtacacccaataaactttaaactttaaacagtgcagggtttaaaggtgactggaggacagataccccccagctgctgagggaagtacaaactgcacaatctttctggaaagccatgtgtccacacccagagaaagagaaggccttgaaaatgttcacagcttttgccacataattctatttccagaagtctctcttaaggaggaaaataaaagtccaaaataaagattctgaaccaagaggctttgcatcagtgaaaaaactgaaaacaacctaaaagactattaaaaacattattttcaaagagttctaagtgacatgggtaaaag

SEQ ID NO: 54801 - DNA, 1909 bp, Homo sapiens
gaggcatgggccatgaactgaccggccctagttcataagcttctggtttaatggtagaaccacatgcagaattcaaagctcccaactccagatctggttagcagaagaacagaaggaacagccactctcagaaaacatgacccaaaaggggaaaagattctgctaggtgagctgcatctcagccacagactgacattccctcaaccagtctctgggatataaacctgggaagggttggaggaaaatctacttccccaccatggtaaatgggctgcacaaaaacccacctctatcctggattcagcgtctcgggctgcatctaccatgcacaggcaaccagaagagcacaggtaagcttccttggcggggtttatcaggatccttagggagcactatccaacctgtatcccatctccacacctgtgagaaagtgctcccctctaggcacccaggtctggaggcctgcaggcccctgtttcctcgttcaggaaaccccagtgttgctaacaaagcaggagctaccacagccccccccgaaaggcttcctctttcttcatctctttcagacacttataaatgtgcttcctctccctatgtaaatttcgtccaaatggcacaacgcaggcttgtcatgaggccattaataactcaccttttcacaggctcttcttggtttcctggttcaggaatcagttcttatctagacagacactgatgtctggatttactggtgtgaggacggacaaatgggctttgtctggggcaggccacataaatgtgatttattttcactaagtcaagaactgagaggctgaaggcaactcttgacaataactaagctgaagaaattgagagtaaaatttcttcccttttgtctgtctcccactcaatggtcaaagtcccaggaaaggctgaaacggtgtttactttcccccacttaggctgacccttcgcattccgaccagctgaaaggatggaactggctggtcagtttcactttccactttcaggaagggtaactttctgttctcatccctcaccgtgaaaggctgcatctggctttgtggcttggtcaaggctgggtggaggtgggggtgtgatgcttcttggcgaagggcttaaagaaatatgaaacaagatggcattccaaattctgcataaatataggccaaaattaaaactcctttaacccaggagttgctggccttagtggtccaatattaaaatcagggctattaaggccaagactctaaagatattctacagtatttcctagcagcacaaacgcaattactaacagattctggaaaagcacattcagctaagccacagaagacctggattcaagtcccatctctgccacttcctgggtaatcttgatatttctaagcttcaatttcctctcctttaagatggatttatttatgcctgcctggtttgttgcacaggcttattggaattaagtgatcaacatgcagaagccctttgaaaactgaaaagtgcaagacaaagttaaatcaattagtgttgtttatctgttgaccaaatttttcttctactagactgtgatttctctgagaacagatttcctgacattcattcatctttgtatccccagggcttagaatatagtgagaaatcaataaatacttcttgcatgaatggatgaatcgatgaatgagataagaccaaccacctaagttactagcagggaaagcaacacctcagggaggaccactgtaaggctttgtgcctggaggcttttagtgtggaatctggagagaaacaggaaactgtttaaccctctaatttatgataccagcgtgaaccaagcttcgctgaaaattctgcatggtacactgtgttagtcccagtcttccgagaaacaaaagctaaaatgagattaaac

SEQ ID NO: 54802 - DNA, 2445 bp, Homo sapiens
tgctcagttattgactgggagcagcctgcaggaagcagggccttggtcgaaagctatgatggattcagagggtggcacaggagcccttggtcggttctactcccagcaactggagatctgccaggcatattctcatggccaccacatacatggcagtgcttcaaagcatggagtttagggtccatgtaaatgaattgagtccctgctattactggatggctatcttgggcaagttacttgatctcctaaagcctcattttccttatttataaaatagagattataattcctacctctcaggactgttattgttgaacactgtgtctgccacatagtaagtgctcaataaaaggaagctgtcatttctctgttaatattaataacaataataataatttattattcacaaagtacttctattagcagttaggacctaagaacagcccccactgttgcatactcgtattagaattgtataaggccatcatagggacgtgggacatggcctaaaaccatagtttggcagtatcacaattcaaacaaccaaaccagtttgcctacaaatgaaaggtcagagggactttcccagtttggctctttccatgaggggttgccagggtgggttgcattgtgccagaatctacctacaaccacaactcctctcctgtcttctgtttgccgtggttcactggcagtgtcctcagcctgtcccatgccagctgtgaagccacatctgtgtctgaaagcaagcattctcaggaactttcaccccaagaacaggatcatcctcaggctctgagagacaagactctgctatgctgtatccattgtaagcacctatctcaggactctttgcttgtctttatctgtgtgaccttgcttttttttttttttttttgactttggccaactgatagtggtcattgctggctactgctggccggtggcccctacatcttaccagagtcacagagtgtccccttgttgggctggctatgacccgaggtcattacagatttcatggccccaactgagccagctcgggcctctcccagccttgctgatcctcaggtcttagtgacagaaatgaccaagaatccagacataaggaactccagacacatggaagccaggctcttacctctttcactgttgccttagaggccttttttccaactcccttttccaagaaggtcaccaaaaacacacacggggattttctggggttttttttttttttttttgaaagaatgaccttgagttattccaactgaaagagtccaaattaaacttaaaaacattgattttgtttaataattaacagcttacaaagctggtcaagttgtatcttccagaataatcatctccattccacagggacttcttttctagggagttttaagtttccgtattgagctggaatctaacccttgagctgccggtgtcaacctgagattggacagcatagggcacagactcaaggacggactgaaccctcccaaccaagccaaactaggcctttccatctgaggaaagagggggtcatgctggggtggagggaaagcctcagggcaggagaacaggccgcccactcttcacacagcctccagcaggagcaccgagcccatctctgaacacggtttgtttttctccactggtcctccaagccagagtgaggaagggctgagcccacctgatgccagacatgcccagtgtttgagagggggaactgccatcatcagggagaaacaccgattcagccatcttctgcccccgtgacacataaaagtattggcaaactcagtaactagcctcaacacaacaccttcttttgcctcttgtttgcatttatccttcccaccaattgaaaaaccaatcatgtttggtttctttgcaaatccaaattctttaagaaatgataccctgaagtaaaacttgggcgttctcacactcatatcccgaggtcaactgttcaaaaacccaccattcaccacttggccttgggtgagccacttcccctggcagagtccagttgtcttcctctgtattaagacagagtggaaaataactatgtgatttctgagggtctgtcctgccccgatgctctttaagtccactggccttgctaactacctcctcactaagcacatacacacacacacacacacacacacacacacacacacacacacacacacaaaaggcctttgaccttctgtaaacatttatctccaacaaacacagtttggtcacgtgcaatacaagatatgaagtgagacaacacactttccggtttagaatcacaagcgtgaggacaaaacatggttttcactgttcatttaggtacagttatagaaaccactggaaacctaatcaacattgggatcaggatcaagaagaatctgtcccaggggttctcatcacctcagagggaggtgagagttt

SEQ ID NO: 54803 - DNA, 724 bp, Homo sapiens
tcttttctggcaacaaactcaggctttgagcaaggatattcagaaaattttagaaaataaaaggaaaaccctggttcagaacaagttaacaggttggttctgtttggaatactaaatgccagatcctgcaacagaaatgttttcccacatttcacatgctctaaaagccgagtcaactgctagtgctaatattattctatctgctagttatgatgaacgtccttcctatcttattgcaagctttaactgcaactacagcctcaaacattagctgtacatgtaaaaagaaacttattttagtctaatttaaaagtagagcattttcatttcatcatcagcctcccccgctatttcctgtgttatcagatgttggagagtaaaccagcagtctgtgaaactggcaagctggtagacaaaataggcatattcaaccagcattttcttaaataagaacctaagatggtctgacttcttaatggtgatggagaagatgcacatattcagaagttataaacccagaagaaaaagtaccaaggaattcccaaaatgactaacccaattctagaggtttcctccaaaactctatagattgcctcacttttatgctctcctttaaaaaaaaaaaaagacacagccaatttaatctctgcagagacagacctatacatatcccaaggaactaacaattccaattgttaactagctcctagactggcatacttaa

SEQ ID NO: 54804 - DNA, 2615 bp, Homo sapiens
ttaagtgtatattacctgctattactaggcctccttattcacaacacagcttcttttagcctccagagcccagctggagagccaggaggctgtgattaactaccttcccatcccctttaatgagcctgtagtacatggaacaatcactcctggccttttctacctctgcttccgaagcacccttaccagaccctcagaggatctggggagagctggctcttcattccagtgtttgctcacctcctgtaagaacagtgccttctcctggccacctagattttctttttcaaggggcacctgcaacctgttttcacaggttatccctactaaaacatcataaagtgggctgggaaaatacaagtaaacccatttgtaaacactgtaactctacctcctctcatctagtaattccttgtttacttattgctttcctctacaggaccataaactcctggagagcagagactaggtgtttcctgcccaccatggagaacatattaggtgcacagtatccattggagtgcaatagtaaggactcattaattgtctccgttatcatcattatgtggcttgtcctggatctccgtcagtgagcgacttgccaagtgtgtacacccatgaaccagaaggcaacccaagaccagccagaaaagacgcttggcaccctttgatgagtacatttacccagtgaccgccaactctccccattccccaaagttctgcaaaggacgcaggaaaagtaaagttcaaggaatagtgttcctagatccctagcaaagttctagacccaaaacacaaagcctgggaggggtggaggaacggggcttggggaactgtcccaagggcctccccggctgatctctccgcaccacctaggactgcctgagcgccccctgtgggtccacggagcccaggagacgcgtttggccctgtagaccatccacatcgcccgccctccgcttctctcaactcgcctctcgcttcagagtcggagggacaggggaagcgacgctcagacactcctagggccagaggtggagggagcgaaggagaccctgaagaagtgggagggggtcgggccaggcaggggctgaagagaatcgcgccacaggctgggacgggaaacgtgggaaagttggagtgggaagtttgcgacagggaacatagaaaagagcagaaagagggcaagatccccgcacagaggacgcaaacagaagcaagcgggggagcgcgcctcaagggatgcggggtacgagagaggggccgggagcccggggacccgcggcgcctgcctacccacctgaggctgccatgccgcggggcgccgctcacatccctggctcgctgcgtgcccggggccgggaccggggccggcggcgtcctggctcgggctggaggggcgccgggctccgcgcgggaccggccgccgctctggcgcttcctccctcagggcagcccggcctcgccacgagggcgtgtccacagagtccgccccgcctgcgggactcggcccgcggcacctgcacccgcggccgttggggaggggaagtgagaaccccatgccggccgccggccagctccccccacggccccctgctcaggggcagcgagaaggcgggggcttcgcgccacgtgcgccccactcctcgggaaaccagccctgatctgccaccaaagggcagcccgaggtggagggggtgtggggaggaggcggagggggagagtgtggggctgccaggcctctgggagacagggcgggggtgtgtgtgtgtgtgagcaccagctgtccaagccacctcctcatcgcctggggctttgtccctaagcccctgctgccccagcaggaaaggggaggggacaggaaggggaagaggaggagggctgggcacctggccctgggtgctcggcgttgcccttgagtgccctcctgtgatctttctgccgttccttggatctggtctcctgatggcacatgaacattaattataatgtcacatgataaatgtctaatagagtttctctgccattcatttcctgtgttcctgtctgctgggcgctgcgtttagcaccttacacacattatcgcattgcatcctcacagcaaccttctgaggtagcacctatcactgtctttacattggagccaaagaaacaagccaaataccttgctcaggcttccacagagaacaaaagctcccggaggttcagtaccaagccagtctgcttccagagctagaactcttgcttaacccttgccttcacctgccctcttcttggactcctccctttgcctgctgccgaaattcaactgaatagcacatccccttggagttctcaacaatccaggggccagaagatggacccagagagcagagatgaggcaaggttagggctgaagtccaggtggaaataaaatgaaatggatttaagaacgggaatatcaggatgaggccgtgcattcattttcttctgttgccataataaattactacaaatttagtggcttaaaacaacaccaacttatcattttacagttctgtagctcagaagtgtgacatgagtctccatcggctaaaatcaaggtggtggctgggctgggtttctttctgccaaat

SEQ ID NO: 54805 - DNA, 4171 bp, Homo sapiens
tcctggcttttgttgccctttctctacccagcaactatgtaatcttggtcaaatcaccttacttgtctgggcttccaatttcatatcttaagttacaaaattgatctctgaagcctctaggattctctgaatccatatgtctgggactaagagattatgtcgaggaattattacccttggtttgattgttttttaaacaaattaacttggggtggttggaaaacacattgattatttactcatcttagagttacacgttgttcatttatttgaaactgaaacgtatttcctccaaacaccgtagaaacttaaaggccgcaaaagactcacacccaccacctagcggcgaaaaaaggaagtttcaggtgatacaagatgtcctgccatcacacctgaaggatggttgtccacagccattttttaaaatctcgtattagtcctcttccttcaacactcaggacagtattatgtacccagaaactcaatacttcctggcgtcttcatttgacaatactcttaagccaatgaaatcctgtgggacgtttgcgaattttataaagatcaatgttttaagattggcggggtgggctgggagtggtgggggggaaggtgccttcctacccttgcatttgcatctcaagccacccgtacccgaggcccacccagtccatctgttcattggtagatacaccattccgccattccgccagtggctggtgcagagaaccaggaccaccacctttgaaaagacctaaatcaatactccaatgggatcctgatgtcaagtatttaacgactttgctttacctactacagtaattaaaattaagtcttcaaacttaaatttaaatttctaaaagcaggaatgcactgtccttaatcttaaacaccaaaggtgggagaaagaggccagaatcctagggtactaggcctactggtatagggcgatctcttctgcttttttctttccaccccatttcttttccctttctcctttcgtttcccatcttctctcttctcgttctcttcgaagtaacagtgacaaaattaaggtgattcaattattccaagaggcttgctcatataaaatatttctcttcaagccctttcctgaaatcccaaattaaagcatttccaatagtctctgctttaagtattcctagttaagtctacttttggaaatattaaatattctcactttggcacaatattccaaaattccttgagaagttcgcctacgatcagtcttgctagtagaaacctttttttttttttatttaaaacgctcgatttccactttttactaggtttcccaatgttggcgatgtctcccaatgacttaataacgtgtatccacttcacctttgaaaatcttagaggtcagtgcatccaccggcatccgggaatttattcttatttctgcttcttaaacaggctctggggaggagcagtttcgacggagaagttcatagcagcagttattacggaacttgcaacagttggtgccgggcgataggcaggttggaagtgataaatggggctggcgtaaaaaacaaaaagccccggggagggcgggggcagccgtggccttgggggacagtgcgaaggcggcgcggggccagcgggactgacttccggctgtgggaaggcgccgtcccgggcggccagaggcggcggcagccgcgtagaaggacggcgggatcgcagcccggcgggcggcgcgcggggcgggtgagcgggcccaggccgcccccgggccacgccggggccacggtgaggtgaggccggccctgcccccgcaccgcccccggcaggaggcgcgacgcccgggccgcgggtgcgtgcgcggccccgggcgacgcggctgggcgtgcgcggggccgcggcggaggctgggccgggcgggcggcagaagatggcgagggtgtgtaggcggcagcaatgctccgttgagagacgcggctttcggcaagaactggattcgtggcgccacaagctcattcactgtgtaggtgagaccctccgccgaccgccgccgcccctccggccgccccgccgccggtcgccccagaccagggaggaagctggggaagtggcaattgctgctccggcccgcccgccctctttggctcgagcgtccccccttcccccaccccccggagtgtgagcgcgcgcgacctccaggcgggctcccctgctcggccgagcgcgcgccggcccctcccctccgcgcgcctccccggggctggctctcggcgggagcgcgggttcctccccctcccgctctccatccccgcctgctcgctcccctccctccccgctcccgcccctgctcccgctccaggcccggcgccccggcgccgccgccggcttattgtggcgactcgcctcgcggcgctgccgctgtactgggggaggcgcgaggggcgcgggcgtgctcggcccccacccgcgctgtggccgccgccgtcctcctcctgcgccacccctcccccacgcgcggggcgcgcccccgggtctgcgtgcacgcgcggcgggctgcaggcgggcgcccggcgctcgggcgtgtgcgaagcgtgaggtggagatgggggcggagggagctggagctgtcacagtccccgggtgcgcctgaccgagccaagtggggtgtcatggccgcggggggcagcggctgcacttcctcagcgggcggcggtggccggggagttaatcctcgacgcacgggtcggtgtgtgcgtatttgtgttcggtgtcgtgctgcgggaggagggggtgggaccgggtccgaccgaggagccccggcgggggtcgctctcgtcccctcccggggattggccggagccgcagcctcgcccgaatgccccgtccgccccccgcctcccggaccttgggccgccctcgggtggctttttccctgcgggccggagggagcgcggacgggggcgccccgggaggggccgggcggccgagctgcgcctctcacactgtgtgttttgtctgtttttctctcccaaggtcccgtttccctctgtgcggcggccggcgggaccataagggcttaactcatatatttaacccccctccaaaaagtaagtggcccgtgtggtgtctccgctccgcccgccgccccctagccccagtccatccttgtgtctgactctcctgtcctccagcattgttacttccccgtctttgcttcggtgctgctggtgtgtggggagatgccctctcgtcgtccgctgtcccccacgcccagtcctcggggaggcccagaattccagccccttctcccccaggggaatattcttgggaaccaggtctttcccggcagaatctaggagagtctatccgttcgcttgggcccctcattccctccttcccgacagggtttcgttggaaggaattatgcaaatcctgctttctggtgtccattcagcggcaatttcatgcggtgagaagttctctttgttgtgcgagggggagaacagacactgatttaatagacatatctgttggggggaagggtggagggggtgtggagaggctcagtttggaagaattacagcacttggttagctcagtgtctttgtgtttgagccttctggcttgacaggagggtctgccctttacaatgtcccacaagggatgttttcgataatagattaaaaagcaaaattgaaactttaaacaagtgaaaaatcaggtaacctttacttaaagaatatacgcctttccatttctacagggtttcattacgaaaatgtatagcgtgagtttcgttaaggatttagactgtaacaccgaaattaatataggcaacaatgctttaaggtatctgataccagtttggttgtccaaaggttaaaagtgcattttcaaacatatgcttgtgcaaataataaaggcatgagtcagttttttggtataattcgtctcatgaatatattttaaaattcccctcctgccaatccaagaccagtgctgccctccaggaaacaaacagccttttgcctatcagttatcctgtactctgctctatctctgcttgttttattctttcaaagtattattatgcatgtactaaaatgttacgtcggtttaagtactttttgaattacttggtatttcggactatcatagaagagagcatatagcaggttttgagaag

SEQ ID NO: 54806 - DNA, 1399 bp, Homo sapiens
ttattatatgtaattttgttttttaagaggagagttctaagtaaattaattgtagtgttaagaactttctatatttaaaaggactggcagtgatccttaggcaattcaaaaggtaacttgtttacttccagatgtaataattttttagtgggattggttctaaacggtcaacctgtttgtttctcttgactgattatcttaatactttagggtcatttggtttctggaaggtatttaatttacagcagtttggattaaaaattaattctcatttctaaaatcgaattctcccttctattagtacttttttggagggtgtgggggcaggtggtggtggtgatgttgctgattaaatgattaggttcagttgaattggagttagtcctgggttcagacagtgattatgatcaagatggatgatatttggttaccaggtgattattaaggagtcctctgagactaggatgatcagtttagattccaggaagatctaggctctctctgcgcctgatatgatgtaaccttttgctttcctgcaccttgcccttgctgtattttcaagaagctcttcctaatgtggggaaagttgtggtgatttcagcttagctctagcttggctaaaaataggacagcagatgagtctctttgactttcagaaagttatttcagattgccctaatttcctgaaatgttcttgtagctggagcaattctaggaagtatttgaacaatgccattttttagtcttatggtgctacacaggggggcctggaatttcttacatagtgagaattggttatttgatgccacttttatttttatttagagttttttttagagacagggtttggctatgttgtccaggctggtctcaaactcctcctgtctcagcctcccaaagtcacttgcctgatagaacttgccacttcagagtacctgcctgatcatttagctgtttgtattgatgctgtttttaggatgaagggcagttaggtgtttacttcatttaaacaagcatctgttttttaccaggcactgtgggcaaacaaagtctgggaaagttgcctcaaccttcaggaacttttaaaccttagagaaaatgtaatgtaatcgatcagttattgtacaaggcatagtgtgtcatatgatggtgcaagcaaatgctaggggtgtttagaagtgaaatctctcccgagttgatggacgatttcgtgaagaaggtggtggatttttgcttcgttctgatggaaaaggcattccattcatgagaaatggcatgagcaaaagtggagaaggacagcaatgacttgtcaatttaaactgcagttcatgattagtgtaagggatatacacatgataggtttgcaaaggtaggttgtaggattttctaatgcaggtta

SEQ ID NO: 54807 - DNA, 395 bp, Homo sapiens
gcacactggaaggctgaggcaggcaagtcgcttgagcccaggagttggagacaagcctgggcaacatggtgaaaccttgtctccacacaaaatacaaaaattagctttagctgtgtgtggttttgtgtacctgtagtcccagctactcggaaggctgaggtgggaggatcgcttgagcccaggaggtcgaggatgcagtgagtcatgattgcatcactgtactctagcctgagggacagagtgagaccctgtctcaggaaaaaagagaagttcatcacagttgtttacagaggtgaaggggattacttagaaacatatagttgtctcacaagaattttttaaatgtgcagtaatctagatgaataattaactctttaaaataacagaaagcagaa

SEQ ID NO: 54808 - DNA, 924 bp, Homo sapiens
ttgctgggattacaggtgtgagccatcatggcccgcccctagtttatacaaatttttgaaataagtatacattgtatgtagaggaagcgaatgttgaatttgttaaattgagtcatgcacagattcagtttgatgatctcttgtttttcacgtttttttattgttgccattgcatggatatttgtgaacttttacctggctactcctcttccttccagtcaatgcaagcatgttttgtttgtttttttggagacaaggtctggttctgtctccctggctggaatgcagcggcatgatcatagctcactgtaaactcaaactcctggggtcaaagtgatcctcctgcctcagcccctggagtatctgggaatgcagcatgtttcatcatgcctggctagtttttgttttgttttgtttttggtagagatgaggtcttgctatgtagcccaggcttgtctcgatcccctggcctcaagtggtcctcctgcctcagcctcccaaagtgctgggattacaggcataagtgtctttggcccaatgcaagcgtattttctaggttgtttgtaggtatttacccttatatctgcccactggatattatcctgttctcttttacctttttttcgattcagtatttatcaaagctagaaaggatgacgtaacttgttttcttgtccagccatatcatttaaagggaaaggaatttaaaataaatcttttagtttggaaaacttcaaacatacagaaaagtagaatagtacagtgaacaaacacccagctacatcaactaatggctattcttgtttcatccctaactgaattattttggagcaaattccagacaccatatttagtattgaatcttggttgtatccttttgtatggcaccatcttccttttcccacctcgcatccccatcaagtg

SEQ ID NO: 54809 - DNA, 1158 bp, Homo sapiens
attattattttttatttatttatttttttgagacagcatctctgtcacccaggctggagtgcatggtgtgatgataggtcactgcagccttgatctcctgagctcaagtgatcctctcacctcagcctcctgagtatgggactacaggtacatgccaccaggtcttgctatgttgcccaggctgttctcaaacccttgagctcaagcagtcctctcacctgtctcccaaagtgctgggattacaggcatgagcgactgtgctgggcttactaaattttaaaagatttgtgttgaaccatctgctgatcatggagcagcagagaaatttattgacagattttctagggtcatcactgatgacaatctgatgccagaacaagcctgtaatgctgatgaaacatcactgttctggcattattgctccagaaagatactgactacagctgatgcaaaggcccctgtaggcagtaaggatgccaaggacagaataactgttctggaatgtgctaataatgcagcaggcatgcataagagtaaacttgatgtaataggcaaaagcttgtatctttgctgttttcaaggagtgaatttcttaccagtccattattacgctaacagaaaggcgtggatcacgagggacatcttttctgattggtttcacaagcattctgtactactgctcatgcttactgcagggaagctggactggatgatgactgcaggattctttattccttgataactgttgtcatcctccagctgaaattctcatcagaaatgtttatgccatgtacttttccccaaatgtgacttaattcaaccgtgtaaccagggtatccttagatgaatgaagagtaaataaaataagattaaacacgttcttcagcagcacactagcagcagtgaacagagatgtgggtgtggaagcttttcaaacgaagttttagcatgaaggatgccatgaatcaagatgattgtgattatagtgacgatgaagatggtgatgttaacactgccgaaaaagtgcctgtggatgacgtggtaaaatcatgtcagtgtttaaaatcagagagagaacatggtgaaatcatgtcagtttatgaaattgaagaaagacttctaagacagaaaatgttgtgaatgaggcagatgactctg

SEQ ID NO: 54810 - DNA, 1220 bp, Homo sapiens
ggtctcgaactcctgacctcaagtgatctacccacctcggcctcccaaagtgctgggattacaggtgtgagctaccatgcctggtccatcttgtgaattttctgattttttcacattcagaattcattttctgggaattgattctaaaagtttgattgcattgttagtgctgtggaaacgtgaagtgtgtggattgggatagcatgatcaggtttttctgaggttgacctttttcaagaaagcatagactggtgttgtgcagtctttaaactgctttaaaggagtttagaaaagttgctcaaattttgcccaaaggcttggtcttgtatttaccttaggcgtttgctaaaatactttttctctagtaagtttaagttgatatttttggtttgatttagtatgttctacagaatgctagttgccttctttcatgatgctatcttttgtctctaacctgcctattttgtcttttgtttttggcactttattctttctgtatcagttagcattatgtttactgaatgttggaggaactgttctgagcttgttggtaggaatgtcactttgtatgtttacattctgatgtgaaacacctgtccctgagcagttatgtttctacagctaatgatgccattaaatattaacttggcagtagtttatgaaccttatcgcctaatttcttaaggtccaatatcttagaaactccggaagcacatcataaaatacacaacagagattaaaggttataagaataaatgtgcccaactaagaagggaccaataggtagaagaatgaggataggaaataatgacacagaggacagtccaacattctgagagccaagttgaaaaggaagtagatactcaagtaatgactcatagatggtaatccaaaatgttctctgtcaaataaaggtgtattgactttcagttgatttttcaaacaaggaaaaatccttatttgctttggggacagtctttgtttagatggtgtggttggattgtatttttattcactgagccaaatgttctgtgaacatctttactagctaccaagcactatatggggatatggtgatgtgcaaagcagactctgttcctgctcgcatggcacttagaatataatgggaaaaacagggacatcagttacacaaggaaccagataaaagctctgaaaagagacgttgttctctgcatgtatgtatggtcatgcacctcata

SEQ ID NO: 54811 - DNA, 908 bp, Homo sapiens
gaaaaagagaccaacaaggcagagtgactcaatgtcatgttcacatggaagacaacagacaatatcgacatagtctaaaacaatacttccagggcaggtgcagctccctcatgggcctgttctaaaccagcctctaggagttgatccaaacaagacgactacagaaacccccaacaaaacgtgccacgaccacatagcatctgaaaggcaaaacaagacgctggatgttgactttaacatataaaaatactgtaacaaaatgaaatacaaatatatattagaatctgtaagtattctgtataaagagatacttttgcggttaggctaccagcaggcaaagaggagacaaagtccagccttttccacttcctgacaccttcaccgggagccccggccctgttgccagtggtgttgcaaggccacagctccctccggacgcaccctgctgtatctcttcatgcctaaaatgcagagcgaactaggggtcttcacaaagggggacaagatgtggagagaggacttctcagaggggtgattttgcagtagccaccttccggactttcaagcggagtgtgaataggcaacgtgagtgctgactcaggtccttagcaactcgctggctgatggccaagttggagaaaaagttgatcctggggcacacagctctcacatcatctcatggtggattccaatcctcagactgcactgaggtcagcgctgctgtgctaggaggctgggccatgtggtggggccggtcaggggagccttaagctcacatggtgctccctaggaacaaacatgccagccgctcacctcccagccccatggcgccaggtgaggggtgagcatcacctgtctacaggtgtcctttccacctcctgcagaatgaagaggcctcctgccagcca

SEQ ID NO: 54812 - DNA, 1126 bp, Homo sapiens
gaggccgaggcaggcagatcacctcaggtcaggagttcgagaccagcctggccaaaatggtgaaaccccatctctactaaaagtacaaaaattagccgggtgtggtggcacatgcctgtagccccagctactcggaaggctgaggcaggacaatcacttaacccgggagggggaggttgcagtgagctgagatcatgctatggcactccagcctgggcgacaagactgaaactcagtggaaaaagaaaaaagaaaagagagagagaggaaggaaggaaaggagggagggagggagcgagggaaggaaaagtgggccagagttctctgactcagcaaatatgaatgccttatgcctaaagttcattgatatcaacattattttgaaaatataaggctaaataacgtgaatgagaatgggcacatttactaaataaccaatggatgccttgccattttccacctgtttctgggcaggacagaggaagcagttacccttgagacctgtacaacctgattaaagcagcagtggctctgaacaggaattccccaaaatagctcagctgatgattcacaatcttataaagcaggctgaacaagacctggactccggcccccatgcagctgccccgtgcctgggcgaccttgagtggctcccttaatatatctgggggtcacttcatgtttcaataaagagcctgcaacctagagggagaagacagacaagcacgcatgacctaaaagaggtgctgagggaacaacacagctcagaaaagagagcaggttcgacctcggcatgtgtttcatttttttctttccttatttgctgacagcatccatcctggctaacgggatgggtgatttttttctgaagttccagtgtgtttagaaaaacaaagactttttaagataacaggaatttttaaatggtggtatatttaaaatgtttacactcaccagattagtatttttatactaacaaaaagtgtgatgtcacataagtatgttattcgaaagataaatacacaatgtatttctaagtattttttatagcacatgataaggagtgtggcctggcaatgagccacaagttgaaagatgattgggaatgctttatttcagtcctgta

SEQ ID NO: 54813 - DNA, 858 bp, Homo sapiens
aactggcccaaggactcaacactgtttctaattgacactcaaatccttgctcggacctgaacgcacaaagtgcctcggagaagatgtgaagcgctgtgtgcaacagtgaggaattcgctaaccagccctggacttccgtttcctcgccatcaagaggtgtctcggcgccaaagcgatcagcgctgccacccccagctggacgtctgcagccagcgcagcgggaggagccccctcgggcaccggcaggaccgagcggggggtttggctggagtccagcgcccaggcccgacccccgcgcctcagcccccgcaggcgcgacgatgagaaacgccgtgggagaaagaaacaaagcccgaaccgtgcgcctccgtgacccaaggcaaaggcggcaggactaccagcccaaggccgcgtttcccaggaaactggaccaaactcagctcacctccggccggattcgcgggctggcacctccccttcactctgtgcctcagtcgccatcttcgtcagcaaacttctttcaccgccccaccttacgtcccgcccccacatatttggattggctaatatgttttcacctcttccgtgcgattggatgactcgaccgcccctcctcaacctgaaccgtttaatatattattggtctattcaaatgactaaccgtcattggtcgttcccagccctggcggaaaaagagggaggggcggggaagaagacccagccccgaggcctgccgggagttgtagtttctcattttgatgaacccttccgattccacagacctttaggttcaagtcagaaatcaccagcctatgctcaaattttgtcctgatatgtaaatcagggaattatagaact

SEQ ID NO: 54814 - DNA, 1125 bp, Homo sapiens
ttggaagcagagtatatcaaaaaccccatgctggctgggcacagtagctcacgagaccagcctgaccaacatggcgaaaccccgtctctactaaaaatacaaaaaattagcctccatcgggaggctgaggcaggagaaccgcttgaacctgggaggcggaggttgcagtgagctgagattgcgacactgcactccagcctggccgacacagtgagactctgtctcaaaacaaacaaaaaccgtatgctgatcagtagcacaattgtgcctgtggatagccactgcactccagcctgggcaacatagtaagaccctgtctctaaaataaataaagaaataaaagaatgctagactcccttctctcccttctcggataacacatctatctccatggctgtgtgataaggactacacattacatcacggttacagtttaatcagttactctggagagagaagtgtttctcctcaaaaccaactgttctgctgtgacttctgattaaaagcaaatatcattgctgagtgctgtaaaaacacaaactcagctgacaagcccacacacctttatttctgcaggggtatcatgacttccctgaagtcatccttactctatctaggtacagagtgtcagcctggtgataagtgtgtacagcaggaattcaagacagttcagaaagttatcttgttttcaacagtctagttgaacaaaaggtcacagaaaggtggccccagccctcaaatagtttacagtagactcagggagacaaaatgaacacatataagtcacacaccacagaagatagtttagaattacgggggctgggtgggggctaaatatcaaagtagggaacagactctaggaattcagaagtgtggagaagggaagaggccaagactgtcaggagggtttaggagcaagccctaggacttgagtcggccatggatgtcactacaaatccatctacctaccccacaagactgcgagctttgggggcagaagtggtgttctaatcatctttgtttttccaggccctagcctccatggcagggaaaaagggagggaggaaagctgggaaggaagtcaacaaaggaacatgttggaaaaggaagaaaatgaagatgtgc

SEQ ID NO: 54815 - DNA, 992 bp, Homo sapiens
catgtaagatgtttttgaaagctggcaagggcccagttgacacgaacaaaaggtttatgtggaggtggaggacaagataaagttggaggagtggaccagggcaagcccccctgagagttctggacactgtgttaaggagtggaagagtttactccagaggccatgtggacctgttcagaggggaggccgtgggtaacctgagcagggttgggcattaggaagttgatctgtcagaagagtggattaaagggaaagaggccggggttctgacccaagatgcatgaacctggccaaaaaaacattaagggcatcgggcagtaggaccgaaatagaaccaccagctgaggcactgaagaaagaatcagtgtgccttgaggaacataataaggcagagctaaaagaccagactccagaggctgggttatggcatctgggtagtggtttgagaagggcaggctttggcatctatcaaaactgagtttgaatcctgggcctggcactagaaatatgtgtaattctgggcaagtttacttatttctgggccttggttttcttatccatgaaaaggaataataataccaaattcagaggtttttggaagactaactgaaataatatccttaaagcaattttcagggtaccaggaataaaataaatatccaatgtagctagtgggtacaaagtttcttctaggagtgatgcaaatgttctaaaattagattatggttacacaactctgtaaatatctaaaaaccattcagttgtatacttttttctgtgtgtgagatggtgtctcgctctgttgcccatgatggagtgcagtggcgcaatctcagctcactgcaacctccgcctcccgggttcaagtgattctcctgtctcaccctcccgagtagctgggactacaggcatgcaccaccatgcccggctaatttttgtatttttagaaatgtttgttttttgtgttttttgtgtttttttgagagagtctc

SEQ ID NO: 54816 - DNA, 3230 bp, Homo sapiens
tccagcctgggcgatagagcgagactccgtctcaaaaaaacaaacaaacaaataaacaaaaagactagcaacctcctctccagcaatgccaaccccagtccaggcccccatccgcccaggatctcgatcaaaaaacattaatctgtggcctttctttgccatttccaactctgccacctccatcgaacgacaaggtccccttcttcctttccattcccgtcagcttcatttccctaatctccgtacaaatccctagcctgactccctttcctttccatcctcaccagacgcccgcatgccggacctcaaaagcgcaaacgctaaaaaccggttgagttgacgcacggagagaaggggtgtgtgggtgggtgggtgtgtgttagtgtgcgtgcttgcttgtgtgtggaagaaaccaacagggttcacgctggtgcccatttctggaaatgccaatcgcgcccgactgcgggagccaggatcaggtccccagggcgcccttgcagacagcaccctgagcgaaggagctcagaaggcagtccggcttcacccagacccccaatcccacagaagcgccgtcccccagcggcacagcaccccctccccggcgcggtggtagggcccgacgtgacgtcacccattgtttacaaatcaacccgagccggcaggattccggctcccgcggctgcaggcgcgcggctagagtgcctggcgggctccggcttccgcgtccgccccggccccggtccagacttagtcttcagctccgcgcccgctccgccgcggcccaccgcgcccgccggcagccgagcccccagcgacgcccgcacagctccgggtgcccagacagggggccatgccgtgccggagggaggaggaagaggaagccggcgaggaggcggagggggaggaagaggaggaggacagcttcctcctactgcagcagtcagtggcgctgggcagctcgggcgaggtggaccggctggtggcccagatcggcgagacgctgcagctggacgcggcgcagcacagcccggcctcgccgtgcgggcccccgggggcgccgctgcgggccccggggcccctggctgcggcggtgccggcggacaaggccaggtccccggcggtgccgctgctgctgccgcccgcgttggcggagactgtgggcccggcgccccctggggtcctgcgctgcgccctgggggaccgcggccgcgtgcggggccgcgctgcgccctactgcgtggccgagctcgccacaggccccagcgcgctgtccccactgccccctcaggccgaccttgatgggcctccgggagctggcaagcagggcatcccgcagccgctgtcgggtccgtgccggcgaggatggctccggggcgccgccgcctcccgccgcctgcagcagcgacgcgggtcccaaccagaaacccgcacaggcgacgacgacccgcaccggcttctgcagcagctagtgctctctggaaacctcatcaaggaggccgtgcgaaggcttcattcgcgacggctgcagttacgtgcaaagcttccccaacgcccgctcctgggacctctgtcggccccggtgcatgaacccccttcgcctcgcagccctcgcgcggcctgcagtgaccctggcgcctccgggagggcgcagctcagaactggcgacggcgttcttgtgcctggcagctaacacgcccggggtggccacagcgccagcctcagactggagggcaaggggttcccttgagggctgcagttctactcaggctggtggagaactctggcttttggaagcgagagtaaaaagctaatgacgaggaaccgaaaaatcgcgagtgtttcgcgggtaactggggttgagggccaaaatatttggaatgaaggactttggccctatttaaggcagattttacagagcgcacctcaaacgtacaagtcagtaggactccttatttggcgtgacccgacctggccgcggagcctgcatttcctcgcagcctctcagtgccctccagccccgcgaccatgtggccacaatccacgcttctccggatcgcggtgcgccggaaccacggaggatgatgccagttacttgctttaccttttcagggctggctcctgatccactttgggggaggagaacatgagtagataatttcagggtgcagcccaatctgccagacttaaaaaaaccatcttgtgtctttggaggtgctgcttaataccaaacatgcggtgccatgaagggaccctttgggggttgaataggagttaacccctgcgctctctttgcaactgtctctcttctcagagtggtgggggaaggctgtacgacacgggtggggaaaggaggtgggggcggggagtattgaatggtggtggaagggtagagaggcgcggagtgaaccccacgccctgtctaaagtgtattttcagagccggcccgcctctcctcggttcaaggtcactgtttcctgggcacgcactgggttgcgggacagagtagccaggttctgccggtgctcggagaagagcgcagtgttttgcaagtgctggagtctcctgaggacacgcgcgtcgccgccaccgcgggtgtgggaaagcgcggacgtgctgggcggctgtgcttcggtaggcgaccaccgcccctggccgcgctccgggctttcacggaaactcccgagaccgggccctgggttcctcctctcctactcggctctgcagtcctactcaagcgggtggctctgggatcctgggggcctgggttgggggctagggagacgccatgtgatggacactccagggacacacagcctagcacagcagcttataatgggctctccggggccatttgcaataacagctgcaattccctggatagacgagttgatttcctccctctgcccctcccccagccatgccagctggcctttgtaagtgcaggaaaccgagtagaaaatgtgaccctccaaatggagaagctgcaggctttgccattgtgaaccatggtgaagtgcttggaacatactgttcactcactctaaaggcgctgagactgtgctgttgttctcgtttttatagtcaatggcttgttcatcatccagatgtggctactgacatatctacacttcgcaccggagtgtctggaattgtggctatcctgattataggattttaacttaactgaaatgcctgctttgaataaatgtgttgggttttttgtttgg

SEQ ID NO: 54817 - DNA, 2213 bp, Homo sapiens
caatttcttcacaggaagtggcctttgagttcatttcattctcactctcacatttcatttactgtcattatagagttatctcagggactcatatgtgaatgaatgtgttctcttccccaatagattatgtattttgtgatggcagaggagtgacaagatgatgaggatgttttaggcagattgtcaggctgcatggcatggggagtggtctggagctgaggaaaacactgatggtcagccagatcagccgaatggtgttaaagctcccaggcacccaggcgattaagggagaggaaaacacaagagacacttccaaaagaaaaccggtaggcctcagttaactgtactgtgtagctgtaaaatcatggctctggagccagactgcctggctccttccttgaaagctccttcctgtgaccttgggcaggtaacttcacctctctaaccttacgttcagttgcaaagtcccatgataaaaaaaaaaaagtccccccctcagagggttgttgtgaggattaattgagctaatgctagtaaaaatgcttaggccactgcctgcctgcaacatagctgcatttagcaacagcaccagggtactggtatttagtaaatatttgcagagcaaacaatgggcaatttcaacagactggcagaggctaagggagtggggtgcttaggacgtagatgatgtgttgtggtgcctgcaagtctgaagatgggaaaagagtgactacagctaaaaagggaaaatggccaagggaaggattcactcagccaggggagaactgtgctcatctgggtgtggagagaggatacaaaagggtgaaattgccaggcacggtggctcacgcctgtaatcccagtactttgagaggctaaggcgggtggatcacttgaggtcaagagtttgagaccaacctggccaacatggtgaaaccgtctctactaaaaatacaaaaattagctgggcgtggtggcacacgcctgtagtcccagttactcaggaggctaaggcatgagaatcacttgaacccgggaggctgaggttgcacgccactacactccagcctgggtgacagagcgatatgccgtctcaagaaaaaaaaaaaggggtgaaatcaaagggaagatgctataaaggtctaagttcctggaggagtgggacagtatggggtcctcagacagggcaggtttgaagggcagggcttagggggactctggttgtggatgccccacatgacagctccctgtgtcactaactgtcctgccacagtgtggctgcaacctgacagattggttgctgaaaccatccttcatgcctgggatggctggacatgtttctgttgtttttgtgtgaatgaattatctgtagctgatgctataatggaatgaaaatgaaaactgataccaaggagtttaagtgctccctcttatcaactgttaactgactcatagcaagtaaaatcacaacccccaactgttaggctgcccaggcagtttgtttgacttattgatttgggtgggttaaaaaaagcaagagctggttatcatcctgttacctttgccctgccttttgcctgtttctgtaactgcctaaattagattccacagcctaagatcggtgaaaaatggtttcctataggttttcctgaaaatctttcctagacactgaagtcacaaacccctttctgctgatgcagcataaatagtacttttcttcagctgggctaaggaggggaggaatccagtgcagatgttcaaaacacgctacttaagggtgctgacaaaggcaacttgagaattaacttcaggattcaaagacagtgaaagtcattgaataagatctgattccatatgccccggacctctgtggcctgactacagaggatatacatagggataatagatacagctgtgtttgtgttatgtgcacatgtggacccactactgttcaccctacagtctcccttggcttctcctgggtctacttttattttctgtctgttccttttgtgtagtcttcttcctcccagagatttgatgagttgggtatttgtaaagtgcttagaaggccgggcacacacaggctgggtgtggtggctcacgcctataatcccagcactttggaaggccgaggcgggtggatcacttgaggtcaaaagttcgagaccagcctggacaacatggcaaaacccgtctataccaaaaaaata

SEQ ID NO: 54818 - DNA, 3496 bp, Homo sapiens
aaatctaacccctgagtgctcaaaccaagccattttacaactaccaaatacactgctgtaaaaccctgtttttctctcccaaggccatagctcaagactaggtcagtctcaaaggggaaagcaggctggcttcgcctgtgccctccccattttgcacaaaaacgtccagatgaaaacccacctccctccaccacagcacctctttgctctccagcccagaaagcatttctagaatacattgtctttccacaaagggagtggaagcccatcttgcagcttctaaaaacctggactcaattttctgatcttgtggaataaaaacttagaagcactcaagtcctgtggctctactaggattctgtgcccatcagcattggcccaaaccatttgtccaggtcccccccccccggtttagcccaagtgccctctttattaaggacatccccatatgcttttctgcccctctcccaccttccaccaaaatgccaaaccgtgctccaaaacaaaagccaaatttattcagcagacattttaattatgaaatcctataaatcaggaccaccacaatttcagacactccgttgcgaagtgtacatcaatagctacatctggaggatgaacaagccattgaatcttttaaaaattggtttagctaccttaaagtttgggggtggcaccttacaaaagcgccgtcaagtttcatacagccagcggcttcttctctgggagagtcacattttaaaaccggtttcagacacaaaagaagggctggcacgggaggaggaaataaattgtgagggtgaggagccgccgaggccgaggcccatgactccatggagggccagaagagagcagaaaaacgtccagggtctctcatgcattcctatagacaccagaaagggtggaataagaaagctcagctgggaggacaagaaagagactcaagagatcgtttatgactgtttctgagaaagctcctggcatggccatgagtggccttccgggagtcctgtaaaaaggaaagcacagaaaacaggaaagaactctccctacacgtccctctctgcctgtttgtgtcctcgggagactccaagcggtggtaaagcaccaacagggctcttcttggagcaagagaaagaaaagactccggggtgagtaagctctcccaggaaccccacagcaaaccgtgaccttgaacacagatggcaaggtcaagtcatttacaagtccacattcaaatccaaatctcccacctgcaaaattcttcacctctctccagtcccttaattggagttcacatctcccaccttcaccagccaccgaatcggtgggaaaaaggggcaatgccaagccacccaccaccaaacttttacattcttctcccctctggaatttctttgcacagcaattgtagcaccacttactaagctcctccaccagaaaataagaaaatgtatgcgtgtcgttagttttcaagtattgttataaagccatcgcgattcctacccctgagccctccttaaacaatccaagctcacgacgcccccaagggctaagtgaggtacaagtcgatgcaagtagctgccatagttctcccagtttatcccaggtccttgggcttggatggcccgggaaattctcatgccccacggaagcaccctggcgcatacatttctccacgcttaagttttctccgacggcctcgccgcggctggtaacttctctggttgagatctctccccacgcgcctccccgcagccaaagtggtcgctcccaggctggcgacgtcggcttcagctcagagttagtaggaactggacgctgttgggtctacgcagcggcctccacttcctcctccaggaggcctgcgtcagagcaaggagcctgagggctgcagggcaatgcggtcaggtccgctgcggcctcccccgggcccaggggcgcttgcggggcccgtggctgcaaccgcggcgacggctcgttggagtctccgcacggcttccttgatgaggtttcccgagagcacgagctgctggaggagccgatgcgggtcgtcgtcgccggcgcgtgccccggcttgggtccatcggcgctgctgcaagcggcgggaggtgaccgcgtccctgagccatcctcgccggcacggccccggcagcgcgctggggcctgcggcgacctccgccacgcagtagggcgcagcgcgtccgcgcacgcggccgcggtcccctagggcgcagcgcagggccccagagggcgccgggcccaccgtctcagccgaagcgggcggcagcagcagcggcaccgccgggggccgggccttgtccgccggcaccgccgcagccaggggccccggggcccgcagcggcacccccgggggcgcgcacggcgaggccgggctgtcctgcgccgcgtccagctgcagcgtctcgccgatctgggccaccagccggtccacctcgcccgagctgcccagcgtcaccgactgctgcagcaggaggaagctgtcgtcctcctcttcctccccctccgcctcctcgccggcttcctcttcctcctccctccggcacggcatggccccccgtcctggcacccggagctgtgcgggcttcgctgggggcttggttgcccgcgggcgcggagctgcgggcgaagccggagcaggggcggacgcggaagccggagcccgccaggcactcgagccacgcgcctgcagccgctggagccggaatcctgccggctcgggttgatttgtaaacaatgggtgacgtcgcgccgggccctaccaccgcaccggggcgggggtgacgcgcgagcaggcacgggggcaaagggcggcgcgggcggtgaccgaagccgtcccgcgcctgtgttcgttgtccctccaggagggggtccggggcgtggggactgatttccgacctcccgggcccaacgagccgtgctgaaacgtggcgcctcggaggaggctgaggttggtttctcccacgcacggacacacccacacccactccgggcccgcctcctgggccgcggcctccctccccacgtgtcggccgcgcctaagcccgcccgactcccgccccgcgcacccgcagttcccggccctggtcgtgggggaggggcgggccgccgcgggtccggcttcgacgaggcggggcggggaaaggcggagggaattgggagtgaagaggcggcacgttacttatttacttatttattatttagaaaaggtctctgtcgcccaggctgaagtatagtggcgcgaacacggctgactgcagcctcgaactctggcttaagtaatcatcccactttaagcctccggagcagctgggaccacaggcgcggccaccacgcctggctaattaaaaaaattttttttgtagagacggtggtggggggggggggtctcactatattgcccaggctggtctcgaactcttgggctcaaggagtcctcgctcctcggcctccgaaagtgttggggttactggcg

SEQ ID NO: 54819 - DNA, 3012 bp, Homo sapiens
gctactcgggaggctgaggcagcagaattgcttaaacccgggaggcggaggttgcggtgagccgagatcgcaccactgcactccagtctgggagatagctccgtctcaaaaaaaaaaaaaaaattgtaataataaattgctgattggggctcggagaagaacaggcagtgactagaactcgccccttcctgaaatatttgaagggtcctagcgtttgctttcttgttggaggcccagaaagcactgacttaacgtgtgtgaaagattgtagacagagacgggataaagagccccgcgctggaaaaagagcaggctttggaaccagcagggtcacgggcagtttccttacgtgtaaactaggagtaaaaagatcagtgtcctgctgaaatgagagagtaatagtaaaaactactatttaccgagcacttccaggtacccggtatttatgatcacattttacagatgaggctgagaggtttcccgacctgcccaaagacacaaagcaagtagaatgtacgagtgaagactcgaacacaggtccgtgaatcaatctctgcgtggggatgggagcggttccagtgataagggccacttaatctggccgagctgctccggagcagcgcggcagccagcgaattggggccgcccccacaacccgccgcccgccgcccgccgccctccgccctccgccctccgccctccgccctccgccctccgccctccgccctccgccctccgccctccgccctccgccctccgcgtgcttacgtgcgctccgtgactgcggcgaccgacgcgggactggagagggaggacgcatgcgctctgccgtgccgaagcgcgccccctcctgtcgggggccgcagcgccaggatgcagcgcatgcgcacacctggagggcggagagcggtccagagcgagtggaaagatttgggcgagaacttgcgcgggagccggactgagcggtgcgagcgcgcaggcgcggccgacggggcgggctgctactccggaatctgctaatcccagtcggtgccgcatccccagcccgccgccatggccgcctacaaactggtgctgatccggcacggcgagagcgcatggaacctggagaaccgcttcagcggctggtacgacgccgacctgagcccggcgggccacgaggaggcgaagcgcggcgggcaggcgctacgaggtgcggaggggccgggtgtgggctgcgaagggccgggtgtccggcctcggaggccgcctggctggcgtctgcgccctctcggagagggccggcaccttgggcagcatctctcttaacagtttagtgtgtagttgagaagatgagtgcagagggtagagtctacttgttcaaggtcacgccgtggagcatgaggggctgtgccagggggaggacccagggcggtcgccccgcaaccctttgcgctccccacgacaccacttcgcagttttccctttctagtctgaacatttaatatgtcggggacaggccgggcgtggtggctcacgcctgtaatcccagcatgtggggaggccgaggcgggtggatcacttgcggtcaggatgttcgagaccagccttatcaacgtggtgaaaccccgtctctattgaaaatacaaaattagccggccgtggtggcgcacgcctgtaatcccagctactcgggaggctgaagcaggagaatcgcttgaacccgggaggcggaggttgcaatgagccgagatcgcgccattgcactccagcctgggcaacaagagcgaaactctgtccagaaaaaaaaaataataataataagtcgtggacagtttgccctaatggaaccatctatggcggccaggtctttttcaggttcccttagcgccagaagcggttggtacagtctggtgctcctggaggacgccctgtgccttaaagcagctgtaaccaaggcctctcaagaggcggctacggatcctagcggatcgacacgccacacagcctcgtccccagcagtaggtggaggccctgggggtgcctaacaagcctcagaacaccaagaaatccgcgtggttgtgcaggtctttgctgttcagtagcattccacaaatagtgtgtccaaaacgcatctgtagatgtaacttgagtgaatgaatgaatgattcgagttgctccttctacccaataaagtagataagattttatctttctcatctttccaaggcccctttatagttgggaaaagtgagtatttggaaagatgacttgtccaaggtcatatctgattcctagtccagtgtcctcgccctagtcctgggtgaagtaacaggtaggtgtgaggaactggtaggcttttggctaaggacgctgggcaaaggtggaagtggctgtgagataatgcttgcctatccaggcttgctcccgccccagtctgctctttgtggtgttggaatgctaataaggaagcattccctgctgccggcacggccaagaatccctggactgaagaggtgcttccgctgatgataggggcagatcctcctttgctcccttctaacctctggacaaagaagcagccattcacaagggtcattgatgaggcacaggtatttggcctcagattgctctcctagcttcttgccttcactgtaccatccttctcaaatgaagcaaaacgcaggacagtctggtaaatgtaaacctctgcggggtggggtgggcaggggagtgattgtttgagatggcctggtgtgacctcatcttttaggagaggctgggaaatggaaagtgctggtaaaggaggccattttctttagctctgtggcaggaagaactgtatcagtccgtggtagtttcccaatgactagtccacgttaaaccatgttgtctctgtttgagactaatcaaatagttaaacttgtaatctctgtaaaataacagatcctatttcagttttaaaataaatgttagcattaaattaaaaatttaacagtatagaaaattaaaagatttaacggtttaaaaggt

SEQ ID NO: 54820 - DNA, 1650 bp, Homo sapiens
gctatctaaaggaggtaggaattaaataggcctaggaagatagaagcgttccagatagatggcatgttacaaaggctctgtagcaggagaaagcttggcgcattaccgacactgaaagaagctagtatgttataaaaaatttttaaagggcaagcagagactgtgattataacttttaaacacagaaaagacagtatgactagattgcgtcagtgaggtggagatagtggcgctagataaagtcggaaaggtaagcaacattcatacagtatgcaactcactgctgggctgagctgggctgggatgggatactgagttcgcatctgcttttgtcccaacttccctccccgagggtcagcagcacaaccaagcgagatcaacacaactagtgtgtggtggctaagtgcaccacagcggcgatacggctagaagaaactaagagaccaacattgtaccactgaggcactaaagacgcgtccgcagtgcccatgcctaaggactggaactcaagggcagcctaagggaaaaacagaggggagatggcatgccgcttcctttaccgcgccattctcgctgctcttcatcagacagccggcaagcgacgaaaagatgtagccgtggcgggtgtaggtgccgctgcccgggctgccctcctccaagttacacagacgttcgcctgcagaaaaaatgctgcatcggtcacgggcccccagaagctgtaggccgtttagccttcttgcttcagcccctatccaggactctgtacgggaagcgctcacttaccggggatgcagtatctcacaggtggcgccatgattgccgctgtcccaaaaccaggatgaaaacgaagtcgatttctcattggccaaacccaggcacagttccgcagtaagacacgtgtcaattggtactctttatccttgcgagtaaactccatttcccaggttaccccgggacaaatccgggggcggaacttcagaggtccacgctggcgcctgcgcgtgtggttgaggatgggctggcggcgggtccgggtccgctgcctggcgctgcgggcggcgggccatggtggtttggattgagccgggcccggccggggcgccgagtcggagggggtggcagtgagcggcggcagaggctacggggctcggtttggctgactggggagtcggcaggcggcaggtaagggcgaagcctcggcccttgctccccatcctagtccctttttctgggtagggcactgccctggggccttgtcttgagtgcgggttcctgctctctcctcgccccgccctgcggggccgtgccctcctcagcccgagcgcaccttccgagcaatcgttacgctcagagcaggagggaaggaggtcaagcgacccaactcgtctgtttcacagatatggaacctcagattcagagacagggtttgacttgtccaaaatgatcaagatagttaagatagagcccaaactggaacccacggtttttgacttccagtccatcgcagtttcacctcgcggctgtcattgagaaataaaaccttttcccggtttttttgttttgtttttgaggagtctcgctctgtcgccaggctggagtgcagtggagcgatctctgttcactgcaacctccgcctcccggcatcaagcg

SEQ ID NO: 54821 - DNA, 412 bp, Homo sapiens
aggatagtaaggctgcttttcaccaaggcagtcttacaagaaaaggaccaatattttcctcttctctttcccttaagatgtacctggctgggcacccaagactgtcagtgtacggatgccaacaagctgaagctgggtgctggggtctgttagagccatgaataccagtgagcacagctggtccttgaagccattcagaggcctttgatctagggaagagacagaggccaggttagaaggaagccactgcattccatatccctgactaagctgtgatacacagccaacctggggtagattttttttttgagacaaggcctctgttgcccaggctggagtgcagtggcgtaatctcggatcactgcagcctctgcctcccaggttcaagccattctcctgcctcagcctcccg

SEQ ID NO: 54822 - DNA, 2607 bp, Homo sapiens
tctcagaactccacggaagcctggaaatcgttttattctaattttagataagctgtctgaactaagagatctctgaactggtcaaaagcaggaaagtgggggtctgggaagaagacaaaaacaaacgccacataaaacgtcatggagcaaactaatcaagaactttagcaagaaacggagagaaagtcttaaggaggacacccagaacatctccagctcctcctggcccgtctcctcaactcctcttaattccagccagtcagagcgcggggccatctgccactcccaggatgccacgcgacgggagcggacgctgcgaggatgcacctccacacgtcaacctcccacaaacagcatggcttcgtggcgtgagcacccggttcggacctgaacgcctgggtccgagtcccacctccccctcctgcctggtctgcagccctgcgcaagtcctcttgccctcgctgagcctcagtttcctcatctgtaaaatgtaatgattccctataattggctacagggagatgagaagtgtaaatggttttaaggaagacacaggcaactctctaacttgttacggctctgaacctcgcggtgctcactaaccagccttgagaccaatctctcaaagtcaccccgctcctcccttcccgcccggcgcctgtactgaggccgctccctcctgttggcccccatgcggaaggcgcgcggcgccgtctgccgtacctgcagccacctggtcagcggggccctcttgctgacccacgacgaagtcgtgcacgaggccccatagggcacccataggcgccgccgcctccacagccgcggcagcggccataacgcgaactagagaccgtgggaggggatatgggcggtggctcgagacgggctctccgcgcatgcgcctcccgagccaatctccggggaagcgcaagggggcggggcgccggggtcacgtgcctgccggcttctgcctaggcagttccagggaggggcggggcctgaaatggggcggtggcaccgagagggaaggcggctgctgggcacgcagccggaggcgattgagggcgaataattcccagcccggctccccgggagacgggctgcggggcgggcacctggctgggtggggagaggggcggtacgcaccacgggggaagccaatgagaaaatcaggcccagccctagggggcggtgctgtcggtcacatgcgcacctggggcgggtggtggcggcggcgcgggcaccgcgagccggcggaagggagaggggccggcctggggcggggttaggcaggtgagtgacaggctccagggggccggcccctgcctggtgccccgagcgagccgggagtagctgcggcggtgcccgccccctctctccgcccctccagcggagctggtctccggccgggcaccgtcgcgggcccccctggcccggccacctgggaccgtgctggggagtctgccacttccctctctcccctggcccgcaaagttttggcggagccatcgctggggctgagcgcgcccccggggggagatcggggagcgcccgatgccgggcggccggagccattgacccgggacgccgccgtccgctgagcagccgaccaccccgccgcctccggtgcatggggactggctgaggagccagcatgggcaactgcgtggggagacagcgccgggagaggccggcagccccgggacacccccgcaagcgagcaggtaacgatggggaagggagcagggcctcgggcatcccgccagttgtccccctcctcgcccgagtcctgggcttaccgatggactccccactggtgctggcgcttgggtttccccgatgggctgctccgcagccagagggggccgctccccagcgccgggcggccgggggagctgagttggggcaactgcgagcactgagccggctgcgcgaccaactctctccaactgggtagctcctggtgggggtgggggcaggaaatgtttgcagaccgcagcggggccgacggatcgggaggaggccgggggcgagggcgccgctggcctggcagctccggccggggtcggacgccggcccgtcggggcacggcgcgggcagccaggcgtccccagaactcggagcgagcgaggcgagaacagtcgctccttccaaagactgtgtcattatcgagctgcagatcgtgtctgcgggaatccgacttgcaaagcagcgcaggactctgggaaagaaatctttatttttcccgcaggggtttttagagcctctcggccgtctgggagtctataaaagatggggtgcggggtgagagtcacccttgggattgttgggatccttcccagctttgggagtgagatcgctcgctggtgatcctccaggcccgcgcaacgctttctcactttcatggtacaccccgcctgccctggcatttcgccccgggaagaggtctgtcggtcatttttctgggtcttacactcacttccttctttgagggtgttgcaaggacccgctgggaataatatcgtagacttgagagctcaaacttgtctggattccagatggacccatctcctactctgtgtcaaagcccagatcctgagaggttga

SEQ ID NO: 54823 - DNA, 1744 bp, Homo sapiens
gactcagagctccagcatgcgagttccaggtgtggaactgagcaagtacagatctgcttttgctccacttgggagtatttttccttcttagtgagcatgggcagcctcctggccagggaagtctggcactgtctgggcctgacagggaaaccctgggagggtagaaggatccagagtagctgctgttcctcgctagctgggcttagtgctttccggagacccctttcttgaagcaagactctgtaagccctgcagaggtcccctgagcacttaccaagagaggagacagattggataaggtttgttcatgactaaaagtcacccagccaaatgcagtgatgcttaacggggaagcatgtgggaccccggagagccgaaggccagcgtgagctgtgatcagagagggagacagctgcccttcctgctaccacggccctggcctggacaagtagagtgtgaccctcctcacagccagcagggcctgtctgcaggacagcctgggagtacagaactgtcctgggtcccccgtttggttttcaggccctcttcctggagctggctgagcagggtttccaggcatccagcaggtggcactgtcatctgggctggagcatgcagccagcagttcccttttgcaactcagttgccttggctaaggcccaaccagtcccaagtgctcaggacagaggctggacgggctccttcctgcacccctgctcttgggacacagtgccctccggctctaataggccaggagttgggggggcaactggctctgctccctggccctggctccccctgctccctggggctgcccgaggtgaaggtgacaggtgggggaggcaggtggagaattgggccagtgagctcatggcaaaggcgcccagctgggcaggggtgggtgctctggcctataaagcccccgaggccctgtggcctgcagaggcggttatggacggcaccatggaggactccgaggcggtgcagagggccacagcgctcatcgagcagcggctggcacaggaggaggagaatgaggtgcgagcaggggtggaggtgcccaagggggtctgaggagatccagttctgctgtcaaggggagggagatcctgtctgctacacctgtggtggggaggggggcagatgtccccaggggcccagttgggcctcattcctgtcccagggtattactggcagggggtattgctggcagcagaagactgaggcttcagccttcaaaattaagtcagtgagatggggagctgggctgggcttcctaagactgctcaccctcctgggccttgagagacagtgggctgtacaaagcagacagctgggtgctgcctgggactttcaggaatgtgtggccctgtgatgccccagtgactgagtgggaggctggggcaggggaaactccagtatttggccagtgaagaagagagtgaggaagggatgctgggaaatgaagcatggattttgccagcctgctggccacccttggggagtcctttggcgtgtggtgttctgggcaattgcattttctctgggataaggaagtggagcggtggcagggggtgctggcttgtcctattctgcatttttttttttgagacggggtctccctctgttgcccaggctggagtgcaatgcatgatcttgactcactgcaacctccgcctcctgggttcaagcgattctcctgcctcagcctcccgagtagctgggattacaggcatgcaccacc

SEQ ID NO: 54824 - DNA, 1677 bp, Homo sapiens
aacatggtgaaatcctgtctctactaaaaatacaattagccaggaatggtgtcaggcacctgtaatcccagctactcaggaggctgaggcaggagaattgcttgaacctgggaggcggaggttgcagtaagccgagatcgcaccactgcacttcagcctgggtgacagagggagactccgtctcaaaaaaaaaaaaaaggggactcctctgtggacaggaggatacctgagctgggccttcaaggggactcagtggagtccaggatggtggagggtattccagcctcaggaaatgcaggagctgaagtttccatgagtgaaagcgtggctgtcttgataaagtctggtagtaggggctaaggctggaaagacacaagccagagagggccatgtaaaagatatttattctgtgggcagtgaggagccactaaatgttattgagtgagggagattggtgtcatctgacctattttaggaaagcagctctgatggccctgagaaggacttgttggaaaaggctggccctagcaggaatggaggggaggagataaatcaggttggaggtagatgccattcaaaaaaaggagtgtgactgaatgaggggtgaggaggaaggaagggtcaagaccccaagggaagaagggatgaggtcaggaaagagcttggaatgagccctggctggggcaagcatccctggatctctaggaatcccacttctccctcccccaagggcatgtgcctatggttggctggtgccaggcaggtgagtcatgctgctatgccagttctggagtgctgccaatagacacacagaccttcagcaaggggacgcagagcagtgtcttccgttcattcatccaataaatatagctacagagctgtcaggacaccagtgccaggccctgtgctaagcattttacaggcattctcccatttaatctgcatagcaatctatgacgtaaagtgggagctttgtgtgtttcatgaactcacattcaatgcagcaaacagctactgagcacctactgtgtgccagcccacaaagacaaacctgaaatgaagggctgtagggtctgaggaagatgtgggtgagcattagagtccccagttgtctctaccaggccccagcctggcagggttcttggaggagaacctctgtctagcctgtgccccatccccagggtgggaggggaaagagggccccagaggccagtgcaggggctggagttccactgtggcgagtttactgggttaggtcatcactgagaacttaagggttagcagagatgctgagtctgcttgccatcatccattcgatcattcattcattcaccagtcactaagcacctactatgtgctagagcctgtcacagatgctggggacaccaagatgattaagacacaagctcgggagccacagtggctcaggcctgttgtcctggcgcataaggaggcaaggctaggcatttgaggccagcctggacaacatggaaacctctcatctatgtgacaacaacaacaaaatttatagccgggtgcagtagctcacgcctgtaatcccaacactttgggaggccaaggtgggcggattgcctgagctcaggagtttggaccagcctgggcaacatggtggaaccctgtctctactaaaatacaaaaataattagccaggcgtgg

SEQ ID NO: 54825 - DNA, 2049 bp, Homo sapiens
aactaccacaataaaaaagctgtttttgctaattgcgatgttcatttccacttgtgtctgaaatctttgggaatgaaggaagactgggggcaaatgctggtttggggaggagggaaactgggagccggttggccctctgagccagccctgcagcttctttactgtggtctcttttcctttcctccctgccactcaacttttcctgccccttctcacatctccagggccaggcttggcccctgcatggattgacttggtaatacactcatcctggcccccttcctggtgcctgctgtcctgtggggctgtgagtggctagcacaggcttgtcacgtggctgccttggcaggaggagcctggtaagggagcggggcaggggatggacagcctgtcacaggcagcttcttgcccagccttgccacacctcccacagggcaggacctgctcagccaatcagctccaccaacctcagaactgcccgtggaaacctggctgggcttctggcttcagagctgggaattgtgggaggagggcccagatcccactggagataccgaaggagatactctttagtattgggatcccagaaaccagtcctatatctggccagagggacactgggttgtggcatctctctagctgctacccagaaggaacagggccccctggggcctataggccttgcccctgaccctgggaacacccagctcaggcctgccccagtggccacaagtcagggaggccgcaaatttttaactagaaacattgatcattaatagggggttagaaagagttcaaactaagtctcactctgggacatagaccaattgtgcttcaggcctcctgcagagatgctgggtccccaagtctggtcttctgtgaggcaggggctaagcaggagcttgtccaggaatgtgggggtctgggcctcaggggaggggaagaaggtggacattgcgggtatctacccccctgtgaccacccccttcactgccactgcagaggtggactatgggaaactggaggagaatctgcacaaactgggcaccttccccttccgaggtaagtggggctgtcctctgtgggacctggggagatgtgagtggccctttagccagagaccaagggagggtacacaggctctgtcaagctgtccagggatagtctggtactcagtgggtcattttattatgggagaggaacaggggagactggtctggagtcaggagacaggcaggaagctccacgctggcctgtaaccttaagctaaacctcacctgcttcagtttacccagctgtaaactgttaaagtgcctttgtagctcccagagtgattctgaggttggactggataatgggcgtgaaagtccttgtcaaccttgtcacttggtgcagatgtgaaggcatgtggctggggtcacgtggcagcccagccacagtcccagttccctccaaagtttgtttgtacattctcttctggacaaagcctccttgccagaattagttctcctgtgaccccttggctcctgtgactcctgttgtggctcctgtgaccccatctctctttacacatgggtctccccaactctgaggttagggaccagatgatatttgcaacaatcaacatgtaacagagtcccaggcacaataaatgaaggtagaagaaaatgtcaaattctgcctgccctgctccgcccatccccattccttactgcacaatcccctgaggcagtgctctctgtaggaccatcccacagatgggaatctgggcctcagagtgacatggtcactgcccaaggtcattcggctaacacatagctgagctgaggtttgcacctcgtctgactgcatggcccatgctccattttactccctcgctgactctcattataaaccctttggagctgctaggccacactatttcaacggagtgtctggtcagcactagctttgttgtggctgctattgaggcagtatcgtgtagactgtggactctggtttcaaatcacagctctggagtgagcgcctgtaatcccaacactttgggag

SEQ ID NO: 54826 - DNA, 3692 bp, Homo sapiens
ttggccaggctggtctcgaactcctggcctcaaatagtccacccgtcttggcctcccaaagtgctgggattacaggtgtgagccactgtgcctggcccaatttcttattttataggagaggtcagattgaaaaattgtgtctaatcccacacatgggggtgggggtggaggattgaagagttctagggacctttgtagatgggtgctgtccatggggaaatattatacaaggaacaggtaacggaaatgcagagcagggaggcccagtggagagatcccaggaagacttctcagaggaggtggcaatgatgatggactaagaacgcataataatgtctggggacactccttatgtgattctttttagccacagtaagtcaccatgttgcttatgtgtccccagccccaaacgcccactcccctcactgccaccccagctcccagagcagcaagtgtaatcatgggggcaggggagagtatcttcctttgtcttacagctggagggggccttgtacacccactcctaatatcacagtaggtgtacaatgagaggtcattgagagcagcctccccttcaacaccagccaccctcctgatttaaggtttgagcactttctcctgactccataagaatgacagctaacacttattgagcaccaggttctattcgaagtactttataaatagtatctcatttaaacttcaaaacaactctgagaggctgggtgtgatggctcatgcccataatccccagcactttgggaggccaaggcaggcggatcacctgaggccaggagttcgagaccagcctggccaacatggtgaaaccctgtctctactaaaaatacaaaaattagccggcatggtgtcaggtgcctgtaatcccagctactcaggaggctgaggcaggataattgcttgagcctgggagacagaggctgcagtgagccgaggtcgcaccactgcactccagcctgggcaacagagtgagactctgtctcaaaacaaaacaaaacaaaactctgagaaaggcactaatatcatcactattttttaattgagttagcctgggcttctctgacttcagggcctgtgcatctgacccctcttctgtgagccctctgcttttctgctttttccccagtccctgcttcattggagatcctggccttttcctctcctctggccccctctctacactaacagggacacatcaggctcacacctggacatctaaccagggtgaaggaggggctctttggggtacccactcacagatttctgggacattttcttatcctttaaaacagtcctataagctaggattgaaatgatttcactgtcatcccatagaaaaggaaacagactcaaagatgtgatgtgacttgttcaatatccagaggtgactcttgagtctagtgctgccctgactacgccacactccctcttctccagccaggcacttcttccttcttgggagtcaggcatgagtcagttgcccccttcaatgagacagaagagagggctgtgtcatagaagctttgagcacagtgtctgcttctgactcccagagtgcaagcctcagctgtcctgctgtttagaccagctccacctgtagggcccctggaactgaccagcaggatgagaggtgaaggaagagggtgatggtggctgaatcagtggccgcagcaagaacctgccccagcccaggacggcaggcagggttggggaggaagatgactttggtattggaacagagagagtggcaagagtttgatctttgactctttagtcagagggtgctggtccaatcgtagctagattggagtcctcacccagggctggcagcttttacggagagcactgcagccccatgtagcaagacacagggaggcccttccttgggctgctagcctgacacacaggaatcaatcccccagaagcaatcccacaggagcgagaagctgtgtgcctccagacgttccctgcaatgttaccaatgcaaaataactaccaaaaaaaaaaaaaaaaaagcagctaaatatccaatgagagatatcctgatatcctggcaactcactctggaatctgacggtgtagtgaacagcatggaaaaagttggtggaatgaagtggagtctacatcacacagtgtcccctgaaggatgactcacaggaacaatttctcttggtcccagtgccaggaaactctgtgtttctccggggcagttgctttgcttttatcttttgggttctacatgtctgttagctgaccatgtttcccttttagctctggctatcaggaaactccacatcgaatttctggctcatttctcacaactatatggcaggaactttgtataccaatactgcttgtggccttattttcatttccttctcccaaatagcctccaattttttttttttttttgagacagggtcttgctctgtcacccaggctggagtgcagtggcacaatcatagttcactgcagcttcaaatgcacctggtttatttattttttatttttttgtaaagtcagggtctcactttgttacccaaggtggtctcgaacttctggcctcaagtgatccccccatcttagcctcctgaagtgctgggattacaggcccaaatatccttctattaattaagaatcctgttgtattgtactctgtgtttgtaaactactgccattttttttttctttaatggagtgggatagagaggagaaagaagaagaaagagaaagttaagcgggctgggcactgtggctcacctgtaactggtacaggtatactggttagacatatcccaagtaagtgattgataaaaacaggaaaacgcaaaataaagcaatgagattcacttttcacccagaaagttggcaaaaatttgttctgacaataccatgatttggcatgtatgacattctatgctgctcctgaggtctacactgattgattagaaatgtggcgcacagtcaggcatgggggctcatgactgtaatcccagcacttctggaggctaaggtgggaggatcacctgggcccaggaattcgagccagcctgggcaaaatagtgaaactccatctctacaaaaaaaactacacaaattagttgggcatggtagctcatgcctgtaatcctagctggctaagacaggaggatcacttgaacctggggggctaaggctgccgtgagccgtgattgtgacactgcactccagcctgggtgacagagtgagaccctcaaagaaaaagtaaatacataaaaaatgtgtcacagatgaaggtgcacatagctatgactcagcaattaacacaccaaagtatctgaactctagaggaactcttagacatatgcacagaagactttacagaaaatgtttgtttcagcattgtttgcaatagcaaatagaagaaaacattcttttcttcttttttcttttttggtagagacaggtaggccattttttggtagagacaggcagccatgctgccctgcctggttttgaactcctgggctcaagcgatccacccaccttggcctcctaaagtgctgaaattataggtgtgagccaccaggcccagccaaaagaaggaaacattctaaatgctctcaacaagagaatgacaaataaattgtgttctaaccttacaacagaatactatacagcaattaaaatgaatg

SEQ ID NO: 54827 - DNA, 1423 bp, Homo sapiens
gggaagactgtgggatggttagattgaagaaagtgggaagaaaatactggcgccaaaaagatttttttttttttttatttaaaggcgatgatgacctgggggtgattgggactagggagtaatactgccagaatactatcctatttcacgggaaagggaatgccagggctggactccgatatagcagttattcctgctggtacctaagcagttcagagatgctagaatgcagggataccacccatcaactaaatgaagcatcccattccccaggcttccatatgtgggagttctctccaccagtgagataaaggcgggctcagggaaaacaaagccctagaccacaacaaggcaacaccttctcgcaccccattttcaccttccaggcgcgttccttcctgctatccgggcccgctctcccgcccggcagggtctaacgctcacacaggtctgccaattcccctgatgcaaccctccaccctctgctcgctaaccccagtccagtcagctctcccgggcctcgacccccgcggtggagactaaagggttcaggtttgggtcccccacaggcaaccgccctcaggtcagcgtatccgaggtggagccgcgcccccgagccgggtcatctcgtgctccgttcctcagtgcccacctgaccgatcacactctttcccggccccctccctcctgcgcctccagccaacctggggccggcctttcgggatgaccgtcacgcctggacgcagggttccagcgcctcggacttttcctctgatgggctcccggctgccaccttgctctccgccacctccaccagcgattgccccacttgacgccgccatcctgggcgaccgcactgggtacaattcccgctgcccattggctgttacctaggcaaccgggagcaacgccactccgcattggcccagcccggctccacgccatctttgtgcggggccgagtgtttgcgaacccgggctgactatgtgaaagaggggtggtcccacctctgcaacgcagataaagacagaggatccagatctggcctacccagaggccgtctagttgaaatggcaaccccaaagaaaaccaaacctgcgcccgaagcaacagtgaccatcaacgcgagcggctctgatcttgctccagtccccactgctgtcaagggccccgccgcggagtttaaggcagatcctaaatccagcttcagagaggcagctttgtaaattgtaacgcgctaggcaggatagcctccaataactctgtgctagacattgtgatatcaagacacttttgcattcattataggaatttgtgctgtccttgtcattatctagatcctttttgtttaaaatatagtacctggccaggcgcagtggctcacatctgtaatcccagcacttcgggaggccgcggcttgagc

SEQ ID NO: 54828 - DNA, 2028 bp, Homo sapiens
atagttgctgttttgaaagcgcccaagtccagtaagccaattggaagctaagcgtggcgctggtatagtaggggcagggggcgtgcctgacccaaggttgggtcctggagcatgcgcagtcttcacagaaggtgacggggagaaaaatgcggaggcagcgattgcgtaggagcaggttctgattggctactgttcgcgcgcgaggggccgtgcctattcgtagccaagtaaacagggcaggttagaggcggggccaaggaggcgtcgcgacctggttggccggccggggcctgggggatgtcacggattggtcgcggccgcgagcgcagtggtgtggagcgcgccgggtcccggagccggctgtctgagggatggacgagacgagcccactagtgtcccccgagcgggcccaacccccggactacaccttcccgtcgggctcgggcgctcactttccgcaggtgcccgggggcgcggtccgagtggcggcggcggccggctcgggcccctctccgccgggctcgccgggccacgaccgcgagcggcagccactgttggatcgggcccggggcgcggcggcccagggccagacccaaaccgtggcggcgcaggcccaggctctggccgctcaggccgcggcggcagcccacgccgctcaggcccaccgcgagcggaacgagttcccggaggatcctgagttcgaggcggtggtgcggcaggccgagctggccatcgagcgctgcatctttcccgagcgcatctaccagggctccagcggaagctacttcgtcaaggaccctcagggggtgagtgcgggggtggggaccgccgccgcgggctgagggccggcggcgctcctggggagttgggggcttcgcacagccagagggaaaagggagaaacttcacagtaccagcccctggcaggatttagggatgccactgaggactggagctggggacgctctgcggaatggagaaataaatcagaacctacttggtgggggaggagtgagcggaaaatgaaaagaggaaattgaccagatacgggccgggggctcagcggtgtggtggggcaatccgccgctggacagagactgctttctagtagggtacttagcttcacactactgggacagctattcggccgccgacttgcagatttggggctttaggcctgttctctctttttggaccgaccgaaccagtgtgtcgctgttcacggaggaggatgggtgacctatcaggggatctgagaattcagttccagccttctatgttgtgggggatgtcccctgccaccgtcccagctcttattaacagacgttgaagaaagaatgggcggactcaccagtttcatctgccctgggtattgctcacttctgggaaagggttcaaatactttttgacgactccaaagtttagatagaacttggagttttagaaacatggggccatcagctactttttctttcatttctctcccagggctatcaacagcctgcttttcaactaaggcagagcgtttgccgacctttattttgtcccctgcctgtatataaagggggatggttataggatggggcatggagtgaccagggtatctgagaagtgacctttatccttttgagaactgcagaatttaagaaataccaagtcttccctgttttcagggaagtttcagggaaattttcaggtgtgctgcaatgggtcattggaaagatgtattgttatttaaattatgggtgtcaaagtttcctcagattttccctgacatctctcctgtgtgaactctttagatggccagggtgctgttttaataggagtcctgagtggccaggacgggctgttacttgtagctcttggttcggctcattgaatgatctagttattcactcagagtttgagtcgtccctgaattaatcaagaattagagaacaattctgccatgaactcagtttctcagtttacataaactgagttggggaaagctttgcgagtaataagtctttcgaagtttctttttctt

SEQ ID NO: 54829 - DNA, 402 bp, Homo sapiens
ctaggaaagccaccaaatgcctgcagaatgcttgcacatcgttctccacaggctaggtcctgagcaaatgctaacataattgaattgaactgaggcttacacttagtcctgaaaggcacttgtctccccttctgtctgaatgcccttttgttcctccattcttcatactctaacattccctcattgatctagtccaggcagtattctttaataaaacccctgtactattgcataaccataattactcatgcttttggagtcattgaaatgcttcttattctccttatggtagaaggaaatcaagatgtttgagaggtcagtctttaaatgacacttgactgcaatcttggccttcaagttctgcttgctttttttttgttgttgttgtttaatttttctttt

SEQ ID NO: 54830 - DNA, 838 bp, Homo sapiens
ttctgcacatttaataaggtatctcaggggattcagattcaggcatcctggaaccacagttcttgttcctgtgatggcacccatgaacctgaagcatggagccacatagtcagtgattgtctctgacatgggctgtcacaggtgacatgcccactctttttacattcatctcttgtccttttccttttcatgcaccactgaagcaggagaacagactcccttgtgcaagagcagccagctgttatcttccgaggctctgttttctcactggaaaatgtagttgtcaccagtgaagtaacatctgagtcaaggtccacacaaaaggaccttggccaactgatatggattttatttcttctgttctgctttcaggattctcattttctttccctaggaggaatggcttatagttatctttattattgtcatttccttcttaccaaggactgtagcaactcttggggaagtgtaccttttctaagataagaacaggactcttgaactttgaacaagagccaggtcagaggcaccaaaatgtgctaagttcagataacaacatggaagccagttcagagagtagctcaagataagttcaataagaattcttctcttgagggagttgggatgagttgctttgctactaattggaagggcctgagggagatgggtttcctcagtcattagtctttccttgctcttcaggacacagactgggtggtggtgaaggagcctgttatcaaggtggctgccatagacaatgggctggccttcccactgaagcatcctgactcctggagggcatgtaagtctccagacaatggtggtctggctcttccct

SEQ ID NO: 54831 - DNA, 2344 bp, Homo sapiens
catcatcacagccatcaacaaatctgtgtacttttaaatcatagctttatgattaaaatcatagaggcagcttgttcagtgtcaagcgcagaacagagcacgttcagatgggtgctttctttcctcctcacttaaggtggcactattgttatacccattttacagatgagaaagctacacccaaagtcacacagctggcaggtgatggaagctgggacatgaacccaggcagtctgaccccagcacccgggctctcaagccactgttatttttgttcctgccagatggctgaggaggtcttctggggaaggtcggtcccagaagcctttcggaggctatctgcttctgtagattgtggaaggagcagggagggatccaaagtcaggactcccaagctagcctctgtaccctctgcactccactgcccggtggagaattggagcaggtactcaccacactgaagggcagctccgacagacctcaaatggggatggggcaagctaagatgcgcccactccaacctcttccacagccttcagaaagggcaggcgcagctctgcgaaggtgcttacaagggccagtcggtgatcacgggcagcacaagagcatggcagagggtatcctggccgaggtcctaaggcgacatctgcagcacgaggaggccccgggactcagacgtggccgcttcgcagaacgacggggtcctaagtggatctggcggtcgcgtcccgctggcaccccggctctgactgtcgccctccggctcccaccgcagcgccgagctgggccgccgacctacgtacctggttgcttgaggcaggccgcacgcagccccaaactggtccgggccacttgggtcacagccgcggttcccgggagaaagcgctccctagccccggaacagccaatcctcggccctagccaggtatgagctcccaggcgagccttccaaacccaaggcggagttccgtgcgccaatcatcggtgggagacagggagggggcgtgtccatccccgccccccgcctccgctggcctcgaaagcggagtgcgaagcttcctcaaacctaatcggcggcggagcggcggtgagggggcgtgtctgcccgggccctgcccaccgccctctccgcccccgcgcggcgcccgaggcgcccccttcattgacgtcagtccccagggccagcgcggttttgctggcgcgggagctgggcggggctgcattcctgccccagggtgcggcgaaagctggccctgccgggtacacgtgacggatgccccttctcctgggcccgaggccagcgcgcgcggcactgactgccttgcagcgcgtggccctctgcagatcctcagactctgccgctcaagtcccctcccagcccaccgtttggctccggctttgagggagaggagggggcagtctgctggagtcagaccttgggcttcaaagccagaatgtcgtgggttcaaatattgggtcatttgtgcgactttgggccggttacctaaacaagaccgtattttaaagtttgtatgcattcggaaatgttcattagtgacctatgctgtccgagttccttgataggccgtaaacaagagagacggaaagacctatagcccttgtcctggggagtctacagcctagtaagggaggcaggcattaaacaacctaaaacatggagtatgtgattacagttgtgatcaatgttatggctataagaggataaatatggaggaacctaagcttcctctgggaggttcaggagggctgaagaagcagcatttaagctgagatataaagaaggagttgaaactggtcaaatgaagaggagtggatctggggagactgctttaaggaaagagggaaaggcatttggttgggccaggaggtagcttggctccggaggaattaaatgcgacccggagtaaggctagcaagagagagcacggtgggaagtagaaggcagaggcaggcagagaaggttgcatgtgatccttggaggggtttaaacaaggaatggcattatatgtactgtgtttatgtaacgggcattttatagtacttaccacgtaccagtagtgtcagtcagcactttgcaaatttcatcatcatgacaagtttgtgtttttagaaggtcactctggctgcagtttggaacttggattggagggggcaggagtggaggcagggtgtccagtaggcctctgataaatgcttgttttgtccttggaagatgaagtgtttgtgcacttgttcagcaatgctcaggaaaggctcctgggtctccctgacttcctttttacttcatagctgacctcttatccatttaagcttgatttttctt

SEQ ID NO: 54832 - DNA, 1656 bp, Homo sapiens
gaggcagggcgggcaggggcggccccagatgtggcaaacttggcgcagcagcgcacgggcggacagggcggaaggcccgcgtcgggctgggagatgcgccctgccctggcccgaggacgaaggaatccgagctgggggcctggcgcagaggggaaaggggggcgccagggtggtgagcgagatggaaagagagatggcaggaagccgggaggagcgcgcgggggaggagacagccgaggggaaggggaagggaaaggggcgggtgggaagggtggagagctggagacagaaggcgaggagggccgaggggaggagagaggagaggaagggtggggaaaggaggagaggaagagaggactaagaggggagcaaggcgaggaggccgcggcgggcgcagcgggcacctgggccgtgctgcccccgcgagcaaggcgccgccattccgctgctcggggcgccgccgccgccgccaccgcgcccaggggccatgctcccgccgcccccgcgccagccgccgccccaggcgcgtgcggcccgcggcgcggtgcgcctgcagcggcccttcctgcgcagcccgctgggcgtgttgcggctgctgcagctgctggccggcgctgccttctggatcactatcgccaccagcaagtaccagggccccgtgcacttcgcgctcttcgtgtccgtgctcttctggctgctcaccctgggcctctacttcctcacgctgctgggcaagcacgagctggtccccgtgctgggctcgcgctggctcatggtcaacgtggcgcacgatgtgctggcggccgcgctctacggcgccgccaccggcatcatgagcgaccagatgcagcgccacagctactgcaacctcaaggattacccgctcccctgcgcctaccacgccttcctggcggccgccgtctgcggcggcgtctgccacggcctctacctgctttcggcgctctatggctgcgggcgtcgctgccagggcaagcaggaggtggcgtgaggccgcccgcgcccgccgcggccccgatcggggcgggggaatccccggagaccagcctccttaatcccttcccccgccgccgccccgcgcgggtgcgccctggcaccctctccctgccctccagcgtttccactgtcgcccgcgcccgggaaccctgacgctcagctcccgcccgacggcagcgccgccgccgcccagaatcccagcccagaatcccgaccgccgcgccggacgcgccgtctcccgggacaagcgcaggctgcgatccgaggggctgacacacactcgcagacgagccgccccgaggcgaaacctcgcggttcctcttcccttccctgctgagactaagacgtggacaggggccgcgcagatccgggggaggctcccaaattggaaccaggcttctggctgcccccttccctcccgccccgtggtcggaagagcactcccttccctggcccctcatccagcctccggtgctgtaaaacgcaggcgctgggccgcgggcggagctgaggacaggccttggctggtcccaggatgagcgacgagtttggttttagctggggattgtgctggcatcctgcgaagctcctcccagccggtctctctgtgctcggttgtcttggggtggggcccatccgccg

SEQ ID NO: 54833 - DNA, 519 bp, Homo sapiens
ggggtctcccgtagccaggccctgtttttttccctgcacaccactgtggcctgctctggtgttgcctcctggaccacaccccacctgcctttcacccgattccccagagattctttgtccagccagctgctggctgctgacggatgccctggaaagggtgtgagggcagagttaagaggcttcctcccaggctcctcctccctgtgccctgggcgtgacatctgcagcctggaaagaggatttttcaaaactcacctggaacattcctcctccctgtgccctgggcgtgacatctgcagccaggaaacaggaagatttcaaaactcacctggaacagctccaggctgggatctgatgccacgtgtgtgtgcgccacacccactgtcttccaaagaaccattccagtgcctgcgcacacaaacatacacaggcacacacactctcttcataatttggtttgtgactggagagtgggggaggaaaacaccatcagctgccaaggcccctcccctactcccc

SEQ ID NO: 54834 - DNA, 1705 bp, Homo sapiens
gaactagataatgtctaaaaagagctcagtccggttcagtgcttggctcctctgtacctgagcgctaagtcactaatataaagccatcggatgtgtgctttaagggaaattaactgggccacacggtgtgaagtgaactgagctgggagaggcctgcacaggaccttgtacacactagctactccggaaacaactgcatgctctgctgggcatctcatacaggatacggtgtctttccggggctcacacacagtccccagttcagttccaaagttggaaggaaagaggatgaagacgtaaattcttcatttaagcctctcgccaactgttccctgcggcaaggcagggcaacgagctgcagggtcgccaagcacgtgcttccaagggtcctcaaggctttgtgaacggcggccggccaaggacagaattaactccagcctggagcgcgcgggaaagacgcgcaggcgcactgctggcaagggtgcttgcctgtgctggggtgggcggagctaaacccggagcgggatgacgtcatgaggacgcagccgcagagcgattcgcgtcccggaagcggcggtggcggccgcggcgtaggcggaggagattttcggacctgcgacttccgaacaaccctggcaggaggagcggcgttcagccgggggaggcctgaagaaacgctccggggcccagtggctctacccctgctcctgcccgaccctgccgcctccctcacggagccagcggccgggtaggtgaggtgccgtccccccgcgtcccagtgtctccgcaggctgtgtgtagttgggtgcttgggcgcagcgggggccgccacatgctggccccacgacctcgggcatggccttccctgtccagcctcacgggctccatcaggcccccctggctgcagaggtgttggccaaggccagtgcgggcgtcgatatacctcgccccttcctgggctcatacctggcgccgctctgtgccctttcgccttggctcggcctgcggggatttcggggtcccgttggcccctttgtcccatcccctcaccctcccatcaggtcgcggctgattgcctgggactggtttatgttgctcttcgccgaggttccgccccctcgtttgctgcttagagttcaggataggactttgaactgggaaagaccgtaaaggctcctcggtttcctcatcagaaagggcagacgggaatggggcgttctgatgccgactgccctggggcagagatggcccaggaagttgttgggaaccgaagggagtgggaagagttagaggatcgggcgagagtcctggagcacggtatttcattcactcattcagcaggcatttgttaagcacccactgtgtacagaagcagtcgtgaatggaggccagttaagagcagggagttttactttgacgtggtcagtgctctgcacttgatcttagccacaaggccaagaagcgatgtgatgtgataagtgctctgttagggtgagtacgtgatcctttgggagcatcggagagggtctcccagtccagagttgggggtgttggcagagacttcccagagtaagggagtgatgtttaagctgatacctgaaggatgagtaggaattaaccaggtaaagagtgggagaaaaatgttccaggacatcatttcatttcagcccatgggctgcctcgctgcagcgatcatttatgcttg

SEQ ID NO: 54835 - DNA, 467 bp, Homo sapiens
gggggaactcctaagcttccaactattcttggacagaggttttgtcctagagaggcagggaggtccctaaactgtgtgatgagcatttctggtcctgctgcatgagtgaggaagaaggtactgtgaagaatgtgaaaaatagggctactattttgacactgtgacacctgctgagtttggaatgtgaccttcccggctgtctggtgttacacagtgaagagcacagactggagtcagagctgtaaccttggacaagtttacttagcagtcactaagtatttattgattatgtattagtctctagagatataggagtaaactcatggcatttattttctattagatggtgtagaaaataaaaaaccaagcaaatacagttgacccttgcacaacacagggttaggggtgcctgtcccctgcacagtcaaaaatctggatataacctttgactttctaaaaacttaact

SEQ ID NO: 54836 - DNA, 779 bp, Homo sapiens
cagattcccagggaaggacttggagccatgcctgggttttgaggccgggctggcacctccacttccagggcatcacgggagggtgcatgggctgtgctcgcaggcatgcgggacccagaggcagcccggtgaagggtagtgggggactcgactcactgtgggcctggggaggtgtggtttctctctgctggcttagttacaggtggtggcctgtctctccggggtctggctgtagccatgtccctgcacccaccttgccagccagggacaggccccatcaagacccaggagcagctccagcctcagccagactgtccccgaggtcccaagtgaggccccagccactcaggcatgcctcaggaagctcctgctgcacatgctcctctccctgcgccagcaccctgctgtctggcttccttcctttggccacagggcgggtgtgtgtgaaaccacagggtttacagaagctcgaggtgccactgagtggcaggattatgcactgcactcggggaatcaaaggtggagacagaaagaactatggctgttgtgacacgtcccccacggctccccggttggcagccactgccacccgcagggacttttctgtggcttccagaggtgtggggcaaaggtggagtctggtgactttctccctagggccagcccctgggctgtcgagcctgggaaactccacatccctctccacacctctagaaggactcacaatgaggggggcccagacaggaggcatcaccacctggtttgggctttaccattca

SEQ ID NO: 54837 - DNA, 1386 bp, Homo sapiens
ttttcagctcctgagagtggtatctgtcttgtttactcctgtatctcagtagcaaagggttaatgagcagctgcagagtagacttgggaagaatgctggatgagggttcaaggaaggagggatccttggcctgacccctccttgctggtcactgggatggaaagtgttgggggtgaaggtctcctggacactgaacttctaggctgccccttcccattccaggctcttggggactttcagaaggttcttggaccgtcaaggagctgccatcctggtagtgctgcagctacctgcctgccccagtactgcaccaggctgcagtctccgttccacactgtgaccacactccatacactattttgccccaatgcccttggcaatgcacacccttgcctgccagcccccttgcttgctgctccacatggacttgctggccatggcatgtggctattccccctgtgccaggttggtggtgtgtctccttcccatctgcagtttctcggtactcatggcaggaaaacactgccagtttccagaaccgcagtgattcagcctgtgggtcactaatatcactcccaccctggtgagtcatgtggtggttgtcttggcatctggagtcccaggacaaacaacaccctcccctgtcctcctttctgccccttgcttgcaccctggaccttggcatgagtcaggcgggcattccccagggagattccggcctctaccccatgccctggtgactgaaggcaactcacccatgcaatggccattttcctgctgggagaatccttggccacactgtaaggtgggcagaagcagagacatgagtgagttgagaaggtcccatcccaggttccctcctagtcacagccacagagtagttgtcaccctaaccacagtgtgaggcatgctctgagctctgggcctggggggagccccctcccttgtaagacccttcctttgcgctgagaacagaaggctggcgggaaggccatgaatggatacggttcagactcttgctcatttccctgtgcaaaggatccacacgagctgggacgtctaacagaacctgtcccttctgtagcatcaccctgtgactgaggctgggtctgtcagggcaaagtgtaatgagggctgggagatgctttttgaggtgtctgctcactgcccacattcacttctccaagaacctctccctcacacgggtgggtgcctgcagccatgcttgtgtcccacctctctggccagggctgatgggtggacatcctagcaggagggaagactcaaggctttgcagcaagaatttgaacaaattgactcagagacttaagagttgggagccggccctgccaggctgtggaggctctaccatgcccatatgggggt

SEQ ID NO: 54838 - DNA, 2410 bp, Homo sapiens
taggaagttgggaatacaaacaatgagctcaggtgagaagggactggagtgtcccctctcccaccccaattttaagaactctggaaaacaccaatattttagaggtaagttagaggaaacaaagtagaatgaattcagagaaggaaaacctggatagtgtcatagaaaataagtgataatgcccaatagcgtcaaatgactaaagcttgagttagatgagtccggaaatacctccaatgagtttggcaacaaggacacttatgacaacaaggcattttccatgggggcggaagctgcgatgaggagtgaacacagatgagcaagtagagacagtgtagattatctttttcaaaaaacttggctgtgaacggaggaagtgagatggtataattgagtggaatgtaaggagatttgcgcacgtatatagccgagaggaatgaggaagggttgaagggacaggagcagaaatgctctccggcactcgccattttgccagcttctcccctacgtgacctgaactcagtgggcgcggccgggcctcgcggaaactacaacccccagaaggccccacggcgttgggggcggagccgaggcctgacgcgcgccccagcggcgcgagcggaagagatagagcttcgcggagacggcggaagcggagagcaacagcgcgccggtaacaaccagccccgtatcccctccctctgtacctcaagctaggatttttaatccccacttctcccttcacagcccgggacaagacttccattccgtcgtttgttgctggtattttttttcctcatgtgacgcgaggggccgccccctgcctggggcggaggttactgggaagctcccgccttctgacccctgcgggcccgcggttgagagggaccctcccggggctcttttgcactcactggggctcgtgctcgctttgggcgctcgccccaaatgatcctggcggaaaggacgtgctttttctgggtttcaacaggtattgagcggggtccctggttaccccctcggggctgcggggccgtgggcccccagggctgccggcggtttccgggcttcgcttcgagcctcgcctttgagcctcctccgctgcccgggagccccgggctacgggctgggagtgagcaatctataaaggagcatgtacttcctgctttttcttggcaggcctgcgaaaaaccccaagtccgatctttaaagtttgtgagtgcagccccctctcagttgtgtacgggaaggagcacaggatttggagtctgatatcctgggggaagtctcagtccgccacttggctggacctgtgatcttttgtacagtagtctgtttagcgcagcctcggtttcgttgtctgaaaagtggggttaatgttctttgccctgcggccttccagggttgtgggcttcagcagaagtgatattcctgcgaaagctttgaactctaaagtatgtttcgggtataaccttgccatcccccagtctccagtctaggtcagttgagttttaaaaccaggttcatgtctatacgaagatcaaattagttaataaatagggggaaagtgtctttggaaacgaatctgaaccatacagatgtttttatgccaggttcctagtgaagaggtgaccttagggcgttaccacctgtggagtcaatttaaaacttcatctggattttaaggcccaccagaatttagactcttcttcctcagcacacacaactatctcttgctgttataaccttccttcagtatcacacaggtacaagcataaagcagtaaacgttcctcagatatggttgtactacaactaatacctgtccccagcaggtcttgtgtcttgtgtcacagttgaaattcagaatataaatagccaaatatcccatctgtttaattttttttgacattaagctttgagactaagcaagttgcttattgtcttatttttccccttacagagaatgctaattctgcaatcagttttttttttttttttgggtagaatcaggatttcactatgtcgcccagattggtctaactcctgggctcaaatgatcctcccgcctcgacctcccaaagtgttggtattacaggcgtttgacactgtgcccactgtgcccgacctctgcgattaatttttaaaggggtaagaaagtgtagttaggtatttttagtctgtgtttattctgaatttattgattgaagaatacttgaaaatggtccaaaaaacaagagaggatgacagtaagttgcattagcttagtgtacaaattcgagcaaatttgagttcaagtcctggtgctgtgtcttactacaggttggagtatccttatctgaaatgcttggtaccagagtgtttcaaatttcagattttggtatatttgcatatacatagttagatatctt

SEQ ID NO: 54839 - DNA, 373 bp, Homo sapiens
gcccaggctggtcttgaactcctggcctcaggcagtactcccacctcggcttcccagagtgctgggattgcctgcgtgagccactgtgcctggcttcagctataagatttgaagataggtatgcaggtggcttagaaactgggaaatgtagtagtgacacattttggccaccagagggtgaagtccagtcattgaagttgtgctctgtatttgaccagaatgtggcattcttggaaatgaagaggacacattgaccctctgttcatttaggttaagtcatagagcctcttgctctctgattctgctttcacttattatctttctaaaactttctgggtagggctggggcagatactaaagaaaggagaagaaa

SEQ ID NO: 54840 - DNA, 1065 bp, Homo sapiens
ggcagggaggaggaagtttgggtctcctggggaataagtatttataaccctgcctgctacctcctttgggtgctggctcttagagaatctgtttttggaaaatgccgggtagctctaggaatcagacctacctgtttgcccattttttcattcaacattctctaagcacccactgtgtgccaattgctatgttcaaggaacttagagtttagtggtggtgacggcggtggccttattacaagagagaatgggagggtgggagtaggggccatgtgcagctgaggcactcaggaaatgccgtgtggaggaggtcacatgagcagggtattaaaggatgggtgggtgtcagtgagcccagcccaagaagactgttaccatctccttgccatcccactaggtggcaccagtcactcaccctccccttggccgtacttggcactgtgggcccaggtcaaggcagcttcgaagcccagctggcggcaagccactgtggcctcctggatagcaaagttgtcatcacacacggtgccccactggccctggtgcagcacctccaggcggccctcctctggcttgctctctgggcccaccagccggagcttagtggtgcccagtgactgtggcctgctgggagggggctggcctagcagcagcaggaacagaaagagggtggctggtggggaccacgccatggtgacttcaaggacagctgaggccaagatacctgaggaatgagtaaacatgacagtgatcaccacctctacccagatctcagacctctgcagcaatttggcagctcctggcaagacaaaggaaagaaaacccccctcaaatgtgtgtgtgtgtgcacgcgcacacacacacacagtggcattaattgagtctgggccaggttagctgatttggttcaaatccaccacattcgccatgaccttgaggaagtttaaacttaacctcactgagtctcagtctcctcatctgtaaaatggggatagtaatctccatctcacggtgttgttgagtgttaaataaaacaccgtatggaaagtgcttagcaaagtccta

SEQ ID NO: 54841 - DNA, 3291 bp, Homo sapiens
gtgcagcaactttaggatggctcatcccttctctgccgttgggcagctcttctcagcagcctcctctcagccctgtagcctccccggggttactgactctgtggacctgaagcagtgccaacaaatggtctctgagctgtacctgtccaggctaggaaagagggggcttgaagtcttctgcccccttcccttcggtgtttctgtcacacgccgaccccccaacataatcagctccggtctggatagttggagagcccagatcagccctggttcgttgtcccccaagtcgtaagtgtgacatctgaacccgccttgccccttccctgtctcctccctggaagaaggcagagcaatggttacacacggcgtgtacacaaacaagacacgcaggcacccctgaggcctgggcgcaccactcagggcgggccttgggccaagctccccagcgtggtcacttgtccagttggaagcaggttggtgagcgactggagggccgggctgagggtccaagggatcccccatgcaccctaggcccagtctccaggaaccctcagaggcctgcagactcacagagagacagaaggacagatgggacagcaagaggcagaccaagaggcagacgcgcggccaggcgggggctcaccagatggagcgcggacagtccggggctgggcgggcgccgcggcggagcagcgctaacgggctccctccccgggcgccctggggcctttttatccgcctcccgcccgcggccccccagccccgagctggccgcggaggaggccccgcaggccccgccccgggcgggcctggagtccgcgggcgccccgcccggccttccgcgcggcgccccccgtcgggacacaggccaggtggcgggggcgcccagccgcagccggcggggccgggaagtcccggggggcggggggagcgggggggcggcggggggtcgcggggagcggagctctcgggaaagggcggcgctgggcccgcggctgttttgcagggagggccgcggcggcctcgggagtccctctcccaggcagtttcctcttttgcagaacaaggtaatgacgcccacctagagtcccagtctgtgagtcctggtgggtgccagggcccccggcacagcacccttcgcacgggagcgcccggctgtcacaggggccgaatctcacgagctcggtcacttaggacaatgtagacgccctttctgggaggccggggctcagttcagagaggtcgaggtggcgcggtgcagcggtgctctcctgcaggaacaggcgagtcacccagagtttactgaataccgcccccccccccccccccgccctccgtgtgaaactctgcgctgcccattgtgcagctgggaacactgagccccaggcgacataacttgctcctccaggcaatacacagtgaatgggagaaccccttcacagagctgaatgatgcagtcctggcccttgtcagactcacgggaggagggtgttagtgcagggagcagggactgtagaattaaagaaatgtggacatggctgacagagaggagtcccatcagctgaactgagcacctaggtgcctgaaccccagtccaagcccccagtttctttcccctagacctggtcctgcccttagcctcactggccccatctgtaaaatgggcagagggttccagcctcccggtttcctccctaggcccacagctgcccaacctggttccccctcttgcccccaccttgcctaaacgtccttccaaaggttcattcatcccacaagcctttattgattttctcctacatgctagacagggtgctggagtgctagacgctggagggggccttcccagtctggtgggggaggcagatgtgcaagtaagaataagcctggacaggcagagtgtgatagagctaggatgtcaagatggaccttttcgatcctgggtgacagccaggtcttaatgaccctgctgccagggacctgccatccactcctggctgcccgtgtccaagatgtccccccagtgcccctgccccaccccagctgggcccaaaacattccccatgatgaatcagcaggaaagaatgctcccagcctcgggtcagtggcagcagcccagctcctcccccagggacaatgaggcagctgtgggcttgggtgccaggtatgcctaagccctctcctagggcccagccacctctcatgctgagccagaagcaacacagagggttcggaaacgtgggctctgcctgctgccaatcactcaccaggcctggctgcccagaactaaaaataccctggagcgcaggggcgggcggaggatagagaccagggaatgaatggatgttgcccggaagtcctttaatttgcacaactctgggcagaggccaaggctgggaagcagtggaagtggggatctctaaggcatgcgctgtgagcccccaaccctgagaagtgaggggctctggtcccagccccagcccatggcgtactaacagtgggattttctcggctgagttgtcatctcctcatccttaaatgtgattgctgtaggggtcagatgggaccactggattcatctcaatcagctttcatttgattgagaaagccctcttcttccctcctgcctggctatgttcacccggcctcagcccagcgcctgtgaccctctccatactctttatataatggtctgtgtctgccttaactctggacacccccacccacccccgagcttcttatttatctctaaacccagatcctgtcacagagcttgacacatagcaagtgctccagaagtgctcacggattgaataaatggacctagcggtgcgtgccagtttctggtccccaaggtgatacagacaagccagaggtgcttcctatcttgtcctcaaggaatttgcagagtggtgggggagacagagccacaatcaaccagcaggacaaggcatcatcaccattatcatcatcatggctggctggggtcgaaaaaccggtggacaatgctttcatcatctcctgtttacacaatgaaactgggacacaaaggggttaagtgacttggccaacatcacacagctgttatctgcagatgggagcaagtgatcaatgacggcgaaagcacagggctgtgtggatgctgggcagggaagtctgagggttgaagccttcccagaagtgccttggaaggtggatctgatacactgggtagagaggggggaaagtggagtggtcaggaataacactttacgatgttgtggaagccgtgaagcaccatgcaggtgtctg

SEQ ID NO: 54842 - DNA, 469 bp, Homo sapiens
ggggtaggagtgggatttggttagagttgggctacaggaatcttaatcttgccaggtactgtcctgagctggtttaacgcttcacagtcataactttttgtaggaggtgggggggacaggaactgataagggtgttggggtgaggggacaggaaggagtttaataagctctaagctactgaaaggcagagaataggactcagattccccacttccacctccaggaatgccagcacaaatgccctgaattcccagagaagtttggactttgtaagatcaatcgctcaacacacatttcttccccagagtctcttcctgcccctcaggaagacacatgatgtcaccccatttctcatatgtaactcctccttgcctggggaagctcagtgtcctggctttcctctccccctcctcctcctcctcttcctctctcctctcaggacctcttcctgccctgctgccttccccac

SEQ ID NO: 54843 - DNA, 477 bp, Homo sapiens
aggtgtgagccactatgcctgacccggtcttgtattatcttgcattttggtttgttgatgtagagctttgtaaacatttcaaagactctttgttaggaattggttttatctaccagccagaatgtatgatcattcaagactgggactgacagattccaaaggttaattttcatgtaaccagctcatctttagcttccaggaaccgcgaagggatagacaagagctgtcctggtggggaattcccttgacctgacttggaggggcagagaggcaggggacctgacacagaggtcaagggagatccctggatcaagcaggacctaagccaagaccagagccagagagccaggagcgagatgtagagccattggcatcaaagtgttatcaaagtccaagcaagaagtcaggactgagggtggaaaggagaaggacaagccctgtcagaagccagggctcagtctgatgaacctgttcaga

SEQ ID NO: 54844 - DNA, 600 bp, Homo sapiens
aattcattatgaaaacaaccccatttcttcatgtctctctgtatccacaccgcttgcaatgtgacttttcagctcctcacatgaagaattggagggctttcccccctatcccttaagtctaagttgcatttgtgacttgctgtggccaatggaatgcagtggaagtgacaatgtaccagctccaagccaaggcctcaggacctcttgcatacttctgctttttctcttggacctggccaagccaccaagtgactaagcatgagctggccaagtgcatgatgacagacacatggcccagccacccctccacccccgcctgtggccagccatcccccaggcacatgtgtgaagggcctcaggctgccccagcagctgagctgcagatgcaagagcccagttgaggtcaaacaagcctggtttagatcttccctgtggaatgatagtctcatgagtgataataaatgcttgttgctttcagactactgagctatggggtggttagttatgtagtgacagttaactgattcagtatagaaaccttgggaaactatgctctccatgttccgcagagccccagtgtctccttttcagaggcctctt

SEQ ID NO: 54845 - DNA, 2690 bp, Homo sapiens
ggcttcctcacttacagcctcggtggccctggccatggcgtctgatctccggatcattgtgtctccatccgtacaacggggtcaggaatccctgccccagccactttacagggctgtgagggggtaactgagagaacagtggtggagagccccagtaaccgccctgccctatggaaagggatggctgtcaccctcagtgaacaaagagtgcagggtgggggcaggggaaggcacaggagtgcagggacccagagaccaagggctgcgagggaggaggaacactcctgagagctggaacaaccactcctgagagctggaacaaccacttatggtgacaagcgagatgcaaataaaagagaaacaggaggaaagcgaagaaagggaaaagacagagaggagggagagacaggaggagaggagtcccagccactgcacccctcacagccctgtgcagtggctggggcagggatccctgaccccgttgtatggatggagacacaatgatagtaagctccccccactggaccctactctgcagtaacagtgaggcccagaagaagcagtgcagggcctggaggccagggccccgagccacaccaccagtgtctcctcaggcagcctggctcactgcttcaagcaggggcctatgctcttgagttcaggggcctatgccacagggatgaccatgtgccacacttggcatgtgacgctggcgacatggaagcactagcgacaaagtgtgtggtctgagtcgcatttctcacagtggggcatgtgcctttctgctcacatgtgtgcctggatgccacgtggacaatggcaagagtttgccagacagctgggcagagggatcacaaagcagttaaacgcccatgtgaaaatgtgacctctgaactctggctcccaacctgctgggcttaccagcaacaagaagagaagatgagacagacagacaacaattcagaagaaaggaatccaagagttacagagcgggaagtgtgtgtggcccgtcctggcccagggactcagcctcacctaccatgtcattctcgaaccacaggaagtaggagcagtagaaatccccctcctggaacagcagcgtggtgtagcccttctgcaggtatctgcgcgccagctggatcagagaccagacctggggaaaagacagcaagcatcaccactctcccagccttggtctgcctgggcagctctcacctccgaaggaaggaaagggcacagccgagaagctccgtgagtgccaggggcctctcctagtacccgggcactgccttggctcagagcaggaggctcaacaataaatcattattggatggatggactaccctccagttagcgtgggggcaaaatatatgtaaaaaagctttgtgtaactttactatacacatatgccataaattagtgaactgggctagtgtggtggcttacgcctgtaatcctagcactttgggaggctgaggtaggtggattgcttgagctcaggagttcgagaccatcctgggcaacatagcaaaaccctgtctctacaaaatatacaaaataattagccgggtgtggtagcacacacctgtagtcccagctatttggggggctgagatgagaggatcgcttgagcccaggaggtcgaggctgcagtgagctgtgcttgtgccgctgcactctagcctgggtgacaaagtgagaccctgtctcaaaaaataataatattaaaaaaaaaataaattagtgaaatgatcattcaggccagagaatagccagggacatcattaatgaacacaggagaacaaggtgtggtctcctgaatcccctcctctgcctggggtcgcccactcacctagtgcccttcaggctgggaactgatggcacaggtgagtgaccctgtaggatgtgctgagccaggggggaagtccaaatcagagttcaccaaggggtcagatggaaacacagggcctgagaaaccacgtgccttagctcccctgggaatgtcctcctgcctgacgcagggactgtcaccagtgctgccggtgaagtgccccagggaaggcagcagggacagtgggctctctgccacctctcagggctgggaagagactcgaggagccctctcctctacccttaacgggagggacaggcgatctgctccaaactgcatcgccgtgtgattactcattaaatctgccatggattgactgtacttttcaggaaagtaatttgacaacatccatcaataatcttaaaaacattcctcccatctgacttaataattccatttctaggaatccatattggggacataatcagagatggggacccagatgtatgcaaggtgtatactgcagaattatttataacagcaaaagcctagaaataatctgtatgtctaaacatcagggaaatggttcaataaattatgttacattcacatgatggactattatggagctgctaaaaatcatgtctataaagagttaatggcatgagggaaagcatctgatataatgtgaaatgaaaacatggtagcaaagttgcacatacagagtgatctcaactacaacaaactgcacagaaaaccaacagaaagaaacgtaccaagataaccccaactgtctccagaatgaggggcaaggatgaagatggtgatgatgatgccaccagtaagtactgaatgaact

SEQ ID NO: 54846 - DNA, 1707 bp, Homo sapiens
ttcattagggttaaaacatggtcttaaaggtggacgccccctctgacctgacagcttcaagtcctgaggactcccgcgcccagtagtcacctccacggcgaagcactgctcctgctcccgcaggcggctgtaggtccacagcaggctctggaagtgctcccacagctggacacgctgcgccaggtctgggggccgcagcctgggggcagagccagagagggcgggagagatcacaagaaagctggtctcccccacacccaaccaaaggaccacagtctcagctcagcatcagagcttggtgagcccatatgacctgcccacacagctgggaaagggggccaggtttccggccgagctctaactgtggagtggggtgggataggcacggagccggaaggcaggcagctgagcaaatcacctcactcctcagcctctgtcacacaaacacatgtcatacaaagccagctagagagagccagggtgatgcttaagcttctcacacagaggccactgaacacagaaagatctggtccatcatcagggccctactcagggtcgcagccatctcggatgctggcaacgtctgcactggccactgtgattcatgtaacaggcatctgccacctgcagcatttgccactgacaccatgacctatctgggctaaaatgactcatgaaacaatgtttgtgcatttgagaaatgcctcaatatgggtagttgctcatatcgccacaaaactaaagtcccagagcttcacactccgcagcttcccaatccatcttagagaatcagggggtggtgatactacgaacttctcttttctaggtctacatttcaactacaagccttttctggggtccctcccacctcagtgtatactctgaaccatgattctctttccccaagttctttactgtgggcccagagacaggttttaaggtctgtctcctgagaaaaccttcacgagactgtatgaatgtgcatgggtttgtgtttttctggagagagagtctgaagcttgagaagccagagaggactagctcagaccagatttgtaatgacgggtgatgatgttgggaggatggaaagagcactggactgagagtcctgagctcaaatatccagtttggatgtggccaccaaccagctagatgaccccaggcaagtgagttccattctctgctctgtttcaccagatataaagtcagagggtcagaccagatggtctccaaggttcacttgagctgtttctctgacctagggacccagctgggggcagtatgtgaaaaatggcagcttcacaggggctgggcacacgctgcctggcccagcgagggtgctcggcaaaggacagaggggaccagctttgaagactcactcctttcggataagatgaccgtccacagtcaccagcccaaagtgcacttcaaacaggtacttgagcacatacagcttccgccgcaggtccccctcgctctcggtgtggtcaccattgatggcaatgaacaggcattctccaaactgcaggcacaggcaggccagtgtcagccagccccaagggcactcccttcacctgccctggtctctgcagacaagccaggggaggctcgggtcccaggcgggtttgataagatgccgtttctgccttctaaaggagtctaaagttccaaataagagaggcctgtggactccccatcaagctgagg

SEQ ID NO: 54847 - DNA, 2025 bp, Homo sapiens
aggagtgactgacgggagacagcatagcacatcccaggtggtgaggatgcagtcccggtgaagggagtggggatcctgggatgatacgatgaatggaaggaaactaacaggaaaggcatctgggaccaggttctagttttggctttgccaagtcccataaacctctctgagcctcaaactcctgcggagaaacagagcaacatcccctactctacctccctacagggttagatcatgggagtgaccaggcaagctgcaaagtaaccttagcaaactgcgttcttacataggtgtggggatcattattcctatttcccagcttcccttcttcaaataacaggattaatcaatctggttccggaatcattcatatttgaatagagggcaggaacaacagaaaacttaattaggaagtcaagcactgtgagccagtaagaggcaagtgactacccgccacagagactgctgttacgagttcggcctttagcagccgaaccctgagacgggctccatcacccacatgattggcccgaatgccatattcccgaaacagggggatgcttcccaaaggctgctgggaagagaacctcgccggtgtcacactgagacttccgcttcacctcgctatcttgccctagaaagggaactcggaggggactcactgacgaaaggagctccagatggcggggggccaacctggggcgacccccagcgcccactttcaccatctggaccccagcaaacctccctgtggcccttggtcccgtcttcagcagctccttctggggtcccacaccttcggagcccggccctgcccctgagtctctggagagagcgagtcagcagttcgccgccgcggggctcccgtttgcctagcacgccagtttctgtccagtttcaccccaaatccccacctccccccacccccgaacctcacggccaccctgggaaggaggcttgacttgtgacatccacccctcttcacggctgaggaactttggccccgagcgaggaagcgaccggcccacggccacacgcccggagtgggtgaggctaggagtgggcccgctccgggacccctagggaccctacctcacttccgggagggttgaaggggggctccggagggaggatcgccgcccccagaggggacagcccggaggcccacgtaccggatcgcggcgcgcacagcgccccgcctgcaggagcccgggcgcgcttccgggtaggaccgcgtgatcgcgcacgtgaccgcccgccccgggaggggccggagccgccgtcgccttccgcgggttcgagccccgcccctgccaggccttgcccatgccccattttacagaagaggaaacggaggcgcagagagaagaaataacttgctgagggtccgaaccaggctcagaacccaggtttcctggctcctcagctgatcccttctctcctccccatgccccggaacctcaggctttgcctaatgaactgaagttctggggctagagctgtccttttgtgactgctctccctgacctttggggaggtgacatagcgcacagaagggctcagttgcccccagagtgccaacgctggaatttataggagttctcaatctattttgggagtggagtgcacattaggagttttgtgttgaacctatgtttgcaatatttattttaaaaaatcgtatgtgtattgggggtgcctggaagtggagggggcgctctggaagggcctaaatccccgaacagtccacccctcagtgcctgggtgccacctgggagctttgagcccagcccagcaaggtatgggttgcaagaactggctggggatatagtagattgagcatctcttgggggaaaggcagaggctaagaatcaatacttccaccacctgcagatcaaagagagcatcactccccccaacccactacccaccccttccagcccaccttagggcaaattcttccaactccccatctacagcacatagccctgccacacgcatctctttgctcagcccaccgttgag

SEQ ID NO: 54848 - DNA, 1114 bp, Homo sapiens
aaaataaattagctgggcgtggtggcatgcacctgtaatcccagctactcaggaggctgaggcaggagaatcgcttgaacccaggaggcagaggttgcagtgagccaagatcgtgccattgcactccggcttgggcaacaggagtgaaactccatctcaaataaataaatcaatcaatcttttctccattggattaattatcatggcacgttgtctcaaatcagttgaccatctgtgtgtgaatctatttttggagtctatgttcaataaatttaaaaggagtttattgattttcttagaggcagtttttggttgaatcaatttttattgatcctgtttttaaattcatcagtttctgttctgatagttactatttcgtgtcttctgtttactttgggtttttttttcttctagaaacagaggccactgatttgagaccttttgtcttttctaatggagttgagtgctgtagatcttccccaaggtcctgctttatcagcatcccacaactttttatctgccatgttttcattttcaattactttaaaatgctaatttttcttttgatttatttagagtatagttcagaggtcagccagatatttgagtgtactttgtaccagctttttaagtttctcccacctgttccctttccctctccattcaattttcagctgctctggcagtcttgaacaccaatgtcactccacggtctaatataatagctgcttgctgatggaccttgctctttgttgtgaactaggggaattccttcaggagaaaagccaaataaatgtggatatcacccagtgtgattttcttcattcaagagctatatctcctgcagtttctgcctgctcttagctgttctgcattgccttcaaagaattgttttttcaaattttgtctaaggttcgtaattgttattggcaaaagggtcagtctgatacaactgtaacattaccagaaattggaagttctttctgcatatttttatatgtagtcttttccatttagtttaaaatattttctttttattgtgatttctgatttttttctcatggaatattaagaagtgtgtttcttaattttcaagcacagggagattttctag

SEQ ID NO: 54849 - DNA, 1834 bp, Homo sapiens
atttacttgacagattagataactgacattaccttgcttgtctaaggttatacggaagggagacagagacataggtaacacctctactttttctaatttaagaatgagttttggctgggtgcagtggctcatgcctataatctcagcattttgggaggctgaagagggaggatcgcttgagtccaggagtttgagactagcctgagcaacatagcgagaccccatttctacaaacaatataaaagcaaaattagcctggcatggtggctactcaggagtttgaagtgggaagatcacttgagcctgggaggttgaggctgcagtgagccaagattacaccactatactccatcctgggtgacagagaaactctgtccctaaaaaaaacaaaaaatgagttttcatatttaatattaacagatgtttccatttagcaaaacagcaaagtaagtgataaagtaggcatttgtgatcacaattcatctatcttgcttttatcctttctgtatagccagccactttcaccctgagaagggggactacatacatagcaaacttagaaaagagaaacagctcatcttatgctggatagagggaaatgccacctatccttgacctatggtaccagaatccagataatgttccagctgttcctgacagccatgcacccaggtggaagcttagttttatgggtcagcagaaaaggccagaaacaggccaccagctggaaataaggttgtgagtcaccctcagaaaatcaacattgcatagtgatgactgtttctgggccttgcccaacctccagtgtgataacattgccgtgacatcatctgagctgtaaagagaatagaatgttataaattgatatagaggtctttgtttagtgttccttctgtgctatgaatgatagactgctttagagagagataatcagacccatgcccaatagagcagtgaattcccagagataagtgtgttgtaaattgctcccaatggagagctaggcagagaagagatccaggcctggccccacatgggtaagtttgggctaggtccagatctgataggccagagggagcaggccccctccctttgctagaatgactgagtgaataagtgagtaggaggcttctatatggagagcgaggcctgcctctggaaggcatggggtgggagaattgagatctgaaggtcagtgttgaccgcatcagatatgcaaggagcttttgcttccaaatatgagaagtgaccctctgtagtgaagacagcctactcattggagtggaaggcagggtgaggagagtggttcagttacaaaagaagcccagatgggtcttcacagtgtattttcattattttgtttcaggtgctatgaatatctatcacccagatataagcacagtcaaacacgagttcaataataccgattaatctttctaaggcatactcaaatttatatcaggtctctgctagaaaaccttcaatggtttctcccatatacagaattaggtgcaaacctttcttctgaagaattaggtaatgcccttttagattcagatgatcccacagtattgacatctttgggttctggggagtgcaaaacaacgtgtgattagcaaacctttaaaaatctatactaataaggagtagttgtcctggaacaggccctattctggtttctttattggttggttaaaaagctaagagtagaaccaggaagcatggtgaagattctctactgaaatctcgaattccaggagccaagttgctaactagctagatggctttggcaaatcccctaacctcactgccctgtagcttttgcatctgtaag

SEQ ID NO: 54850 - DNA, 1239 bp, Homo sapiens
ggggtgctcccacaggacccagtacttcttggatctcagctcctgtcacacagtattgtgaccgctgagctgactgcttgtcagtctctccactagattggaagcccatgtgtcttactcatccgtcactcttctgtccgcccactcacacaggaggcgtcaataaaagacacattggatataaacacgtgggcaaaagaactactacctagaaggaaagactctggacaggaaggccagaaacccgttttagtccaggcttgggacatgaaatgtgcaggtctaggtatgtgaccagccgcttctggtctcagtttctggattgttaaatgatgagagagagggagagagggaagggggagagaaaggaggaggggcaggggagagataagtccgactgtgtgtttgtatgggcctgcgcttgagttatcagctccctttcctccagtgtgctttcctaggggccactagaggtcactcttgtcctacacaatggtgccaggacagtctgacttcggggtggcacccaggaagccggaatgcgtccgcctgcctccaaatcccgcactccagtctcaggaaggccgggagatgtgccctgcgcttggcctcccggaggaacaaatcacagaatcaatcaaatcccaaccagaacttcgttgcggtcccgttggcaagggtcccacctggaatgtggcctaatattaaggaaacgtgcgaaacgggactgcaattcctgcaggggtgccggcttcccggccagcgtgcagagaacggggggtcccagggcaggtgcggggtctgcggcgcccgccacgactcggcgctgggctctcccgggctccgggtccccggctgcccccggccgccagtcgggtcggccccgcacctgtttgtgctttgcaggctcccggccccctcgctgagcgaggaagctggtatgtgcagctgccctgcccttctccaggtcaggggcaggttagagtcccgaggaggcccagtcaggtttgaggacagaggggctttgcttccctttcctgctcggtggggagacggtgcatctggggcagcttgaacaggaagttcgtctgaaattgccttgagtgatggctaccacgctgaggaaggctgctcagaagtggcccctgcaggtggtgtcgcctggtaccccatgtccggctggaggaaaggctctaagaccgtcatgaccctctctggggtgctcccactcctcaggag

SEQ ID NO: 54851 - DNA, 549 bp, Homo sapiens
tgtcttctaagaaaacactgaaatatgcaaatgtctgagcagacacaccatataaagatattacacaaagagcaggaagggaggaaaatcagacttagcctggatttcaaggccttctgcagtctgggcttattatgtgtttgtggcctttccctttgccccacaaagcatcctgtattccagtcacatgagatgatttgccacctcccaaacaaaatgagccttgaacttctgtacttccaaacccttagtgatctcatcctgttgctggaagttgcctttcctacagcctttcctagaagtatggcacatccttccagctccagctccacggccttcagccctgagacttttcagattcccaagtcagaattcatctctctctttctcataatcccatctcctatatttacccttaggtggtctgttttgtctctgagttacggtagcctctgtggagagggaccaggtttccccagtcctaattgtgtggagctggaggagagaatgtggggctacaaagcatcccctttacagcagtctacaggt

SEQ ID NO: 54852 - DNA, 886 bp, Homo sapiens
gaaaaggattggaaattttaaaaggtactggatttctcaatagttaaaggaaaactaagatgaaatggaacaaaaggatcaaaatctgagggaaatctatgtgcatccaaaatataaatcaaactctactacagggtctcaacgtgttgacctctcatttatcttttctcaggaagttcttggaagaaatgcttcaccaaaatgagggagtaaacctcaaaaagggcacaaatccaacaaataagagtcaaaaagaatccccaggataatggtgaagggcactcccaggacaacagctgttcaggaaacacggcaatcaacccgtccagatgggaacagaaggagggatggctccaggagcagatatctccaaggagaagatgaaactgatggttacctgaggtgtctgcatatagaaacaggagatttactactctggtacagtttagggatgaatttagaatagattaataggaagctaagcaaataaaaatagagatagttaataaataactccagggtaaacaaaagttgtgaaagaaagaaaatgtcatcatagcataccacatgtccctgctgtgaataatatttacatagtaacaaaaatgtaaaccataaattctgaccaatatttaagatataaactcttggaggatgagaaaagtatgtaaataagtaagtttgggtatatgaatggttaggaggtatgagagctaaattctcatcttccataggagcatcagactgttacttagaaacatgaaagcagatgtcagaagtgcctaacactgtgaaggttgcttctggagtggggaaatttggagtgggaagggaggagctgggcactgatgattttaaaattataaacaaaaatgtattagaagct

SEQ ID NO: 54853 - DNA, 881 bp, Homo sapiens
catcacccagacaaactcagatcttcagatctaggtttgcatactttttcttccttggctcacattctctctcttgttctcactcccatttagttatttagttataaaagataatggcctatagtgggttccaaactgtcgagtaaatcacactgtagtgagccccactgagaaaggcctgcacaggtgtctgggcagagacagagaaaagccagattcttccattcagtttttggcaagctccattcccctccagttaaatttaaatgaatttttaagaatgaacaaaaaactagaaaccagagggggccaaataaatggcttttgaataaataaataaaaggttgtaagggcctacatatcctgttggtttgaaaatgtccaaaaagtagaagagtatgaagggaggggaagaaaggggagaggagcaagtagccagacacatcacatggaaaatgtttgaaaacaggctgggaactggctaaaagcagagtaagtaaatagttgggaagttggctggaaatttgcaccagaaagcattcttatttattcattcatcaaataaatatgttctgaatgtctactagtgtataacactcttctaagcccagaaggaagtactcaaaacattaaaatgcactctgagtcatgagaagtttgtaatttagttggagggaggacatatgattgaacaagcattcagggagtgcttaccacatgctcggcactgtggtaggtgctaggtattatagacatgaatgagacagcctctgcactcatggaactcacattctagagcagtgttgtccatcagaaaaataatgagaaccacaaatatgagccacacatatattttaaaattcactaacagctatatttta

SEQ ID NO: 54854 - DNA, 3405 bp, Homo sapiens
gcaggtttccttagccttaggtattacctatcaacttcactcctcctggagacctcaatcctcaggtaacgcagcaaaagctcatattttaacaaggatattagcaaagttctgtcggaagatctcagaggcctgggtttctctcttaccaacagccctttcatgtgtaaagatggctccaaagggaactctgaaacttagtccatttgaattcactcatggagaccctttttaacttcagacctcctgcttgattaagagacacatagaatgagcacccatattatcaacttaggccaggttctgaaggccctccaagcatatggaaataaaatattgccccctccccaaagggaaataattaacctccctgttcgaccaggaaacttagtcccgctaaaaacttggaaagaaggatcccctgaagatcatttacagtcaaaatggaagggcccctatcaggtgttattgagtacccacactactgttaaacttcagggaatagctagttgggtacacccgtccaggattaaacatgttttgtatgagtcgcaggcacaaaaggaggacaccacaaactacatatatgagcctttggaggatctctgctacttgcttaaaagaatcaacactcagccagaagtggtaacatgatgctgtgggtaggaaaaggcactttaattttgctcttcttcctgctctgttttttacccctcctaggatgtttgatcactatcttttcactaattttttgcccttgcttgtttagcctcttaaagttaatgtattctagattacaaccgttccaggtaaaacaatgctggcacaaggcttccaacccatcccatctactgacctggagaataaaagcattctgcctctgggccccttagattaggcatccagagattttttactacggtttgagcctatgcccataagctcagcaggaagcagtaacagaagatggacctctgcccttctgaagcctgtttaagattaaggaggagtatctaatctgatgcaggactcagctccagaggtgagacttagacatcaggccagattgaggactaactaaaacagggccagagcaaaagcaactttcaatcagacatgcctaccagcctgccatggcaacacccaggagttactgcccctttccatggcaatgacccagtgagccaaaagttactactgcttccctagaaatttctgcatgaactgccccttaatctgcatgcaattaaaagtgggtataaatatgactgcaaagctgccctgagctgctactctctgcctacaggatagccctgctctgcaggagcttcacagagctgtaacactgcttattcaataatgctgttttcttctacctctggcttgcccttgaattctttcctgggcaaagccaagaacgcttgtgggctaagctccactttggggcttgcctgccctgcatcagatacattgtaaaaatcatacgtttaaaggtatcaaagagctacaaaggcaataaggagtatcagaaacaaaattccagagagcagagaaccattcataggtgatgtaagggtctaaagtgctttcagggcatttgccatttctgagcaaatatttggggtatgtgctcactcctgggacaaggactttggctagtggctgagatctggaattgggccaagcacaggaatgctgcttacagacagaaacgaatgaaactttttatagacacatgggcaggagtgacaaaatagaagatttaagaagcctcaaacacaagcttcctcctcaaggtattttctgaatttttaagatgagtcaaaactttagaaaagcagaatggaattttctagagtctatgaatacttactatttaggaaacaaagactggttagggaaaagagccttgaatacagccatggcaggtgaaagccctggagattaatactaacatctgctgtcacatttgccaatatgggcacagctagaggctgagaatccacacttgtcagaaggctgcttctgaaaaatagagaaactggtggagttttggcagttgtacagttgtaccaaaattggagacttgacagactttaaaccagcagcctctctagtcccaataaatctgtgatattttgaagcttcatggggtggaaggctaaagagctaatccaaaacctctgtaaagtggagtgaaaatttccacagagccttggttctaaacaaaggaccccaggctctcaatgaaaagccatgaagtaccacttcctaggaacagggaaacaaaagtggactagtctgaccaaaattgcaaaccagacttgacctaaataagtgcataaactggattaaggtgttcagatccccattctattttcttagactaggaaagggtgaatcttaattttaaaaataagtgtttaaaaggaaggaaggaaaaaacaaaggaaggaagggttgatgggtaaatcacctctggtggaagaaaccatcttctgaagccttgagagttggggtgttattattttaacataatacatcttacatggctgataaccaataaaagcagacccataggtcatacagatattggagttagcagaccaggactttaaaatacctatgacttatatatatgaatatatattcaaataaaggaaaagacagacagtagaaatgaaaagatacaaaatttcaacagagaaatggaatttatagaaagaatcaaatggacattctgactcaaactaaatatctgacattaataactcaatggatgtgtgtaaaaatagattgacctaacagaagacaggatagtaaactcaaaagaaatcaatagaaaatatccaaactcacacacacgcgcgcgcgcgcgcgcgcacacacacacacacacacacacacacacacacaccagactgctggggagtaggagagaacaaaggaagagagaagaaaaaaaatgaagaagacacagacagagagggaaaacagtgctagagacttatgggacatgggcaaaatatctaatatacatgtatttagaattccagaagagcagagaggaaatggaacaccagcagtatttgaggagatatgttggaggattttctaaaagtgatgaaagatccactgtaattgtttgattccattttttggcagctttcaagccctcctcctccattttaccctcttgacccatatctggacaagccaataagacagcctgcatgctctctcctttggcactggcaagaagttcaaaccacgtaagccctggccaatgtgcacttactccagctccaccctctatccacaataaaagctaaagccagtctctcctccttgctctctcaagccattttgggggtctgctttgcaacctgccctgttaccccccaa

SEQ ID NO: 54855 - DNA, 635 bp, Homo sapiens
tactctattattggattgcttttaggagacactgagttctgtatagacaacaggggaaaggaataaagctttgttctgaagtcaaagcttctgagtaatacagcactgactgacatttaactcaattaaacaattcagctttgctgggctagtaacaccatctttgcaaacaaaaaagcacaacccacgtatgctaggctgctccacctgtacactagcatggctgtaacacagcctactgcacaatccatactcagtctttgcttattcattgattcattcagtaaacattttttgaattcctgctttgggccaggcattacactagactctgggaatacagtggtgagctaggcagacattatggagctaaaaatatcctcttccatctttggtcttcctgcaagtggtctgttgcccaaagcaggggtccctaacccccagactgcagaatggtaccagtttgtggcctggtaggaactgggccacacagtggaaggtgagcagtgggcaagcattactgtctgagccccacctcctgtcagatcagctggggcattaggagcgagaaccctattgtgaactgcatatgcaaggaatctaggttgcgtgctccttgtgagaatctaatgcct

SEQ ID NO: 54856 - DNA, 388 bp, Homo sapiens
ctgctaagacactcgtctgttactgatttcttctgctttttattaaaagcatttccatgtcccttgctcagaaacctctgagtgtatatgcataattaccaaaatgccaagtcatcagcatccaacctactaaggaatgtcagactccaggacacgaaaacattgatcttgcgcaatactcagaggggccgggactttctcacggagtaaaggttcttttttcttttaaaaattgcttttatagactcgatctttgtaagacaattgtatcgtttggtgttgggaatcctttatgattttataaataaactttcaataacattgtttttactttaaaaaaaaagacatgtttttcctcctcccagcacaatagtgatgtagcttgtgt

SEQ ID NO: 54857 - DNA, 459 bp, Homo sapiens
cagatggatcgcaaggctgcatgtggggctgagggagcggcaggagtcaaggacaatcctggggtttctggtttcaggaactgcatataagtggatgacacttactgagaagggggaagactggaagtggactccttaattccataatcagatcaaggcagtgatgattatggttctaatgagaaaatgattcaacctattattttactctttctgctacatggtttgccagacaacagcttggcagctaaatagatcatcaaccttccatgactcattctaaatagaggctaatcaaatattttgctttatctcaagagacaggattaaattcccaaggttctaccctgaaagagcagaatctataaagaatctgatttttcatttgaggcccctgagctaaatctgtgttaagagaagctgacagcctcctcatccccttttttggaagaagcagaa

SEQ ID NO: 54858 - DNA, 1063 bp, Homo sapiens
gagccaattttcgtccccatggaggcagtatcgtccccatggagaatgagtggttgaaagcgtttggagagaatggcagattgacagaaggtagaatcattcgacttctctgttggctgccttcccttactaacaacaagcatctttacattgggaggagaacaaagactgatatgttcagaaagctgtgaagagatgggtgggagggcatctaatcacattcactcatgaacttccaccagcccaaccacacactggcagagtgagtgtcctctgaagaactcctggggctccagccagacagggaaggatctggaaaccacatcctgtgcagaaacaaaagtggtgggggagaggcagttcatgtggaaaagtgtaaacaaggaatgacaactgctactttcaaatatttgaaaggtggtagattagaagtgccagtagatttactatctgtggtttaaaggaaggaaaggaggggcaggggagtggaacaaagatcaaattctggttcaaggtagatgaacttttaccgtgagcaaaaggtaaatgagcctctttttttttaattaagaggccccaccagcagaaggggatgcctcaccaggtatttaaagaatccatcaccactaccaccccaccagttgaaatggatgagtcagagacaatatggagagactatttcactggcggagaggcaggacttgatgacttctgaggccccagtcatccctcaggactgcaggattttctaacaacccaaatgagtcctagaaagtggcagatcctattaaaatcacaagaattaactttaaatacttaaaaactccaattaatagacctcttgtgttaagtaacatcaaaccccaccaaattctacaaaatggccatttggagcggcccttggactctggaaattgtgatgtatgtttttgtggttctgtttcaataaaccaggagggactctgacagcagggaacgggctgatgttctataatcaacctgagtgatgtcatctcctctcacagtccaagaagtccagtttcttaagtaacataagacagct

SEQ ID NO: 54859 - DNA, 995 bp, Homo sapiens
atcataaccaccctagttaaaactgtatccactcctagaattcctaacatgccacctcctgctccatttttatagcatttatcatctttagtatactacatcattttcttactgatatagtcaaaaagattacatttagagtctgttcctctccccgaaactgaatgcaagggcaggggattctgtgtgtttgagtcactgctgtgctccagcatctagaacagtgcctggctctagtagtgggcatctgatgactaaaggaatgaatgaatccaaacctttggaacctgaggtacccggataggagccaaatgctgaaaatctgcaaggtaaataagcaatgatcactctcctggggaaagttagggccttgtgggagatgaagacttataaaattatccattatagtaagaacagttaagtactgttattcccaagctgtgaacaaagtcctgtgataactcagagagcttaaacaacaagctctgcctaaaatacctaaggattcagtgtggaagtgacccttgatcagctcttgaaggacttagaggtggggactggacagctagagcaataagggagggcattccaaatggagagaagggccaggcaaaggttcttagtcttgacagggcccagtaggtctagagaacagcaagactcttagaatgtcaggacctctagtggagtgaggggaaatcagcaactgtaagaacaggatgaagactgtcacctgtcacctactttcactgcatgccaagctcaaagtctggattttaccctacaggcaatgggggagctatgggcggtgggggtggggagtgggaacaggtgacatgagtagcttgttttgccaaggaaggtcatcctagctgcagcatgcagaatgtactaaaacagggaagagactagaggcaggaaggtaaattaagaggctattagtgaactaagacagcagcctgggaatggtgaggccttccaagcagaagaaaggc

SEQ ID NO: 54860 - DNA, 851 bp, Homo sapiens
ctctgcaaagtaaaaagcatcttgcaaatgtcatgtcaatatcactagtgcactgaggtctctaggccattggcccagcagtcttcttccttctgcatctccccaagagacttccagaaaaagcctaggtgctacttccacatgaacctggcacctttaacacaaacatggagaaggagtggaagaaggcccaccactcctcttgtcccagaggaacagaaataagacgaatgataagcaaatgccctgacgatttcaatgacaggtgacacaatcacccaaggacccacttaaacacatctctatcctctctctgtattttgacctcagccagtgtttacccttctgacttcatcccacttcatctgcctcaccctttcattgatctaaattgatctatttcacaatatttgatcctgctctacagtaaacctctaagcatttcctcttcctctgaaagtatttttaagtcactctgagttatccagcaccaatttttttccctacactattctatgattatgttaggattagagctttacagggcagttaccttagctttgcacccacgccaataatctgtccaagtaggattcctggcaggggtcatttgcctctctgtttgaatgtttaggtcctcaataatcctacacttacgcaagtgattttgaaatggaaacaaaattttagagtgatactgatttttattttcttgatttctgcccaaaattaatccctgacttaaaaaaaaaattacattttagggttgttgttaccatttactgaacaacacgtgttgattgtagaaaattgggaaaagcccagaaggtaaaaaataaacattataatta

SEQ ID NO: 54861 - DNA, 2709 bp, Homo sapiens
tacctgggactataggcggccaacaccacgcccggatacttttttgtatttttagtagagatggggtttcaccgtgttagccacgatggtctcatctcctgacctcgtgatccgcccgtctcagcctcccaaagtgctgggattacaggcctgagccaccgcgcccggccgactttttttttttttttttaacaaatgctatgcacagacaaaacgttatctatgagaaacctgattctgagcgtccttcatgtcacactctgctacaaaatgattccaccttctctttccacaatttctagtccttttattctaagtctattacctagcataagactttatcctacccattttcatctctctggctggtctttgcacgtggcaaaatccaaatggagaaaataagtgtctgtggggcttcaaacatccaaatgatagtgagaagaataacaaattcatcagagagggttaggggtaaaaaatttgagaggcactccaatataaatcttcttggcagatggggaaactgaggcccatgctctgagctgtccaaggtacagaagagaatcacttgaatcaagaaatgaagataggatgtgtggaaagtaagcttctaccatccatacttctctccactcctttccaccatctctacccattcctaccacatctgtgacggccagaaccatctccccagaccccccgggggcagcattaacctgtctcaaagcattgtgtaacaccagcagatttttaaatccttaagggcaaaatcaagcctcagtctccccctacaaagcttaataaggtggctgattgatactcggtggtcactcaaatatttaccgactcagaacagagctttctagcgttaaaagttctcctttacccatttcctagcaaccagaaccctaagcctatcaggcttcctatttttctacctctctctacaagctccggcagcctcatttcttaggaggatgcagtataaagaaggcagaatggggaatcggaaagactgagtttgtgtcttggctgctacacctggtttgtgcggcctcggacacatcgcccctttccagggactccacacctgcatctgtaaaatgggcaggttttaggaagccttcgtggatccagcctcctctccggcgccgccctcttcaggcagcgccacactgggcctcggcttctcccacagtctccacgacctgggttgggtccgctccactccccgagctgctcacactccagagcactacatccttacctcccactcccaggttgaccttgcgggggtccggatcctccctgaagtcggcagtgagcttgaagaccaggacaggctgggcctgcggaacctcggcaaagactgacggaggtgccatatcgagagactaggaatcaagagatttcaccccacgcccggagctggcaggtcaggtctggccgttgcgactggaggagacactcaccttcacctagccggcgggggcgggcccgcggcctccaatggtcgagccgcgtccaaagcttggcaacgcgattaaccaatcgccagcttctgacgacgaaggcacaggggagaaggaacgctattagccaatccaagaaaacaatttatcggctgccgagaatgatgcaaccaatgcaatttcctccggctgaggcgtgggcgaagactacggttgattggtagagcgtgctcctatcgcagaggctgttattccttgggtctcccggctgaggggaggagccgagcgagcggcgggtgtccctgagaggccacctttcgaccttcgagggccaggaggatacggggaggtggccggagggagttcccgaacacaggtcttcctgttcccgccgagcaggtgttggcggtgccaggcccggcctggcgggcccgggctggcagccaaatacccagcgtctgtgctcgggacgggagtgttcgtccaggacgtgcagctccggagcctgcgcgggcgaccttgaccacctttgtcggctgtttccccctgagggaagtatacctgtcctgccagccttggtctctggcagggaaggtccttccaacagagaggggtgcgcacgaattcctttttgccgctcttctattaatagtttgagattttcctccccgattccttgcagagagggcctggtcctcaaggacctcgggatctgggcgcgacgtcccttcccagcttcctcccgcgcgcaccggaccagatcttgctgtcgtcagctggctggtacccaaagttcctcttcgtcaggctgttccttccccgttagagtccttcctccccaggagccctctccatctgctgaccttcaagacccagagcgaatgccacttcatccatgaagccttcccttaacccttatctggccaaaatgtctctttcctgtgcttctgtactttcacaattttagaaaatgcctttgtggttaaaaacctatctccgggaccggactatctaggtttagattctggctgccgcttacgaatttgggcaggtttagtcaagttattttaacctctctgtggaagttcctgctctgtggaaataatagtattttcctcagagttggtgtggggagtttgtgagttaatacatttacgaagtggttagttgcatgtaagaaggactctctaaatgtcagctattattaacattgcatatctgccacacccttcat

SEQ ID NO: 54862 - DNA, 3465 bp, Homo sapiens
taatggctggcacctttactaatgtacaagaataagaactgtaaagaacaataatctgtttctttcttcacccagctttcttcagaaggacctgacttcagtacacataaatcatcctgcttggttgtgaatgcaattagttttactttcacaagaatcgtgtcctcttgttgatctctttccattttcttcatacttacatctactttctaataccgtcacacttcctttctaggcaacttctccctttttgccaacttcaggtggccaaagaaatatgctatcagtttcatctctcttgtttggaggctgatgtgctccctgaacatacagtcctaatcccagctcaattttcatgttcaggaaataggtggggtatcatgcttgcttcacagagaaactgaaacctattcctgaatacgatctttcccacattacttccagtctggaattctgcattctcactgcacaatgatttccaatcactcatgtgttaagatttaacatgtaagtcctttatctagctgagagatcccagattcgggttcctgccccgtcagtaagggaagatacagcaaggagtttgtaaaagcactagcccagaaaacatctcaagccgttagatccatttcagggtctggttcacgccagttggcttcaccttaatcgagttagtagcacttacctgagcttcgggataccccatcccaccctattcctgtttagtcccaggtggggtccagggctttggctgacagattttcgatcctgagtcccgattcagatttcactgacggttagaaataggtcctggttcctgactgggatcaactcccagctgggaccttgcttgaatggagtgtcggttcgaatcatgtggtagtggcaggagccaggaaggaacccatgtcggctccggctctcagccgggatcctggctccggacaagacccaggggtcgggtcagccccaggtcgggttcgaagccgggtgcaggtctcaccttgacgcagtcgatggggtacatcacgcagtgctccaggatccctgccacggcgcctgccaccatgtgcgtggtgacagtggctccagccggcagcgcctcgtagtccgggccggagtccggatcttgtcgtaccgggggcctgcaggccccggcctccccgccgccggccccccggcccacgccccgctgcagccacccgtccagcagcgccgactccccggggctccgcccgggccctgccgccggcccccccgccacaccgccagcaccccgcccctccaactccatccacccgggccagctgcggcgcccacccccgccgccgctgccaccactgccgccgccgccccccggccccgtagtgtccgcctcaggcgcggcccagagagcccggggcctccggctcccgcttggccccgcggacacgccccccaagcaaccattggtggagacgccaagttagacccacccctttccttacgtacgaaaaatcagccggtagtattagcgaagtcgcctgtcattcctccgccctgaggcgttgctagcgcctacatcccaccttttcccctttgatcttagaagcttcttgtttattggtcactgattggccgacatgtgcgatcaacccgcctctgacttttagaagggcgggagaaacttaaggctgaactttgataggctcaaccactcttgatactttgaccgcggccattggcccgcaccacgtcggtccccgattggctacagaaagagcgacgcgcccagggactctaggggccgacttcgggcccctcactagcgcctgcagagctgcggtccctgtgcgcgggatcgcgtcgggggcggggcggcgacaggccttcaacgtcaaactgctgacgggcgccgttacgacccgcgctcccgtgcgctcctcaaattctgagacgcgtggctggagagcgggcggccctggccccggagagccgtgttcccgcgggatctcgtcgcgggcgtgaggcggggccggcctgggccggtcatccctggctggcgcgacccgcagcctgtccgggaagccgttgcgacatgcgggctgggaaccgcctcacctccaggggggaccgcggcggcccgctagactctggtcgggtctggagtattgggccctctggccggactcggtgctcctcaggccccagcgcccggcactgagcctcgcatccacattcgcagagtaaacccaacaagtgttgaatgaatgaggttccccgggccccggctgtcactgggctctgcgccaggccaagagccgaaggcgggggaggaagatgtcgaaatgggcgggatgattcacagatgacggccggtggcgaggcggggctggaggccgcatcccaaaggcagcagggaagtgcggcggctgtggggaagctcggacgcacggcctggccgagtctgaagcatcagtattttgtccctgagccggcgcgctgatgggtcccccgcctggcgatgagggcttctccctccctcgggtcagcccgggtcctgagaggcaaggccagcgattcccggccttaggacctcctgctctagggagcacgggcgtcttcttccatttgccttccccgagcgtgttggcacaagctgcccgcggtttccagctctgtcttctctgttttacccagatgatgcaactgtggacttctccatctgttcataggttttccttggataggaaagatgttttccttttttctttctaaagtttagctcttctctgggcttcctttttaaaaactttttctactctcttcagcagttgttattaacctttaggtcgcgaccgtttggaaaataataaaactacgaattctcttctcctacttccacctcccatcccctgtgtgcactcaaaattttgcatatcatttctgcgtttcagagtccctgaaggtgccatgtggacaccctaggggtccattaacctggttaacctctccctggccggcgcagtggctcatgcctgtgaccccaacactgtgaaggccgaggtgggacgatttattgagctcaggagttcgagaccagcctggacaacatggcaaaaccccgtctctacaaaataataaatacaaaaaagtacaaaaattcaaaaattagctgggtatggtggtgtgcacctgtagtctcagctacttgggggaggattgcttgcgccagggaggtcgaagctgcagtgagccgtgttcatgccactacactccagcctgggtgacaaagcaagactttgtctcaaaaaaatttttttaaaaggaacttctcccccacagcatgttcagtctctccttttctctagcatatttagcttgagaaatgaataggtctcacaaaaacccattcaatcctgctagagtactaattccctttactgccagattactccactaatgacctatccacctctatgtcct

SEQ ID NO: 54863 - DNA, 827 bp, Homo sapiens
tttcttatattctttggccacttgtatgttttcttttgaaaaatgtctgttcatgtcctttgcccaatttttaatgggattatttgcttttttcttgttgagttctttgagttccttgcagattctggatattagtcctctgttgtatgcataatttgcaaatattttctcccattctgtaaattgtctgtttactctgttcttttgctttgcagaaggttttttgtttaatcaagtcccatttgtctatttttgttcttgctatgtttgcttttgaggacttggtcataaattctttgcctaggtcaatgtccagaagagtttttcccagattttctttgaagatgtttatagttcaggcattacatttaggtctttaatccatcttgatttaatttttgtttatggcgagaggtatgggtctagtttcattcttttgcatatggccatccaattttcctagcaccatttgttgaatagggtgtcctttccccagtgtttatttttgttgagcttgtcaaaggtcagtttgttataggtatgtggctttatttctgggttctttattctattccattgattttttttttttcagaaagtctcactttgtcaccaggctggagtgcagtggagtgacatcggctcactgtagccccagcctcccagcctcaagcaattctcatgcctcagccttgcaaatagctgggattacaggtgtgcaccaccatgcccagctgattttttttttttgtagtagagatgaggtttcaccatgttgaccaggctggtctccaacttctggcctcaagtaatccaccctctgtctt

SEQ ID NO: 54864 - DNA, 3467 bp, Homo sapiens
tataatagtaattcaacgtgctaagtgaaacaataggcatgtataaaaaaggtgtagtaggtcaagtagggcttttaggggaaggcgacccttaagatgggtggtaagggatgagtaggaggtgatttggctaagaggctgggacggttattcaaggcaggtggaggggcagaatgagcaaaacaggacgcgttgctggagcgtggtaaggaaggcaagtagcggcagaggacggcggtagggcggatcgtggggcgcaatggatgtgccacgttggaaagagcttggactttatgccgtcctcctggaaatgagataacggctggtgtaagcaagaaagaaacacacacacacccacgcgcgcgcgtcgtttcctttgtgttactgtaaggtcaaggagggcggcgacacagaaattcatgatgactggcataagcagacattcaatgaatgaatgaatggacataagcactttggtgtaaacgtcattgtcttcgatttctgttttctcacggggcaagacagtgaggtcggggcatcagtttgggaggtgatagggaaggtttaaggtgagagaactgccattctggtagggagggtcagtgggcacaaaaccaacaataggttatgggcaagggatgcgcttcggtcgcgaacaccctgaacccacctaccggagctactctgtcccaggagcggccgtggagaaagcaaccagccgagagttcgcgccccagggagggaagcgggcacagggccgcccagcgccactcacctgtgagctctccgcgggccctgcaggcggagcctcggtacgacgcctttccgattgggcgcggctcaaagtcccggggcgggcatcagaggccgagcgctctaggggattggccaccctggcggacggacgtgctgctgaccgagctggttcgcccccggttcggctcgtggagagccggcccctccgtgagtcttctgtcagtcattggctccctgcggtttccttggggacgtggcgccgccgccggccgggccctccttccggctgggcaaggggccgcggggagcagctcgggactgaaccgagaggtgccgaaggaaccggcgggccgcttgatcccgtgagtgtgggcgcgagagggctgtgggacccggagggacggggagaggaagcgggacccacaccccgccacctggggacgaccggttcctagaggacagagctggcccacgagaacgccccgctcccaggatgcccgggtagggtcccctgggcctgaggaaccagagcagacggagcgggagcctggggaggaggtgggagccgtggaattcccgtgcaggtttgtctcgtgggctcagtcggacagaagcctgaaatcaaatctttctaggctgcagacgtaggagatgcctgggacaaggaggccaccttctcagggcaaaagaaaaagaaggtgacaggcgttgagaccaccgaagggaacccatggctaggtaaggctgcacactttccctccggctgggagcacggcagaggatggcaggcaggttggggggccctgggaggctgtcccaagtgaggtttgccctggagctgcacttggactttgtattctggttagttggatgcagagacgatcaaagttgtattatttcgagggctgataaataatagtttctagcccatagaccaggagtggtagagtgagtcggcttgctcagctctgtaaagtgcaaggttgtaacattgattcagattcgcatctgagcaaggctaggtgccacttgaggaggttaaacaaagaagtttttttgttttttgtttgcagtgaactttaaaagcagacagaccgaggtccttttgaatcaatatacaaagtgaacttcacagatgaatacacttatccatacattataataacctgaagcttttaaaaaatattaatgtggatctacatgcaccaataagggaaagttataaaataaagtgggggaaagatgcagaacagcaggtatggtggactaccatttgtgtaaaaccgagggaatggatacgcacacacacacacacacacacacacacacacacacagagatatattactgtaaatatattggtgtatatttatgcttgtgtatccgtagaatatccctggaaagatacacagcaacggccaggtgcagtagctcacgcctgtaatcccagcactttgggaggccaaggcaggcagatcacctgaggtcaggagttcaggaccagcctggccaagtagaaacccggtctctactaaaaatacgaaaattagccgggtgtggtggcagtcacctgtaatcccagctactggggaggctgagggagaagaatcgcttgaacccaggaggtggaggttgcagtgagctgagattgcgctactacactccagcctgggcaacagagcaagactccatctcaaaaaaaaaaaaaattacacagcaactgggtagtaatgtttgcctctgagagattgtggggtcagggcaagaatcacttttcactatacaatatatccttttaaactgatttgtcttttactatgtgcttgtataatctggtaaaacatttttaaaatcagttaaataaattttctgaccatcctgtttcttgacagaattcttggttgggaatactgtagttgctctgattctccaatgttatgaggttgcccagggagactggtgatcttttcactaacatgagattaagtctttgaattgcactcaaagtgcagtttggaaaaagggcagataaggcttttctgatatatatagtagaagcaccatgagcttcttctaaaattagagatgacaagaacatttagacttctgttggcatggatttttgcctttattaggagggttttatccaattttaaaacgatatttaagcactcagttgtagaaatgtttcagacttactaatgtttgtctaatttcaggatcagtttttcctacctctgcccagcctcctggtacttcactgtgcccacagtgagtccatttctccgtcagcgggtggcattcctgggactcttcttcatatcctgtctccttttacttatgttaatcatagactttcgacattggagtgcttcattaccacgagataggcaatacgaaaggtgagtcagctttagattttggcactcaagtcataaatattttcataagctgtttaacacactactgactttgacccttttgggtgatactgtacttttattagtaaaattgcatgccatttattacataaagaagattttaagccctattttggcaatatgcagtttggtacaggaatactgatactgcatgaaaggcatctttgtgttttcttgttttggtgggctgaaacttattgtgtgtataaatgtttaggactgtattatacctttatgaatggacccctttatcattattaaatgattttc

SEQ ID NO: 54865 - DNA, 1073 bp, Homo sapiens
aagcatttaaatgtatgtgggtggcagagtgatctgataattcttgtctatcactgtatcccaagtggtcagagccaataaatacttggtaggttgaattaattgaaacaagttagcaatagagctgaggaacacatagactgtgccactgtggcgacctcaccaaagtcctaacaccctggaatgctgtggctcagagctcattgttacttaatgaaaggttctgtatatattgccacaaatgaccatttatcattaaacttcactcagggcagcctccatgagtcatttaagaggcaaacatttattgagggtttgctgtgtcgatgactctatgatagcactggagtacaaagatgactaaacatagcccctgaactcaaggagttcgtaatctagttagagaggcaggcataaaggaaaaattatttcccagtgagataatagtttaggtacggttgtatagaatcaggagtgaagaatcaggaactatgtacaaggttaagaattaggaacaaagctaagaatcagaaattaaacagaagaagttcttgagcaaccaaatttgatatcactaagttcatgtgctaaaagcacctgtactttactgataagataggctctcacataaagcctgttagcttttattttacacactgttctcatttgcatggttctcacttgtctcagaacacagtagataacagcaaattggaatggtgggtggggtgtgttgttagatgtgggcacattatgacaataatcagttatatctggcatcttgacagtgaagcaggagagaggaaatttaataaagatagactcaataactcaaaatttctacagacagtttctatagtggtaaacagttctacatatgttgttaaaactgttttattacatagtctaaaaatttatgttaatgaaatgataatctttttttttttttttttttttttgagacagagtctcactctgttgcccaggctggagtgcagtggcatgatctcagctcacttcaacctccacctcccaggttcaagcgattctcatgccttagcctcccgagtagc

SEQ ID NO: 54866 - DNA, 985 bp, Homo sapiens
cttttggtcctctttagagattggctagtgtggcatcggcaaaacaggagggtccagcaatgcaaataattggccatgatggctaaggccatggctacaaattatatatgacaaaaaaaaaagaaactatatatgaaaaaatgcatgaaaggtctggtgatccattcattttaggagcctaaatagaggaaggcttctagttggttgaaagtgtaagaaacctgattaggtcataagaggtcagagttccaggaaaaggtaatatggctactgcccagaggggaaaactgttctttagttactagtttgtatgcacaatgagaaaaatggagactttccactgcataaatgccatttaggcctatcttcctctttagtgatcaaaggtcagctgacattttagccaaagcacacatggagacttcgaaaggaagagaaagaaaagttgagttgcaccaaaactggagctgtaaagttccttattttggcaggaatcagagaggataacaagatactttatttggaaagcaattaaaactttctaagaaagagaccagttgattttgaatagagctgtacaaagacacggaggagttaacagaccaacagctccattttgtgagctctaggaccaaaccaatcaatactatttgatacatcttttgggcagagaaacatgagaaactctgtgacaatatcaaggtagtatagataaggtacatgttcttgagaaacttatggtctaaacaggtagagcaagcaaatatgaaagaaatcttaggggctcatactgaaatataaacagggaatattgacgtccacattttagaacagaaggaagaggccttttcaaatcattctgggtactaccagtcagcattgttgggtagaggctttttaagaactgagaagccatgtccaaggagacaggagaggggaaggagtaggtagagaagcagatggatgttaaagagaaaaggaaggc

SEQ ID NO: 54867 - DNA, 2263 bp, Homo sapiens
ggttcatctgtttgtatctcccactaaactatgagctttggggtggcagtgtccggtcagtcttgctctctcccttctgctagctttgtttctaacactgttcctttatataatgagaccatgataaggatttcgcaaatgaataaactgacttcctccagggcaggagtcttgtaatatttatctttctttttccagttcctaatatataataaccactcaataattactagttaagcaaatgcatgccctcttcttactatatccctgtgagtccaaagatccatgctcggtttcctatttctgattaactgagtcacctttagaaaagtaactttaagcctcaatttccttctctgtaggatgcagtaatacttcctcatctgactacttggaactttttaagcaaaaataaactatatgggtaaaaattactcagcttttaccatgtgctaaaggcctgatgtatattaaagaatgtaatcctcataacaaaccttaaagtaggtattgttatccccattttacagataaggaaactgaagaacagaaagtttaattaacttggccaataccacacagcaggtcaatgttccagatctgaacctaggggctctgatctgaacctatgcgttgtgagtgcactgtaaggagctccggaaacgtgatgtggggctctacattatctttatcccggccctttcactccatccccgctcccgcgactcggagtccgctgcagtgcggtacctgtgctctaggcgctgccctaggagccaggagcggcagatactgcctccccttcaaggccctcaacggcggaaagagcaatcgctgcatactgatgacagggaacagccacctcttccacaacccagggctctgtggtctccctcctccgccaaggaaaagagaagcacttccgggtcgggcagcgggagccccgccttctctggggaccggagcgaacagaagtgcgcctgcgttgcgactccgctttcgcgggggctgctggggcgtaggtgtcggggacgcgcgcacgggcgcgcgcagctgttgacgcgcttcttagctggtgcgcgccggagcccaaattccaagtggaaactgcaggcgcacgagggaggaacgcgtggagcatgaaaaggcagggggcctcctctgagcgaaaacgagcgcggataccgtccgggaaggccggtgcggaaggtggcgggggaggggacggtcggccgaaggctccccggggcgggccggcgggagtcgtagtcagtggtgatttcttctggagtcgtttcctcagctccttccagccccttgggcggcaccttctatctttgaggcgttaaaggtgtggaaacggagggcgtgacgaggggcaggtagcgagaatggctcagctgtggagccaaggttcgagtcccggggtcccctcataacggccctgcgaccttgtgcaagttggttaacttcagcttcacgttttttccgtcgccacacgaggatgccagtaccgcccgcaccagcagccagtactccgctgggatagttaattgtcgagcgcggagcccagttcctaacctgcagttacctgtagctgccacggcggggacggggcttggtccccaaagtcacgcagctaccaagtggccgagcttgtggctgctccaagacccgagttcttcctgagtgccagggtagcatggcatggcaggtgccagagaatttggcaagtccctcttcctccgtgaagaggaaccttcctaaaagttatcaagaatcctcaaagattttttctttatgtggattacatctatctattttgactgtattagaaattaaaacaaatttttttttgggaggccgagggggacagatcatctgagctcaggagttcgagaccagcctggccagcatggtgaaaccccgtctctactaaaaatacaaaaattagctgggcatggtggcaggcgcctgtaataccagttactcgggaggctgaggcaggagaatcacttgaacccgggaggcggaggttgcagtaagccgagatcgcgccactgcactccaccctgggcgacagagcgagactccgtctcaaaaaaataaaaataaaattaaaacaaaattttaaaatattgattagaaaataaccatagtaaacccattacatattgacataatatttttttgaaaaagaaatattcctaaacaacaacaacaaaaaaagcaaaagagtggaaatatatttttgcaagtttct

SEQ ID NO: 54868 - DNA, 1669 bp, Homo sapiens
ttcctgtttccaatgaagtcagtgtagtctttacatctggggctagagacagaacagaggttctctttcagacacatctctgaggttgtgcttttgtagatttttttcctcaaacctatccttacctttctttttaatttgattttgctttaattgagggacaagcagggatagcattgttatattagccaatggacagataagattctatcatacatgttctataaacttaatggtacttccccagagtctgtagcctatatatcttttatcacttctctaatctcattctagctgggtagggagagactaatttttgaatcaatgagaaattcagtttggggattccaagtaaagtaagcagtcgttactattccttaaattttatgcaaaattctattttacttaatgtgttacttattctttgcaacaggaggtggtataacagacagaaatctacaaaggatccttgagggttcaggtgctacagaattccactgttctgctcggtctactagagactcgggaatgaagtttcggtaaaaatgtattcttcgattcaaataagaaggatgagattaatttttactttctcccaaatagaaaaactttggatgggggcatgattaatcaatggaatattgtgactactacataagtattgtagttgtttttgtagttgaaaaacatttctaaaatggttcttgtcctgtcttaaataaacaggctctttgaacataggtgaaccttgccttgtaaaggcattgctgaacttagaccagttaatagtaaacaaattctgcagttgagcttcaaatgagtcagatatgcacatgtgcccattcgcctatgatttcctgtagcaaagttaataactatggtgtaaggatggaagagtcagtcatttttctccctcctacctttagtacttagtcttccctcacatttgttctctgttttcagttattttgaaattatattaccattaagaaattgtgagtattatatggggttttttaaatacttaagaagactcttacaatttaatagtagttgaatatttctgtttataaattgggaaaaacacaatgtaaaagaagcaagatggctggctgggtgaggtggctcacacctgtaatcccagcgctttgggaggccaaggcaggtggatcacttgaggtcaggagttcgagaccagtctggccaacatggtgacaccccatctctactaaaagtacaaaaaaattagctgggcgtggtgatacatgcctgtaatttaaaaaggaaaaaaaaaaaaaaaaggaagcaagagccttagaacttacaattccagatataaaatcaagtatactgtccagtggattcagctgctggatgtttcaagtaattaattgatgaaaattatggaatatactagtccagcatacttgacctacccttgtatcatgaaatagtctataaaatgaagcggcagtaggagggcccatttaataacataattatctgttcctttattatttctgttacagaaattcatctgttgccatgggagcctcactttcttgctcagaatattccctaaaggtaacagatgtgaccaaagtaaggactttgaatgctatcgcaaagaacatcctggtgtagccagacctctctgagagacatggat

SEQ ID NO: 54869 - DNA, 11409 bp, Homo sapiens
tttaaaattcatgttaattcaattatctgtatgtcttttttggtccctggatattccaaaactatatatatatatatatatatatatatatatatatatatatatatatatatatatatatattttttttttttttttttttgagacagagtttcgctcttgttgcccagactggagtgcaatggcatgatcttggctcaccacagcctccacctcccaggttcaagccattctcctgcctcagcctcccgagtagctgggattgcaggcatgcaccaccacgcctggctaattttgtatttttagtagaaatggggtttctccatgttggtcaagctggtctcgaactcccaacctcaggcaatccatctgccacggcctcccaaagggctgggattacaggcatgagccactgcgcccggcctctaaaaagatttttgtttgttttggaagtataaaaatgttaatattattcttggggggagaatttgggagtaattattttattatttcctagttacagtttttaattttttataggaacatgaattactagctcaatttaaaaaatgtgaagggaaaacaatgtttttactgttctcacttaaatttggatatgtgttccaagatactacacaagaatgaaaatccttattaaatctatctctaatgattaaccaaaagtggaccactctgcttatcttggacattgaacttttgtagatttttcaaagttatttaagtgcaaaacttaattagttaacatttgcttgctaaatagaaatgatacagcatattttctcctgaatcatgtagatgagtcattcttttctattgaattatctctgtgcaatccatgatttacactgcagcacacccacactgagtcattaagaagagatgttttgagaccattaagaggagatttgggatcaatctttttacataggaccagcagagctaagtttagaattcaggtttcctgactcctttatttatgttttgcagtgtttcattgtacagccttcctatccctattaaaaatatcaaggcattcgtcccatcttttgatgcttttatgattctcagtgattccagaagattacagatcatggttctgcaatgcttctgtcagtccttttagaacccattttgggctgcaggaactttcatattcattcatttcattttttacattcattaatgtaaaaaagaaaggctcagaagcccctgccttcccccaccccaagaataaccactgtgaatagtttatttgaatcaacgtttatattgtttgaatctgttaagtgtaaatacataattttttaaatcaaaatggaatcacactattctaccacttgcttttttaaaatagactttatttcttagagcagttttaggttcacagcaaaattgaacagaaagtatagagacttcacataatgccctgcccccattatgtatggcctccctcatcatcagtttatcaccagcccccaccagagtggtacatttgtgtcaactgatgaacctacattgacataacactatcacacaaagcccatagtttacactaaggttcactattggttttctctattctatgagtttggacaaatttataatgacatctattcacaactatagttatcatacagaataatttcactgccctaaaaatgctctgagctccacctattcattcctccctccctgctaacccctggcaacctctgatctttttactgtctccctagttttgacttttccagaatgccgtctagttggaatcatacagtatgtagccttttcaggttgacttctttcacttaataatatgcatgtaagtttcctacacatcttttcatggctcaatagttcatttctttttagcactgaataatattccattgcctggtatattatgactattgatgtttaatatgatgattgatacagttggattattatctaccatgtttgtggtgactatttctctttgttgtctttgttctcttttcctattttttcttccactctttttttcacttttgtggtttagttgactgttttatatgattacattttctcttctttcttagcatatcagttatacttcctctttttcttttttacatttttagcagttgccctagaggttttttgtttgtttgtttgtttttggttttctttttgagacggagtctagctctgtcgccaggctggagtgcagtggcaccgtctcggctcattgcaacctccaccttccgggttcaagtgattctccagcctcctgagtagctggattataggcatgtgccgccacgcccaggtaatttttgtatttttagtagagacggggtttcaccatgttagccaggatcgtctctaactcctgaccttgtgatttgcccacctcagcctcccaaagtgcccaggatcccagccatagagttttaaatacacatttacaatgaatccaagtccactttcaaagaacactatgcactttacaggtagtgcgagtaccttataataacaaaataatcctaattctccctcccatcccttatgtctttgctgtcattcatttttgttatacataagcatttaaaaatatacacagaaatatgcatgattgaatacattgttgctattattttgagtgaactgctattttttaggtcagttagaattaaataatttatttcaccttatttcttctccagtgctcttcctttctttatgtaaatccaaatttctgacctatatcattttccttctctcttaagcaggggtccccagcacctgggccacaaactggtgctggtccaaggcctgttagggctgcacagcaggtggtgagcagcaggcttcttagctccacctcctgtcagatcagcagaggcatgtgattctcataggagtgtgagccctattgtgaagtgtgcatgtgagggatctaggttgcacacccttatgagatctaatgcctgatgatctgaggtggaacagtttcatcctgaaaccattccccacaaaattggtctctggtgccaaaaaggttggggaccactcctctataggaattcttttaacatttcttgcaaggcaggtctactggcaacaaattccctcagtctttgtttgtgtgagaatgtatttatgtatttattattattttatatatatatatagagagagagagagacagagagagagagagagagagagagagagagtgtctcactatgctgcccaggctggactcaaactcttggatcaagcaatccctccacctcagcctcctgaatagctgggactataggcacgcaccactgtgcctggcttctctttacttttaaagaataattttgtgggtacagaatgctggctgttggtggcttttttctctcaccactgtaaatatttcattccattctcttcttgcttgcatgcttgctgaggaaaagttggacataattttcatcttttctcctctacaagtaaggtctttttccccgggcttcattcagaattttttatctttgatttcctgcaacttatatatgcatgcctggttgtagggcttttgtttgtttgtttggcatttgttctacttggtgttctctcaacttctgtgatctgtgatttggtgtctgaaattagtatgagggaaattctctttcattattgcttcaaatatttattctgttcctttctctggttattctcttcctgctatttccattacacatatgttataccctttgtagttgtcccatagttcttggagattctgtttatatagtcttacttatttttgcagttttggcagttattttcaagttcaaatattctgttttcagccttgttcagtctaccaaaaagcccatcaaaggcattctttatttctattacagtgtttttgatctctagtatttatttctttttagttctttcttagaatttaaactctctgcttacatcgacccatttgttcttgtatgctgtctactttatccattagagcccttggcattgtgatcatagttgttttaaatttctggtctgataattccaacatcccagtcatatctgagtttggttctgaggcttgctctctgtctctttaaagccttttttttttctttttttttttttgccttttagtatgcctggcaatgttttcttcatagctggacaggatatacggagtaaaaggaagtgctgtaactagacctttagtagtgtggtatacagtgggggagggggagaggaagagttctatagttctgtgaagaggtctcagtcttttagtaaacctgtgtctctagactgaatttcacaagtgcttctcagttcctatctgccccgatccctgttaggtgggacgtgatggctagagtgggctgcagctgggtattttcagttttcatgtggaaggctagaagagactggagttcttatttcccttctccggcatcatttaggctcctataaatcaagagcattaggctctatttaaacagtttttcccaagggcagactttgtttagaagagaagaatagagtgtccaggtatatttcaaatggttacttttcctatcccctctgccagggacatggaagcaggaggagatttttctctaataaaaagagaacaatatttgagaacctctttgaattcctatgggtaaactcatgaaagtgtggagatcatcccctccttatggctgagtcactctggaatttttctctctcaaacttatctacactgggcctccggcaattcaattacagttcaggttttcctgccctagccctggttcctgctgagatttcttttcttttttctttttttttttttttttttttttgagacagtgtctctgttgcccaggctggagtgcagtggcgtgatctcaagtcactgcaagctccgcttcccgggttcacgccattctcctgcctcagcatctccgagtagctgggactacaggcgcccggcaccacgcccggccaattttttgtatttttagtagagacagggtttcactgtggtctcgatctcctgacctcgtgatccgcccgcctcggcctcccaaagtgctgggattacaagcgtgagccaccgcgcccggcccctgctgagatttctgcgccagtaaattgtgatttttgatattctcttgtttatctcttcagtttgccctgtaaccttatctctctacagatctaagaagagttattgatttttctatttgttcagatttttagttattgttaggaaagattcatgacttcctggctccttacttgcttttctcattcaatattccctatgagtacatattttatactttaagcaacttgttttgatgaacatttagattctccaccctctctttttttgattacttagaacgtttaggccagacacgatggctcatgcctgtaatcccagcagtttgggaggccgaggcgaatggatcgcttgagcccaggagtttgaggctctacaaaaaaattaaaaaaagaaaattaggtgttaatccttgaccttatatttctcaaagttttaccaagagttcccccggactccgagtcctaccaccagtgccaagagaagtatgcagcctaaaggtgcaccctgccccaagtgagatctcttagttccacagctgacctttcctggctcttctggtgagtggtatggaaaatgatggagaaactgccatatgttttcataatggtcagaccaatttacatttccatcaacagtatactagggttcccttttctccacacccttgccagcacttatcttgttgttttttttttttttttgtaatagccatcctaataggtatgaggtggtatctaactgtggttttgatttgtgttttccagatgacttgtgaagttgattcagttgtcatatacctgttggccatttatatgtcttctttggaaaagtgtctgttcaagtcctttgcccactttttaatttgttagtgtatgtttgctattgagttgtatgagttccttatagtatattgtggatattaactcttcatcagttatatggtctgcaaatattttctcccacactgaatgctgccttttcattttttttatgtgtatacttgacttttaaaatcagtaacaaggtccatacaattcacatttggctgatatgcctcttgattctcttgtaatttgtaagttcctttgactcctttccttcttttaatttatttattaaaaaatggaatcatttgcactatagaatctcccacattctggattttgacaattgcattccaatggagtcctttagcatgttcctgtgtttcttataatccggtagttagatctagaatttgaccagatttaaggccaattttttttagctaggatactgcatgggtggttatgttttagctaggataccgcatgggtggttcatgatatcatgaaaaaagcatgttcttaaagcaatttaagtgacagtacaaaaggttgggtcaggtggggcacggtagctcatgcctgcaatcccagccctttgggaggccaaggcagaaggattgttgaagcctggagtttgagaccagcctgggcaacatagtgagaccccgtccctacagaaaacatttttttaattagctgggcttgttggcatgtgcctgtagtcccagctactcaggaagctgaggcaggaagatcgcttgaacccatgaggtcaaggctgcaatgaatcatgatggcaacactgcactctagctcaggcaacagaccaagaccctgtctcaaaaaacaaaaaacaataacaaaaaaagaaaaggttgggtcgatgacagtttctagcgactgatgccaccactctgtttacagaatcacccctctcctctggccctgatgttttatcatgatatcatatttacaatgcctggcaaaggcttcattcccatttggcatactacctctcaggcaaatagaacttttgaaagcctgtattatgtatataacatataggctcacactggataagctattttataacctgacttcttcaaagaaagtttacatcatgtttaaaccatgttttagattctatatttttaattaaaaatctaaggaagaaggatatttcacatttctataaactctaagatcttgcagcagaagcgaaactgcacatttaggggtgcctgcccctctactgatgctgccctttgtgggtcatatgtccttaggaaaatgaaagactgtgcactcttgatttgttggccagctctgttgacatctttcagtggttccttttatgtatggccactcctacagaggcctcttgtactttgggaactggtgagtctccctgtccctagggctttttagtcacatgtccatccactgtttcaatgtaacatgcatctaggcaaggttaacgattaaatggttgggatgaaaggtcatcctttacggagaacatcagaatggtagataattcctgttccactttctttgatgaaacaagtaaagaagaaacaacacaatcatattaatagaagagtcttcgttccagacgcagtccaggaatcatgctggagaagttctgcaactctactttttgggtgagaaattacatttatcttcatattgactcttctcagactcagaacaagtggtagttagttaacttagggtggtcaccaacaagaaccagaaatgttagatgtgcaattggtctaaagctcaggctttttagaaagcataattcataatatctccagaggatataagatctgggaaatgtaatgcaaattattctctgtcatatgtttttttatatcagactcttgtactagctagtcgcaaaattgccttctctaaagagaaacaggtaaaaaccttccaatttaatccgtgtgaggaaggagaattgttgttgcatactttgctagtagaaggaagagaagatccgtgactgagtcttgctgagacatgttgatgttgaaatgataatgataagttctagaactggcaactaatgatatggactagaagttgagtctagggatgcaactttgggcatcatgagcattgaaataatttttgaacaactagagttgggtaatattgtttttaaggaaaagaagagacaccacttagagggtgaacaagaacagtgtaacattacggagtcatagatagcaaaaaatttcaagataggggccaatcaacagtatcaaaggtctagtggaatagaaaacaaaaaaggaccttagatttagtgattttagtaagggtttggtgagaaagtatcatctgcaaactcctagcctcagcatcagaatcacctggggcaataaatgtagtttaagtatcttaagtgattcttctgaattctaacatttgataaccttatatagaggtgagaggggcagggatgagatagcagagcacctgggcagcacctcgtgtcttagaaaggacctgggtcccaagaccctcgaggccaggagtgtataccacggcaaggtggatcttcatgggctatagtatctagacaggccatctcttgagaattctttctgagaactacctgacaaactttcttggtcagggcatcgcaagcaattctttaaagagtctgtataaataatcatataaaacaatttttaactatttataggaaaagaaaaatccacactcatgtgactcagatacaagaattggtgcccaccccccaccccccaacttccacttcacaagacacttccatttatcgcagaatgcaaagactgcacaaaacttgctggttggaagccttctgtccaacaatgctgttgtcactgctgtgctgaaactggccaggtttttaatgtaagcgctttgggccatcagagagcaaatgttacagtatgactaagcattctccctgcatggcgcctgcatgtttgaatatctgccagtgagttcagttagtgctagaaacttgaataattttttatatcccagggaactattctgtcctttaaactggggaacagtccttcttcatcctataatttggcaaatgcagtggtgaggtttactcagaatagctggtacaaaattcacttagaatcacaagaagacacgtttttggagggtgggttggccagaaagtgactacatttgtcattaaatggtgaatttgtatccatgtgcacaaataggaaaatacggatagttaaagggtaaggctggatatggatatggagttgaatttaaattgtgtgaaagcagtgggatgtgctgcagggtggttttctgtcttcacaatgcatgtatgcaacaatccttcccctttggtctccagaattcctcattcctggacagtccggaggcagacctgccactttgttttgagcaaactgttctggtgtggattcccttgggctacctatggctcctggccccctggcagcttctccacgtgtataaatccaggaccaagagatcctctaccaccaaactctatcttgctaagcaggtaaagttaacaccactgtttctgaactctaattccttggtgcacagtagagacattttcttggtggttagtgttctcttccttgtctttaagcagctgtcccaggtgccattgtctcaggtagagccaggctcaaggtttccctcacgggtcccttgctgcatttcttaaatcaaagtggctttgatttttgcataagaatggtgactcttaattcttgtggatattgggttccctaaacacaaagggcatataatcaatcaaattatctttatagcatttgagaaatgaacactggatcacctgtctttaaacagctctaataaatcagtggactgtaattcagttggcatctacctcgtgaaaatgagctagataatggatctcctgccccactgaggcaatccaactatcactcatcttcaaaaacttgggtccgaaataaggtttccattttccccgcatatttgatgagtcaggatgatcactcacagtagaaggaggaggggtaagtgtgcacagtgacaagcacgagtagggaaataatggaaaggacaggtctgcgggagaggcccaggaggggccaggaggggaggagccctcagccagctgcaccaactcactcagggaagggtcttgtgggaacccaagaccctcattcgaggttgtaaaattatctcataaaatcttccatctgcttcttttcactatttttttttctatctctccttattatcattattactaccattttaaatggagtctcactctgttgcccaggctggagtgcagtggcactatctcggctcactgcaacctccacctcctgggttcaagcaattcttatgcctcaacccctcccgagtagctgggattacaggagcacgccaccatgtccagctaatttttgtatttttagtagggcgggatttcgccatgttggccagactggtctcgaactcctgacctcaagtgatccctcctgccttggcctcccaaagtgctgcgattacaagcctgagccacctgcacagcctctgtcagtccttatctttcaacaggtttttagaaaggcaaactagattccattgttctactagcatacctaacaatgactcaggttacctggaatcttaaaggaggaaagagcttggccaaaggaagtggatttcaccttgacactttgaggttggggttgatcgtgggttttattagattctgattcaaaaaagaacagtctcagagcttgggacagtgtcactgtctcccttgttgacctgagtgcccatcacaggacctagcatgtttcaaacactcccactggaatacaacatttgttgaatgttggtgttaaatgcattctgggaatagtggttgattcaagagtaggttagagctgacctcagtggtacatacctgtaatcccagttcctctggaagctagaagtggtaggatcactagaggccagcctggcaacatagtgagtccccatctcttaaaaaaataaaataaaataaaaataaaaaggaaagaaacatatgttagactttgaacattctgaacattaaacaactctgaacatttaataacattctcagtacccttggaattgagtcattgttcgaggttagaagcaatcaagttgggaggcttcttctactttctggagcttccaagaagaagctggttaatgagcaaaccaatatcccatcctaataaaagctattagttaactcttttacaaaatactttattgagatataatgtacataccatacagttctctcatttaatacaattcaggccggatgctgtggctcacgcctgtaatcccaacactttgggaggccgaggtgggtggatc

SEQ ID NO: 54870 - DNA, 2510 bp, Homo sapiens
gtctcaaaaaaaaaaaaaatgcaattcagtttttttcagtatattaacacatatgtgcaaccatcaccacagtcaattttagaacatttcattatctttaaccccgtctcctccttccccttatccttagcaaccgctaaatctcttttctgtctttatagatttccctgttctagacatttcatatgaatggaattatataatatggttcttttttgattggcttctttcacttagcacaatgtgttcaaggtttatctatgctgtaccattgctataccatgtattgatattttacccctttttttggggggacggagtctcgttctgtcgcccaggcaggctgccagcatagattcctgccaacagtgtgttaaagtgcatgtccttgcaccattgtcagcattgagttattttcaacttttatgtgtaaacatgacatctcactgagttgctttgcatttttatgaatactaacgcaattgtttttttaatttgttaagtgtatttcatttgcgaattgtctgttcatatcacttccttattttttaatgggggtgtgagtgtatttaacttatcttttgaacggataattctcagaggatcacaaagttcaaaaagtacaaaaggagctgggcatagtagctcatgcctgtaatcccaacactttgggaagctgaagtgggagaattgcttgagcccagcatttcgagaccagcctggccaacttggtgagaccgatctctacaaaaaattaaaaaaattcaccaggcatggtggcatgtgcctgtggtcccagctactcgggaggctgaggtgggaagatcacttgacaagttcaaggaggtcaaggctgcagtgagccatgttcacaccactgcacttcagcctgggcgacagaggtagaccctgtctcaaaaaaaaaaagaaaaaaaaggacaaaagggtacccagtactctagtcactcattcatgtcttagttggcaaccattgataccagttcctcatatctccttccagaaatagcctgtgcttttacaaacagctacgtacatatattttttcacacaaatgctagcgtcccatatgtgcttttctgtgtcttagagctccttccattttagcacataaaaatctgcatttttctctctttttgtggatattttattcatttgtacctaagcagccaaactcgtactgataccaccatgcagccaaggttactgaaacctctttgattagacttcagtcatatcccacccccaaatagacccaataggtacaatgaaaaccagtatatcaaggcagaatacagagctgtaaaacaagaaaaatcctatgagggagggagggaaaaaggaagaattccgccactacccagactaaaatcgagttaatatattcatctccacacgttttcaggctgcatgttcatggagtaatttaggaataaacctatgatttgtgaagcactgaaatacttagtggtttgctgtattacatcatagctttccccagcagtttccaagacagcttccaaaaactggcaggagaatttcgctggagctgcatgcaggactaccaagattcctccccacagttatgaaaccgatttttccgggactggttgttctagtcttctgggtgccaagtctgacttttctgggaatggttgatccacactggaaggtttccagatgtgttccccaggcattcctggtggtaggaagagtagaggcctgggtattctgtagatgctgagccctgagtcatattgttgcttattctttggtcagttggctttctaccacctcttagctttcattctctgtaactagcttgtatgctgtttgtagctaagattcagggtattggaaagttcttgcagctgctggaggctgcggtgtttctgtctctgaaatccatcattaattacacacagctgggccggagagaacatgattctggtcttctgtttcttctcctggatcttatcttcattcttcactgtgctcttctctgcagaaatgtgtagttttactctgggactagtggaagaattagagctttcctgaataaatagatccacggaggaaggaagatgagagagcctctgagtgggacacctcctcatatgtcatttgcaaggatggataactttcatcagggccacgagtcacaggcattggtgaaagagtccctagaattggatgctttagaataaggcaggctttggagacaagctggactcacactcatgttattgaaaaggagcggggaggggcgggtgcagtggctcacgtctgtaatcccagcactttgggaggctgaggtgggtggatcacctgaggtcagaagttcaagatcagtctgggcaacatggtgaaaccccatctctactaaaaatacaaaaattagccgggcataatggttcacacctgtaatcccatctccttgggaggctgaggcaggagaatcacttgaacctgggaggcggaggttgcagtga

SEQ ID NO: 54871 - DNA, 713 bp, Homo sapiens
catttacagcataatgaagacagacctctgtcagtaaatgccagtacagtctgtgctacagagggtacatttgggatgctatggtagggtacaatgggaggccttgacatttctggtttgtaaaaacaaaaatcatgccatctttctcctgtccaagctgagagatgcttaaatggtattaccaatgccttgatttcagacctgagtttcaaacctggcctgggggactaaaacttacatttctctgttgaatgatgggtaagttcagcttggagagagcagctgaaagacaaagtggcgcctcagcaacagtctgttactctaaagtccaaagtctacgttacactttgggccaggcaggagtttggtacaagctaagtaaatagtttttcagtgtctctgatcttacattacaggggaaaactggaagttcatcttgggtgacttctcatctcctgcagaaattttcttacagagaattacagcactttggccaccccctgtttaatatgttccctaatggccacagcaggaaagagcaattagcaaattcctgaatatttccttcacatcatttcccaaagcttctttatgttaggtaagaggtccagccttcattacaggcttttagcaaattaaagctatttgcattttagaagcatatttgaattccacatacattgcatctcacaccaagacatcacgttcattag

SEQ ID NO: 54872 - DNA, 2303 bp, Homo sapiens
taaaaaataactatatgcaggcactgaaaagcaatcaaaagcaggcagaatttggaggggatatgactcaaaacaagggaagcaaactaggtaagatgcacctgtctccagtcctcccctcagggcactccctagtcttttaggacgccgggaaataaagcaaaagaagaaagcccacatggggcaatcttactgggctgagcagccaaaggttccagtctgggggctctgaagacattagctattaagggggaaatcctggaaaacagtaagccacagagaggagagccccaaaatctgtgcagaaatgcctctcaatccttcaactgtgcatgcaggtgatgagactccaaggaaccccgtggaaagctggaggccagaagagcccagcagatagatcttcaccaactgtctggctctgggaagacacagtttgaaatttgagtccctccaagttaggaggttcaataaacacttccagttttctgttgaaacctccgaagggccacaccttaggaataaggcccacctctcagaactagaggtccacaccctaggactaagagcaaacccctaacagacctgccctaaaaaaacctcagatggaggcctcaggagaatgactgatcaggccggtgagaaaggaaagcctgggggaaaacttggcttcctgcctgggggagaggctggagagcagccactgaacagagctctgtctcagatggaggaggggtggcaaggggaagacgggagaagaggaagggacaggacattccacttagacaatcaaacttgaagtgtttacggtctagggtagatgtccaacagggagcagggactatcaatctggaactcagagacgaaaccatggagtgacaggtgggtggcgcaacttataaaggggaagggaggtgggcagataaaacacaaagaaatggccatttatgagcacctactatgttccggatatgtgactgttttatttttctatctcattatgagagaggtattatcttcactttacaaattgagaatccgaagctccaagaggttaagtaatttttgtcaagttaaggccatttagtaaatggtggagctgagatttgaactcagggcagaccaactctgatgcttgttcctttgtgtaattacacagtgttcccttgtaatattcaggaagggcaatggcgtgagagagctaacaaagaacgttagaatgctgaaagatttctagtaaagacagaatttgttataggtcaagaaggatattaggggtacaaaaaggggtgaactaaatatgaatatactttcaaaagttaagtcctcaaagataaagagagttgtagaaatggaaatgatattgggtggaaccgagctggtttcagggagatcagagggcacattacaacactgcagagagaagggtttcactcctgttaagtcaaacagaataaacacactttgattacagttgggaggcttaatacaataaggaactaaacataggaaacaaagttcaccaaaggaacagatgcggggggaagggaagaggaacaatacaaaaaccaatataaagaatcacagaatcagacttttttcttttttagctggaaggaatttagaagttatccagtccctatcatttcagagagaaaatgcacctaggaaaaaatgactagctgctaaaaacctcagcctcccaactaaagctgggtttggtttcatttttgtctttataggtgcaggttaagagcctgttaggtccaaaatggtgccccagaaattcaagttaagtcaagcccatgttggaagaccaccaggtaaaccaccggccatcccaggaccatagcaggcttatcttttcagtctgtggtggcccctagtacaaatctaaccagccagcccattctgaaggagacctagacgagaaactttctacttaaggggagggcatgagatggatttttcagatcattcacattctctgactaacctttatcctctggtcacagcctggaccccaaaattggccagaaccagaaaggccgtttggcatgaagacaacatacagcatacacacacacgaaaggtttaacagagagttcagtaattataaaaataacacagtagaaataaagctcacttatgagaactgaagaaaagatataatggcaagaaagaaagaacctctacatgataaaagactcctaatattctcatttcacagacaacgtagttaaggctcagtgagatgaagtgatttgaaagctagaaataatcttctggaatccacaagagtgtca

SEQ ID NO: 54873 - DNA, 2306 bp, Homo sapiens
gcaaataaagcatcatagcctttattttctgtatcaaaatcaccctgatccataatatgagtctttgctttgggatacatgttgtcattttgatgaacattcctgtccccttcatggtatttgataaattccttatcttcattgacaccattcgaatctgaaaagctcacaggctgaccatcaggataactcccaggaacatgatataaattgctgtgttctctacaataaaaattagttgcccaacaatcctcaagattatggttaacattctcatggtctatataccacaactgaggttgacctaaattcgctgaagaatcatccaaacccctacagtcagtcaactgttcagcttttttagagtcctcaggattataattcagattcttacagtctgagtagccatttgcctccccgtatccaccagctttcgaggtcacatctgggcttctcgtaggtgaattatccttcgtcccagggctgagactctcataatctacattttctggactcctataaccatcatgacctccgtggtacacacagccctttccactttcatgtgcttccccacagtccatatagcttggttcactctgttcaaaatcccagtatccacaatccctttttctgtagggctgatgctgtcccttggcccagtacctgggatccaagtcattttctctgtagagtccatccagcactgtaaggttccttttccgtacactcccgtagtcttcatactcccagctggagtcccagtgccttttctcctccacttccctttcttttctagccttctgggtttcacacatattctatgtgcttaaagacaaaggttttactattcttttccatgggcctgggctgggctgtggacaggtgcagtctagcctaaggctggatttgtcctgcttaaaatgtctcccaaccattccagacactcttctcgttgctctagtcggagcgcagtgagatgtggagttatttcaacctcaggatccaatcagcgagctactctatctttctccagaggccagaagataatgagtaactagtatgcatgtgattggagttgccagctttgtttggtgtttccctcaagctggtcaaactggcttggctgctttacttgctgaagatagaggcattctgctactccaaaggttttgcaggaaaagtcgtgtgaaagagaaacagcacccctttagaagtccaggtcaggtcatatatcagtctcccccgcctctttaatcctttagtaagccaccaggggtataaacaagtgctttccttctcaagctgcacctccattccccatcctccaagtccacctttctaatccttgaacatctgaaacctttcaggacttcatcccttaacttagagtcaggactcttctgactgctttgcttttctggaattgaagtcaccagttagtgtacactccaatcgcaagctgctgaagctcccacctgcagacagttagtcatacgactgaaggaagaaaaagtacttccttttactttgatctggtgagtaggtgattttatagcgtaaacattcttcccagaatggagttaggtatgctttcacattttcccagatacttgtcatgccagggaagcatcaaaaacattcatttcttaaacctcttttctagttaattcatacaacatatttaagaagtcgaaaatgaggccagaaatcaaaaaggcaggtaaatggctatttaaatcaacaaatattagatggttacctatcatagaggaggcattgtggaacagaaaaagacaaacaaattagtccctgcctcttacaatgcagaagcaacacgcttaaagaaagatctaatgtgataagtgctatggagcaaagacaaacagcaacagcaccaaagcaaagtccctggcatggcaagtggaggcttcagggaagcggttggatgtgaacagtgacttctaggagaagcaggatctctgcagacttcacatatggagcactaagaaatggggaatcatctgaaggatataatacgtggaaaataagagaggaggctgaagagataggttggggtggaccccagaggatgtcaatgacatttattttattcaatggaaagcaaagagtcatgaggtttttgagcaggggaaacacatgctaagagacaggccttaataagattactcttttagctgtctggtcatttcttagatatctaggaatgattccttgaactttaatccttatttgtgaaataatatccagaaccctgaggaaaactgccttatatgctttgttaa

SEQ ID NO: 54874 - DNA, 1133 bp, Homo sapiens
ctggcacatggtaaaaataaattgagtatttcctggatgaatgagtgattgacctgaataccacacggaagcccacaaaatgatgtttcattccccaacacacagcaatcataaatactgtctagtattctaccctgactctagatgataattccaaatttaaaactcctaattctcagttacagccaaagactggcttatctaaaactaatactggactttttatttccaataattgaagtctacattatttggatcagtctctcatagaaaaaaaaaatctttaaaatagaaatctaaaaggagaccttttctgtaataagctaagatcctaaagaactcccgagggtaaatcagaattgggccagccctcttgctaaattacagctgagttccgataccttggtcatccaaggtacaaggtacactgagccttgaaattggtttaagttggacctgggctgagaatgactagtgtttgtttccatgtggaaattccttctcagcatttcttaggaaatttatatgtctttctaaatcaaaaacaaaaaaaacaaaaaaaatcagctgaggactctaggaaacaagagaaggtactaggattctcctgagagaataaagcctaacaataaatgcagagacattaagagtttaaagaaatccaccaatgtcaagttgacgcaagagcagagaatactggcacgcggagtaaaatgttacaaggtgacatttctgggaatgaggacaagagtgggtaggagggccagggtctaatcagttagctttgctcatagttgttgctatgtaatacatgtgtttagaagagtgtgtgctcatggccccgtgtgttgccaacagtgagtcattcttgcaaataaaataaagattaataagcttacttgtatagtatgctttatacagatcttataagggtagtctaagaaataaagttttgcaaacaaagtaagtccttagcaattctgacacatgattctgtacagtgctaaatcttgctcagagaggcaaatgttccattatttgaaaaccacccagtaatgtttgtccagtgttttccactgcttaatatttgctatatagttctttataaatgttttaacagaagaaatacaaaa

SEQ ID NO: 54875 - DNA, 922 bp, Homo sapiens
tatgcaccaccacacccagctaatttttgtatttctagtagagatggggtttcaccttgttggccaggcttgtctcaaactcctggcctcaagtgatctgcccgccttggcctctcaaagagctgggattacaggtatgagccactgtgcctggccagtaatttttattaagcaacatatcttcaagtctggacatacttcattaaaaaatctcctgagatcacaaactataaacttttaccctgatagacaccgatatcaaacagtttaataagtaatttctaatgtggcctttggaatcaaagtctgaacttggcacagattgaggataccgaaaatctgccctttcaggtctgccccagcctaccctgtgttcccggaggctggcccaccagaactgaacaaggcctcccccatctctggctttcagttgggttcagccaatggatggcactggcaggaggtctgaaggcagagggacagtgagattgtgatatttactcccctggctctctccctgctgggttgtgagttggctgcgttgctctattaaacaccacagctaccatatgaagacctcctcaaaacagctttctcttgcatcaggtaaccattccatcccccacctcttcaggagcagggtggctctccagctagccgtgacatatggtacaatcctttgttattttccctaaacttctccattctgctttaagttggacctcttccaattacccaatttgagtgtgccttctgttttctgctgggcccctgagtgatacacgcccaaaaggatgacttggatttatgagaacaacacatgaaaagaatggggatggctaggcgcagtggctcacacctataatcccagcactttgggaggcagaggagggtggattgcttgagcccaggagctcgagac

SEQ ID NO: 54876 - DNA, 2290 bp, Homo sapiens
cgagaccagcctggccaacatggtgaaaccccgtctctactaaaatacaaaaaaattagctgggcgtggtggcgcatgactgtaattccagctactcaagaggctgaggcaggaaatggcttgaacccgggaggcggaggctgcagtgagccgagatctcgccactgtactccagcctgggcaacagagtgagactcttgtctcaaaagtctccaaaaaaaaaaaaaaaaaaaaccaaactacataaaggaaaatgaattacagcattataaatcaagatacatacacataaaacaaacattcccactttgcaagctcctacataaacaaaaggaagcacatgcaatgcattaagaatgaacacctgtgagacatgagatgaatgggacaagggaattctacaacaaaaccaatcttttagattccttgcgtgttataaaagaaaaactcttatgacctacgataaacacagaattgtttccttccccaaagttcccaattttccaaacaacaaaagctactctggttgccagttctgttgatgagtaacagcttttcatcctttttcaatcaggaagggaaaattcagggatcagcaaagtacaaaagggatgagcagagaatatttacgaaacagtgtttttgttctcatgacctgacaatctgactgaaaaagacctgattacctcttgatttgggatgattcagctacaggcaggttggtgtcaagttttcaggtcatctgaagcgatttactttcagaacctcttcccacgcaatcctcttgcctccctgtagaaataataccctgcactacttgaaaacttaaaattcttgagctagagagggcccagttattttacagatgaggaaacgaagactcagggaagaattatggtgtgagtcacacagctctagcttgaaaaggtctccctgactcagcccttgtcctcttcctgtctattctcaacccagcagccagttatccttttaaaacataagtcatcatcaacttcactgttcaaagctctccaacggcttccccctcactcagtgtaaaggccaaaatccttacaatgacctacactgatgtgtcctccccactcccaccccctctcatctgctgccacctccccccaacccacatccacactgactggccaccatgaccttgccacccctaacatgccaagcatgctcctgcaccagggtttggaacatgctcatcccactgcctcctgctcacttcctcatttccttccagtctcccaccatgagttaggccaggtgtggtggcccatgcctgtaatcccagcactttgggaggccaaggtgggtggatcgcttgaggccaggagttccagaccagcctgagcgacatagtgaaaccccgcgtctactaaaaatacaaacattggcccagcgtggtgatataagcctgcagtcccagcttactcgggaggctgagatgggaggatcacttgagcccaggaggttgaggctacagtgagctgtgatcacgccactgcactccagcctgggtgacagagcaagactctgtctccaaaaaaaaaaaagttatctcagtagaggctttatttgacccctctatataaaaagtaaatcccctaccacacatatacatacacacacacacactcttaccctttcctgactctaaagttctccacagcattatgatcctttgacctattcattcacatatttgtctgtttccacccaattagaatgtgtctgttccacgagggcttagtctgttttgttcaaactggttccccctcccagcacccacagcatacacaagtgctaccacgaccccggcacacacaggtgccccccacaagcacatacaggtgttcctcctcccggcacacacaggtgcccaccctctcagcacacacaggtgctcagtgagaatgtgttcagtgaataaacaagtaaggaccaaaagccatgccttcagactcctcacacaatgccctatgtgcctgccctcaagtgctggttcaattcttggtggtcacgtccttcagtcagaagaaaagatctagaaatctaaaaatgaaataatacattttagctactctatttcacctcccacagctgcctttcatagcagggaggataaagaacacaactaaaagttaacatcttggtttaacggctctttcattaaagagctcattttactgctgctacttaagaactttctgcctttccaggcaagaaactaataactcataattaactcctgaccaacaagactaag

SEQ ID NO: 54877 - DNA, 2197 bp, Homo sapiens
ctcgagacagaagaggaccttagagatcctttaattcaatattttagagaaaaatgggtagaggataaactaacttgctgatcaccgtgtcggtattcatgctgtgaaagtaataaacggaacaccaactgagaaatgatccccgaatgctgtcaggtacttcagtcttgcaaaaactactacagattaatcagtcctgctcatccgtttaactcagctatgtaaacaagcagagctagactatgctcaaaccctaaatattagcgttaccactcgcctgccacatactacagcatcattagttatgaaagtgttttaatacaagatcttcatgtttgtgtaaaagaattactataaaacagacctaaaggcaagttacccatattccagaataagtgagtgccaaaaatattcacccttcattacagtacaaatgagacaggcagtaataatgagactgcatttaaagttgtttttgcacttaaaatttaagtctatactcctcatctgcatcaggccccggcctgtttggtaacctcaatattcctttactaaagtgacagcatcaccaccctttgagacacagatgcccggtggacatctgtgcctgcagcaggaacgcgggtgtccgcgggtttctgcaaaactccaccatgaccaaagctgcatctccagctgaacaggtctaacccttgcttcggaagccatctgtccctgtctccctgacacagaatcacggcctcctatgccgtaaggctccgaacatctgtaaaatcagcggggtggactaacgcagaattctttttccagctctcaaaattccgcctcattgccggagtggcagggcggtgcagagaaagagccctgggcttgacaccgcttgaaaagcccacgttcgcattgctctgaccacccctccaactcccggggactacaggagtgcgagggggcccgctgcgccccactgtccctcgcgggctcctggcccacagagcgcagcacagcgccgccgctgggaaagggccgatacaggcctagccgcgcggcgcggcgcggcgcgtctctcggggtgcgggtcccctccgcccgcggccccggaccgcgacccccgctccccgcccggcccccgcccggctccggcctggcccggcctctgacctgctttccgccgcccggcggtccctcggcgcggcaggcagttgcagccgccagtccccagcccgctgtcacctccgcccctggaagcggcgggcgggtcgatcccgtgtgagtcagcgcgccgccccgcctcccgctcaggcttccgcctctgccggcgcggtccgcgcggccccgggggcgccaagctccgctgcccgcgcgcccacctctccggcgcccgccccgcgctcgcgccccctggcggccggcccggccctgctcgcctcgcgacgtcagaggggcgtcgctcccagaacggccaccggggaaactgaggcacgggggcccgcccccgccgcagcgcgccgacacggctcgtcgggcctcggcctcacgcagtcctacgtgcagccccggctgcggacaagttcctccactcttgctgttcccccactcccgacaccaccctccaacctagaaaaaagtcaaaattccattcagagaagtccaagtcgattcctgtctgcgtgtgatgctgtcctctttgctaccccgaggcagtttcccttattatgccacacaatactcgctggggttcgcctctatctgtcccatttttttctgaggaaagtctctcaggacatctttgagaatttgagagcaagaaatgacagaagcaagaactgggcagggctgtcagaactcctcctccgactcagtttctgaatccccgcagtattcccgttgtttgtttaaagaccacgaagttacacagcttggctatgttgctggaattgctgcgcctcacgtttctggaatctacctagaggattctgaagaaggcggcgagtctatgactgtgcatgcacaacaaaaataaatatttcacaaatctcatcccatgctgtatatgtttctccttccctttgctttttaaaaacttgtggttaaatatatatcacatgaaatttaccattttaatcctttttaagtgtacagttcagtggcattaagtacattgacattgttctgcaaccatcaccaccatccagctcca

SEQ ID NO: 54878 - DNA, 1268 bp, Homo sapiens
actcgggaggctgaggcaggagaactgcttgaactcagcaggcagaggttacagagagccaagatcacgccactgcactccagcctgggtgacagagtgagattccatctcaaaaagaaaaaaaaaagtaaagaaaagaaagaaaaatatatctacacatcaaatatgatttcaccaatactgccacttaggacaagagccatgattgacggtgctgtaacaatcttctttatgctgcctgggtgactcacaggtgccatgctcaggcatgccagtaagtgtcaccatgcttcagaactaaaccttctgcctacttgtttgacttcaaagatagtagagatgataaagagtgttggtatggacttggggatttattttacttttctttttttttttaattttagagatggggtcttgttatgttgtccaggctggactcaaactcctgggttcaagatccccctgcctcagcctctcagcctcctgagtagctgggattacaggcacatgccaccacatcctgcttggattcttaaactggaaatttccatgtgtgttaatgcatcctttcaagcactacattgcaacctctcttctggccacagcacgcagatggaaagatacttttcactgacaaatgtgggacattctgggtgtggaagagccgtagaactatcccaggctgaagaggaaggagagggagtggcacagtgtcctaaccacactcctctggggcaggcctgggctttcccacccttggaacagcttgagcccctgaagccagctgggagttaaaaaacatgtcactgactaagaggcctctctgtagggttatttcctgccccttccgcaaaaattgatagccagtttttctgctagttcctccaggagggaaggggagaatcagagccaactgtgctgtattatttaccaattcctatttagtaacataggaatctagacagaaaaaaatgagagagaagagagacaagaaaatgaggcaaggacagaggaaaaggaaaggagtggtgacatgtggaaggccttggggaaaagcaaagaaaacactgggccccggaagatattttatttcattttatttttattttgagataaggtcttactctgtcatccaggctggagtgcagtggtgcaatcacggttcactgcaggctccatctcctgggttcaagtgatcctcccacctcagcctcccaagtagctggcactacatgtgcatgacaccatgcccggctaatttttgaact

SEQ ID NO: 54879 - DNA, 1904 bp, Homo sapiens
cagtgctggattttcagtgttctctgcaaacatcttgctcctcctctccaaataaattccccttagaactcaccacccccacatccccaccacacactgcttcagtcatgtctcacatttcaataaaagttctgtataaactgtagagtgctatgtatatgttcattgtatttattaaattcttattggcttggctagaataatttccccatttgccaattttgtagggaccacaaatgcaacccatttgaatctgaatgcagtgtctcttcacccatagttgctcctcttgggaaatggcaccacctgttgcccaagtcaaaaacacaggagccattctaaattcttccttctcactcacttcccatgattactcattcactaagccctctccgttttctgtgttgatcctcatagctgacccttgctttccccatctcctgccacggcctcggttctgctctcactcatccttgcctagatcttggtaactgcctcccatcatctatcttcctgccaggatttgacccccttccactgcacacatcatgcagtcgccaccatgatctttcttcaatgcaaaccacctcttgtctattgctcaccccttccttccactgtttagatcctttatcgcttctcctttctgctcagttaagcccacacttcctcacatggcaaagacctgccaggccctgatgtttcctgccttcccagcattacatgccctgctcctctccagcacccctcccgcctcctagttatacctaacaaattgcagtcttcaaaagcctctgagtttttgaacatctcctctccctccaattagaagttagctgactcctatttgtgttttagaataaatccaggcatcattttctctaaacctttcccatcatttgccctgtgtctgattttagtgtccttcccttgtatttccatagaactcggcacatatttctctacaaacattacattgtgccataatttttggcttgtgacttccttgattaaaatataaggtccttaagggcagggaccacatcttatttgtttctggattcccagtccctactctgtagctggcatataacaggtattcatgttgaaaagcagtaacaaagaataaacagtctcctctgcatttatattttgttgactttttagaacagggcaggaaatgactacatggagttccagaaacctcggctcttccatgtgcccccactaactctccttccaacagggcagtcgttggttcagtgacatattgactcagactgccctctagccaatggcagccacgcatgcatggactctgaatctattctgtgtaccagtgttgcctaatttgcaaatagcctgtacctgtgtaatcctctttgtcgggagtgaagtggttctccctgcttttgaaaaaagctaatgtgatgtatgtttactgatatgacatcaatgaggataacagggtatcaagcaggaggttaactggaaaagaggagcctggctctaaatgatctggtcacttgggatggagggattgccacatatcagactttgagtagctctattaacagggttagtaatggctatgggccaacatgtagcggggcaactatatttcattgattctaaggcactccttctttcacatttttatgtctctgaaactggagtgtgtcttaaaacagatgacatcttaaattcagagaaaaatagaagtccaacatgtcaatagtatgccagaaaaatataacaaattttaattgactgaatagtgactaagcctggaatttcacaaactgaactaaacagaatggcttataaagaattataaataatgtctaaaaacttgaatttgcatatgagcccctcctaatttccggggaaaatactgtacatat

SEQ ID NO: 54880 - DNA, 2816 bp, Homo sapiens
gcagagcgactctgctaaaagctgtcaccatgaacactcccagcaaccaggagaatgagtgattaacatctgcaaacaggatctgggtgttgtgccatcagccctgcactgttcacctccacttgctttgtaacccaaataaggggagctgctcccccaggctccaaagggctgatctttctggaatcagctgtcataccgctcagcttactaagagcacctctgccaagtcctgcagagggcagagaagtcacccataagtcaccacttcacacatgaaccatctcattatcccttttcctgacctcgactgcagggcttacaaatctctataaacatcctctaaaatctcccctcaatttagagctttcatcaccctaaacctaatggcttcaaaggcaaatataaagggctgtggtaaacttggatctggaatatgacaggttcaaatccttactttgccactcatattcatgggatcttgagtaatgtaatctctctagatctcagctatgaaatgaagtaatagtagagcctcataaggtttgcagtggacagcctctcatgcctcctggcactgcattttgaaatgcaatagcaagtgcttctcccactgcctggaacacactccaccatcaccactgctctcttcagctggctgtctgcctcctgtccatccttaaaaatttggctcagatcagacattgcttcctagaaaccaaaaggctgggctgatctttactggtgccccacagcacccagtgaacaccctgcttacttaccacactatcacacttgcctacttacttgctgtattgccccatcctacacacacacacaaggctatatggctttttgttgcctcagcaactagcctacagtagatactcaataaatatttataggaagaaagaaaggagactattttttgtgtgtatttttagtagaaacagagtttcaccatgttagccaggctggtctcaaactcctgacctcagttgatctgcccgccttagccttccaaaatgctgggattacaggtgtgagccaccgagccccactggaagaagacattttttaaaattaaaaaaaaaaaaagtagaaaaattgattgaaagaaataagaaaaattggaaagacaggtactaattcagaagaaatatggtaagggaaacaagtaaaacgtcattctgcattacagtctatgtcaaaatagacactaggagtgagcaatgaattaacagtaaattttttgtttttttttgtttgtttgttttgagacagagtcttgctctgtcgcccagcctggagtgcagtggctcgatctcagctcactacaacctccacctcccaggttcaagtgattctcctgcctcagcctcctgagtagctggggattataggcacgtgccaccacacccagctaatttttgtatttttagtagagatgaggtttcaccatgttgatcaggctggtcttgagctcctgacctcatgatctgaccgcctcagcctcccaaagtgctgggattacaggcatgaaccactgcacccggcccagtaaattcattttaagtgctcataccagggcagagaccaggagaaagatgagaagctggcccagcttgttgggatgctcctggagggctgtggttggggtttaacatccagctagcttagctcatagctggtgaagacattaatctacgtgttctattatgcaattgcaggtagcaggcactgtgctcactctctccactatgggaacttatagctactcagagacagacacatatattgactcctgtagacaactgactcctgtagacaaggtgaactaatgcatcccagcaattaccacgtgcgaatctctacactagatgcaacaacatatcctcctgaatccactgaagagtcaccctgcaaggatgagtaatcaggttcagagatgttaggtaacttcccatggttacacataaagtcctgacatggacactgtaggctcacttctaagttttttccatgactcacttgcctgatttacctgcatgtcatattcaactttttgttctttcatgcaacaaagccatctcatatgggccagatgccatcttaggcattagcaacagaaacaatccccagggaacagcacagccacagcccccgcccccgccctcagagagattagcatttgtgaaaacagacattgagcacataatgagacatgaagtgtgcatgatgtgtgacgggggggaaatacaggatgctaacccaggccaagcagttcaaagtgaactgaagcttttacatctgaagaagtgatgaagactcaggagttggctgaggaaagtcagcactacgagggaaggaaagtgaaccaggcagatggaacaacgtatgagaagggacagacagaaggtgcattcagggaccttagagaagggtggctggagaggacagcaggggccagatcacgaacttcgtgtgtacacatttgagacttaatcctaaagcgattagaagccacggcttctaattcacaaattcttttgccacagaagaggcagaaatcacttcattttaatacctaccaataacctataggatggtcagttcaaattattctcaggtccacagcaactgacctaggatactatggggttgatcccataagaacaggaggaaagagctgctttccccacaactcccattaccactccctgctggcccaagatcaccaggaaattgatcccaggaggaaatacagaacgtttgggaagagcaggtccaactctggctcttgggccgctaacatc

SEQ ID NO: 54881 - DNA, 1106 bp, Homo sapiens
caacaaggatgcatactacaatctgaaactttggtcaaaaaacttccctattcttaatctgtacaaatgaaaatgctatccacagactcaagctgcctataaaccctatccattctccctgttcttgaaagagacaacagtagcatctaacaacatgatggacagccacagcacatcattaagtactggtctcacctacttttaaaggctttagaacatctgaatgtacagtggagattccagaattccccactacctatgatgcaatcttactgagtcccatgatacccaaaatgagactgacaaagaacaggacaaacaaatgtacttagagacaatcatttcagagaaatccaagtacctataactgcctttttcctctctgtctcagcttctttttccacaaccttttgtttctgtgcagctataaggagttttgtcttctcagcctccctgtgaagcaaaatgttataaaaattagaaatgattctcctatgtgcagtcacagccagtaattctgaccctacagtgagtcagagaaccgttttgtcaacatgagcttttggacccattaaggtaggttaagagaggtgttactttattttacttataataaatctgaggttgaaagattcaatgatttgcccaaagtcacccagagataggaaaaaaatttagtacatttgaattttagtttggctttcttctcctagttgtattgtgtaaagcctgtgatttggaagggaatatatcaatacttcctttgctgttagacctccagctagtccatacagcagctctgtgccaattagaaaacggcaccagccgtttctacagtcctgcaggtgcatggtttgacatgcagaatgaagctgggtttcagcccctgccctcctcaggtgggcacccatgtgcagtgaccatatttgttgcacagaagatataactaggtggtagttattaggtagtaaactggggcttacagtaaggagaattttctaaggcttccagtgtctaatacaggttgagcatttctgatctgaaaatttgaaatccaaaatgctccaaaatctgaaactttttgagagcccacattatgacacaag

SEQ ID NO: 54882 - DNA, 1212 bp, Homo sapiens
aagtgatcatagctgtaggaacagaaactctgtctgagctaaagggaggctcgtaggcaaagagaaagcttaccttgttccacaaggcacatttttaacttcatcagtttgtagtgttgtctagggaggaaaagatatctcatcaacactcaagacacacattgtcaaaaaactactggtaccagaggcaaatctctggaaagctgctgacagtaagtacagcagagatccatcacaatttcagttcccaaagattagctctcagaacagtcatttctttttgtattctagtagaaatgaaagacttgagacagaaaatattttacagcaatttttttttttttttggagacagagtcttgctttgtcacccaggctggaatgcagtggtgcaatcttggctcactgcaacctctgcctcctgggttcaggcggttcttgtgccccagcctcccaagtagctgggattacaggtatgcaccactacgctcagctaatttttgtatttttagtaaagatgaggtttcaccatgttggccaggctggtcttgaactcctggcctcaagtgatccacccaccttggcctcccaaagtgctgggattacaggcgtgagccactgtgcctggcctacagcgaatgtttgaattaagattcactgggaaaggttcaatgttcagtctgctaataagtagaaaactcttccagagtcccttacctgcctggagctggccaggggttgtaaacaacacagcttgctcacatagatactctggctacaacttgcactctgaactttgattccactgctaatattactatttatgttgaagataaaagagattttatgcatacaagtactctaagactcaaagctgcccttgaatccaacagcaacctttcttctctaaagctgtggtcaacattttagtttaatacctagtgatctctcacatgtcctattcagtttcctttttaatagaagtgctaccaccagtactgcttcctcctggtgaaccaacaatctggtacttaattgctttgcccttgtcacacctttgttcagatccagaatgaatgacttcctgctgtactctaaggcctcaaataggtcagcacctaatgagtacattctagacatactgcatcttatcaagcacaaagcaaaggaaaaaggaatcacagtccctgtttccaaagagttcacaatccag

SEQ ID NO: 54883 - DNA, 2009 bp, Homo sapiens
gcatggcccatcagtgttgtgcttatgtccctggaggtccagggacataagcaccatcacagtcatcatggtgttacaagacgtaaccagacactggaagcttttaaatgaaaaagtctaagaaacaaccataaacatacagcatctacagcggcaaactaaagcctgtacagttgaacgaactataatttatccatctcttcagttagaggtagagtgactacttcctttcttccttcttcatttttctacaaataattgagtttgctgtgtataggaataaccgtagggagacttaatctctgcaacaaaacgaacatagcactaaaactgtccaacatctggagggtgctccgcaaaagcccgcttcgacccccgtgctctccctagagatgggacatgcgcccccgaacgttgcagagggaacaacttcccagactccactctggagtacccttttaatctgctctagagccctaactgactgcacatgccgctcacctgtagtacacagccagatggccctcctcaatcttgtggatggaggcgtagagcaggacagccaccaaccccaccactgcagccaccagaacccgggcttgagtcatattcattctcgttcctcctgggagcgggagaaaaggaccctcagtcccgtgagtgacaggtccaccccctccagtttctaccctctccctccggaaacttggcgctctctcgcaggctgagccggggagtccagtacccctgtcccctcattcttcccttctggctgagcccgctgaccccttgccaactcctccgcccccggaggccagtgggccgcccctgctcggtgagcttcctgaaactccctctcccaagggtcgctcccgggtggaaggcactaactgagaagaagcccagccgcaggctcgcgaggaaagccgacccctcggccgcgcctcaccgatcagtgacgcatcgcccccgcccgcacgtgcagccgactcccgcgccgagccaaccgccgccaacagccggccccgcccactcgcccagcactgcggctgcgcggggacgcacacggcgtagccccggcccgcggctagtgagacggggagcgcatgggacaaaattctcctagccgcgggccgcgcaggctcctttggaggcaagtcgctttctgtacactgctggttaactgcttcggaagaggacagcccgcagtctggagtgagcagcgaagcagagaaaaggagacgccctttcggacaagggactggttggtttgttcttgtgcagagaacccactcgctcactctcaaacggtagctgttcggtttatttgtccttttgcagtgtatgcggagccccactgtgtggcacgcacttgcttccggcagagatcctgcccttcaggagcaactaaacttgttgcaaataaagtgctgtgaaagttcagaagaggaagatattagatataacggcatcattctctcgttttttaagtgttcctattatgtgccagaatgctggtccagtgagggctttatgaaggccatccagactacaggaacagaattgctaagcacatggggcgggaggcggagggaatcctccagggagaccaaagtaagtacttcagtttccttgaaggcttgtgtgatgggaaggagtgctatggtaggcgtcactacatattctgttcgttttaaattaaaaaaccatgggcacatattgccaaaaataaaaaagggaaggaaaaaggtatagttgggagatagatgaatacaagagaaattaaggacattaatggtttaagccttgaaaggctagaggtggaactataactggacaaggtggactagggttgtaaagtcctctaacccagcggacggggtgggggtgtgtgtgggttggggatgaaactgttccacttcagatcatcaggcattagattctcacagggagccggcaaacctcacatgtgcagttcacaatagggttcgcgtgcctatgagaatctg

SEQ ID NO: 54884 - DNA, 1385 bp, Homo sapiens
agatcgcgccctgcattccagcctgggcgacagagtgagactccgtctcaaaaacaaaaacaaacaaacaagacccaaatatgattttttaactgctactacaatggttaaacattctctattaaatcaaagtaaaattcttgagtctgatgttaactgtcctccacctactagagcgccccccatctccatctactaatatagcctttcgtttgaagccatgctctgcaccaactcaccctcatactgtcccgacctggaatacatccccaattccaaagcccatccatgcttccaaaggcttaactctggacccatcatgaagccttccttgtctactccagtccccactgatatcatatggcctccaagcgcgcgcgcgcgcgcgcacacacacacacacacacacacacacacacacggacgcacacattcccaaaggcagtccccttcagccctcttctcacacattcgtgctcctacatacacactgtgacgtgcatctgcctcacacaccctgacactccacattcacagagacacacacgcactgtcacactcactaaacacctggtcacagcctgacagtcatacccaagttccccgcaacagctctatctatgcccagtacctcaaatacaactttggacacacaggcatagtatctttctctctaatacacacacacaagcccactggcccccaaatactgcccaaggtcccaccaaccatctatcccacactgtcagccctgtgttccacagacgctcaaacccaccgccgctccaacccaccgccgctccctctcacgccccgcctcacccgatgctggtacagacagacgttcccgaagccgccggtgcccagccgctcccgcatctcccagggcccgcccgcgcccggccgcagccccgggggccgctccatggggcgggagggcaagcggcctcaggttccacagttgttccaaggccggttccgggccgccgatgctcgcgcgtctttgttctcgcgagaatgaatgcgtcacttccggtaaccgctgcgagaaggcccttccctaagttctcccagggcgctgccagagccctgccggctaagggatggggaaacaaacaggtactcggtccgctctttaagtcccctacgtattttccgggagggctgaacggaaccacaatgtttttctagtcttggaaaacataagatctctccaaaccccacattcccgtcaaatccacttttcaaagcagcccagtctctcctgtatttttttctttttaattaagatggggtctcgctccgttgcccaggctggagtgcaatggcacgatcacggctcactgcagcctcgacctcccggaattaagcgatcttctcacctc

SEQ ID NO: 54885 - DNA, 1719 bp, Homo sapiens
cgaactcctgaccgcaagtgatccgcccgcctcagcctcccaaagtgctaggattacaggcgtgagccaccgcgcccggccattatttgtattgttttttgtttgttttgttttgttttgttttgttttgagagtctcgttctgtcgcccaggctggagtgcagtggcgcgatctcggctcacagcaacctccgcctcccgggttcaagcgattctcctgcctcagccaccgcgcccggcccattatctggattctttagtacctgttcctctagactctacgctccattaaagcaggaactccatctgttgcaacacctagcacagcgtccggcacactgcagttcttcaataaatacttgctgcatgaagccctctcttcaccaccacccccacccctcctcctcgcaaaaaaaaaaaaaaaaaaaaaatgccccagggaagggtccctatctactctgtccaccactgcccagggcccatcagtgggcccaatggctatttggcgagtaaataaatggggtcaggagaaacgaaggggaaaggatgtgtcagaggccaggactgccccctaagatggaggaggcctaactctgggagcttccgcctctccgaacgagcgtcgccaagagaaaccccctcagaagcgaaaagggccaggaaaagaggtcagccccggccaggcaaagacatcacctaagctccccagcagccccgtgtctctccgccttttccttctcccttcccgtcatgggaaagactcccgcccgtgtcgtcacctacacacacgaaagagacacagggagagaggcttccattcacggtcactcacaggcgcagcggtttctgtgccatctgtccgaatagtatgggttgcgactgccacctaaaattgggaatgcgaatccgcgctccccggaaaaatgcgaccgcgcaacaatcagacgtcagcgccctccagccaataacggttcacttacttacggagaccgccgagggacagaagcctctctcaggtgtttgcgcctcaaggaagaatcaagagggaaagggaggaacgaagggagaaagagaaagtgaccgaaaggattccaactatgattttttaaattaaatttcagagcacttgaagcgaatgaatggctaggaagtacagagcacaatgtcgggttctaacctaacctaacctaacctaacctaacctaaccatatcggtctagtgggcaagacagaccccctctatccacgttttttgtaagtttttaacctatcaaaaagttaagaggccgggcgtggacgctcacgcctataatcccagcactttggaaggctgaggcgggcggatcacttgaggtcgggcgttcaagaccagcctgggcaacatggtgaaaccccgtctcttctaaaaatacaaaaattagccgggcatggtggagaattgcttcaaccagggaggcgggggttgcagtgagtcaagatcgcgccattgcactccagcctggacaacaagagcgaaactccgtctcaaattaaaaaaaaaaaagttaaaagaataatggctattaccttgattcagtaagtctcagcatgttggcaaatttgcttgtgttctctttctctcaaagtgcccaagcccttccattctcactcaatcatttgaaagtaaagtacaggccgggcgcagtggctcacgcctgtaatcccagcactttgggagat

SEQ ID NO: 54886 - DNA, 2780 bp, Homo sapiens
acaacccctactattctgtatcaagccttttctcatagattctgattcacaaatttagcttacagtaatttcctggggaagtgaaacaatttaataaatgtttttgagatgctgtactggaccagacttcactttctttctttttcttttttctttctcattttttttgagatggagtcacactctgtcgcccaggctggagtgcaagtggtgtgatctcagtccactgcaacctgcaacctccacctcctgggttcaagcgattctcctgccccagtctccccagtagctgggattacaggcgcccgccaccacggccggctaatttttgtatttttagtggagacaggatttcgccattttgcccaggctggtctcaaactcctgacctcaagtgatccaccagcctcggcctctgggattaaaggcatgagccaccgcgccctgcccatacttcactttctgatcctcctccacacataggtcatgtgtccacttggaaacgatcaaacactagtcatgtcccaaaggatgggttatcaaatcctcagaccaaactaataggtccctaaatctgcaggtcactccccgttcctcaatttcatttctctttatcccggtaaacacatcttctgctttagccaaacacactgcttgcacataccacctcattcgctagttgtatcatctcccccttttccaccaataattcccttcacaaccctgctcaaaatacactttccccaaggaagcacttcttgattactgttgctggatatgaactcttttttgttattgttttctcattagtctatgttacagaggcctgcagagttgtattttctttctctcccattcatggcctcccccaacttccaacaggcctgtctcagggcatgcagggtaggaagggagctgcagactgatgctgctaaccatctcccaggcctcctgggccaaaccgcacccgaatcaacccagaccccgcctcacccgtcagttccccagtcaggtaagtggccattttggagaacatgtcccggcagagctcagtgatgtcagcttcagcaggctcctttgcttcctcagctgtctccacggcggcatcgtctgggccaagggagaatgactaagtgtcccgcctacacccggtgctaatccagccaaagcagcctgttccgacatccctccacttgccttcattccatcaagtcggctccattctccatctgccataatttcaagtccttcactgcgtccctgcccatctgacacatcaactcgcctccctcgcaccgcccctcgcccatacccggcacccccgctcatcctggcaccatcccagtcaccctgacaggacaaacactcgcgcgcagcgacaagtgcactcctctcaccagcccgttcctgccaggtgagccaccacacactcaacctcgcccacccgagacggagccccaggccccccaccggacgcttcctccccatccattccgggtacctcgggcgggctcatcactccgggtcgccagtacgccctcggctgccgccgccatagcggaccccgcgctgtttccgggccggggtgctgcgcatgcgcactgggtgtgccccgcccacccggccggccctgcagtcctgcgcctagcggtccagtccagcctcaggtctatgacacagcaaagggcgattccggagccgaaattgaagctacgccaggctgttgtgaattgatccactgccaacagtcgcgacgtctgggactgagggcgagctcatccctacagtcacaccctggagggatcactcatcttgtaccactcacgacccgtctgggaatagtcaaccctgtttgtggcctgctgaccaaaaccactgaagacggattgcccgctctcctgacactccgcactggagttagtcatcaaaagattgctcagggaatccaaagttttacaggttgtctcgtccacactttgggaaaccttcaggcattgatccctggtcctaaatactgtccctcccaatgtcctgagttaacaccaactcactggcccctatttcttaaactgcaggcaggcatctacttctcttcagttgatacagccttccttgaagaaagcttagactgtaacttttttagggctgaggatacactctggttatcttaattgcatttaagctgtttcacaagcctcctaggtgtacagagtacttaatgggatgggagaacaggagtgagtgaaagagatggatgagaagaagtgactggggagcaattgaaggtgcaaaatgaggagggataaaggccacagaagaagggataggagatattcagcaggcctcaggcaggctcctggacacccaaaatcttggtagtttcttttcttatccctggttatcctccctctgcaccctctcaccccaccccgatgccagtacatacacacacacgccagctaccccttatccccagccctcctaccctgactgtctccaccctgaggactgagtctcacttgtcacctgtccccacttttcctatggtgcaaccatagtagccactatttcaagccattcctgcgagccagaagttcttttttttgaaacagagtctcgctctgtcacccaggctggagtacagtaacgtgatctcggctcagctcactgcaacctccacctcccgagttcaaacgattctcatgcctcagcctcccaagtagctgggataacaggcacgcgccaccacacctggctaatttgtttgtatttttattaaa

SEQ ID NO: 54887 - DNA, 1991 bp, Homo sapiens
ttggtccacactggatagggatggagcaggcacagtagggacagccaagaatccaagtctgaaaattcccaagagaaggcaagtcctctgagggaattatcagtgattcttgggcagttggtcatttttccctaagcctgtgttttagagcatgattctcaaccttggctatgtattggaatcacctaaggagttataaaaagtactgatgtctaggccccacacccagagattctggtttaattggtctagagtgtgtgtcctgagtatgaagatttttaaaggccccccagggtattctaatgtgcagcagtttgggaactactattctagagagttctttactatctatgggagagttttcaggtgggtttgtgttctaggtatgttgggggaaggagagggtgagctatttccttacactgcctctccacccatcagcccagctcaccctctcttcctccaggtcctgtcgcattttttcctgttccttctcatccagaatacgattcccatctctgtcaaacttggtgaaggtggccgtgagctcagtgatttcatgctctgcgtgtcccagtctgagaagaggatgatgaaatgatttctgcccagctgtggctgtgacctctcagttatggacttcctcactcttttgcttgactctggcaaaagttttgcttctggtaaagaaggttctccaaagtctagcaatcttacccccaggaaaacactcagttcagttcagtttcttcttcctctcctgactcctgctcaccaggttcagggcctcatgacctcctacagggattattgcaaaatctgtttgcctctaaataacctgctatcccccagcttcccctttactccctacccctgaaatccatcctccataatacaactagagtaattaacctttctaatatgcagatctaaaaatgtgccttcttgaaatcccttctggcaccctattcttttggcagagtggtagtgtggcctttctcagtgtggtccttgcctgtttctctggtctcatctcctgctatgaccaccacctgtccccgcccctttatttaatacttagcaatgctcaactacttattcctcctgtgtatgttgcttggtttcagacctctatgcttttgtatgtgctttcatctcttcttggaagagccttcctctgcttgtccacttgtgagctattcatcctccaatatcctatttagacattacctcttccaggaagccttcccttaagctcagagatagaattgatcaccctctactcctagtcacttctgttgaacttattctgtgattcagtttatttgcaagtctatgagctcttagaaaacaaagactttgtcccatttaattacgttgtctcctaatcccagcactttgggaggctgaggtgggtggatcacttgaggccaggagtttgagaccagcctggccaacatggcaaaatcccatctctaccaaaaatacaaaaattagccgggcgtggtggcacatgactgtagtcccagctactcaggaggctgaggcatgagaattgcttgaccccggggaagctgaggttgcagtgagccgagattgtgcaactgcactccagcctgggcaacagagcaggactttgtctcaaaaaaaaaaaaaaaattatgttgtctattactcagtgcctgatctgcagctggtgctcacaatgtatttgttcaatgtgtattaatatgtttgactgggaatcagggagtgaatggctaaaggaatagatgagtgtttgtggggaagcatagaacaaaaatcagagttttgtgggagtggggtgtgtattcaatgattagggaattattacattgtttcctaagagttgttcaacaagatccaggatgttataaaccacggtcagagatttttaaaccaagggcacagttctgaaggtcaggagcggagacctacgggcaaagatctgaagcctgcaagtcaagatc

SEQ ID NO: 54888 - DNA, 2498 bp, Homo sapiens
accttgattacattaatttacaccttagatgctgaaggtaaagctgagggctagcatgggattttccctttctctcttgggtagggagagatggggaagaaaggtggagttgggggctggagtagaaagatcaagcttttagccgacctggggagccttccagaatgtaacttgcccagaggccaggcctcctaggtactagggtttatgcagcagggaatgtgatcacgggggaagtggtgagtggtggcagggcaggggagaagcagcgcccagcaagtgtccttctgactttctgctcagcatgtttgttctgtggctggaaagaatgagttactagacaaaacatatgaagtacctagtacgcacctagcagatgttaggtacagacaaatccccatcacatcccccacctcagtgctcccaggctggtacaacttttctgagccttgcaaaatacaggtaaatatgtgggtaaatattagtagattatcaaagcacctagcacagtgcacataaatagatgcttaaataaataaaaataaattttaaaaaaacactaaatgactctgtcaccagcccattctcttcccctacccgattctaggggcacctcttaggaagggcgcccctctctcttccctgaactccgaccctgtttaatatagtatgtttacactctgccttcatcagatgctagcctgcccagtttgctattgtgctttgtcctgtttctcttagaaatctgtgagctccccaggggtgggagcagaactttggctccattctcccccacacagcagagaattgactttccgctgggcacaggggaggctcagtcaacactctatccccatgtggctacgttggcttagaggcacagaatgggagagaagcaggctcttggctgaggaaaagccctgggcgagcactgagggaagcttggcctcagacatagccagctgccctctggacctcgcagccctgctgtgcccagctcagctgctgtgtcagtgcaaagccagggtgacatcagctgtgggagaggttactgtcaggcaaagggaaggccaggagagagatggctggctggggcacgaggctagaaggactcaggaaacagttcccttgtaggggaagcagcagcttgggaggggcagttgggaggagagaagcaaaaggggtgaagggccaggaatggccagggcctgcctgttcctttcacctacagcagggagagaggcatgggttcagaactctggaagagagtgtgaccttcctgggagcactcttagcaactgcaggaagcaaatggggatttacctctctacgaccaggaaggcaacacaggagccgggcacggtggctcatgcctgtaatcccaacactttggggggctgaggcgggtagatcacgaggtcaggagttcgagactggcctggccagtatggtgaaaccccatctctactaaaaatacaaaagttagccaggaggggtggcatgcacctgtaatcccagctacttgggaggctgaggcaggagaattgcttgattctgggaggcagaagttgcagtgagccaagactgtaccactgcactccaacctgacaacagagcaagactccgtctcaaaaagaaaaaaaagaaagaaagaaagaaaaaacgcgggggcaagctgctcttctctctttactttggctcagaagctgagtcagggcaagagagactttcccttcagcttgtttatttgttgttggaggccctaggcctgtgtttgcttttcctctccatgtgttcatcctagatggcttgctcagaatggggtagccttccaggctggggaaagatcccctatgggcctccagaggagggagggagtagtctgtggcctgggaaaaggcatctttgtaaggtcagaccactgcagaaatctctggccctggtcctggtcctaagacatttgtccccaggcctcatctgctgggactgtcagtacccatctcacacattctgccctgagacataaactgcttccagtcacacgcactatctgatctgaggacgtaccccagggccccagggataggtaacaataagttggtggaggcccgtccgccagtatgcatacctgtgtgtgcagacattcccgtgtgtgagcacacacagaaagggctggagtgagaggaagatcatggctctgtggatagtgtggagagacagatgtctgccaacagagggaggtgtggggctagtgcactggcctcttctctaccggggaaagacgtgctacaccatctatccagcctggggcccaggaggagccatattcaagggtcctcgttcatagtatatcaggtcagtcttttcctcctctaggtctctgaacttgccaactgcccttctccacactcacccttaatggtcccttcggatttagcaccgtctcctccgggaagtcttctctcgttctctggagctggtctggagtgtacctttcc

SEQ ID NO: 54889 - DNA, 3071 bp, Homo sapiens
actgtcacttgagaaccacagtgtgaccagggcctcaggagtagaggtgatctctgctcgaaagagaaatagaatgaaaatattctccgggccaggcgtggtggctcatgcctgtaatcccagcactttgggaggccaaggcatgtggatcacctgaggtcaggagttcaaaaccagcctggccaacatggtgaaaccccgtctctactaaaaatacaaaaaattagctaagtgtggtggcgcatgcctgtaatcccagctacttgggagggtgaggcaggagaatttcttgaacccgggaggcagaggttgcagtgaagcgagatcacaccactgcactccagcctgggggagagagcgagacttcctctcaaaaaaacaaaaaacaaaagaattaagcaaattagacattgcagagagaacctgaagggggtcagaccacgtacagatttctgtgccacatgccaagtacttctgaggcatgactggatgagctgtccacatctgaaatcatccagtcttgttcagaactttcacaccggacagggagccaggactggaatgcagtctcctggtcactggccagagagttggcctgaccctgagaccagtggccaacaaaggagctgcttagtctacctcccaggaaatcccaggtgcttgtcttcctgggaagtgaatcattggcgcagcactccgtattttctcctcttcccaggggaaggatcctagggcagtatttgggaaagacatgggcatggaaggacaccgggtgaatgcatagcctgcctggttctgagctctcatggtaaggctcctacagacacggaaaagatgggggcacagggacagatcagtagggtcagagcatctcagggaccgagggcaatatggtcctgagcagggattaagagcttgggctctcatatggtgtttctgggctcaactgccagctccatcacttactggttgctgtgaccatgggcaagttattccatctctccatatctctttcctcacttttaaaatggaataatggggtacccacctcccagggtcacagagaggcttacagaaaacgattcttgtgaattggcttgcagtaataattcaatacctgccagctattcttattccacatccaagccctttcgcctgctgctgggtgaaaacacatgtcagtgtttcctgacggtttccacaaagaagattccaaaattacaacctgccagtctgaagaatctccaaaacatcccgcacgcatcctggaggcgcgggcttggggatgggactgcccgcccgggtcctgaacaggatgcgtgcgcgcaggcacacacacaccagccagcctgtgtgtgcggccggagtccggtgcggtcccgggtgagcagcgcgtggctggtgggcggggcagagccattgttcgcaggcgtaccgagtcccccgcgctcgcccgggagggaggcggggcttcccgcgtcccccaagctccagatcctggggtggctgccacgtctccctgccacgcgcctggggggacggaagacgggacggagatgttagtggtgggcgccccccgagggttcaccactgtttcctgagaaacttccccagtgcccacccacccgttctccgtgtgcccgagggccggtcctgggctaggctccgcgccccagccccaaaccgggtccccagccccttccagagagaaagctcccgacgcgggatgccgggcagaggcccagcggcgggtggaagagaagctgagaaggagaaacagaggggagggggagcgaggagctggcggcagagggaacagcagattgcgccgagccaatggcaacggcaggacgaggtggcaccaaattcccttcggccaatgacgagccggagtttacagaagcctcattagcatttccccagaggcaggggcaggggcagaggccgggtggtgtggtgtcggtgtcggcagcatccccggcgccctgctgcggtcgccgcgagcctcggcctctgtctcctccccctcccgcccttacctccacgcgggaccgcccgcgccagtcaactcctcgcactttgcccctgcttggcagcggataaaagggggctgaggaaataccggacacggtcacccgttgccagctctagcctttaaattcccggctcggggacctccacgcaccgcggctagcgccgacaaccagctagcgtgcaaggcgccgcggctcagcgcgtaccggcgggcttcgaaaccgcagtcctccggcgaccccgaactccgctccggagcctcagccccctggaaagtgatcccggcatccgagagccaagatgccggcccacttgctgcaggacgatgtgagtttcccagcctggccccgtaccgccgggtcgcaggcgcgggctgggcttccaggggacgggttggtggcagaagagaggggagagctccgcggaggacttggtcatctttttcgagttgtgctgccttccgtgagttgggaatgtggattgtaatttggggacttgagtctccaactttagtttcttaagctttaaagaaaaatccggtcgtgctggtgcttttatgaattatgcgggttttcctttgtcttcgtggggatgtgagtgctttacttctccttcctactgccgcctcccgataggtttcgcgcccctcgtccccctcgccctccgcccctaatgtatctgtacagtttcagggaacttttctccgttgcgtctcggatacaccctaccctcagtgaactacggcgctgcggaagggtccgtactgtccacccttcccccagcgtgattagagagcggagtggccccagctgcctccacgtgtctcttctcctgactctcctcttcctcccccttccagatctctagctcctataccaccaccaccaccattacagcgcctccctccagggtcctgcagaatggaggagataagttggagacgatgcccctctacttggaagacgacattcgccctgatataaaagatgatatatatgaccccacctacaaggataaggaaggcccaagccccaagg

SEQ ID NO: 54890 - DNA, 1594 bp, Homo sapiens
cctctgtctctacttaaaaaaaaaaaaaaaaaaaagtacaaaaaacttagccaggcatggtggcacgtgcctgtagtcccagctactcaggaggctgaggcagaagaatcgcttgaacccgggaggcagaggttgcaatgagccgagattgtgccactgcactccagcctgggtgacagagactccatctcaaaaatatataataaaaataaaagcattttttttctctctttttaactttcacatatctcttttcaggcaccttcttaccattgtgcctattcttactttaacccatgattaaaataaatcatatacactgtataaatctgagattatcataggaatggagtttctggcatgagatgtttcctgtatcgcaaatggatctataatgaccttccccacctccagcctctgggtggccatgagttcaaagtggctgccaatatctgacctgttgttgttatcattcactcctccttgcctgctgctttcctcccttatcacctcaccctttgttctcctccagctctgtttcctgccaccctaatctttttgtttcttgaattacctcccccactgtcacatgctcatcttctctgccaaattaaccttctcccttgagcctttcttgggctgtctcttgctgccccagttgcaaagtcctgtcttctttctacccgttgaccctcttctttttttttcctcccttgtctctgtgtgcatctgattccattttaaatctggtaaccaaaggcctggctagtgcttacacacagcccagctgcaaaaccattaatggacattaataatcctcagtacctttattcctggcattctacccccctcctccccagttcacactgcagatcatcaggtgtcacagagagaggacataccttgaaatgccctagatgatgtcatttactttgcaggacttccttgccttgcttctgattaatgtcatgactggtctgtctgagggtactgttatctacaaagagccaaatattagctcttagtagctattctttatccatgcctgattagggtcagtattatttttggctgtggttcagaaagaagagtcctgccaagcgttggcaaactctctatctgtcgagtttccaaagctttacacgttagagaaattgctgtgaatccagaatttgtttgttttcctccctccagcaaagtgaaatgttcatcccaagagtcctcaaaatctcagaggttacagggtatttttcttcctcagagagcttctgttttatcagcacctcccccacaccagggtcaaagctcaaaaaagttggagcagcccctgggaactgcagtggctgaggacattccagcccctgggctggcctttcttctgatctttggctgcagggcccactcttttggaacctcccacccctagaggtggttccagtgtggtggggaaaggtgtgcttctttactcatttttttaagagtcatagccagagtgcttcattctgcaaggacgtgcacatgcacatgcacacagagccttgagggcagggccaagagtgaatttggaattttccaacctgatacccattcccaa

SEQ ID NO: 54891 - DNA, 836 bp, Homo sapiens
ttaatatcaactctgaagctaattgtactaatctgagattgtgtttgttcataataaaagtgaagtgaatctgattgcactgggtctgggagtttcttttggctgtgattcaaagtcttgggatttgtctctggctcatatctatgtctgtacctttaagagtataaaagaagtagaagttacaatggttgactcataccccattaacctgccctgctgtcctaaaggtaactttaggttaaactctgggacgcaggaagccaggagtctgctgccattaaatcaaacacattaacaccagctggcaacttggccctggggaagtgccagggttctcgggtgtgtcacgtggtcggtcacatagacctaagataaagacactgggagaggaaaagaccagcaggagaagcgctccctgggaaagcagttttttgctcttgcccaggctggagtgcaatggtgtgatctgggctcactgcaaattctgcctcttggattcaagcattctcctgactcagcctcccaagtagctgggattacaggcacatgtcaccatgtccggctaattatgtatttttagtagagatggggtttcaccatgttggtcaggctggtctcgaactcctgacctcagatgatccacctgcctcggcctcccaaagtgctgggattacaggtgtgagccactgcgcccagccaaaagcagttctttaccttgcaacccaggctgggcagtccagctttttcctgtttctgaaaagtagtcacctctagggaataaaatggcttcttgagaatgctgatatgcacagcagaaggaagaaaggaaaaccaat

SEQ ID NO: 54892 - DNA, 1649 bp, Homo sapiens
atttagttaaaggggtttaggcaactgcataaacacagacctaacttccttttgagtgggaaattaaagttctgagtccatcagacttgtggatacaatcataataacaataacaatatttactagagctgggcactgtactgaatgcttggcagtgtgttatcgcaccacatccgaagcaggtgttattgttacctggattttactgatgaggtaactgagttcacttggagaaaaagctgtgagaaaatgtgtaatgttgctatgatctggttccagacctatggtcttaactactggctctactgggtgtggagcagatgacaaactagatatgtcgtaatctgtcatatgtccaactgtatgcctggcaatattcagttatactcagaggcaaagcctggtgatgtgaccctcctccctgggtggcagtggcagggagcttaagttttgcacaaacagcagatgcatccactgttccggaagaacccagctcactccacctcctgacccgtcttaacattcagtcacacctgggttttaagctttcctctcaaaccatagatacgtacccaacatttcctgtctacttttcctaaactacacttcaccctcctataagattgtgagctcctcaaaagcatcttcctctttcagaaatgtctccctgcccctaaacagtcagcactggaaatgacagaatgagctcatgtcttgctctaaattctgtcactgctacaaactgtgtgaaatgtcacagggagtaggagtcatattttgtgacctgtagttaactttccgtgctgcaggcaaagcgctgattcttgtacactgactttggaacaaatgccacaggccctaattgcaggctccaaggagttgagattccatactggggttgctggaggcagaagccttcccactttcaggacccggacctgcccttcccccacgcggtcccgcccagccagctacaccctggccacagagcgctcacaaaggctcagtgtgtgtatgccgggctgactcacagtggttctgggcccaggcgaggaccttctcagaggggcggaaggggccctctccctcctggccattttccatggggagcagtcagtaaccaggaccatgccagacttcaaaaaacagagaggaaagtggaagtgaaaggcagcagaggactcagaattgctgtttcttatttctttcttagagaattatggacagcaggaaggactcaccttttagtctgtcagtttgtttgcgagagagagagagagagagagagagagagagatacattttaattgagagacaattcacacaatataaaactaaccactttatttattgagataggggtctcactatattgcccaggctggtctcaaactcctgggctcaagtgatcctcctcccttggcctcccaaagtgctgggatgacaggtgtgagccaccgtgcccggctaaactaaccattttattttatttatttattttgagacagagttttgctcttgtcgcccaggctggagtgcaatgggatgatctcggatcactgcaaccttcgcctcccgggttcaaacgattctcctgcttcagcctcctgagtagctgggattacaggcacctgccaccatgcccatct

SEQ ID NO: 54893 - DNA, 3115 bp, Homo sapiens
tggaatcgtacaatatatgaccttctgtgtctggcttccttctcttggcataatctttcaatgttcatccccattggagcatatatcagtacttcattcctgtttattacctattcatattccattgtatgaatacaccacagttggtttactgatttatcaattgatgaacactggagttgcttccaccttttggttattgtgaatagcactgccatgaacatttgagtgcaaatatgagtacccgtttataatttattagggtttatatctaggagtggagttgctgggccagatgctaatttgatatttaaccttttgtggcaccatcaaactgtttccccagtggctgcaccactttaaattttctccagcaatgtatgagagtcaccctcttcttaacgtgtacccatttgtccctttcctctttcctactttttacaaagccagttccccacagacttctctttcccctggagtagagggtgggagaagttgcatctctagtagaaagactatccaagcctccattcttaccttttccgcaaatagaatacggtgaccaggaggaggagaggacaggctgccacctccctgtggtcactaaggtacacccactacagccattaacgcgactccgtaaaactaccctcctagcgacctccaacgcctcggtcctcacccagaacatcacattaaacttttcaacagtcacagataggaaggggctcggtgtggaaggtgccagctctggctcagccctgcgggtgagtgtttaactttcagcccagcttaagatctccgaagacacccatcgcctcgtcctgcccagtcccctccgctaaagggccggcctgcccgggcctggctggcagctgacatgaatggagaggaagcgcctccctctccacccactctcgccggggttactgccggtcacagacccgggccttcaagagctatttacacctacaacagcccaccagcgcctgaccacgccggagccaatcagcggcccccaagcttgtctgattctgtctgctccaatcaggaggcgcggtccttccagcctcttgctcctgtgaatcacaggtcggcgggagccttttttcctttttttttttttcccggggagtcggcctcggggctctgctctcctacctcagtctgccctaccctggaatggggaaaatgcggacatgccactcagtccggccgcgaacagtgctccagaactcagagagttttccagacgggtggagatcgcgttccctgcccgccgaggtcccatcgcttccctgctgggaagacaaatgaggcgctttagccgtctccacggccagcccctccctcataacccgagattctttgtgggctcttagtccatagctgcctttgaggtggtgtagaccttgctaaccaggacggcccagtaggcagagctcatttttattcctgtctgcaatcgtgcaaaaacgcctcttatggaaaagccagagcgccaggagtcagcaaaacacactaaagattgggcagtcactggggagaacgtgagtaaaagcacaggaacagcaaagcgttcaggaacgttcgaggctgacgcaaccggcgcaggaaggtggtgtgtggtgggagagtgggaggagacagtggaaagtttagacttgcttctgtaagtgataagaagtcatcagatattttcaagcaggagaggaaaataatctctctgtttcgcaaagttaactctcatggcaacagagcagagtagcggggggatgggggctgggagatgttgggaagctattgttaccactctggtgaagagtcatgggacctcaaaagctgggatagtcacggtgggaatggaaaggaagggcacaagctgagaggcatttgggaggagaatcaatagcactttattgactggatgtgtgagatgagtgaggacagcaatcagaagaggactttgaggtttctagcctgagtggctggaaggacaccacttcccctacctgaaataggtagcaaaaaggagagagaaagagagaagcagagggattttgcaaagggaataggagttcagtttttgacatgtggcatttgaattgcaagaagtacatccctgtggatgtaatacccagtagacagttgggaattaggatctggtgtcgagaagaaaagtagagatgagatccaaagggtttatagtggatcgggagagaaattgatgacctaaagagaaattatagaataagaagatttgggcagggcacggtggctcatgcctgtaatcccagcattttgggagaccaaggtaggaggattgcttgagcccaggagtttgagaccagcctgggcaacatggtgagaccccgactctacaaaaactgcaaaaattagccgggtgtggtgacacatacctgtaattccagctacttgggaggctgaggtggggggatcacctgagcctggggaggtctaggctgcagtgagctgagatagtgccactgcactccaacctgggcaacatagcaagagcaagaccctgtctcaaaagtaaaaaaaaaaaaagaagattcaagtacagaatcttgggaaggtagaaagaggacacagaggccaggtgtggtggctcatgcctgtgatcccagcactttggacgctgaggtgggtggatcatctgaggtcaggagttcaagaccagcctagccaacatggtgaaaccctgtttctattaaaaattatccaggcatggtggcgggcgcctgttaattccagcttctcgagaggctgaggtaggagaatggcttgaacataggaggcagaggttgcagtgagctgagattgtgccactacactccagcctgggcaacagagtgagactctgtctcaaaaaaaaaaaaaaaaaaaaagaggacacagagctagcaaaacagacaaagaagtatcagaaagatatgaaaaattaaaaaaaagcaaactacgatactgtaatagaaataagaaaataattccaggaagaggaagcaggacattgtttatgtatgtacaaaacagtaagacattggttaaataaattataaagcattcatttgatagaatacagccattaaaa

SEQ ID NO: 54894 - DNA, 645 bp, Homo sapiens
ggtggatcacggtggtcaggagctcaagaccagcctcgcttgagctaaaaatacaaaattactaaatttttgtactaaaaatacaaaaattagccgggcgtggtggcggtgcctgtaatcccagctactagggaggctgaggcagagaattgcttgaacccggggagcggaggttgcagtgagctgagatcacgccactgcactctggcctgggagtcagagcaagactctgtctccaggaaaaaaaaaaaaaaaaagtcagtgtttatattgctgtgactatgcaaatattgttcacaaataagcgaagtaatgtacccaagtaagctgagtaatgtttctctcttgcataactttttgtgctttttggacctaatagttgtatttttctatgtacttaatatattaatttaactcaacctccgccccagttgtctacatctcttctcaatacacttggtcacatcagatattttttcaatttcattttcttgaagaaatctctcctggagccccctcacatgctccaatctggactggttactctctcaacctgttgcatacataatttttgtcctgggaattctcttcagccttgttctctcctgtgttagatcccctgttcctggatcctttgtgttcctc

SEQ ID NO: 54895 - DNA, 929 bp, Homo sapiens
ataggcagctgctggctatatccactaccagctccaggtgcggacaactcttcagttcatttaaaagattggcaaaatgaggtaccaagtgggctggcccagtagactaactagacttctcgcaactcccacaggggcagttaaactcgccacgcgcttaatccggggcctctcactcctagctctctccccaggcggtgaagggcaccatgaaacgcacgtgcaagtgccacggcgtgtctggcagctgcaccacgcagacctgttggctgcagctgcccgagttccgcgaggtgggcgcgcacctgaaggagaagtaccacgcagcactcaaggtggacctgctgcagggtgctggcaacagcgcggccggccgcggcgccatcgccgacacctttcgctccatctctacccgggagctggtgcacctggaggactccccggactactgcctggagaacaaaacgctagggctgctgggcaccgaaggccgagagtgcctaaggcgcgggcgggccctgggtcgctgggaacgccgcagctgccgccggctctgcggggactgcgggctggcggtggaggagcgccgggccgagaccgtgtccagctgcaactgcaagttccactggtgctgcgcagtccgctgcgagcagtgccgccggagggtcaccaagtacttctgtagccgcgcagagcggccgcgggggggcgctgcgcacaaacccgggagaaaaccctaagggtttcctctgccccctccttttcccactggttcttggcttcctttagagaccccggtaattgtggaacctagggaatggggaacccgctctcccagacctagggatcctgagagggagagactgcaatttctccaaagcttgccactttccagcctgtttccccaattcctctgtgctctcctagag

SEQ ID NO: 54896 - DNA, 1119 bp, Homo sapiens
ctactgtgacctgcttgagtaagctatagtcagatcagtctcacctacaaaaacaggagatagtattacttaatctctaaggtactttctagcgtgaagaaagtttaagcctgcccattaagccaagatttccaaagcacctttaaacacttgtggctactatcacgtattctgtgaccagctcaacactctactatacagtcaccagtgccacctgctggtcacagccattttaatgtttctgggaaaagattccctaacaacaaaaataggagctgcgataagcagctgtgcatttgatgtgcatatctcagttaattctctcagtggtcttatcaggtaagtactatgattatccccattttctagagatgacaactggctaggccgggatgtgaacccccatcagcatcaagagcccgtatttctaaccactgtactagtcgcaagtaaaccctagaaagtgttttaatcgctgacagtctaggaactgggaaaatgggctcttaattcacattgttaagaggcatctattcacaaaaaaagggcccccgctggggtcagattggccatgggggcgtgagggggagatgaccaatgaaatgctcgacagacctgccgtgcaggagggcaccagctacccttggcagtccagtccctagggaggacggtcagcacagcctctttcccgctgtcgccgaagcgcggcgcgccagggtcagcaatgacagaccttcccgcccagcccaaacgcagcgacaccggacggcctcggctgggccaggtcaggaccaaggcggatgggaaggcgcaaggcagcagtgaacagggagaccctcatccggctgggggttcccgtgcggcagggacagtagagccggatccaattcaagggtagacgtagtggaggcccccgaggcccggacccgcgggcagggcaggcgcgggccgggggctccgcagcaagcgggctcccctccgcgctctgccgagaaaggagcagtgctccgggtccccagcgcaatctctgctaccagggaccccagaccggcggggcgaaccaacctgtgcggaagaccccggacaagggtcaggcgcggcggccggagccgctcctct

SEQ ID NO: 54897 - DNA, 1704 bp, Homo sapiens
aggacaggaaataaaggcgatgataatcacttcagataattaaccattgggatgttatgtgggtatggatacggaagagtgtggaagggataggataacatcaactggagtacgtaagggggctggctgtttaatctgcttaatagttgctacgatttccacagcactaacagaaaaacattttttttaaagagacatacacacaaatatagagtactccgtttacaaataagattctcatgacaggagtccagctccagcctggtcacatgcctggatgacagcacctgagcgcagcagatgctcaatctaaatgaaactcgacgctctggatagagccaaggaaggctcctgctattcgggggtcctcgagggagccattaaaacctcggcttcctcatttgaggaaacagcctgagccaaggagaaaattgaagtcctctcagctgcagctgctcacccacccccctcccacctccctccacagagaaaagcacccactccattgactctgaggggtcacgagaaggttcgggaaaaagggtcacagtcaagccacccaacccagccggccttctcccatcactacttgggtgcgagcataccctctctgtctcaccccatgccatcatccgggtaaggttcgtagtcttccacacgcatattatacttcttggcggcggcggcccgttcttctggggtcctaggatagggccccgggaacatgtccttggtcatgtgggaggctagaacgcagaagagaacaggtcagaagcgagcccgctctccagccgctccgaaggcttcaagtcgcaggggctgcagaggtccgagcccgggacttcgcaggatcagtgcgatcctccaccccattttctggatatatcaacgccacctccactccctacccggaggctgccgccgcggcatctacgatcccccctcccgatacaccaaatttcaggtacccccttcccacactgaggtctcgcccgttctcgcggacctgtccgtgcgcccagcggcatcacgttccgggatgccctttgcagccactggactcccaagaccccggccctggccaccgccatcttcaccttcttcacgtttcccttctgcacatgcgcaaaggcctgtcacggcggctgagccgggccaaacgtgacggaggaagccgggagtgaagaaaagccgaagggttcaacaggggcggggtttaaatacgcagttgggaagccaagggttggatagaggctgggaaggataagcgggaagaagggaaaaccaggcaggtctctgacatttcagaatgttgtgtcctttttctccctgagctgacttagacccatccagggatgatgggaactcggaacctgagcaactcaggtagacagcttaaccacctcccccaggagctgtactagtgaaatgagcctgtcttactctcttctctggctgcttgctttcctctccttcacgggcacttccttccatccccaaacatgatcattcttcaaattcacctgttggtcttgcttgttgttctgttctccaaatgggttgatcttcacttagacgccagtgcaacacacaattcggccctgaattggctccttagtttcagtccgtgtttccatctgcatgtctcagtcacctcaacccaacaaatgtaaaattaaacttatcaccagaggcagctctcca

SEQ ID NO: 54898 - DNA, 937 bp, Homo sapiens
aaactgtctttgattttgaaagaattcaacttgctgtatatcttttgcctaagccttcagtcagcctttgctctacatctaccaatgtgatcactgcttttccttctgacttctttaggtgggtcaagagtttgcttttctccccattcatgagtgtaaagtttaatgcctaactgaacttgcttccttctttgactcttgtgtagactcgggcacatggggcaactttttttgtgttttgctctaccaggtcgtccctattccgtgggactagtgtctagccccatttcttcagcagtggagcctaggatgtagagctgcatactaccattaggaggcgcaccctcaggcctcggctccgcgttctttatgtctctggaccgctctctctcgcagctcatctctatggtttccgttgggtgtgtggtttttttgtttttttttttttggggtccggaataggcggagcttccggttccggtgggggccgtccctggcggcggagatggcggcgacagcggcggaggctgtggcctctggctctggagagccccgggaggaggctggagccctcggccccgcctgggatgaatcccagttgcgcagttatagcttcccgactaggcccattccgcgtctgagtcagagcgacccccgggcagaggagcttattgagaatgaggtggggggcggggccgcgtctaaagggagaggaggaaggtacccggttgagaggtcagaggtgaatggtgaaagagatgggagactggcagggctctagactagggcctatgggaagatggagagaaaggcgaggagatacggaacttaggggttcgtgctgattaacaggagaaattattctgaagttgagaagtagttgggatcatggaggccaacccaccggctccttggcattacttcatttggtgttttt

SEQ ID NO: 54899 - DNA, 1155 bp, Homo sapiens
gtctggcgggcttgggtccggctcccccgccgccgcagtgatttattcgcttcacccggcggaatcaggtgctgaaccgagccccggaacgagagaacagatttctcccaggaaaggttttgtgaactaaacgatgctaattacggggtgggggatgcgtcgcccgggaaggggaggcgcgcggggccgagcgcggcctgggaggggagagaccggggctggccgaggccctcccggggcgcctcccctgcacctctcgccctggctttcgcctttccctgggaactttcccgtctgagttaactattaaccaccggcgagaggcaattttcttcggaatttcagcgatttccttttcgcagtggactcagattagcacgcaaacagtgagatgctcggcttgagtctacgcgcgggcgaagatgcctctgtcgcctcaaacagtgtccttcgcgacggcggaaaactacagcccgcccccgctcccgtgcctgctcaggaagccgtgaccaagccagtgcccgccggtgcccggagtgaaggtggaaaaagccgagtgctcctgctcgggggcggggttgagagggggagattaatccgggcaagccaaggggaccttagacttgcagccagggccgccacccgaggagcccgcatgcagggacgcgcctgaaggcttagtcaaacccggggaaatgccctcccccgcctgcagaatccccacgccgtctcttacttcctccctctttgccactggcgagcttacacgtgcacacacacacacccctctctgtctgtgaccgcaacaaactttgtgaaacttgaaccgctgggtgcaaagttcacgcccttttctcctttcctctcttgcctgggccggctcctcctggagcagggagggaagaagttcttggcctccagacctgggagaggagtttccgaaagtcagggcctcgcctcgctgtgacattagacccttgccacccaccagaccgatggacactaaacactttccttgtcggaaggcgctagtagttgcagcggccaggcttggcagggccctggtcgaccaccccaccactgccctggccggactttcccagggcgttggtctcctggtccctattaagtcggggctgtcctgggcttggagcc

SEQ ID NO: 54900 - DNA, 540 bp, Homo sapiens
tggtcagagcaaccctggattaccatttaggtggctaattccttttgcagataactgacaatgtatcagcctctggttaacgggagtgcaccccacttcatgaaaacccatccctttggaaataaccaatcacacactggttgtttttaacagcccctgatgtttgttgaatgaaaaagtgtggcagattgggcagccctctccaggctgaagaattcacaaaggatatcaaagtaccagatcaaagggcaagcaaacatcccttacaggacctacagaagcccttggttaaaaatcaacaagaggtgattggatgtaagataagggcccttcaaactcacaacacgaacccactagacgtctacacttggggtccttaagggagctgggggtggggaatgtggacagcagggggcccagtgaggcctgaatttagctcttccatgtggagggccagctcccttcttggcagtgtgtatgctgtgcggtgtttgcaccttcaggttcaggacagaatttgtgtttcatgccagatgttga

SEQ ID NO: 54901 - DNA, 1177 bp, Homo sapiens
taaagacaaaaaaataatctaccgctgacactcaacaagaaccgtcgtagaatggacaagtcttcggatcgcgctgtgcagatccctcagcaaattgtgacagtattatggcactttggcctaagctgttaaagagacgatgtaatgaacagctgcggatttctgaggcacaattgtgtgacacaggaagcccaagtgttggccatcctcaacgaaggcagctgccgggctccggtttgcttcagcaaaccctcacccctcgccttcaaccaggcgggtgtcgtcagctgtccgccagctgctgcccgcgcctttccgcccccgcgcgccggccaaggccgaggcggccgggaccagaggcgcgcgccctcagtgcatgtgacggggtgggagggggaggtttcttcctcccccgtccccaagccccgccttctccagagaggctgcggcttcctattgcgccaccaccgaaatgaccaccgtgccagccaatcaagacgtgattcatgaagtaagacccgccccttactggtccccaggttccttcccgctcacgccggagtcacttccgaagagagaaccgccatgaagagagaagggggtgccgcccacctctgctccgacagcctcccggagtcccagcagcaagacggcaaccacgcacccaacttctccagccacggctcatgccgccgtcgccagcggcgccgacatgacaaggcgctgcatgcccgctaggccaggtttcccctcatccccagccccggggtcgtcgcccccgcgctgccatctgagacccggtagtaccgcccatgctgcagcgggaaagagaacagagagtcctggggacaggtaccgtgcagagggcttgagaaggggccgggtcgcgggggcaagggtatgaggggagggctgcagaccgccgctcttccagttcccgccatcctccgcgagctcaggcgttggcatttcggggcctggcaaatccccgccccgcctccgcgcaggggctactgggagttggagtttgcttctctgtagttgggcagctgctcttggtctagtgaccaccagcctggacagctacggagaacccgccttaggtagaaagaaagtgatttttttcctttgcaagagtttgacccgggaccctaactgcttaatgcatatttagatc

SEQ ID NO: 54902 - DNA, 798 bp, Homo sapiens
tgtataataacagtgattgtcaaaataatagtggtttaaacaagaagtatatttgaaagaagtataaaagcaggaagtccagggctggagtgccagttttaccatataatctttcttctccaccattcttagcacctagcttcgggtgctgttctagctccagcctttagttcaaattcccagaaattccacacagcattcccacacactaagttagttgaatagaaaacttagtcaatatgaccacacttggccacaagggaagccagagagtgatgtttatttcaggcagccagtgtttgcagctacagatcagggttcagttaccaagaagaaaggcaaaaatagatgctgggatgtgcaactagtaatctccaccacagtgcccaaactgatctaatttctctcagtgcatgatatctcagctctagagagatcacatcagttctgctgccaattttttaaagtacttccccagtctgagacttgataggctctttctcaacactaccagcaaatgtagctttgtctgccagttaaatgtggagcctagccaacagattggatcagctttaggccatcaattaaatttattttatgagtaactcatccatattggtatagagtccacctctatggactgaagacagtttgcttgctcatttctctgattatgtcagatgtgttggtggtgatagtagaagtattttgccatgaagttaatagccatgttgattttactttattttttcagatcgggaaaaacagatcagatttttttgacaacacaaggtttcc

SEQ ID NO: 54903 - DNA, 1769 bp, Homo sapiens
ggtgagcctaggttagggttaagatttggtgagtgaacaggtgcaaacgcttgtggcttatttatccagaaaaagcattttctgtgtgcctttcaggtcaggctgttactttatccccttcaggcctgaccccatctcccccacgcatagctcaagctgaacagcccctgaagctgggaatcaagcccctaccttgtgttcagagcttccctaacgtccagtcgccacctagggtagccttccctccacaccctaggccgagagcagaagcgggtggcaggagcacagggagtgaggtccaggttagaggacaggccagaaggccctccgagagggtcccccaaccccgcaacgccaggacaggtttgcacgtccccagcagtaggcaagtcaggggggtcctagggttacagcggaggagaggacgggctataagcatgtggagggtgcacggggtggcgaggccaccaccagggggcgatttcagggccgcagcgcctagaggtggggggtcgcccgatggccgaaggctgtgtgtgagcctcgccctcaaaccgcctctattgtgctagagtagggggcgcaaagaagagagtggcgaccttcccctcaccccacccagtcggccccgcctttcaggaccccgccccacccccggctccgcctccaccaccccccccccgccccgcctccagccgcggccccttcctctcgcagctggtgctgtggggccgcggagccgcgcgtcgctgtctctatggccccggatccgagcgcaaaggtgagcaaggcgaggagtgcgggcggcgccctggcgtgagcctggggctgcgggccgggggtcgggcaaggcctcccccacgtccattctaccctccaagctgggccaggcctttctcaccaccaagtcccccggtcctgcatgacggctctagaggggcgcgggccaggcctcgggctgcgcggggtgcaaaccggccaccacggagtcggggaccagcgcggggagggggccgcgtggcgaacagtgttccccaggatctgggtcacgtctcccggcgtccggcgggatcgaaggagagcttgtcctcgagctgcagcagtagagactgaggttagacctgacgaagggagaggaccgcggactgtccaggatgttggagggagggggtcccgggggaggggctctctcaagccaggagagaccgccatcctactaggcagagggaaataccgcctacactaggcaggtggacatctgggatgaaggtcgagagcctgctgatcctccattgatcctgtttgaagggtctctcctccccagttccctccaccccaagatctaatagaggaaaggtgatcagagttcagggggctggccctggggaagaacccgaactgtggaacttggggtggagtgtggggcgtggactggagaccttaaacccgtacttcgccactgaagggaggggtgatatgctccgccccgcccacttagccccgccccctcccacaggttaagtgggggctgagagctccagcccgtctcccacctttagaaccgcaatatacataggggtggaggagtactaaattatgcgttccattccatctttgctgaagctaggggcctcctcctgcctgagttactttcccattccctcccttgtagagcggccttgactcatgcacccatcccatctgcccatccaaggtcagaagcctcccccatcaccacacacacacacacacacaaccccctcaccacc

SEQ ID NO: 54904 - DNA, 777 bp, Homo sapiens
tccctgtgagtatatgtgtgaatgacccctgtgaatccacgtgttcacagtcctccttgtgaacatgtgtgtgtgtgtgtgtgtgcacccatgtgcatgtatatcaccttcctaatagtcacccatgtgactcttaaactataagtgtgacatgcaccacactgagtggctcctctaacctggggcatgttcctcctagccatagtgctccccacacacatgccttttgcactgagcaaataggaggtcccaaaggtaaacaggtgtgcctccacagggaggggtggggcatggccggcttgcctgaagcttcctgctgtcccagatcccaaacagggagcctatgccctttcagggtcagggaatcctcttctctccctttcatatttgactctacccctcagggctctgcccctgcagtgctgacctttacctcttgaataattgctcctgttatccctctggccagttcctgattcctcccctctttccaaggccagatagttaatatttgacctgggagaggaggcaccagtggcaccctctggccctgcctgtgggtggctgatgagatggaatgtattaggtctctccacacctcacccagcccaggaactcttcaaggaaccccttggtgattaggaggcctgttacaggggttgggagaggcctgccacccacccccatcccatccccaactggttggcttgagggagggtccaagatgtgtcgggaggggccaagggctcagggatcccatcatttaccttcttcacg

SEQ ID NO: 54905 - DNA, 2102 bp, Homo sapiens
atgccacttgcataaaaatgagtggttcacaaggtcactgcccccagaagcaggcactggaaagaaacaggcagctcttcattatcccaagcagaacctctgtcaacttgcccattgatgggttccatttgcctgggcttggaatcccaaaggggaagaaccacctttaccggagtaacagtccaaagcctggggctgcagttggtggggcaactcttcactgtgcttgcacctgggctggggcaggatcctgaacctctcgggggcgtagcccgcggaacgtggtcggcttgttggtgaaggggtgccactggccctggatgctagggttgtcggtgtggaagggcttgcggatgcggatcacgtccaagcccgactggtcggccagcttctgcaccagcgtcgagatctcctcgaccgacttgcagtggatgctctcctcgcgcacagccccgttaactggcagaagaggggtgagagtgggtggaagctggccggtgcgaccaagcgagaaggaggatagcgggtcgagcccctgatcccgccctccagcccgagcccggccccactcacggtattcggccactactctgggcacgcagcacggacgcgagtttacatatattacgacccctggattccgtcgggcgaagtcgatcacctcccgctccacgaactccctaagcgacccgggacagtgagcagtatgacccctgactgggggcgacctacccggggagtcgttgccacctccacacccaccccgacccgcgcctgcgcacttcccttggctcacctggcgccgcgagacgaggcgccgtcgcggctgacgctgaagctcagacgctgcagctgctgcacatagcgacccagtccgttgtggagaacgctggccaagaagcggctcggagtcccgcgcgccgtcatagctacagcttggaggccgcggagcctaagcagcgaggagaggggggcgggactaaacctcgaggcttccggttccgggacgaccgctcccggagttttgcttccgaggtcaaggcgagtagcatgtgcgggagactcacgttgccggcgaagtgggagagagaaaagtggtaacctggggctgggggccggcgcggcggagctcggagtagtagagcggagtgaagacacgggggaggatagagactggcattcctttgggccgggggattggcgggagtcgtgctgggtgctctcgccgtgttgaggtcccagtgaggggaaggagaagcggaagagggtctctagtcggggcctagggcaaagggactacaaaaaggatgcagatgactatagaaatgaggacgacgaggagatgctgtggaggagcagtagaggtgagaagatgatgcaaagaaactgtgtcagtgaggaactgtatagagggtcatagaggtgaggtggcggagagaaactaactaacggaccatagaggtgggggagccattgtagaaggacgtggacgcgaaagggtcgtgtagatgggcatatgtgtgaagcagcaacgtagaggggctgaagaggagaaattcatggagagaaagaatgcacctagagtgagctctgcagagtgctgcgtgggatatccctagagtttggtctagtgaaggcacgctaaccaggcacctaaggcatttcaagtagtgacttcccacatttggctaggaatgtgggtcctcctccgaagtgggtaccccctccgtatcttgttacccctgcgtggggagtggatgggtcggaggggcctgccccgaaacttggccccaggccctcctcgcagacgttacaggaaggagactctccaagccttggatatgccagtgttgcctgtaactgcaactgaaatccgccagtatttgcgggggcatgggatccccttccaggatggtcacagttgcctgcgggcactgagcccctttgcagagtcttcacagctcaaaggccagactggtgttaccacttccttcagcctcttcattgacaagaccacaggccactttctctgcatgaccagcctagcagaagggagctgggaagacttccaggccagcgtggaggggcgaggggatggggcc

SEQ ID NO: 54906 - DNA, 3371 bp, Homo sapiens
ggggtaggtgggagctgctctggtgaaacttgagccttctttgtctgcttcccaggggttgtccctgtatttggggattgggccaagagtggaccgggttgggctcccatcggagcagggagggtggcagagtcaagctcttagtttaagcttagtttaaggcagccaggtagccgaattctcggtcacgtgatgctcgcccccttccccaggtcaaaaaccaaatccagtaagctgtgaagtcagaggccagaggggcagcctcggccaccgtcgagtcactcttaggctgggcactgggtcggctgctggtggagtgcggggcagaccactcccctccctgggtggggggcgcggcctgagccgccccgccccgccccgctccaccaggtcgggccaggcgggcgccgggagctgggagccgggagcccagagttcggaacctagagttcggagccggctagggagccggcgttgtcgcggcgaggaggtgggcgcgctggagcaggagcggggccggaactggagccgaggcgcaggtggcgctgggtgagtggtggggcggcggaggtgcaggaactcccgcctcccgctcatccccgctcctgaacgaactttccgcttctagggaagctaggggttggggtgaggaggggggtccgcacttggtggggtccccgcgaagagtccgaacagggaagtgacacgaaaacgcacgccgacgggccccacacacgcgtgcacagacccacgcccgcacttgggacacgcgaacacacatgcactcggaaaggacgcgcccagttggccacccttgcactcccagggacagcgccagccggcccgcgcggacccacagcgggcagggcactctgcggtcgcgtattgggtgcgggaaaggggcagccctgtgactaccgacgggggcgggccgggtgggacgcacccggaggttcctgcttcctggcctcccgcaggtgaagaccaagacgtaaacagacgccgagcacgtgacagctccgcagaccagtggcctgtgcccccaacccaaccacggggcggaaatccaccctagtccggggcgcgtttgcttggtcccaggccggacggcgttccattctccgcctggagcggggataagccctctcccgggaaccggagcacagcgccccctggagccggggcggagcaggagggcccggctgctgggcagggctggggttaactcgggctcctggacgtccttctccccagcacattcttggtgtctgcatccctgaaggtttcggagacaggcccttgatggcagtggacagctgcccccgcctgttaccgccagcccagagagcagctgcctgagcgcctgcgggtccccttcctaccctcacctccactccttgcgggagtcggagtctcctccccccagaaaatgcatgagtgtaaacgctccctcaataccagagtgggcctgcccccctagaaaaaggaggacgagcccctccccccagggaatgagggagtgggcagtagcccgatgcctcctcctcgccccaccccctacccctacacacacgctgagcccagctgccgcctgagctgggcaggctgccagaaagaggaggaggctctcggtgccccaggaggcagggatcagggcaaggccagaggagggggctctgctggggagaggggctcagtctgttcttgtgaggctgagggtctggggtgagtcagggtggctgggctgtgtttccctttccagggaaaaagaaagaaaaacaaccctgtccatggagctaaaaatagagctgagagccggccagggctgtggcctggaagggggggatgctccttcctggggcccgggcgagctccggcaggccttggccctgcgggggagggggtggttaggggagaaaggctgcctttgcccagggatgcaggcatcagctgacctgaccgggtcaccgagacccctaggggaaaggctgtgcggtagaatatttgtgaagcacggcgtgtaagaagttgtctgtgtgagtgactgtgaatagaggctgtcaatgcgtgaaagatggttaggagactaagtgcacttgagactgtgactgggtgcgaaggactgcggattgttgtggaagcctgtgcccaacaggcctgtgacaccgtgtctgtgtgtgaggtggactggaagattatggaaagaaggaacgcggacccacgtgacggctgagactgcggctgcatgtgggaaaggtcttgtgggtgttagggagactgtattgtgtgcgagaaggtgagactacttgaccctgaggaagtggaatattgtctgccgtgaggctggtgtaggtttgggctgtaggcttgcaccggttcgccccagtgattgttggggagccaggggccgctcctctccgataaatgacctctctcttagcaagtgatcccgaggggaggctggggagcacgcggtcgcgccagaggccggcctgggttcgcggggaaaagggcaccgtgccggggagtggggcagggcccgcgtgttgggggcggctgggtgtgttctccgagccggccgccaggtggcgtcgcctccgcgaagcccaggttgccgcctccaacccgccgtggggcaggcgcggatcgagcctcggcctcctactcgggctagggcgcggggtcccggcaccggagagtgggggacggccggccatcggcctctcgcttgggactctgaggctgagagcgtgtcagggaagcttcgcctggagaagcggagggggaggggcggccgccgccgcgccgtggccctttgtgctggaacaatgaccagctgccgctggccccggggccccggctggggttgagggtgaccaccgccgccgccgcgtcgagccgaaccgagcccccagacacgcagtcacagggcgtcggagggagggctcccgactgccgccgagcagcccctacgtgcgccccggcggattcgcgtgacgcgggtgcttgcgcgtgtccgcgccccggggcggagacgcccctcggaccctcccctgcgcggtgccgcccactcgcaccgggcgggggctggccagggccgggggcgccgcggaggcggaggcggggctgggccgggcagctccgagtggcggcgcgcgggccagggccggggccggggccggggccggagccggagccggggccgggcggcgcgcctgtggagcgctgggggcggcctggggctgagcatggagcagcgcggcggaggtgaggggggccgggtctgggaggcggcctggggagcccccaacttatgcgcggtggaatccagccggggggacggcgttccccagtcgcccccactttctgga

SEQ ID NO: 54907 - DNA, 1338 bp, Homo sapiens
ggagaccagggacacagtggagctaggggttacagagggggagcagggagagggctggggacatagaagaggcacaggcacgacaggaacggggctgtgaagtgatgcgaatgccgcgctgctacaagaggagcttgtggatactggggtaggagcccagggggacaagcaagccaaaggccattgccaaggcagccatcaagtaaacaagccaggcggtaacccgagtccctcccggcgcgccagcagaggaccgcccctccacaccgcccacctgcgcccggggctttctctctgggcacctagaccgcttgctgcagggctgggggtctgctgaggcccgccaggggactgtaaaccaagggagcagcgcccgcggctccagcccctcctccctttggctggggagggggccagaactgatccccgaggtgggattggctctgggaagcagcttagggcctggtccaggtggcccaggctgggggcatcgcctcgaatgacacccaccgccctcaggttctgccaatccccgtgcccaccgggtgggcgcggccgggaagctcctgcccctccctgctggtcggcgtcacgcgtgacgtcccgcgtgatggctgggagggcccggcggcgacagcggaggcagagaggaaggcggttctgagagcttcagagagcgatggaaagcgtaagtgctcgctctccccggcgggcggggttctggaatgggggtcagagaaggaggcctgccttgaaactgtctgtcctggtgcagtcaatgtcctcggctctgtggaggtccaagtccacagggcacaagggaggttggggggaggaatgtcagggtggggctgtgtgtagtcacacattcaagtgtctgcagatgggcacagtgtgcgcctgtaaaggtgtttgaaggccggtgtatacaggacacctccactctgtctgtatgtctgggcagggtgtgcatgatagtgtctttgtgtgtgggtatgtgagtgtgaggggagggcgtctctgcctctgcgggaggaagtgtggctggagaggattagtcattctgtaggattctgcccaactcagccagatggctgcaccaggctttcctctctgtgctgggtggagggagcagccactgaatcctgctcttatccggaggcaagtggcccagagagaggtggatgagtgtctgtgccagccctgcctggccagggaccagggagagcctggggtcattcagtgtgagttggagaaaaatgggtctgtagagaggacttgtgcgtgcccacatgcacacacatggctgacatcagagtcccctgattgagatctgga

SEQ ID NO: 54908 - DNA, 1282 bp, Homo sapiens
tagcctggccatagggaggtggtcaagtagggatattctgctcctttccaggatcaccggaaccaatgacacctgcttcctaaggacaggtaatcaggaccagcttcaactctggcactgtggggctatgccagactctggcctagtcctgctgggtctgatgccctacaggtcagagccaagccccatttcctcccagtgaagcctgtccatttcaagccccgcccccgggccctcgcggtcaaaagtaagccaccaccttctgggaacagtcagaagcagagtcccgcccctgctgtggtccctgtcagtcaaagctaggctcggctccgcctccttcccgtttcccgagcaacggctttagtacctcaggccccgattctcgctcaccttccgggtcggagcctggaagctacgtctcagatccgccttcccgctgacctcgatcctgcgccgttaaatccaccaagtccccctccctcctttccaatatcgaaacccacgaattccctagcgccagccctttgacttcctgcccaaaaatccgcgaggttttcgaggaatcacgcgaggactctcctcctggatcccaagcccaggtttttttttcagctgcctctgaggctgttggctctttcttcggcgccgtcctcctcctttccctctctccacccttgcgcctaacagtccaggaaacgtttgctgaactcttaattgtggctctgtggccggcgctgggtagaaatgggcggttgggtgaacagagaagctaccctctcacctgcagggacaccgcgcgtgcccgaaaggcatgaaggacaaccttttgctaggaattgtggaggaatcttgattcagctgtattatccccaaaaggggagtttcctaagatgctcccttctctcttcttttattatacacatcttttccctcattgggtctctcctaggctccagtgtcagctcaggctgccagacaaaggcagcctccgctccaggccacagcctcccatagcttcctccttcctgtcttctcagaccagcaatgtttgcaactaaataacgacctggagaaggcaggaggaaccttgcatagcttggactacacacacaatcccacatccaacacatccagtaggaaaataaccccatgcctttaataaagaaacgagaagctccttcaggctgaagtgcttgcttatggggcaagagtttgctatgttaacctataaattaaccagctatgttattttccttccgacctctcctcctctatcaccagc

SEQ ID NO: 54909 - DNA, 1184 bp, Homo sapiens
ctccgtccccaaggtgttttgttagagtcagagacctctccttgggtgattccattcgtcagccccacaagtccccgtctctggcctttttcagggtctccggcagctctctgacagttccccttctgtctcaggtcgacacttattccaaggaccagggattactcacaactatccgccagagtttgctccgccctttctttttcctgtttaaaatccgcgggctcttagtgttctcggttcctagatttcctgttctgattctcgcgacagttgcgaggcctcgcgtgaagttcccttctagtccctatttcgaatttgagaccgggagagagtgtctgcccttgcccacctcctcagaacccctctggccagggatggcgcctacgtggctcgggagcccctgaatgaatgggcttggcccaacttaggggcgcattccgacgggagagtcctggctgtattccgaggctccagtgcgcatgcggagtcgatcccgcgcaggcgggcggggacggcagccgggtcttgtgggcggagcctgactaagtgccgcccccttgccggctgcagattgctatttctgccccccaccctcgcccatccccccgcgagctggactgcgccaaggcttctgtgagccgcttggggccggccggggcggggcctgcccgacccgggtttggctggcgggcccctaggaatgctctcctccccgcccccggcccaaagtgccacggtggcggtggtggcggccgcgaggccgagtgtctccggccctgccagcctcgcaaccgtaacctgtaatcccgacccgagggacgcccgccggggaggcgccagcccgcctctccctgcggccgctggtcggctccgacctcgaatcacccggctcacccgcgggtcgcagcacctgccggatgtggggaggaagaaggaggccagatgagggaaggcggatgtaggcgcccagtctgtccgcgccttggtggggcagctgggtgggcaagcctgcggtcgctcccgggaaccagccctgggctgcggggagacgaaggtggttggtcctgccctccaggagcgccccgacatcgacgtaaaatgacttggcaccagagctcctgccgcctcccccttatgcagctgccctcgccgacgccagggactgtaaaatcagatgggac

SEQ ID NO: 54910 - DNA, 2328 bp, Homo sapiens
ccccagctcccataggaatctacccatttcctgcagaagccagagtcatggtaaggctgtttcctatctgccccaattgtgacctgtcctctctggcttggggtccccaaatctctttcctcattctccttacctatcccagggacactggtgagactcaatgtttatttaatgattggaggaaagaatgaaagcataagtcagcgaggccgaggcgctgtgtgtagatggcgacagcctcctacacgccagggctccacccggatcctggcgccactgcgggagggcctgcccttggctcagcgtcagagtttgtcctctggggcccaacgcagggagcctggccacatgggaggggtgtggtccggaactccaaccccaggtcctgcttggccgcccctcccgcggctacgcactactccatctactgctggcttgccccgggtccttaagccagcgacagtttttattgccgaacccaggctggaagcgggcggccctaggagccgcgcacaacagcgcaagcgggctggataccgggagccgattccagggcgcccacagaagcagaatcagaggggtaggcgggggtggggcgtgctgttcggcgctgtggccaaaatccgcccggcgctgaaagaggggacgtgggtgtgagtcccagcatcagccagggaatccgcccctagcttgttcttcgcccagctgggctccaagacgccctctgcgggcccatagctcctaccgcgtccacctgcagagcagaggctcctcaccaaaagccccaccccaccggagagggtcacgcaggtcccggggaatccgcactccttaatcgcgttagccgactttgtaggtgttcaggagcagcctcctagcagcctcagttttcccctccccgccctgctggttcaagcaccacagcctggaatgggagaactgttgtccaccgccccctccctccccgcaccccgcctctgctgcagcggacccgctttaataatgtcgctggaaagtgacacgcgatttattattaaagtaatgcgggcgcagggacgggaaaggtttaataaacgtgctgagatgccgaggattattcaccgcaaataaatgagagcgcgggcggcgttttaataaataatttcccgctgctcccgggggaaggcaggggagggggagggagggggagggaggaggagggggaggctgagccgctgccagaactcccggtttcgcctgcccacgggcttccaagccatccccgcgttttgtgtcctaggttgctcacacccgagatgtgaggttccaggagcgccgacccagagttgccaggcctgaaggcgggagaggctcagtcgcaccctacatttcccacctccaagattttaagtatagttcgcttgaaatccctggaatgcgctttcttctggctcctacccggagatccggagtccggacaaaccggggcaggaagggtccgtcggaccagctcctcccaagccgaggcttccaggtctcggccgggctcttctccctgcttttagctgagccgggctgggcgtacctctctcctccatctagagcagggtgtgaagaggaagccagagggggctgtctgaaaatgaccctgaccccctcctcgggctgtcgtgaggaggagggccgcttcgcccggctgctcgtcaccgcgaaggctccaaagaagtgttgcgcagccgtgctggtataactgagggtgtcctggcgaagcccagcccctggcgccctggtgaccgggggggtcgatgtgcggactgggcagaactggagcccgaagctggagagcgcccctcaaaaagaagcctggaagcccgagagatgaacccgactcagagagggccaagactgcagaccttggggaccgaggacaccctcaccacgctggtgggggctggggggatggcgcgggcggtggcgtgcggggaagcgcctggggaacacctggctctgcaagttttgtgccttagcggaaagaggcgacatctctggcaagttgggagtacaggaagtagcgaaggagtgccatctggtggatccttctggtagtgacactcagacctgggccaggggccttgagacaatttacttgactggaaaaatctgaataaaaaaaagatgcttcaatttgtattcatttaatgtatatgaatgtgcacatgtatgtgtagcatatattagtatgatatctatatgtaaaatatagtagttatgtgtgcattgtatgtatacatgtatacatctaatttcatatgtatgtatgtggatatattatacatgaagttttttttg

SEQ ID NO: 54911 - DNA, 930 bp, Homo sapiens
ctcacacacatgaaaacattcttaaagcagacacaccatacggacctgggatttcacccacagatgcccactctcaccctgcaccctcagcccccacgtcgccctgcttctcacacacacgtgctcactctcacatgctggccagctcccagcttctctggctcaggctctgaacagaatgtgaatgtgataaaatcgacagctgaaaactgtcctgagagcaaagctgtactttgttgagaaacctgagcccttattggaggaatacaagtgtctgtgtctgggggctcggggagaggggaggtcgtggggtggtcccccagggcgcctgtggccactgggctgtttccatcataaaaaaaaatgatgaaaggagccgggcagtgagagcatggctgtgagtaaataaagctgccacctttgaccctgggaggccagagctcatcccagaacgaatgctcattagggagggggtgctcaggcccagcccaagttctccagcaccggaggcccaaggccagattcccaagggggaggggatatgagaacccctgtgtgaggctaggggacatgtagagggagtagggggtggagaaaggaacaggggatgtgggagggggttggggacattagggagaggatgatggtcatgggggagggatgaggacaggtaggagagctctgacttctggctccccctccctggactcctctctctgcagcctctccaggtctcttccgctcttgggctctgaaacaagcatacatctcccttctcctgctgtaggctcggtttgcttatttttctgatcatcaggaactataggcaaacaggggttagcaaaaataacaaacacagggcaaactacaaagtcaccaggaatcccagaaaggttgagaagtggttgattctggctttgattcagaaat

SEQ ID NO: 54912 - DNA, 1268 bp, Homo sapiens
ctacttttctatttttataaagatggggtcttgctatgctgcccaggctacccttaaattcctaagttcaagcgatcctcctatcttggcctcccaaagtgctgagattacagatgtgtaccactgtgcctggccaaacacagtagtttttaaaaattgtgtgctcttggccacttgaggagggactcatgaactgtgctctgagaatgtgcagggaggcggaactttgatttcgtttttgaagtaggagtagaaattttctttccttttggcggggctgcgcatagggaaaggggttgtcagggctttgcacccaagggatgactggggaaggtgtgagcgtttctatcagttggtacaacagggcaaagggcagccagcgactggggcaaggtactaccgatgaaacgaaagtaagtgcagcgccttgaatggagggggaagggatttggatccccaccgccaaggcaatgcgaagccttgagcaatttctgagtgggggaagaacacggcctgtacgccctttaggggagaaaacttgggcccctcccagcagtgtggattcggaagagaggggcttagcaccagctgggactaaactgctgcagaaatagacgataaatggaggtaagggtgccgatgaggctcccggcgtcggtgaggctgcctccggagaaggggcgcagggggaactcctggccaagaggcctggaaaggctgggaacccagcacccctgagaaagggcgcaggccgcggcccccagcgtgaggcggccacgcttcgcttcggcagttcttacagagcgcgcgtcccggaagccgcgggctctgcgttctgagcctcgcacctcattgagaggttattaatagggagtttgtctggtgtcagagcgcagacataaactgcattagcattaccccataatcttattttgtaaacgctcatgccgttccgtctcctgtaattgcattgggaagatgcaatatttatgaaaggggagaggggaatgtcactgttcatctcggtgctgcagtaaaagtcccaggaaagacggtgctggccgcccaggcctggcggtgggcctgcgagaatacccagcgttggtgccgcgcgccctctgggtgtcccgctggctgcccccagcccagagctccctcctcaacctacctcactgagccttgggcagcagtggaggatgtgccggcaggggcagcaaccatgtctccccgtggtgttatccctcccagatggtggtccctggcgaatg

SEQ ID NO: 54913 - DNA, 872 bp, Homo sapiens
tgggaggaagctgaccccacagcaggagggaaagaggtaagattagcacagaactcacagtgcgggtggaactcagcaacactgagtctcccttccctgtgcaatcccatgaagatcggaggaacccttgtgcgcctttgggaaagggacttcctccctataggcaggagggtagctgagatgaccgcgagccagttagaggaatttcgctgcctccagccccgcagcccgccgcagtgccaaataacagacggcagagggcgctcctacctaacctttcccatgccgcggagggtgcgaggaccggaactttgcgagccgagaaagttctgatttttttccgcagtgttctgatctttgcccgcagtgtaccggggattgagctgggggccgggctcgggtaggaatagggatgagaggggctcataagtagaccccccccccttttttttttgagacggagtgtcactctgccgccaggctggaatgcagtgtggcgcgatctcggctcactgcaacctctgcctcctgggattacaggcgtgagccaccgcacacggccagagaaccccccctttttttttttgctccccgccagcagagacatggggtggtcccttcctcaaccccacgccaaacccaaaccctgaaacagtgtcccgcacatctgccgggtccaagtgagagtcccctagccacacccctgcaattccttgcggccctctactaaaggctccgttccaagaagtgagggtgagaggtcgggcgcggtagctcacacctgtaatgcggcagctttgggaggccgtgagttatgatcatgtcactggactccagcctgagtcagagtgacagacagagacccctgtctc

SEQ ID NO: 54914 - DNA, 944 bp, Homo sapiens
aacaccaggaaagccagaaggttccttcctttggggcaggagttggggggagtcgccgtacgcccaccctgccacgcgggaggcctccgggagagggcagagggcgccgggcagggaccaatcatcggcggcgaccggtcactcgcgccccagcgaggagaccctgagatccgcggggagagcacagggtcgcgccgccccctggcggctcaatgacagagttgaggcccggcggctggcgactgcggcgtctggcagctccaggaaaggatcccccttgtgaagaaacgcccctacgaagactgtcctgtcctgtccctgccctcccgctcccgctcgccttctctccccttctttattttctctcttcctcctccccccacctcttccactcttcctgcccttcccccctccccgtcctcactccctctcccacccccattcctttctctcgtccttcgcccaccgcctcccgcccccgcggggcagcgcctcggtgcacccgcttggcagttagcccattagatctcgtactattgatccgcttctgagcaaaagctgacagcaccccctcccgggctccccacgttcccattccccgcgcccccctccaggcagtcctggcctgcgcctcctcccgccccccacgcgggccgcgccgaagtctcgccctcacgaaggacgagaacaaatgtaattaaagcgaccggcgaggggggtgtgcccccaccaacgcaggcacgagcgagggtcccagcggccggcgcccggcctgccacctccctccccctcgtccccgccccctggagcgggagcatttgggttgagctgcgcctgtcctataaatccacatataattctcctctttcctgttcagctaaggaaaataaacgtgtaaggctgtttctgggagcccagctcagggaccgctctaaattctcctc

SEQ ID NO: 54915 - DNA, 1840 bp, Homo sapiens
cttttaaccaaaccctagagttttctcctcctaaggtagacccaatttccaaaataaacccatattgtaccttttcaggccaaagaaaatatttatatgctttatttgctggaggccattatattccaccgttgaaggacttttgttaagtacctgtttgacccttagtgcagggcttacatcccacagttagcaatagcaagttatgtgctttttgagctctaaacactgagaatttcttgaaccgagttctattcggccctgacttgctgtgggggagaaaagattcctcgggagaagtgtgggtggcgatggcttaggaggaccttgaaattccgcatttgtctgtgagctgctgccaggtgcccattggcccagctactctgggtcgcaaacctgcagatgccagatacatgaaatttggggacgttcagcttcctaaaaccacagttaggcaggtcctaggacccgtgattcttgccacagtttttcttagtatttgggctacaagtgaggcattggccgccatcttgatatcaaatgccaggcaagccgctactggcgtcgctcggtaaccacggagacacccgtgcccctcccgtttctcatccttagaggctgtaaactacaattcccatcagccgatttcctctgcgtaatggcaacttatctaaatctggcttgtgggcaaccgcaacgctgccgcagtgaactgtgggagttgcggttcacggcgtagcctcagtttttttcctgggggaagttccagaactacaaatcccgtgagccagtgggctttcgcctgcgcacggagaagccgattctccttggcccctcagcctgcgcctgagaggtaagagagggcggggggaaggaagaggaggcgggatccgggcgctgcgttggctgcggcctggcaccaaaggggcggccccggcggagagcggacccagtggcctcggcgattatggacccggccgaggcggtgctgcaagagaaggcactcaagtttatggtgaggagacggtggaggccggggaacggtggaggcgctggcgttggcggcgtcgctggcctgggccgcccgcccactgcgggaccgggcagcgggaccctgggccgaggctggcggcggagcggctggagggatgggatgggagctccagaaaggaggctgggggttgcggagcggacccaggggtgggggcagcggctccgccatcttgtggatgagaggccaagtgacagcgggagcttaatcgaggagggggctccaggcggcgcgcggggccctggagggaaaggggcgtggggactgttactgaaaagcggaggaagctctctggagaaacgccgtgaggccgctggcggggccttcctggtgtcagggttaccggtaaggcccgggagaggaggtgcattcacgactggggaagggagcgcgggatagagtgaagacagatacggtgggtagaggggaacgggcagggctggatgcagatggatttaagggtggaggagggaacgctagggctggtgagaggcttatagttttgtagaatgaggagggaggatagcctttgccttgagggtggaatcccagcttggccaaactactgttgacaaactctggaagggaagaggcctcactaaagaagataaggactgggaatgaggacctagggctataatgacagtccctgggaggggaaaagggtgttgactgtaagctagaattacaaatgtcagggaggggtacataacgctactttgaaaggagaagctaaatactgtaataaggacaaggtgatgaaaagtaagagcagattgtcagggaaac

SEQ ID NO: 54916 - DNA, 896 bp, Homo sapiens
cagtaagactctactgttgtcacagtatcatttcagttagctattggcgtttagaatcacaaaataccagcatcttacagtgataggtatttattctcttgaaattgtgggtttgctgggtagtggatgatctaaacttggcttactcaaagtcaaaagcccaaagtcaagcagggcagggagtaacttgcacaatactatagtgacagtaatctactgcagtgatctagtacagttgatttagagaagaatggtaagatgcttattatgacaactattgtgctttcttctttctgctctctattgttgacactctcctgatagcactttttcattttggttgctgaataatacctgttgattggatactcctagaatcataatgtaatacagcagatttcttctcttcatgttatgtagaaaaaaagcataaagaaataatcagaatcttgactattccacagtgatgccctgaaaagttcagcaatatcatggtgctattcttctatctttgggactgataagcttgatgtcactggaatggcatttgtaacagaatttgaactgtaacagagtttacatcaaggtcatacataataacccaacaactcctttgttaacagttttaacagctttccatctcttcgctgcacctaaacttaaggttgcaaagatcaggtgctgatatatttagatgtctggaaaactttcatgctttcactgaaaagtcatagagacagatatccaggaattatagcatgtggataaatatttttgtagcacagattcataaatccttgtatgcaggaagtactacaccaaactgttaatgtggttatttgtgagttgctgaattatgggtaatatttcaaaatatttaatggtattctgaaaat

SEQ ID NO: 54917 - DNA, 1425 bp, Homo sapiens
tcgcccaggctggagtgcagtggcgcgatcttggctcactgcatcgtctgcctcccaggttcaagccattctcctacctcagcctccccagtggctgggactacatgcgcgcaccaccacgccagctaatttttgtatttttagtagagacaaggtttcgccatgttggccaggatggtctctatctcttgaccttgtgatctgcctgcctcggcctcccaaagtgctgggattacaggcgtgagccactcactgcgcctggcctaggtctatatttaagaagaatgttctagtgtactttatgtatgtgttaatgtgagcttttttactaaagtaaaatatatatacaaatagttacatatttttaatatgtacaaataattatatatagctcagtgagtttttacctagtgaacacatcttcgtaaccattatctagatcaggaatagaactttgccagcactccacaagttgccttcatgctccctttagttactaactccctaatcccaagggaaaccactctcttataatatctgtagattagttttactgttattggtatgtaagctcatctaaatggaatcattccagggtgtattctttggtgactggtatcttttgtcccacattgttcgtaagatgattcattcaggttgttgtgggaggtgtggtgtgtttattcttgttaatgtattccactgtgattaatcattcagattagtcattctatttttgatggacacttgggttatttccagttttgggctactttaaattgtgctattataaataatcttgtacagtttttccttaaacatatgtacatatttctgttgggtaggtacctgagaatggaatcgctgggtcacagggtatgaaaatgtttagctttatgctatggtttgaatatagcttgtttggccctgccaagtctcatgttgaaatttgatctccagtgttggaggtggggcctggtgggaggtgtttggattatggaggtgcgttcctcatgaagggcttggtgccatccttttggaaataagtgagttctcgctccattagttcctgccagagttggtagtttaagagtctggcacctcccttttctctcttttggtttctctcttggcgtgtgatttctgcacatgcagctcctcttcgccctccaccgtgagtggaagccgcttgagactcttaccaggagcagatgctagcaccatgcttcttgtacagcctgcagaactgtgagccaaataaacctttttttattatgaattacccaccctcaggtattccattatagcaacgtaaatggactaagacactttagtagaacctatgcaactgtttttcttttttttttttttttttttttttttttttttagagacagggtctcactctgttgcccaggccggagt

SEQ ID NO: 54918 - DNA, 1587 bp, Homo sapiens
tctggacataaacaacgtagggctgaagcacatgaaggctgtgggttcaagcacacgagggttctgagactgggtcagctcaccttctgcttcttctccctcttccctcctaggaatctttgcaagtacttttgatgatgcatcagcatgaattttctgccgcttgggaaatgccttcaagatacccctgggatccattgaagtatggctggatcccggcctattggagcgttggtcagggctgctgcacgtggaaatccagaattgaggccctccaacccctttgcctatggaggtagggtctttcctgaccaggctttgggggtagcagcccagtttggggaagcgggtcgggggagggggtctcttcaaacccggttaaacttcagtggtttagcctagcttcacactccccagcctttcgaagttggagtattacgggaaatgaggggaaggctggtgccatcgggggtacttttgaggagtaggaaacgacaccattcctcagaggggttgcgctaaagattcagcacagccctgctgcggcccacttcgaagggctttaccaaatgggatgctgggctaggaaatggagctttaggggatggagcggagcctggggaggacctgcacataaaccccacatactatttctctacctccaacacagactcgcagaggaaggaggaggactttcgggggtgagtgggaacgccctgcacctgtcctggtctcagcctctcgacatgggggtgctcagcgccgcagctgcggggagatggggcacggccgcagcaggtgtggggagccctccgggaatggaggagtctcgcagctgcgggtgaagtcccgggcaggtgcggtgtactcgccgtgtacgcagctggcgcaggccagggaatcccagctcggggctagaagaaagctggagtgcccgaccccggccccaagagtctctccaacccccagagtcggtccccgggtggggtcgactactggccaagctagtcacccgggggtgggcaggaatagaccacttaccagcagagccaatgagagcggacgaaggggggaaggagggcaaatggccagaatagcttccgagtcagccggaagtgaccctctggaacggttgccatggcagcggctgggcgtgctgcttagcaggggaaagatggcggtgacgggctggttggagagtctgcggacagcccagaagactgcgctgctgcaggacggtaactcgagggtccccacgggctccttcgtttttttccctcagggtccggccctccgggaagggcctcagggcctgggtcggcagagctggaagggtctcggcggtcagccgggccaggtcctgcatttgcagatgaggagactgaggttcacagagatgacatgactggaacacatgtctccggacaccccttagattcctctacaccatctcgctccgctctgatttctgttgctaatatagtaatttcttttacattcattatctcatttgctcctcaccactgtcctgagaggctaattttcaccccgttttacagaagaggaaactgaaatccaagaatgttt

SEQ ID NO: 54919 - DNA, 2058 bp, Homo sapiens
aaggtttttaaatgaaaataattgtctagaggtgatggtattatggctttttatgtttttaaaaacgttatttaatgttgtcataatgtactagaaagaactactttttaaaaaatgggtggaatagggggcaatctgaaagctcttattcccccaattccctacatgttttttccttcctatttaacagtttaagtggttcagaaaagtttttcattcacaggtctcagaccctaccaaaaacaggccaaattgcaataccatgtcttgtacacatcctggacagactccagcctcctgcctcaagcaggccccctttttcgtgtcgctctgcctatatgaagtcataaactatggctgaacactgggaccgagggcttctcttaaggtccgagccctgaagcttaacaacctttagaaaagggtagggaggatgaaagatgaaagtccacaaaaatttatgatagaccacttaaggaacctgagtcctagacctggactcaaggaatcgtccaaagcaccgtaccagactggctcctctggggcgaaggaaccggggcagctaaacctctgcaaaaacacacaatcgaaagctgtagggagtgcctaagatggctaattgtgaggagcggcccacccgggagggtgcctactgagggatgctctcgggaggctgcctcagatggaggccttggggaggaggggcaaaggggtccccgagagtgctcgggaaagggtgtaggcggaggtcaggtgtaggcctagaaactcggggtgcgacacgaccctgggccgaccaggccgcggcgccccgccctttcccgggacgcggggccggctcggggcggggagcgggcgggcgagcggacgcttacaggtcggtgccgagccgcgtgaagccggagttgagcgaggcccgggctatccggcgccagagcagatcgcagctggtgaagcgccgcagccagcggcacacctgggccaggcggccgagggcccgcatgtccaggtaggagcagatgagcagcagcagctcctccggcaggcgccagagcgcaggccccgcggccgggcgggcagccgactcccgagccgcctcctcctcctcctcctcctccccggccgccgccgccatggccacccctgtccccgcgatgtcggcccaagcctgaccccctcgtccctgtgctcttcccggcctggcgccctcccgccgcctagccctgaccctccattcctccttcttcccatactctcttccttgtgcctccttcccggcccctgcgctcccctcgactcccttgacgatgcctctcgccccttcctccacgcttctgcctccctctgcttcctcccttgggcatgccctcgctcccgcgtcagcccccggcccggctgcctccttcgccgtctgcggcccgggcttcccttccgccccgcttcctcttccgccttgccccgctctcgcttttcccttccccttccccttccttcgcttccccctcgccaccctcccttcctgcagcttcctcgcctctccgccctcgccctcgccgggcccgccgttcccggggggccccgagcggccctggctgcccatgagcggccgcggggccggcccgacgcggagcccagcccgagccgccaccgccgccgccccgggaggaggcgacaccatgtcggaccgggtcacatggggcggcgcgggccgagccctgggcacgcccctcacacctgcagccttggagccacttcggggtgcgggctggggccggggcgctgacaccacccccgcatccccgagagcgcttggtggaagcacaggagttcgcgctgcaaacacgtgaggccggtttcagggccctgcctgaggccacaagaggacccgctgccctcaggaagcggccatttggagcacctgccctcaagaagcccctagttgggtggccttgcccctctagaagccctcctcttcctcgagtgatgcctcctttccacgggccacatgtgagggcccaacgaatctgcagccctagaagttgacaggttccatagctt

SEQ ID NO: 54920 - DNA, 2975 bp, Homo sapiens
gctgaactctttcatgccttactgtagcagcaaagtagcctgttatggtctgtaccataaccaccacccatttttcgaaagaatactctaatttatatggtgaaaaaaaacagaaaagctgatgttctcaacgtcgagagcaatcctttttccatacctttttggttttttaaatatatatattttttacccttatccacgccattacatacgagagagatataaaacagacatctaggaaactctgaatcggccaaaatacttcagaaaattcaaatacatgctgtaactgcggaaagactaataatgtaaccgattcgtgcctctacagagctgcaaggtggactatctgtccattctcatccagaaactgaaacaagcatctggtaattttccctcactaccaaaaagtccatcgttcttttcgactgtaaatgggaaaaaaggcgagaagggcatttttaaagccgcttctgcggtcactaaattccaattacgcatctcagatacttcgagaatctgtgattaaagccaaagtttcatccctcgagagcaaagtacagtagctgggaaagagggcaattttctaagttgcaaatgaatctttgcgggggtggggggaagcaacaaaaatattctaagccaagtggaacttgaaatactataggccaaacgtgcttctcttcactccagaagtacaagcacgtcagtgtgggccgattttccacaaagggtggtgacagaagcactacacatattttttcactggaaccagacaaccctagggaataagatcccaaggtacaaagaagtagaactcagaggctaacagaacaccaggctcttaaccaccgcctccttaggaggtggcctggctccaagcccaagacgggtggggtcagacttgtgagtggccaggggggaattcgacgccgtcttaagacgtgcaaggagattcgcccaacatctcgtctctcccctcgctttaggagggccacatttcagacccagaggctttccggccttttagagtctccaaaatccccgccaccaccctcctcccgaggacagaacgtgttagtgccaaaacggggagggaaggagggcgctcaccttccaccacaccgcagaggaaccgccgagcccctcctgcagccccggccaccgccgctcccccagccccggcggggttgtcttctccgggtgccggagctgccggcggctccagcgatgcccccgcagaggcggcagggttggagctgagctcgctctcccgctcctccaacgtcgcttgactctccttctgcaccatcctcctgcccccggccgctgccacctctgcgggtcctcctcgacctctgtccgttggggcaccggcccggagccctggagagggcttcagctccaagtgtgcgcccctccggctccttcccctccccctctgcccttccccctccctctccgcagggacccgaatgcccggatgagaagggcggcggcaccggcgcgagccctttgtcagccgcagcctcggctttaagctggggcgccagaagcctaagcggagagcgaggctgtgacctctcgttccctggaagaagacggccaagggtcctgtcctcgttctctgcctctgctgccctcccgataatcttaggtcttccgctgtttcccctccaagccccgagctctccctctgctgctgcctccaccgcccgcttcctgtttatccgcactgcgcttgcgctgcagaccggctcagaccggtcccctccgcccggctcccccgccttctttggggctagcctattaagcttctttaggtagggggaaatagaacaggagacgcgaaaagcagaaggtaatgaaggcagtggaatgtaccatttctgcttgccaccctccgaaacaagcctggcaccctgggacggacggaccattacccgccccgaaggaggggagtatgggaggaggctgccgccggttggggcaatagggagaaggggggaaggtgaaaaggagaggtgtttattctctcagtgcgcaggcgcggagccgcggcctctcgttcttaaagagataggaaagaactgacctactttctatggagattcttgtaataggtgggctcattacatctgcctaacccaggcttggttcggtaaagacaccattccaaggagctcagctcacccctctgccttgaatcattttcccctaatcccatttaaaatgtaatcattcgttcattccttcattcagtagacatctatagagcttgcctcgtgctgggctctagaacactatgagctcacagtacggtggtggagacaagccaccacacacgcagttcccacaaggtgtccccaagaacttcggagctcagaacaggtgatactcactcctcctttggggagaggccgtgggcatggcttcacttttcagctggattataaaggatgtgaagttagcctgactgagcagaaggggagggaagacagcactccaggaaagtggaacgaacaacagagtccaaaggtagggaggcatgaaaagcctgccttgtttgggaatggggagcgcgcggtgtgtgcagtggggcatgagatcccttcggcctcggcatgggcatcgcttccttgggaagccttccctgagccctagatgggtttgggtctccttgctgtatgttctcagagctctcttgtagacctaccctaatgcactttacatttatgatgcttgagaaatctatctcaacctgtgaggtataaacatgaaatgatgattaagacttagtaatgtccatcttacacttcagtctgatatttaccttctttagccgtagcccaacttgtagtttcagggactttcatggtccctcttcttttcagtcctggattgttgagatgggggttaggagcaaactttttttttttttttgagacagagtttcactctgtcgcccaggctgg

SEQ ID NO: 54921 - DNA, 516 bp, Homo sapiens
tttcttcctcttaagtcatatcaagaggctagaggaaagctttctggcattccttttttaagtaatctaataccttctaaaagtaagcctaggttttgtttgtgtgtttgtttgagggtggggaggatgaggtgaggtgtgggggaatgtgttttattctgatacggggcctctaaagccactgaattagaaagtcccaaaggggaaggaaaaataaatagacaacatcatagtaaagagaaattgctaaagccagccacagtgagggatggcactgtgcccaatgcacctttaagagcaggaatctgggccaccctccaatgcaactgtcaacttctgactgcagaagatagaggtcacttatacaggctgaagcaaaatgaagtggatagatggaacagtaaggatgaacagtaaaccggctggggatttcttggtccattgtaaacttattctctctgactcatgactctgcaaagcagctctcttttcccaagtgccgggtggttgttaact

SEQ ID NO: 54922 - DNA, 423 bp, Homo sapiens
ttgaatagtcaggtccatttccttttccacccaccctctcatctgccagctctaagcaccacctaccacaaaatctagaaagatttcatgactgctcatagcaaactggcaatgaaatcaaaaagaaattaactggagactagggtccagcccacgcttctccttgcaattgtatacttatgccctagaaagctgtgaactcttgatcatttttcttcctgtcaaagttactcattcaacaaatatttacttagcactactatgtggcaggcactgtgcaaggcactagagatatagcactgaataaaacagacaaaggtccctggtctctcacaactcacattctagttattaaaaaagaagaagacaacctcagtagcagggctctaagcccacacacaaaaggacaaaaaagagctaatc

SEQ ID NO: 54923 - DNA, 675 bp, Homo sapiens
caaaagtgtataggcaggagtcagggccttcactttaattccttaggaccagttctcatctacttcattatcttccctctgtttttccacctcaacccagttaagtcctcaactggctcagacacccatccctcttttgtttcattgcagagatagtctggcaacagttgttcagcttattgtcgctcaatacatatgaaaagcagaaatttctaagggtccattaatgttcaaaacccatgaaacatttgaaaatcaccaaaaaagtatgattctgtaaaagattagcaagaggtaacactgcacactctcatatccagcaggacagcccacactaaagtccaagtcactgcacaagaatgtcaggcacttactgtactgagattttctcatgggcatctgctatgaacatgctgcccacctgtggaagaaaaggggaattgcaaacttatagcaggaggatatgagaggagctttatgcctaggaagccttttatcagtgaagaaaacaagctgcttccacctggggagaacttggaactctaggccataagtcacacacaccaaaaccagcccactttgaaaatcttaaaagactcataagtaataaatgaaataatgagaatcctactaaatcatcttgcctagtaaatcatcttgcctactaaatcacct

SEQ ID NO: 54924 - DNA, 1607 bp, Homo sapiens
atcgcttgaaccccggaggcagaggttgtggtaagccgagatcgggcaactgcactccagactgggcgacaacagcgaaactccatctcaaaataaataaataaataaataaataaataaaataaaataaaaaactttctggagaggaagaactgcggagggtcggatgatccagtgacatacatttgggtatggcccaagtttctgcttccccattcgccaggggcagcacgcctcagcttctccttctccaggggaccaggtttctctctactttttccttccctataccctcctgggaacaggttcctttcctgggctctcgccgagtaacccaaagaaaacacagtagcttcactgattccgtgtgaagagtgggttaaagcctgtcagagcctggagagggacaggactggagcccttccgggacacctgaagacttcgcacaaacccgctttcctctatccctgagattctcagaggtgccttgccctacgcccgcaccccaggaccaagaacagcaggagaggaagctctcggggcagctggcggggtcaaaggtcagcacctcggaagccagaaggccccgcagggatgcgggagagggacgtgaccgggaccgtgtggtccgagggaccggccgctggaagagcgaagccgtttctctctaggctcggccgcccccaggcccagccctccccggcatacgcagcttcagcagccgtcctccctccctctcccctcgcgtcctcgtcgtccccgcggccagcgcaggccccgcccccagaaccgcctcggggccaaggcctagtatggcaggacccgcagggttggtcaggttcgaggaccgggccgggcctggccgccgccgcttaccgagcccgcggctcctcctctaccacccgcgccgttcccgggcccgctcgctctcgacgccaccgacgctgccgctgctccgggctcacgggcgcgctcccgacctccccgacccttcccgtgtccccgcgccccgccgggtcctaaagcccggcgcgcaatgggttagtccacgcccgcttcctgagaccggctcagaccacgattcccagcaagcatcgcaaagactacaactcccgaaaggcatcgcgagaaataaattcgcagtggacttgtctattgagggcctactgggtcgcaatagcagttttccgaaacatggccgactctttgacctcagcaattttacttctaggaatacatgtatcctctagaaatactggcgaagtttggaaagatatattttccaaatgtgtattacaactttgtacgtgaaagattgaaaacaaactcattctttcaacaaatacgtgtgtgcctgataagtgcaaagtagcgtgtaaagctctattaacttggccagaaatctattttcttttcttttccttttttttttttttgagacaggatcttgcccttgcccaggctggagtgccgcagtggcacaattacagctcagtgcagcctccacctcctaggctcaagcagtcctcctgcctctgcctctggtagctgggattacaggcacgtgccaccactccctgcctctgagtctttgttttctttttttt

SEQ ID NO: 54925 - DNA, 1895 bp, Homo sapiens
ctctctctctctttctttctttctgtctttttaaaatttttatagagacaaggtctgcctatgttgctcaggctggtctcgaacgcctggcctcaagcaatcctcccacctcagcctcccaaagtgctaagattataggcgtgagccaccgcgcccagccatgtttactatttccactagattgtcatctccatgaggttgaggttttctattttgtttagggctgtctactcagagcctggcacaaagcatgtgctcaacgaaaatttcctgaatgagtaaattggggtgaaattcttgggagaggggctcagggggctggaatccctattcctgcgtgggactccgggccactgggcggcgtcctggggtctggggaagggcctccccctgcgccgagagcgtgcccgggcgggcgcggtccaggcgctgagcccctggggcgctcccgtggctcctcccccggcgggcgtgtagtgtcggcccagcgactgcgggaggcatcccggagccggccgggcggggcggagtcgacgctcggcccggcctctgctcacctcatccacgggagacggaagtcttggccctgctccgctcccccgagaatcgggcctcgccctgctgggcggctggacctgggcaaagcctgggcgcgctcccgcgcagcggcgccatgaagcgctcggggactctgcggctgctctcggacctgagcgccttcggcggcgcggcgcggctccgggagctggtggccggggactcagcggtccgagtccgtggcagtccggacggccgccacttgctgctcctgcgaccccctggggcggtagccccacagctgctagtcgcgtcgcgagggcccggcgcggagctagagcgggcctggccggccggccagccctccccgctggacgccttcttcctgccgtggccagcgcggccggcgctggtgctggtgtgggagagtggcctggccgaggtgtggggcgcgggcgtggggcctggctggcggccgctgcagagcaccgagctgtgtccgggcgggggagcccgcgttgtggcagtggcggcgctccgaggccgcctggtgtggtgcgaggagcggcaggcccgggccgagggcccgtcagggtcgccagcagccgctttcagccactgtgtgtgcgtccggactctggagcccagcggggaagctagcaccagcctgggccgcacacacgtcctgctgcaccactgccctgccttcgggctgctggcctcctgcagacaactcttcctggtgcccactgccaccacctggcctggcgtggcccacgttctactcatctggagcccaggcaagggcaaagtgatggtggctgccccacggcttggtctctcctacagtaagagtctgaatcctggacgaggggacacatgggacttccggaccctgctccgaggccttcctgggttgctgtcccccagggagccactggctgtacacacctgggccccaactccccagggcctgctgttgcttgacttcgggggcactgtgagcctattgcagtcccacggtggtacgcgggctgtgggcaccctgcaggaggcacctgtaggcccgtgggggtctgcagccctaggcacatttcagggcactctggcctgtgtgctgggctccacattggaactgctggacatgggcagtgggcagctgctggagaggaaggtcctaagtacagacagggtacatctgctagaaccgccagcccccggcatggaggatgaggaagagctggagacccgagggaatcttcgtctgctttcagccttgggtctgttttgtgtgggctgggaagccccacagggtgttgagttgccttcagccaaggatctggtgtttgaggaggcct

SEQ ID NO: 54926 - DNA, 1288 bp, Homo sapiens
tgtccctgttgctgcctgtccccagcagcaggagtagaggcagcaaggtggggggacggaggagatgtgtcatccagccctggagtcagccatagcccccctcccacctctagcaaattggaagcctttaggaagggggagagaagagcccagaactagtaaagttttctcagggtggaagctgcatcccggggctgaggggggcacctccagctgggtattgccatggtaaccaggctgactcgagggcaggcctcctccctttagggactggccacaggtcagcaggcctgagcgccccggcggctctgggctggggcacctctcccccagcccgcagatcaggcccgggccgggctgagggccttccgcccacccccaacaggctcgcagggtgcccagacttacctgggagaactgagggggccaggagaggtacgggggagcgactgcaagcccagaggagtcctggcaggggtgagggctgacggggggacaacttcagcagctcatgtcccgagtgggacgggcaggcccgactgggagctccagtccgccggccgcacaaagactcgcacgcactgcctcggcccgccccgcggcggccgctgtcccgggggaaagttacaatggccactgggccgggggccgggggccagggggccggcctggggggcggggggccgcggggagtccggagccttctttgtttgcaaggtttccctcaacaatggctgctccgctctttcctctctcctcctcctccttctcggctctccccgccgccgcctcttgctgcctctgcctccgagcagcccgcccgccctccccaggccaccgggcccctctgctgggggcaccaggagaggcaggacccggcactcacactcactcacactcgcacactcaaacacacacgcagcgcccgccggctgcctgcctttctccctttctctccctgcctccctccctccccgctcgctctctccgagcctctctcagaatgaggccccagggcgggcggagggtggagctgcccccaccggccccgccccctccctgagaggaaagaggaagagcaagggagggagggaggctgggacggagggactgctgagaaaaacaaaagagagacagagactgggagagacaggggacggatcagattgggccaggagagacctggatggaggagaggcctgtgggggccaggaacgaaatgcagcccgcctcccccgagccccaggcacggtgctcaggagtgagcaggtgggccaaagccactggc

SEQ ID NO: 54927 - DNA, 1271 bp, Homo sapiens
aggtggggggcaagatgggccgcaatcaatacctccctgcaaacagggtcctcagaaacagcatgggggggatgtcacaggataggtaagaggcaatgggcagcagggaagggggggcagcccaaaccagccaatcacaactctatggtgacctgagggggggggtcaaaagtccagagtcacttctgattggctaacaacctggaattctgagaatttcagccccccccaaacctctccccaattagcctacccccaaaaaaacatacacataagccacccccagcgtctcctccccgtgtttctgggctgctgcgcatttacacagttggggaaaacgctacccgccagcctgaggccccgcgtagcccttccagcccccggcttcccccatgccatcgacgccccccacacaagttctcgccaaacacggggtgaggggtccgcagggacggctgggcaggaaggggccgagtggccgcacgccccactcaccaggacaggcacagcccactgacatcttcacatcgcccgcctctgggggcccagccgagtcacggtgcccgcccctcgcggggacaggccgggcatgagccgccgccgccgcccgcggcccccgctgcgctcgccgccggcccggcccggcctcggcccggtgcgggcggcccctggctgcggcgaggggcctgtcaggcgcggagcagacaggaaggaagccaggcaggaaggcgagcggcctctgcgtgtgtgcgcgcgggtgtgagtccgcggagtgtgtgtccgtgtgtgcgtgtgtgcgcgtgtgcgtgtgcgtgtctgtgcgctcccgccgccgtcgccgagcgcccccctctccgccctcgcgctcgcgctccctcgcgccggcgccggctccccagcccaagccgggcagggccgggctttattaatatgctaattgtcctgctagtgggaggggagagccgtgtcaaagtgacccgggagagcgcgcagcaagcgacgacgtgcgtgcgccgcgcggcgggcgggcggcgaggggctgggagcgctcggggaacggcatgcatgtgacgcagcttttaaaaaaggagacggaggcagagaccccagagagggagggcgaaggggagggcttggaggcgcagccgcgcgctcggtgtccgtcctccgggtgccgccggatggggagtctggctgagccggagcgggagccgcggctgggggaggcggagccggggtgggcagtgtggtgtatctctctccaccccggg

SEQ ID NO: 54928 - DNA, 2169 bp, Homo sapiens
tcctctaaacagtcttgtactttttgaaataatttttgtgctttgtaaaaagttatttaaaaatagcaaatatgaagtagcttttaagtggcaaatgaatgaagagtagagacagtgatggaccgtagaaacgcagagcgggatccctcttggctaggacaaccaaagcctttcctagattaaataaggcatgaaatgttttgaggttcaagtattccaggtcgacatataggcaggagaacacctgttgtctttagggaacagcaaggagacctgaaacagcaagaaacaaatttgatagagaaggcaacgtaagtttctgagtagtagcagagagggcggagaacgcgacattttccgattaagtttgcagtactgccgcaatatgggattaggtgaggattagcgcttggagcgcaagtgcccactagggggtggtgtttcaaaacatatacaggcccacttggccccacttggactaaggtgaaaggaacgtacagcaggtagaacgtcaaagaggacgttccaacagttggacaagttaacgacaataaaatacgcaaatgttaactttccccctaactgctgagcgctccctaaatcggtatcccagtgtaacgcaaaactaagccctacaggatgcctgcagctagtgccaaacggtccccacttaaagggactactactcccaggaaccttcgcgcgaggccagggccttcttccagggtgcaagtgggtctcgccgcacggctctctgggattcgtagtcttgcagtgtcattcgggagttgtagttcctttcccacaatcggctgggcgaggcggcgccagcgatcagagcagcgctgggtgttcaggggccaagatggcggcgcgccggggacggagagacggagtcgcgccgcccccgagtgggggccccggtccggaccctggcgggggagcccgcggcagtggttggggaagtcgaagccaagcgccgtatgggactttgggcgctgtgagcggcggcgagcaggtgagaggttggctggcggcccgcgacaggcagcaaagcggtgtgtgccgggcggtgacacgtggacgccacaggaaagagaggaagcgcctgagagtcgatgccgggtggccgcgggagccgggccggagcaagtgggccctaggccgtttgctgggggtaggcgggcagaggcagcgtctctacggccattcctgggggacgccggagggggagagcggggtgtcggaaacataacccgcggctgggggtcaggggttcggacttggggtcgaaggctgagacctccatgtaaggatgcccagtgaggctccccgagcccggcgccgcagttcccttttcggagccacgtggggttgggggagcaattttcccgggagaacttgtctgcctcccctccccctctaggcggcccgggcatccacgtgggtcgggctcctggtggaggggggcgcaggcagcgggtccacgtgggggcggggaaggaacgtccacgtggctcccgtcccaggctgtcgggcatctagtatcggccttggagcctggctgacgcgaactgggtgtgtctccacgggtcccgccatctcctgccggggctggaggcccgggccgggaaggaaggtaagggctgctagagtcaactttgttcagagccttggaggttttttttttccctgctgcttgggtccgcaacgtctctccactgcggatggtgaaggactctccagatgttgcgggagtttgttccctgcggatggctgagtgtgatggggagggtagagggctgaggctgaagggttgtggaggagtgagtttgtggcgcttccgtctgaccggcttggggtgggttgtgagtcacgggcattggcgttttggttgccttgcagtcttgccttattagtgattcaaggggtatggggagtgtcaacatacacctgggacaaggttaagaaagggaaagggaatcctctcctcactttttcctccagcatctcttttgggaaggcatgctcctgtaatctgacacgcagaaactggggtggtccgtacttaaggctcttcggattttttgctggggatgggaaaagttggaggcggtttgagaactgttcaacatgttcaacagttgaacatacactggatgaggagga

SEQ ID NO: 54929 - DNA, 2578 bp, Homo sapiens
atgaaccaccgtgcccagctttgtttttgatttttgagataggatctcactctgtggcccaggctggattgcagtggcaggatcatagctcattgcagctttgacctccctggctcagttgatcctcctgccccagcctcccaagtagctgggaccacaggtgcatgccactacacctggctaattttaaaaattttttgtagagataggggggtttcactgtgttgtccaggctggcctcttaactcctgggctcaagggatcctcccacctaggccttccaaagtgttgagataacagttgtgagccactatgcctggccaattttatataggagaggggggtgtgttcccatgaggatccttatctttcctgagcggcattagtgggaggtagccaaggggtagtgggtaggattgaagggattgctaactgctaatatctggaatgtggcagaacttggaattaacttggtaggtctgagcattgatactggagttactcatgacaaaggcattgatactggagttactcatgacaaaggcagagtgtgaactctgatcccggaggaagaagggttattttcaacaatctcttcagcttgaatagattgttgctgtgtgtgattcaggtttggtgcatgacacctttcctcttcatggagctgacctaaggcggaatataagggagatgggaggggcagcttgggaaatcaacacctcccaccctcacgacggataacccgaaggatcttctgcagcagaggcaggagtctggaggctgggatggtatcagaaagggcctccctgggtattggaggcagtgaagatgaagggcgagaatccattggccgtgccagtacgccatgggggcggttgggagatcttgtagaacaactgttcgagcccgcttgtccactcattactctggaatccgagtcccagcaggggcgcgggaaaccgctgctctgagaaaaggtacctcccccagaaagactgcgcgggaagtcccgagttttcccgccacgccgagggcgtgatccctgacgtcagagctccgcctccacaagctggcggccggtgggctccgcccttaaccaagatggcgatacgcgtgggaccggaaagagtttatagatttcccgtctaccctacctctgaggtgaaggtgggactgccctgtggagcccaccctttccgttatgcgcccgcgcggcgcaatgacgtaacacaggcccgcccactgcccctgttgggttcctgagtcgtgctgcgtcgacaacggtagtgacgcgtattgcctggaggatggcggacgccggcattcgccgcgtggttcccagcgacctgtatcccctcgtgctcggcttcctgcgcgataaccaactctcagaggtggccaataagttcgccaaagcgacaggagctgtgagttccgggcttggggcggggaccgggctgagatgaccacaaggcttcaggccctgacgtgcttaggtttccaggtggggaagtctgggggtccgccagtccagtgtctgcaaggcctttacgccgacccctcggcagtgaccagagaaagcctgcggcctcggtcgcttaccttcctccatgtctgagtagatatcgctgagtcttgttgcttttttcttgtgacctgtgcagcggcggcagcgtgggagcctcgtggccccaagccacatggctggcagagtgcagcggggaggtagagtcttgttccactgaggacgttggttcttcggcatcttctggggggcttttcgttgggtgaggcaaaccgtgatttgaccttagcctcagtcacatttactgggattcaaaagcaagtgaaatttctttagaatgaagtctgggattttcgtttgtaaagaagaaaatgaatgaaagtagaagcagagttttgttttgagttacactgagaattgagagtcatcaacagccctaccaagtaggcatagtagtgggcttggagctttggctaattgaatcaaacaaacctaggtttgggaccaggctctgccactttttagatacgtgacccgggcagtttatttaacctttctgagtctttctacagggatgtcatcatccactttataggatttttgtgagtttcagtaagatgatgtgtaagagtagcaatctcagtgctggtacagaggaatcttgtaaaagtgaaagctgtaccatagttatggcaatttaggatgctccaaacacatgtaagagtaagagaaccaggaatgtgaaaggtttgtaatctacatcaacggacattcctgcatgggaagacactttgagagaggagagagggggggtcttcagcagggatgatagcatgactaggaaggatggcttgcacttttagcagaatcaggctgcgaaagcaaagaatcagatcagcctcaaaacttccttaagctgggacaggctgccatgtgatctaactgctttcttaatgaaactgtttagagttgactgttaaggagactgcggagagtgctttcacagtggactggatggaattggacatttcagaattaggattcttttttttt

SEQ ID NO: 54930 - DNA, 1915 bp, Homo sapiens
cccattttctctatttctggatgatgggagtggggcagaggacgctgaaacagagttgggacgtgacagacataactgtgagaagccacgacagggaaggtggacaagagggcgaggagagcagggtgtggaatagatcgctggacttgtttttagaatgaagggagcccagagctgcctcgaaaaggagtgattcctcaaggggcatggtcttggcccaggtaactttgataatacgtggacaggggagtagggatgcccgctcaagttctcaaagcggaccccgcccctttccagccaattgtagcctttttccccataatgcccagcagccactgccaaaccgcgcactgcaaccgaactctacctaactccacctctctagccgcccagcccagttcctcattttttattggttttttaaactgtcactcagagagtactcgtatccgttggttgtcccctaacataccctttctttcccttgtaatcgcgcttctttaggcactacccgcctcctgaagccaatttcctttattcgattggatagtcggaatgctacttttcacggtgcaaagctatgattggctgcgcgcggcagggctcgcgcagttaccaggcagcgggctagactgaggctagttaccacgtcagtgagctgacagggaaggtacccggctctactgcccgtcccggacgactcatcctggcggactgtgcagtcccaccctgacttcggcctcaatttccaggaaacaggctccttctcttctcccatctgctaccagagccgggagagctgctcggagacgcctccggggtgcgggctggacatgagcagcggctgccggtcctgggactaggccccgccattttggatccgctgacaggtcagcgaagtctcttcctagagttccggtgtcgtgaaggccgccctgacatcgcaatagggaattagtgggaagggcccttaaattgggcgagccaaggtgggctaaggacgcagcggacaggaataagacgagggaagggttgttgtgggagggaacagggaggtatgcaggggcaaaggtcatgcctctgccgcaggaggggcgatttctgctctcattactgatcctttgcaggtgcccaaatcttctgttttcccaggcttgacctagtatttagcttctcctttccagcgctttctgcatcctgaagagcccagtactcaaaagctgaaagcaaacctaaggagcattgtgtctacttttatgggttttcagactttagatgtgaaagtctctctagattctgtacagcgtctacttctttgtgattgcctcactaatacaaaggaactgcttcattaataatgatgaactagtgcaccctagaatcaggttgtcagcagagggacgtgtggaaggcttgaggttatagcagcgcagggaactgggctatgagaaggcttccctcttacaggacagctcagctgccagtctgggtctgtatgtaaacactatacttatcttctgggcctgtttgttcctttatacaatctttcacaggcattcttttgtagtgtatgtttttgttgacatttttctctcagatcttcactaaggagatgaggcttaatcataaggaaaccactctattatgacatatttgactgacagcagagagagatatttgaatactggcaaagtttggtattgtcggcctattatgtttagtgggcaaaaagagtcatgagagattttcagccaattgtagggtcagagccccagagtgaatgatggaacataaccctagagagtagtttatggcactgtgatgacctttgataaactgctgtgttgtaaagctataaaagtccaccaagggtaacgaatgcttttagaaataaggaatagtgtagatggtgttt

SEQ ID NO: 54931 - DNA, 567 bp, Homo sapiens
ggatctcttattcagaatgcaaaacaggagacagtgaagtacctgtgtttccaaagaactccgaattgagctgtggtggaagaggaggaaatttcttactgtggtcttgtataatgtgaaatctttgtgaagtctcaatagatgttaagtctccaaggaggggagactttttagctgctaaagaagcttaggttcagtgagcctccagtgggaatacagacatagacgtccactgacatttctgcaaccagttttggtgagtggaaagcaactaggtaagtttcactttttgcaagaatcccaagtgaccctttgcactatggactgaggtacctgcttgtctctacaaaaactatagaggagacacgacaggctttaactggaaattgttcatggtttcttagaagggaagctcatatcctgttaaagcactttagaaaaataaagtcaaattagagataagaggatctttacttgtattttcaagagcttttttaaaaaactgaagtgaaatgcatataacataaaattaaccattttaaagtgaaacaatatagtggcatttag

SEQ ID NO: 54932 - DNA, 782 bp, Homo sapiens
aagcactaggtgtttttcttggcactaagaaaaccttgcagcatcattaacctaggagagatttggggtttacacattaactatgggaggttgatcagtttgtggcctatacaccaagactgttctttatcacccccaagccacatttgagcagggattgaggaaggggttgatttttctgtttattagaggtgacatgagcagtggggcagcggcaaagaggccatgttgctcttgctaaatatacatccctgacagttggataataggttccaggaagttcagtggaaaattaaaacaaagcaacatttatagctgattgaacttgaaaagccattttggtgttgaatggcaaatatgtggacttcagcattcctggagcctgatgcatcccgctggatggccctgttcctgtgtacatgatggcctggggactcagcagtgtgcagggtactctcctttagagggtgctttgaggaaagaagtttgctgccacttacagaagtccccttcccatacagtgatataacacaagtaccccatgtccagggagcatctttcctctgatggcttgaggacttatttattaaaaggacaggaatgtctggcaagaaacagaggagctcttaagtactgtaaatactcctagtcactctgcatcagggctgcaagtttaagcagattgctgtggtgtatacacatgattttagcatgataacacttctgtttaatgtccttagttgttctggggccaccactggcgtgagccttaagaaaggcta

SEQ ID NO: 54933 - DNA, 3597 bp, Homo sapiens
cgaggttgcagtgagccatgatcacgccactgtactccagcctgggtgacagagcaagacactgtctcaaaaacataaataaataaataaataaataaataggccgtgcgcagtggctcacgactgtaattccaacattttagaaggcggaggccagcggatcacctgaggtcaggagttcgggaccagcctgaccaacgtggtgaaacccccaactctactaaaaatacataaattaggcgggcgtggtggtggccgcctgtaatcccagctactcggtaggctgcagcaggagaatggtttgaacccgggaggcagaggttgcagtgagccaaaatcccctcactgcattccagcctgagactaaaaaaaagaggcgatttcccacatcggtggaaatttgagctgtttaaactctggatgcctttttcagttctaatattccagatctccttggtggataaacacttcatttcccttctcctgagcagagctcctgagccctggcccgctgggaacctgtcacttctaaaaaagttcgaggtccggactgtctctcccggagccttgaggctgatgagacggagcgagagaggggccggggccgaatggagtctactcgcgggcccagggaggccgccagagggcgcccgggaccgaccgcaagaataacttccttcctcttccgctaacttcccggcagcgcgccgctcagggtgggggccccgagggctggggccgtcggcttccccctggggatcccccgcttcagagaaagccaagcgttaggcgcagccaaagccgagaggcagcggaagctcccggcccggggtggcgctgggtcagcgggtaccttctcggcggtcccctggccggccgaactcgcgcctggtgtcctgtcaccccgctccccgccctgagtgagcctgtcccctctcaggggcgcgcccgagtcgctccgggttggctgcgccagtccagagttaaactttcagccaatgaaaaagggcgcgaggcgtgacgcacggaaacgtcatgggaattcccccctccggggggccgagaaggggctttcccggccctgagccctgctggcaggcgaggtgtcgcgaccggtcccaggtgggtcgggcgcggagagaagccgcaaccagagccgccgccacggtgagtggctggattcagacccctgggtggccgggacaagagaaaagagggaggagggcctttagcggacagcgcctggggctggagagcagcagctgcacacagccggaaagggcgcgcaggcgacgacactcggatccacgtcgacaccgttgtacaaagatacgcggacccgtacgtacacctgtacctgtgctggcgcacacacggcagcgtccgtgcagtcgcactcgcacacacatgcacacggagacgtgcccaccggtgcactggtgcctgcacccacacccttcacgcacaaactcaagatacgctcacccgtgtccgtacatcaagacaggcgctgacacacacccacactgagaagctcgggattcacctatctacacacatgctcgcttgcacactcatgttgacgccatggacacacaacatgcaaccaagcactacagccgaaacacacttgtggagctgtgatggagacacactcttgtattaggtgggggggggggggggggagcgtgcagagatctccctgtcgcctgcgcgcccagaaccggtgcggtgtgggaccagctgctgttgtgaggtttgggagagagagaaaagagcccactccgaggaggagacacttttcccgcagccccagaatcgcgttctcggggcagaaccccggggcctcccacaggaaagagcccccgcctacaggctgttcgaaggggaggccgtccgacagcaggaatgtccccccaaaagcccccggggtttatcagccgtggcctccctcctggcagaaaatcccaaggttgctccagaccgggggaggggagcgggaggcggacttggccccagactgccagcctcctcccggccgtgaaagaccctcctgttccctgccctggagggaggagggggcttaacccccaccggggcttcccggattctcctagacctctgcccgctgaaaagcagcgggagcccgtagactgtcgagggcctcccgcccctcccgtcgcgagggcggggccagtggcgtcatttccaggcccgccccctccggccccgcctccccttggtattttcgggactttcctaagctgctctaactttcctgccccttccccggccaagcccaactccggatctcgctctccaccggatctcacccgccacacccggacaggcggctggaggaggtcggaccctcccccaaatctgggcccccatctcccgcccacccccatttagatctgaccccctcccccacgccactcctcccaactttaggcgggcgtctaaaattctgggaagcagaacctggccggagccactagacagagccgggcctagcccagagacatggagagttgctacaacccagtgagtcatgccgcctgcccctgacccggccggctgcccctcgtgtctgtccacctgtctgcccgagccccctctgctgccttacacctgtatgctcgcagatgctctcagcctgccagtctgtccatctgtctgcaactctgcctccaaaaggagctttctcttgggtctgaggaggaggggggagtgaccactgaagacttggagatgggaggtggggctgtggggggtgctgagagtcggatgccacccccagtctgtctccaaaccagggtctggatggtattattgaatatgatgatttcaaattgaactcctccattgtggaacccaaggagccagccccagaaacaggtcagcaagttcactaacctcccctagtcctaaagcgggggagggagagcatgtgccctctctctgggggaggggctgggagatcgtggctcagcaaggtctctctgtccccagctgatggcccctacctggtgatcgtggaacagcctaagcaggtgagtgagcaaaagggagggtgtggaatggcttcagctttggggacaaatggggtagtggtagctggctggccatggaggagccattgccgaaggaggccacaggggattggatggtcactgctgctgatcagagtgctgtagtttggttcagggctactaccaggcactgcggtcactgctggcctgggtggtcttccctgatcacaatgctactatgcccttggaccttcagagaggcttccgatttcgatatggctgtgaaggcccctcccatggaggactgcccggtgcctccagtgagaagggccgaaagacctatcccactgtcaaggtgagccaggatggtgctggagggtgggctaagtggacagcatgcccaaggccctgactgacagtccctgcctctcctagatctgtaactacgagggaccagccaagatcgaggtggacctggtaacacacagtgacccacctcgtgctcatgcccacagtctggtgggcaagcaatgctcggagctggggatctgcgccgtttctg

SEQ ID NO: 54934 - DNA, 713 bp, Homo sapiens
gagagtcatggctggtgcccgcttcccacagccctgcctgtatccacaggtggcagcctcggtttcttcccctcctccctggcctacagcccctaccagtccggcgcgggccccatgggctgctacccgggaggcgggggcggggcgcagatggccgccacggtgcccagcagggactccggggaggaagccgcggagccaagcgccccctccaggaccccccagtgcgagccgcaggccccggagatgctgcagcgaggtatggactccggggcacgggcggtcggggcgccggggctgaggacctagccctgacccacgccctctgtggcccgtagctcgagagtacaacgcgcgcctgttcggcctggcgcagcgcagcgcccgagccctactcgactacggcgtcaccgcggacgcgcgcgcgctgctggcgggacagcgccacctgctgacggcgcaggacgagaacggagacacgtaggcaacagagggcctggcggacgaggcgcggggtgggggcaggaaagggaccggcacggaggcgggctctgcagttttcggacacgccaggcttcaagtccggcctcggtgttcacaagctctgttcaagctgcttggtctctccaaacttcagtttggtcgaccgtgcaaggggtacagtcatagcacttacctacctcaaaaggtgctgcgaaacgttaagtgcaggc

SEQ ID NO: 54935 - DNA, 2603 bp, Homo sapiens
acttgatgagggaaacattatagcctcgccaattcattcattatttcaacaattacttattgaacacctgctacgtggcagacagtaagagcctggatagtttctccccgtttttcaaagtcgctaaacgcgaccagagggcagaggagaggccggtaacctaagagtcctggctccgccccctccgcgtttggccttgcctgctcctcccaccaccacttcgctcagaggcggctactggctcaagaggacgacagaagccagtctctgatgcccaccgcattctccagcttcaggcctcaagccctgtagccgagaaggcgaggcctaatgttacaccaccggtctgttccgcctccgtttcggggtccacccgaaaagctttcagatcggatcctcggtgagacggcactcgattaaataggtctgtctctacaggccaaggaggcgggtttggtgcggccactccaaggccaaagcgagaaaatcttactgcgcacgcgcaatagacagccgatggagccaccgatggagccgtccggaggggagcaagagcccggagccgtcaggtaccgagcaccggaggggccgagagggaagaggaacctgagggaggggagccgagccggggctgggtctgggggccgctcttgggagctggggcgcaggaacataacggaggcggactcgcaggtaatagtggccccgggacgccagtgccaacgcccctttactcgcaggttcctggacctgccctgggaagacgtgctgctcccacacgtcctgaaccgggtcccgctgcgccagctgctccggctgcagcgcgttagccgggccttccggtcgctggtgcagcttcacctggccgggctgcgtcgcttcgatgccgcgcaggtgagccgggggctgaagccccgcccctgcctgggtaccgccccgcctctagcccagcccccagccccgcagtatgcccttctggacccccttgggccgccggggctgcccggaagggatccacgcaccaaagggcaaatactcggtagcgactcagagggaaagtggggtctctcctgggagagcaggaggctgccagaaaagaactcaggtcaggggtgcataggcggctgaggagtgcgggacgggctgagagttggggtgcctccccgcccgcaggtgggtccgcagatcccgcgggccgcattggcccggctgctgcgggatgccgaggggctgcaggagctggcactggcgccgtgtcacgaatggctgtcagacgaggacctggtgccggtgctggcgcggaatccgcagctgcggagtgtggcgttgggcggctgcgggcaactgagtcgccgggcgcttggggctttggccgagggctgcccacgcctgcagcgcctgtcgctcgcgcactgtgactgggtggacgggctggcgctgcgcggcctcgctgatcgctgcccggccctggaggagctggatctcaccgcctgccgccagctcaaggacgaggccatcgtgtacctggcgcagaggcgcggcgctggtctccgcagcctctctctggccgtcaacgccaacgtgggggacgccgcggttcaagagttggctcggaactgcccagaactccaccaccttgacctcaccggctgcctccgcgtcggaagcgacggtgtcaggtgcctgggcctgatagggcgggaggagggcagtcacttagcctctgctggtatggggcgggctgtagttgttaaaaggccggactgagggttctgaatcttcctgcaaaccacagcacccccattctgaacagaaagggcctctaggattgcctaggccagagagcccatagtttaaaaacttttttcaaccaatgtttacacattgggagatttcacatagaaagtcgacttctggcttttcttcaacaagggggagatcttgcaatcctaggcggagctgagggccaggttccccccttaaatgagacaggaagtctccagctcactggaagccaatccaggcgcctcccttgtgtagggacggaaaaagtatgcccctgccccgagctggagggagaccgggattttgccggagccagtccgaggctgagtgagcccgggcctccaccttaccccaccaaaggtgtggtggcctcatgtccctagcctcaccctgctcctccctcaggacattggccgagtactgccccgtgctgcgttcgctgcgggtgcggcactgccaccatgtggcggagtccagcctgagccgcttgcggaagcgcggcgtggacatcgacgtggagccgccgctgcaccaggccctggtgctgctgcaggatatggcgggcttcgcaccttttgtcaacctgcaggtctgacccgcctgccaatcggagcacagctggactgtgtggctggggcctgacactgagctgtagggaaactgaactgtgaggacctctggtgagaggccagtgccctgccccaccctggagcttcaaataaagagctttttaccccctcttgcctggtgctgccctgttgaagataggggattcgaggttggggaggaaaggtcagacaggcatagtatcccagtcc

SEQ ID NO: 54936 - DNA, 1340 bp, Homo sapiens
gtgtggccccatcctatattctgaatctcctctcctgcctggctggctatattgtctatttcagaatctttgctcacaccactctcccagcccagagcatctgtccctctgcctctccaaatctcattctgcaggactccctttctgcagccaaccctaactgccccaccttcactgctcccagctagcctgggagcttcccaagggcagcacaggcctggaccctccagatgctagatagagacactgtggacaaatttaagtgagagtggggtaagaagtactatgctgctcccttggggtggggaggtgcttaaagtggagggagagcaggccatgtgggaggaggaatcctgggagctagtgtgaaaggagtcctagcgaacttctcagggaggcagcaaggggtctagcatggaaggtcttcactgcttctcccagcccctgtgaagcccggttcctgaggccctggacccataacgcaggccccagaggatatcattgtcctctgatacccaagtcagaccttagaggcaccaagggcattgaggggaacaagggatccctgcatccaaagtcaggcgggagcacaaacagggagggcgagcacaggaagtgggaccgcgatgatggacgacccctgaagcagcagctccctaaacccgctagcgggacacccgtaagcgtccagaatagtgggcccgaaggcacagggatgcggctgtggccttggaggacacatgacgaggcaggcctgagcaaactggatgtgccttgatacaggccacggcgagaatcagagatgggggtccgacgggccccggggggggtaccgtgggggaacacatcggacgggtaccctgggtcagcgctctccgcgactctcctagccctgggccgggggcaggaggggaaatcacctgctccgtcgggcgccgccggcgacttgtcccgcgcggtgcagctctcatcccccagccccaccaacgagatcaaaggcggggcccagagcggttcccttccagaggcgccgtggcggccatgtttgagaagggcaagttgcccacaacagggcggagctcctgctctaattctctaacgtcccagggctatggacgggctcccttggcggccagttttgttgcgcgtagggaggcgttaggcgtgaaggtcttgagagggggtggagtcgaagtgggtaggactgcatccccgtcttgttccttctcatccgtcagagacccgaaacctttctctttctttctctctctctttttctcgtctctctctctctctctctctcacttttttttccttttcttcttcttttttttttttgg

SEQ ID NO: 54937 - DNA, 661 bp, Homo sapiens
acactgccactccagcctggtgatactagggttaatgaggggtggggtgacagcgactttgaactctggccgggcaggcccctaggaagggggtgatgggcagcccacagccccaggcctttgcctgtcctccagagaccagccatccctttcctcccccgtcccctttcctgcttccccctgtccattgcacaatactgatgactcttctctccctaccaccctccattcccggaactttcaagtttcctcagtagagctgccctgagttctggcccaagacccctgcaagccatttctgactgtgtgccttcccctctcccctatcccctgtttgctggatggcagctgcatgtgacttggtatcagaaagaacttcctgagctttcaagggaggaggatggaaaagacttcttagggggagtccctcctttcccaactcaaactctggggagtcccagctctgtgcagcaggagtcaagttctggggggtcgaggacagaaggtgggctgaggagagggaaccccacagacacaaggacacacacatactgtaaggtaggggctcccgggatccctgccctgagggattctgaagctggctggaacttcagcccctgattttctttcccctcaggtctcagtctctctctccccaaaa

SEQ ID NO: 54938 - DNA, 1548 bp, Homo sapiens
agctggtgtttgggtgcctggatcgccttagctggtgggaaaagctagaaacctacgctgaggcttcccctagcacctccattccccatcatcctgcttcaaaatgagaaactggacttgaatttggcataaagggcagatttttcaggcagagtagagagagagcccagcgggctggtctcaaggggtgggaagaactcagttagagaccaaggtgaggaaggggaggcttcaaagaatggcgggggcggggtcccgctctggcttgaggttagaaagggctctctgggcagggttcctggccctcccacaccttcctcctttctcagaagagccagcatggggcgggggcgggaggcggctggggcgggggtgggggccttatttaaggagcaccggctgagaacatcgttgcagatccagccccaggagccatagagaggaggtttcgtgggtaagtggctgtccctctctctggattcaagcaggggtcgggatggggtgcccctgaggcgcaggcttggctttccctctctgggataggctgcagctttgccatgtgagtgaggggagcacccagccctcggctgaactctccagaaaatgaaagtgtgcttcagggaactctttctcctccactccactatcccaggtacttcaaatctttattcagggttttggggagatttctggggagctaggactcctgggctgggctcctatcttggggatccatatcttggggactccctttagctcagaaagccccttggtttgcatagagatgcccttctcagtgtgcgtgttctggctctttccccagcccctcacccctccagccccacatcaggccccaccaggaacacatctgggcaggaagcgacagatggatccctgccatggccctgagccccctcccctcttaacctactccaattcctgttggaatttatggaactcctgtccatttccttagctgtgggcccccattttcagctccaagctcagaccctccctggaataggagttctcttggtatcacaagttccttatgtgacccatcctgggcctcaacttactcatcctgggaacgggagacgattcacagaagaaagcatgcaagagcagcgtccaggctgaaagaactttggccacctggcactgagaactgaattccataggctgtgagctctagcaatgccctgtggactcagttctggtgcccggcagtgctacaacatcaatgccaaggccgtggggcagctgatggtttgggctcccaacttcccagccaggtgcttctgcaggcccacatcttgcccactggccaaacctttaaataactttgactcgggctactcttatgctcaaagacgtcaggggctctcccaaatctctttaccctgccagaaagtcttctatagtacggcctccacttagctttcacgcctgatcttccatcgcatcctgctcataacctgccactagtgaacccctgctgctccggctccacacttctcatgctggtccttcctcagtgctcctggg

SEQ ID NO: 54939 - DNA, 1685 bp, Homo sapiens
ggtgcgttcgcggctccttgcagccccgccctctcgggctcaggtgatcctcccatctccgcctcccgagtaggtgggactacagtagtgtatcagcacacccggctatttttttttttttttttttttgtagagacagggtttcgccatgttgcctaggctggtctccaacctggtctcctgggctcaagcgatccgcccgcctcggcctcccacagtgctgggattccaggcgtgagctaccgcgcccggcctatttacttttcttactaagctggggatcaccgtcgccctcggcttggcaggaaggcgggggtaggggagcggtgggaaaggggggtgggcgacgactctgatagagggaaaagaggaagggaaagttggggcttactgcagggcaagctccttaggagaaggtggggaggaggaaggagggaggtccaggcccttcttccatcccacgtcctccacttcccaaggtgcaagaagaaaagaggtacagaacacccagaggtgccctcgattccgtcttgcacttgcccttctcccaccgtccagcaataaagcgagagaaacaagtgcaggaaactggccggcagtcatgggagaagccaaaaagacaggtgagcagcgcgtccgcctcccgcgcacaggtgagggctcacttctgcctgtcggcggcggcacacacaggaaagagccaagcgcgtgcacgcgggcccgcccctaggccttgcggcggcttcagctcaggcccttgctcttcctggggcggccgcgctccgcggcttcccgggctgggctgctgtcgccgctgtcgggccggcgccgcacgcgccactccacgcggtggtcgggctcgagcacgcgcggcgtcgcctgcagcaggaactggccgcggcgctgggtgacgcgcacgtcggcgcgggggtaggtgccgtacgcgcgccgcagctcccggcgcacgaagtccggtagctgcagaggggggccccgcgcgcgctccacgcggccccagcgcagctcggtttgcaggctcccgccctccggccacggcgcccagctctcggccaccgccgcgggcgcctgcagcgacagtcccgagatgccggcggcggcgcagggccggcgcagggtcgtggcgtaggccggagggcaggcccaccagggcggcgcggcctcgggtggcgcggcggggccgtagaagcggtggtattcccgtggggccgcccactcgcccgcatgcaggctcccgggccggctgcggaagctgtgggcctggactgggggtagcagcagaggggcggccaggtaggtgcaggtgagcagctgcggcggcggcggccagacgccctgtttgggcggcggccagctgtacacatacatggtcggccccccaggcggctgctgttcttactgggggctcctgcggatccagacctgcggcggaggaagggatatgtagacagactttctacttaaccgcctcctgtccctgtgggccggttccccgggacgccggttcatggctttgggggaattcatcccaaatcgaacattcagctccccgcctagcctcttgtcccaaggtcgggcagagcctcaggctcccagcagacaataaggagccttttcaagccctccgccgggatgctcttcccagtgactccccactcacttgtctc

SEQ ID NO: 54940 - DNA, 755 bp, Homo sapiens
cccggcctactttaaattcttaatagctatgtgaagtgcatagtgatgtcatgctcttttagtagataaggaaccagaggctcagagaagttaggccactgtcccaggttcacacagcctgtaagtaccacagtggaatttgaacccagtccaactgatgtcaaaggccagaagccatttgagtgaaggcaggaagattgcttcatccagatggggtgagccctgtctgagttccagtcccttctggtgtgggtcacaacccctgcacctcttccttctccagtggggagagtggtagttatggatgattaaaactgaaaccgtctcccagctgcagggctgccatgttgccacactttccttccccatctcctgttgactgaagcagtatcaccagcagccctgacagaaaggttcttctgggttctcagtatccctcaaaactcagctaccctctggtggtggccaccatttggtgactcaccctggtgatgtcatgctattcgtgactgagccactgctccaagtcttaattcgggccagtccttttgaaggcaggtgctggggctgggctgtggatggaaaaaaggggcctggttagggtttcatttggactctaacactgtcatagaaacccagattcaggctggtgaacctgatgcacagctaaggccaaacagtgggagatagagaaaggtttatttgatttggccaaagtgagaaggcgggagagcaaatctctcaaatccctatta

SEQ ID NO: 54941 - DNA, 1236 bp, Homo sapiens
cgttattaatacaaagaggttgtgctgcatggttgctcattcaggccctggtggctgtttcccaccttcagccctggctcctgtggctagagccctggtgcccacagctcaacctggacctgtccacccttgaagggctcatgatgcagcatcagggagtcccagatcgagccgctgacacctccaagtcggctgcagctgtgcatccgctcagaccacaagactcaatggaggatgctgacctctctttgttctcccaacgagtactaggcaaggagggaaggaaggtgagcgcttagaaaaaacgtgttggtttcaactgaaatgacattaagctatcgtggaggtaaaggagaggggttgagccggtcaggaatccaggcaacctgaccctatttgccagtgtccgcttttaattttggtcgctaagggcaagcgcccgtgacaaacatggcggcggcagcctcaggcgcagtcacctgccggagctgcgcccgggggccgcgcggagccaatcgctgggcgggggcggagggagaggctggggaagccctagaagtgcgcgcaggcgcattggctcgcacctggctcccgccagccgtgggattaggcttcgccggctacgattgcggtgagacgctggccagcggccggggctcgcgggcaggagcgggctgggctggggccgatctggcacaaacgacagacccgagggggaggggaatgctttgcgctctgggagtcatgggggctatctgcgggggtctttggggtgatcatattgtggattgggagagttgtgtggtccgggcggaagaagcggggttcaagggggcaagggtggaatcctcgcagaaaggctctccgggggtctggaggaaagggatgcagtgggtcaaatagctccctggtggtctgggatcgagggatgcactggtcaggtcgggatccgtgccattagcataaaggcatttaaccctggtggcacttggggagctttgaaaaacaccgatgctgggcccgcccgaagagattccgatttaactgttctgggtgaggcctgggcctcggtattattgcacagctcctcaggtgattttaacgtgcaggcggtggggagcagccctacacgtgtttcagcaccagctattgagtgaagagctcctgggctgatcccaaactcctcagtggcttgggaggggtgggtggtcctgaggtgaagctgtcgcctcttct

SEQ ID NO: 54942 - DNA, 1553 bp, Homo sapiens
agcaagcaacttggaactggatcttagtctgatgactggctcctcaattcctaaactggatggtttgaaatctgttatttaacatccctgcatacactggggatagtaattcctatctacctaacagagctgaagcttaaacgagaacattgtaatatgcctaaggtcccaagagctgaatcaacaaagggaatctgacagagtcagcttacaacagagggaactggtagttttgcctcaatggagggacctacaagggacacagacagggatcaatctctgtgggaccaaagctttgaatcgaaggcagaaatgcagtcgttttacaattttctcctttccccccaaaataagagcagtatttagattctttctattggtcaatattgatgcttctgcatggtggtgctggcaaaagggatgacggataaagtactggatttagggcacctctgctatgtgaccttgggctcacgttacgtcttcgcgcttcagttttctcatcggtaacacgaagatcaaagttccttttaaactatgcgtccagtttttgtgaggatccaactcgaatgtatgtgaaaacgccctggaagcgctagagcgccaggcaaatattaagtttggtaattttttccccgtaagaactaggcgttccaaagaggaggacaacctctctgcttcctttgtcactctcctttcttctcgacctttaccaactttgtaatttataatcacagtaatagctgacatcctacagcggtttctggcaccagattctcgggccccacccagatccacaccaccaagccgcagcgccggctgagaccgaaggaaaacttagccgttctccacccgcgggcgggcactcgcctctaggccccaccacccagagtcccggaagccaatccccacagccctggagcactgccccgccccttcaagagggaaaacaatatggcggcaaggaagaatggcaggggcgtgagccaatcaccgcagaggcctagcctcatccggcaaggctaagaggcggtatcattggctaagatggacagccagagcaaccaatagagcgatcggaaatgggggagagggcgggcgacgggaatctcacacagcggttaaggcccctagagccaagggcccaaggactggcttggactataactctttcctttatccactccagagttctccatcccacttttgctggctggccgccttgcctgcggactatgtgataaggggaggaaggaggcggcggtggctgaacgcgcctgacaggccgggccagtgacaaagagccggcggctcaggctgaaccccgggaagcgatcctttcgaggaggagagcccaagtccccttatagataggaaagacgcaactcacgttgtcgatcacgacaggctggttggcgatcacatcgtaggactccatggcagaggaatctctccttctggggaaggaactgcccagccgggtccgccgctagcgccactgacacgcatgcgcagtctagccgccggttcagggcggcgagggagcggcccga

SEQ ID NO: 54943 - DNA, 1502 bp, Homo sapiens
catttttttctctggattatgttctcccccagcccccttgaaatttcagggacctttttgtcaatagccctagaaaacattagatttattatcatctattaatactaacgccccatggatgaatgaatcaatccattgtcagatttatgtttaaatcctagttagcagcgcgtcagcaaaacagtaacaaatcctttgttggcgcacttctcgctgctttcgtgggaccttagcacctcagagggtgctcagcatctctaaacttgggttcctcctaacactagggggagaccaagagccttgggacactcccaacacagggaggggaggcggggcctattgtcaagtcacaccttccctgcctgtgactggcacagacattagccaatgggtgcttggatagggtgcgccggcgccccgccccccttagcgccccgccgccccgaggcaccctctggcagactcggcggcggcgacagcctgggcggacagtgcgccgtgcgcaggcgcggagctagacctcgctgcagcccccatcgcctcggggagtctcacccaccgagtccgcccgctggcccgtcagtgctctccccgtcgtttgccctctccagttcccccagtgcctgccctacgcaccccgatggcggagctgcggcctagcggcgcccccggccccaccgcgcccccggcccctggcccgactgcccccccggccttcgcttcgctctttcccccgggactgcacgccatctacggagagtgccgccgcctttaccctgaccagccgaacccgctccaggttaccgctatcgtcaagtactggtatgctctgggccgcggggagacggacaggcgcgggctggaaagggttaaagcgccgagggcgaagtaatttgtgggaggtgggaggaggggtagagaatggttaaagcactcagaaggagggcttcttgctgcgagggaaggagttaaggctcaagttgggaatggggacaaaggggttaacggagcccgtgggtactgaggggttaaccgggattaggagaatagagtgaggactgggggtgtgtgtaggagcagaggggggaacggcaggagcgagggaactgtaaacgtggtgaaaagagggggcgcctgtagggggtcattagtgggcgaggggaagccaagcgggggcggccgaagtgggatgggagaggcgaggcggggcctggggagcatttgagagggctttggaggagcgaagccgaagaagctcagagggcacgagactgcatagaatggggggttcggggggcccagggctctcctgtggtgggtaggagggccaaagatgagggcctggtgcttgtggagagaggaggaggtctccttttgataccttcccgattagctcagacgtcgtatcagggcaaagcttttgcttttgaagtttgacggagcagctcttcctgataaactttttgcttactctgcactgttctctttctccgtgcagagct

SEQ ID NO: 54944 - DNA, 1110 bp, Homo sapiens
agcagtggctgaaagggtggtcaccttgggtcaccagttctctgaaagaactctggctctttggttcttttcaagcaggagagagttgacaaaggcatcgagacagatggctccaacctgagtggtgtcagtgccaagtgtgcctgggatgacctgagccggccccccgaggatgacgaggacagccggagcatctgcatcggcacacagccccggcgactctctggcaaaggtgggagccatcactcagcattccaccagccttcctccttccttttccccagggcctggtttccagtctctctaggatgggtctctaacaaaaacaacccattcaatagtttatttcctggcatgatttaaacagcaagtgaagtcttccagcagggcggaattaagggagctttattggcccattcctagttgtgtttcctgtgtgtatttcaaatgcatcaccagcaggcaccgttgtgttttagatatgccctttgcaatctgaggtcatggaggtgagtggaagcctcagaacagttacaggaaaagtccatagtccacccaagtgcaagagaaaagtgtcggccacccacggaattgacacagggcccagctctggcctgaaggccatgccagatccaaggatcactctggcctcgggccctcccaggccttcaacaaatgaggcctgagtgtgaggctggcttgcaaattgcccacctcctgtcatatagatacagggttaggggctgtgggcagggcctctggacccaccgtgttccggatggggtctttgggaaggaggatgtggctgtcctgttggaatctccctgtgctgatcttggctacagaaacagttgtggtttttagtagagggcgtccccagctaactgcaaaggagaagcagccacttacatatacatgtgttgacagcttctttgtctacttcctttcttcattcttccatcttttctttttttgaagaataagatgtctacagccctgaataaaatccttacatatatgataacacttataaaaggtttttgttcgttctgtaaaggacaaacttaaactcctagtgcaaatatttgagccctttctttttttttttct

SEQ ID NO: 54945 - DNA, 1716 bp, Homo sapiens
cccttgaacagatcacagtgagctcatctctcctccatggtcagaagagaggtataacgcttggtggttggcaaaaagatcatacatttaaaaataataataaaagcctgccttgtgccttcacagattctgttgaccgaagagtttgtagagaaaatgttggaggatttagaagatttgacttctccagaggaagtaagcttgtttgacttttcctgacaacaggtcccgtctctgggaccatgtgtgtgcgtgcgtgtgcacgtctgtgcatgcatgtgtgcgtgtgtacctgtggtgcgtgtgtgcttgcatgtatctgtgtggctgcatctgtgggctcctccccaaggtgcagggataggctggagaggagactgtagatttctcttctgtttctatgcaccctcaccatcccctgccctacccccagcccttgtaaggacacccagcaaatcgtctgaattgccagctcctgagagcctcattgaagaggaagccagggccttcaggctagtacgagttctccccagcccctgctgttccctggcagattctgaacagaacgcccatgtctgttgccagagaacattccgctggggagttctggtgggcagcaagggactcctgctctcgcctcgggccacccaggagccactctcccttcttcgtcctccagccatgagctgtgcctcttagtctccctcttccagccctggctcagagctggaggagctggcaggccagctgtggctgtgccttctttagctgctcctctggggtagaggaatggagtccataatcccctttgttttttctcccttgttcccggcatccttatttgcgagggcttacctcatcctggaaaatcccttcccctcccccgctcctgcccgcagcaccccagtgggatgggagctttcctggccccagtgccccatgggttagtgaactctagcaggctggccgggcctctggagagctctcctgggccctgccctgcctgtggcagaggcagacccttcccttgtcctgtctgccaggaaatgtgcttgggggagaactccttcgcctcccaggggccaggctttctaccaagagggaggccaggcgggagctaggttccagccagggctggagcttccagcttccagggctccctgggctgcaacagccaggacacaggcctctggtgtttaggaagctgaggggagtgcacagggcgggaccgtccagtccaggtctccagttggacaggaactccccagagccagggtcacctcaatagagcagggtctcctctgtcctctgggatgcagcttgagaaatttgttcatttatatattccaaagccatcaagcacccagtccatgccagccaatcaacccccacaagtcactggtccctgagtcccagctccccattcagtcagaccagagccagctgcccagaagcgcttccggagaggccttgtcgcactgggatggcgctgtgccaggctgctgctttgagcttgggggtaggagggggacagtccaggcaagagggacagaagcctgggggagcagaggaaagtaggtcactaaaaatgacttttttctttttttccttttctgtccagaggctgtccctacaccctgcctcactcgccactttggtcctggcagagacagtcccccagcagagggagcgaagagggaggcagccaggaagggt

SEQ ID NO: 54946 - DNA, 5850 bp, Homo sapiens
ggaaggccctgtgtgttctggcccctacctttcttcctggacacatggccttctttctgtcctggaacctgcctgttctattgcttttgcatttgttttttcttccgactggatcgctcctcccccaggtttcacctatctgactctttgtgtgcattcaggtcccagctcaaatgtcactttttcagaaagcctttgtgtgagcctgttattctctatcacgtaaattgtcctccgtgtatttacgttaaattttttgtacgtttttctgggaattctcagggcctagaaaaatattttgttaaagatttattgactgaccattgaccttggcagatttctgcagttctttaagccatggtttccttattaatagaggaataaatgcctatcttgctaggtagtttaaagtgccagggatgaagttaaaagtattaaggacatcgggaaatctccccacactgaacctttgcatttccctgctcagttccaccggactgctgagcagaccgacaaacgctcctttccctctgggtaaaaagagccacgggtcttcacttcaggcccaggaagaggtggtcccactacgccgtggcatcatcgcttttttaacaagcgcggaaaaccccctcccatcccaatgtttaatgtaccgaagtttgtgagagtcacgtgagactctcgggtctgccccgccttagggaggtggagcctcagcttgtgggccaatagcaggagcagcctccggaacagccccaacgcgacagggaaagggggaggagccgggcgcccggccctgtaactgtacttccggaaagcacgccccgccccttcccccccaccgcgcccgtttctttcgccagtgccgggtgggccgaaccggcgggtgccgattaaaggcgccgcctgccgctttctcctcgccccccagcgccgcagctctccgcccccttcccgagtagcgggaccggccttgatgtagggacaccaccccccgtctccttccgccccagcccgggagctcggctcgctgcagcccctggccctcccgtttccccaccctgcctgccccgctctgctccgaacccattgtatacggccggctgcggactcccaggccgggccgtggcgggggccccgggacccccgagtgcccctccggctggtcccgcgggccgcggcatctccgccgccgccttcctcgcggcggcggcgagggcgccctttcctccccgcgcgggtgacggggacgcacccccaccccggggcgccccttcgcggggggagagccgggcccgagcaagtcgaggcaggaaagggccgccacggactgcccggcccgccgatcgtttttattatcgagattattattaaaagggggcggggaccccaggacgcgggggaggggctggatacgcaggtatttttattaaacagattattcctgaaataataatacgcgcaagatggctgaaggtggctgtgatgagagtgttggggttgggatttttttcttcctgttttttcttttttgatctgaggataaagctctgaggcgacagcggctgcggagaccctgcccgaagcgccctcccctcccttgagaagccgcgggcagacagacggacctcggaccgagcaacgggtgcgggcccgccccggacgcgtcgcctgggcagcagccggggaccgcgggctctcgcctttctgccgacttcttccaattctcatcttcttttattttttggacaggaccggggtgggtggagcagaggtggagagaaatcgggacttggcattttctccctctctctctcctaatttgttggaggccgccagccctccccttggaaaaaaaaaaatcccaccaaaaaaaaaaaaaaaagaatcaggagcgagaggacgccgcggggccctcagcgagcgcgcccagaccccggccgccgccgcggagcccaagatggctgggcgctgagggtggcggctcggcctggccccgccgccgcaggctggctccgaccgcagccccgagccttccaggccccagcagaggccgagaagaaaagaaagtggggaggagggggccgggggggcgaagggggagggccgggggaggggaggggagggccgggagccgagcctcctgttcattagcagttgagaaaaattcctttctagtttgatcaatccttgttttcctcggcagagcccgggcgcccgcccagcgcggagacgggcgcgcggggtctctccgcggcgggggcgccgggcctcgggggagcgcagaagtagccgcccgggggtcaggccggagcgccgccggggcttctccctccctccctcgccggttgcctttttttccacttctctccctcccccttccgtttctatttgtgaagggaggaggaaggcagaggcgggctggtgtctctggccggggactggaatttcatctgaatgactgcccctgcgcgcacgcagcgccccggagtcggcccgcccgcgccccgcagcccgcgcccggccagccagccgggggacgcctgcaccgtggcccggggaccgccggcctgcccctcccgccccgtccggatctagcagccctcggcgcggccgccctcgcctcctggccccgcagaccccgggctccggcccctgcgagggaggtgcggcgccgacgagccaggcaggagccgccgctgccgccgccgccggaagaagtgtgctgctcccaagctccgtctgccgcggggcgcgccccaatgtcagccgcggggacgagcgcaggccgcgggccgccactgccctagccgcgccgacggggaggcggcctcttatatggaatttggaccccggcgctcccctccaaggctggagtcccggccgcggccctggcgcagtccgccgcctcccgctaggcgctcgggaggaggaggagacgcagcccgctgcgcgcgcggcgtgaggaccgcggctccctcctccggggggcgggcacgcggaaggcgctgctgactgagcgaccgtcggggccggctggggccggagctcggggctcggtgggcctacagcggctccggacggacccccggggctggggagtcggggaggcctgccccggccccctgcccgcggccgccatggcggagaattggaagaactgcttcgaggaggagctcatctgccctatctgcctgcacgttttcgtggagccagtgcagctgccgtgcaaacacaacttctgccggggctgcatcggcgaggcgtgggccaaggacagcggcctcgtacgctgcccagagtgcaaccaggcctacaaccagaagccgggcctggagaagaacctgaagctcaccaacatcgtggagaagttcaatgccctgcacgtggagaagccgccggcggcgctgcactgcgtgttctgccgccgcggccccccgctgcccgcgcagaaggtctgcctgcgctgcgaggcgccctgctgccagtcccacgtgcagacgcacctgcagcagccctccaccgcccgcgggcacctcctggtggaggcggacgacgtgcgggcctggagctgcccgcagcacaacgcctaccgcctctaccactgcgaggccgagcaggtggccgtgtgccagtactgctgctactacagcggcgcgcatcagggacactcggtgtgcgacgtggagatccgaaggaatgaaatccgggcaagtaccctacgcgcgcgcgcgcacacacacacacacagacacacagtcccttcctctctcccgccccgggaccacccatcccgacaggctgactcttgtgacatcaggccagtggcccctggccaaactcttctctgaaagtttggggacagggtcctgggaagaagggccccgggtcgctacttggtacattctcgcacctgtgcgcacagggtccgtcttctgagtgctttatgggattggggtgtgggaccgtcaggggtagagtctgggtgttgcttttctgtggtgcgcagctccctcccccagtcttgttgctgtaggccctacgggaagtcaccgaggcagtgaccccggtcctgcctctccagctgctgtttatgtaatgagtgtcccggtgccgctgctgtggctgacatgatccatgatgctggcataccaatgaggaagtaaacaaaagcagccatgttagttttcagcgctattggaaacacactggggggggagtggggggagtttccagagggagagcagaactccggccgtctctctggacagggcctgggcagccagcgaggccccgacagcggctccgctatttggattcctcccgagagccggctctccctgtgtgagaatcgctgccctgtgtgcctgtgtgtcgcacgggccgcatgaacaagccttcaagtatctgtcttcatcatcctggccctttcgcctagcacagccctctcgccgccctcccacatttggggaggggaagtggaagacggaaaaagaatcctgtgggtttaaggttgagccgccttgaaatctggtttcaggcagctggctcccctgggctgccggctgggtgattacggaaccgcgtcccctcccattgtatacaccctgcggccgcggccaatgtcaaaccgcctcccccctcaggcctctgggcctggttttggagctggactgaggcaatacttccgtccccttcagtggagggggctcctcctaggtccctccccagtcctctggctttcagggttgagtcataccaaaatgaaggggttggcctgacaccgaggagtcctctctgaagccccaccttggggcctggggcctgggtgtgatatctgggggctaggctgcactctggtgggactgggagtgtctctgggtggggatccctggaggttagtggaggccagtgcggaggctggctatgaggaagctctgttcagggcatgattggagatggggctgtttcctgtgtggggggaccagtcagaatgagtcactgtttagcaattaaaaaacatacacatacaaccaacaaaaggcaggagggccaccacaggctggggcgggggcagcaaatacgatttgctgtataattagtttccaatcggatggactagccctgggtttgtgtgccaggataggcctctggtttcttaaaggaagtgtgtcctccaccccctgtgtcctccatccccgttcagggcaggcacagcccacactttccccagtattgggaagctgctgctattaataaagatggaagggctgggggaggaggccgggaaaagtgcagaggcaggagaaaggagggctgtccagttctgtcctgggattggcagtggaaaatgagaggaggggaaaggagatgtggctgaaaggaacaggggaggggcagcaacctgggcgatgggcggatgcctgcccgcacccacagtgctgctgtagctggtctgagttctagggatgtctttaattggggtgggggagaaaacgtcattatacctgacttggtgtaggaggatagctttaggtgtctgtgtttttgaatgtctttgagactgtgtgcttcgccctccaatgcacctgtctcctgtctctacagttcagggcacaggcaggggtgggtgggtggcatgtgcatgcagagtattccctggggtgccccccagcaggcccctcatttccagactcgtggattggatggaagcaggcactgaactttgtcggcaactccgcagggtgtgtgtgtgcgtgtgtgcgtgtgtgtgcgtgcgcgtgcatgcgcgtgctttcttgtgcctggtgtgggcaggctcagaagtagtgggttgcatcagggccagat

SEQ ID NO: 54947 - DNA, 779 bp, Homo sapiens
tagagacggagcagctaatatgtcttcatcaacatggattatgtattgaatgaaaaatcggtcatcaccaacaatcagatcctgcaaaactctcagcaaataactaaataattcgggactgaggaagcgcacccgccacgcagacaccaagacggcgtaaaatccaccaggcatcccttccaagcggcacccctttgtgtcgtgggacttacttccctaccccccaggggcccgcacagcgcgagaaggaggagagctaggctaccatctcccctgctaccgccagggcgacctcagagccaatggggccggccttctctccgcttctggccgggctccagacgaaccccactttactgcaaagccgcgagaccgattgcccgggaagtctaagcctgctagcgaaagctgctctccgcagttcctgggatccgccctcacccctgtccccagagtaatgatggagcccgggctccgcacccggccagccgcgcactctgccagccccttccccaagcctcggacccgctgcaagccccgccttcctctccaggcccaggcctccctccagggcccaccctcgggtctccccgccgacccccgaaatcagtccacaacccagatagcaggctgagcgacgtcccattccctccttggctttaagcgcagtgctccgccctgggcctggggacgggagggggataaccggccggctccaagggggcccaggcccccacactcaccatcctcccgccgagtccctcctcctcctcctcctc

SEQ ID NO: 54948 - DNA, 749 bp, Homo sapiens
ctcccccgttaccaggggcaactgctgcggcgccgcccccgacgtccctcgcacgcacagctgaggagctgagcagcaatacggggcggggtgcagctccgctttccccagagtgcgcaagtgcgctaaggcgcccgcccacgcagtgggcgggctacgggagctgcagaggccgccgccggctcgcctggaccagggagtggagaaagcctgcccacgtggctggcgggagcctcccggcctgggattggtcgaaaaggaggggcgtggggcgggcgtgggggcagttccccagcccaggtcctcctctcacccgggccagttttcaaggcgggctgtaactggtggcatttgtcccgggaccaggtaaggggccttgggacaatggcgctcgccctgtctacctccaatccccacatctcgggtgggtgctgagattgctgtcctgactgcccaggcggggctgcagcgcgggctggacttccacctgcagaagccacgtggcgcgaagtgcgccctggggctgcagatgggcccctctgctctgacccccattgcctaggagtgccaggccgagcggctggggcgttacgagctgtccgggatgggggagtaccgatggggggaggccgtctgtcggagggcaagaagcagcctgggggctggccctgagccctgaggtgagctgaaagcacaggtgaaaggcgttttggggatcggcccggtttttgttttgacacagggtgtcg

SEQ ID NO: 54949 - DNA, 2370 bp, Homo sapiens
ctgggcatctcttcaatggtcagtgtgagtggaatgtgtgggaaaatgtagtggtgagaggtgagataaagagaagtagacagggacgaagtcacagagaggaccgtgttgggaagtttggactctctattctgtaggtagatgaagtatttaaaagaagaggccatgatatagtaatatttggtttaatgtggtatggttgtagtgtgtggcggaaatttgagaggaagaattgtcaacttgcagggcagcagggaagccatttgtatttagctagaagaacatggattgaagcaatggatgatggatttcagagcaatttgtgaagtagaaccagaattttgtccgtcgaacttggggtgacgaagcactatgcctcagataaaggtactatcttctagggaattcaaacggacctaagctgctatttgggcagttgagaccaagagaggcatcctggtaatagtgctgtgcttcaagacaaaagacattaaaatatttttacattgcaattgttttcctcttcaggagcgcctggttacctttcaggaataatttattttccaacacccttgagaaacattaaaccttttttctttttttgatgtggaaaactggaaaactagtacttccgccacactcaagatggctacatcagaaatagacttttccatccacctgggtggccccgcccccttatgaagctgcttccgccactctctgcgggttgggacgaattttacacttcttcgcagcattcaagatggtccggcttcctcctactttttattggctgcatcgcttcgtcttcaggggaaggcgggacttatatttgatcgacagctacattgatcaatggacaaagggcaaaggccaatgaagcgctggaactggagagtctctcgcgtgtctgggagggtgttttgcgcggggcggggtggagcagagccggaagcgggaggggagcgtcaaacaggaaaagaagggaagaaggaagaagagggtagaggaggagagggaggaggaggagggaggtggcggcgccgtggcggaggagcaggagcaggagggggatggagaggagaaggctcctgggtggcatggcgctcctgctcctccaggcgctgcccagccccttgtcagccagggctgaacccccgcaggtaagggggagggggcgtctgggccatgttgggtcctgggggtcgtcgaggcctggctggaggggtctgaaggagtgttgttgccaagagttgaggggtcccgagaggggcgtctatgcctggcgtggacaggatctaaaggggcgtcggtatttagctgagggacacctgtgacagttttggtgtcaaggaggtggcagaggcatgatgccaagcgagtgaggggcgtttgagacggcaggttggttaggtgggctggggtgactgtggctggatagcggtgccaagctgaggatgtgggccttattcgtgtccctctgtggagcaggtgtcccaggcagtaatgcagtatgtacgtctgtgtgtgtaggggtacacaggctattgagttggcctgtgagggaggggatcctgaggatatttctttaaggatggactggggaaagttccgagggcatcttagtacgtttaaaaaaaattactatgttcctgggagagacttggccccattttaaaatctgtaagccatggcgcacttggttggagggaggactctcagaaggcaggtgggatgaaacagagtggaacccctcaggaggaggagcacacttgagctgtaacaagctcttgctgttaggctggctggcctgggagagcaagtcacggatgctgatctgagccagctcagggcttttgaccagagggtggttctgatgccaatatgggcagcaaatggagcaccctagcttttcttgctgggtggcttgctctttatccaggcagagaagcttgcttgtgctgattccagctccagctggcatttcaaaaccctaatgggagcgttactcctggtgccaagttgggtggggtgcagtgggggcaatcacccctccttccttgcatgtggcaaagctttatgattcttttttcttcactttctgttcttttccccgttttttcagaaaggcatacacacatagacgcatagcgtagtggcaaagtttatacaacttagcgcttgaacttgtgttgtgaacaagagcagaaactgagtgccagcaaaaatacttatcttttccctaggagttttagggctgccttttcacaaatacatcttgttttgcccattatcctctattttaaaatactgattaaaaaataagttgaaattcacatgacaaaaaccattttaaagtgaacaattcag

SEQ ID NO: 54950 - DNA, 2038 bp, Homo sapiens
attttctttgaaaacaaaaaccttctttggccattctgtccctcaacagcatcccttctttgttttcttttttctttcttttttttttttttactggaagctgagaggatcatccagcatctcttctttgagctcctcttgtgtgactgtgtttgtccctcgcctcaccatgtttatcatagagtgcgtatgtttgtttctgtgtaactaactaaataaatcctccagggcaagactgattcatccaacagtacatctttgttatccccacagcacatcctgggtggactggatgcaactgtaaatatcaggtcacaagtaagggggaagtgacgattaatatcaaaatcctatctgcatatgtgtccaagccattttggagtcatacagacctggttgagattctggctgcactgcctattaggtgtgtgtccttgaacgagttacctaacgtcactgtgtaaaatatgagatgtcaccatctgttggaatcttccctctctgaaatacatgatttgatgtttagcaaaggattacatactgcagttaagaaccgtttacctaactctctttcctgaaagactcagtagtaggaaagcaccatgggtttttatagataccttgtggaagagataagctctgtgacttgtaaaacgccttgtcctgcccagaagcaggagaggtgtgtgttttcttgcctcagcaggcctgctacatgcctgcctttgtccagccccaggacatagataaagctagtgttcttggtttctagcagttaagcaacctatagtgtttctgcctggcagagttctgggtttgggatttatccccttgcattccccaaaattattacttcaggattcttttgttaatgcctagcctcacacccatgacatgaagatgtctcagtttaacttttgttgtgacactcatgttggtttgaggtttgagttagtattcattctctcctttcttgagttagaactctgaggcatttaaatgggtgcgtgcccaaaccggagaaagataagaaagatctcttatcttagacattctgtgtctgcccagcagcctctgctcaaagctcctggaaataaaatggccttacgcctggagattatctcctaccctagaagcctggcagttactgtcctgttctgacaaactctctttcttcagatcccttgattgtaaaataagatacccctagaccttcagccctagtcgccgtcagcctcagttgaccagatggcaaaggtgtgggaacagctcaccaggttcccaagagccatgtcctaggaaggtctccagcctattccttgtgtgtggatctgttgtgcattaggaacagatgagaactttagggctttcccagtctttgacctcatagaaccttgctttccaaagtgggtcagaaggaccctaggaccctgacttcacactccagaacaccaccatcatatccagtgtgcatggcagtctcataaacagggttccagagcgctgaccagggacctgcctgtctgcttaacattcacctgaccctcagttctggtttttgctgtttgttttttccttgtttgtaacttctgatattctaatagctgacgcctgtgtgttcataaaggaaagagcctgtggagccagagtcttcactcaaatccttgctgtctcacagccagctgtgtgaccttgggcaagttacataaaccccatttgcctccatttctgtaactgagtaatagggatggtaatagccacatcatagggttgttgtggctgtgagatacttagcatggagtctggctcatggtcagggttgaacaaatgattatctctcccctaccccaccccagaatttaaagattataaatatatagactgcctacaaaaatgttgccaaaagatacttaaacaaattttctacagtaaaagaatgaattcaggtagctgtgagcatgtatgtttttgcagtatgtcttaaattaatccggtacggcacagtggttcgtgcctgtgatgtcagcatttgaggatg

SEQ ID NO: 54951 - DNA, 2847 bp, Homo sapiens
cacaaaaaaacaaaaattagctgcgcatggtagcacgtgcctgtggtaccagctccttgggaggctgaggtgggaggatcgcttgagctcggaaggcagaggttgcagtgagccaagatcatcacaccactgtactccagcctgggtaacagagtgagaccctatctcaaaaaaaaaaaaaaaaaaaaaaaagtaactttcgatttataaagctcctctgaagattgttctccttgagtcatttctggaaatccgaacccaaacatggaccttttgtgctgtgcaagtgttgtctttggtagaggattcaggccgagggagagctgctgtgacctcctgtttcagggagggtagccagaagggatttggcttacaccaccgactagggaaagtcagagcaggacaccatccccagggcccttgcttgtgcaaagcttgcgttagagaactcttgtctccctgagctgaacttagtgaagaaagcacgacaaacctaaggcggtgaacttttctgaaccaagagttggtttaaatatagatgatctgcctttctggcaacttggaggctgcggtgggacttgttgtaccttttataagacaagtgaggaaagatgttggcacctgtacttgcgcagtttgtttatgaaatataaactctccggtggaagcgagggctcgaaaggtcagtgtccaaggtagcgtgtcgtaccttagctggggaaaaggtgcctctccaagcccccgctgcgaattgcctcattccctagagaaagttgggacagccaggcttcatgtcctattatttactgagcaccgactctggcaggggtgggggtggaaaagtttctgtgaaactgacagacactggacttgattttctttcccagggaggagaaacaatactctaggagctacaaagtcagtccttattcagagcagtgttcctgttttcagctttagagacttgatttatgtaccccccagcctgcttagagccaaggggttgcagcagcctgctcccatctgcagcccccaccatcctcccacagtgggctctggctctaggtgggtccagggctgggcatcgcgggtctgcagcacatcctcctcagtattccagtgcagctgtctgaagttttttctgctgcgcctgaactgatgtcatttcccccttggcagacagcttcggctttgctgcgtctgagatatgtcacgagaaggtgggggtgggccagagccaggcagggggagtagcgaggagagcaggagacagtgtgcctgctcggtcccaggactctgtttactttgtctgctttgctaaagaaggccggtgaaccaggaccaccgcacacacaggcccaccaggggcaatgctcattccaagaccttaacttttaagagccctttgttccaacgttagtgtggacgatgctcttgcaggatgcctttccttttgggtcttagacaggtaattgtttctgcacggatcgggtttggaagggaagaaggggtgggagcttgtttattgtactactgctttgggtggagggaatattttagcaaatgcctctcagttagaccaggccagctcccacacagaactttccagtctcccttcttgtttgctagttgctccttactttcagagccaccgtgttcttaaccctctacgtccccgaggtttctctagggctgaccagttctgattttccatcagacactgtaaaactgctttggaaacttcacggagaaacagctgaagaatggggctggggaaggggagaggcagagtgcgattcttgctccaaaccccttttattccttctccattttgatttggctagttagtggagatttcctcacagtcctctggttctgaagggactctgtgttgggggtggggtgagggctccgttcttcttttaaaggaaaggctttcttcctttcaagcatgtgcctggggctgtgcagctgagggacgttcccgacgcctcaggggaaggggtgtggaattgaccccattttggccttactgaccagtttttcaaaaagacccctgtggcagagacttgattgctcggtgagccgccctttgaagtgggagcactgcattcattccagccggtaaagcagtgtggaatgagagaacagtagcaagccaccaactgctgtctgctgagaacacagctgttgccaactatttgttccagggcttctgagagtcagacacccccaccccctcttcgtctgagaggcatgtctgtatcggaatgtgtaactgtaaccagcagctgctggccataaggggtggggagggagcacacaccctctgctgcctgttcctgggtgaggaaaagccacagatgagctcacagcagaagccctagaggggagctgctagggaccactggttgccctcactctgagaaaagtgctaggtggacaactctcccttgagttgcctacagttctgttcaaaggaagctcctctgaaaagccccaaacattccattacagctcttgttatcttcagagtgttgcgttgacacagctgatgggcagagaggtgaccactctgaacatcccttctgcccccacaagaaaggctgtccttttttttttttttttttttttttttgagatggagtctcactctgttgcccaggctggagtgtagtggcgttagctcactgcaacttctgtctcctgggttcaagcgattctcctgcctcagcctcctgagtagctgggattacaggcatgtgccactatacccggctaagttttgtatttttagtagagacggggtttcgccatgttggtctgactggtctcgaactcctgacc

SEQ ID NO: 54952 - DNA, 1960 bp, Homo sapiens
tttcaccatggctggccaggctgatctcaaactcctgacctcaagtggtccgctcgcctcggcctcccaaagtgctgggattatagacatgagccaccaggcccggccaaaaaaaatgtagattctttatgtctgggccagggccccagaatatgcatttctgtgaagttccccaggtgtttctgatcccggttgtttccggccacactttgagagactgtcctccagagctgggcggcatggaaataattacaagccagcatgctgagactacaacagaggaacgcccagggactgggagagcagagcgtgggggcaggtatctgaatcaggctaggagaggctttcctgagaagccgatatctgatctgactcttgaaggatgaggaggagagtttaccagacatgtgagttggggaaagagcattccggacagatcaggttgggagagttgtttttgttttcttctgcagatgacaagggaagctgtcattcatctcttgagtcttggcattgaatttgcctggggcaagataaggaccttagttcaccaggtatgggtgtcttttatgggtaccaagaaggaggaagacctcagggcccttctttctaataatgagcatggcatgatttcagtgtctgtaaagggcagataaactgtaggatttattagttctttcatgcaagggacagttagacagctcatggaagctacagtgttgactaaaaaaaatgctttttgtgcttagatgagccagagctcagaagaagatagtcacctggtgaactttttgggtatggcactatataccaaattttagatataacaaacaattaggcatgctatccctttattatctgacaagatcagaaaataggttttctggttaagagaaattccattatgtgtacctaacaaagggattactaattttcggagaacagtattgcaacagaatgttcttagtcatgatttgaacgaattctatttcatgtttatccagaagatattgattgggtaatgtcgaaggtttcttaggagcaacactcagcatctgaaaagtcctgtgcacctgttctacccaaagcatgttgtggatacaaagaggtataaactccatccctgccctcaaggggtttacagtcagctagggaaagtagaataagtgcacaggtaatgaggacattctgcaggtggtagcaaatgacactagaaaagaatagaatgccgcagttcagaggtgtgaagaggcaacccttctgcaggtggcccttcccacagtccaatccagtagtatcagttgttgcactataggtgctaggtgtgtggaaggaccagtgggtggtaagttctagttgatggaatgcaggctagatccattaagacactaattttacatcttgcaccttggaatattgcctttctcagtgggaaagacccattgtcctccaagttgtccacaccagtgagatgggatgatccctgatactggaaatgaataatacccatcaaagccctcttagggtcccttttccaggttggaatttgtcatggaaagaggcacagggggcaactcctggcccaaggggctgtttgtatttttgaaagggtgagctggtccctgggctgatgccgaatgtgacaaggcaactagaatgttgcatggtacttactccctgggcataggaagtggctttagagtctcacaaggagagcagtggaaaggctgtgtgatagccagctaaagctgcagggtggagccatgactgtggagagggaagggggggaattgccggcttccaatttaacccctcaactgctgaatgttagccagcattgacttggggtatttattatttcaccacagcggccacccatgagggaggaggtcttatctcctttttgctgtaaggaaactgaaacccagggagaagttatctgttccagaacccagggcta

SEQ ID NO: 54953 - DNA, 2714 bp, Homo sapiens
cagcaaacaccaaggtgacacttgtttgtgctaccaaaagttgaagccagaatccttatctaaactgatttgtgaaagtcttgtgacagctccacagaacacctcatttccctactgtcaccacaggtgagaaaggtggtgcttacgcaagccctttcaggttaattttttttggggggggtggggggagggatggagtctcgctcttgctctgtcacccagactggagtgcagtggcgccatcttggcttactacaacttctgcctcccaggttcaaggaattctcgtgcctcagcctcccaagtagctggtagcacctgccaccatgcccagctaatttttctatttttaggaaagatggagtttcaccatgttggccaggttggtctgaaactcctgacctcaggtgatgcacctgccacggcctgtcaaagtgctgggattacaggtgtgagcaactgtgcctggcctcgggttaatttttgaacccccaaccatctctgttgaaagaagctgcttttttttttttttttttttttttgaggaacgtggcttgtttttcattgcatctctgttatcagagcaaagagaaagtgtactggacagtaacttagtggaaaagaggactgtgcctgctgattttgaaacattatccaggatggagccaaagaaaacagtcacttcctccagtgatagcccatgagtttgacccgccccctcccaccccttttccatgaagaggtaaattttagtccaggaaaacagaatactttggggctatttaaaaaaatgctttgaaatcccttcttctgccctaattccttagcactagtaagatactagtttcttacctcttcctctctagggcttcttgactcttatttcttgctaatttgtagcaacagtgggttgaaagagccctgagaatggacctgcctgagccatttctgtgcccctctgtagccattgtttctctgggcagagctcacctgaacttgaaccccagacctcacaagaggcttctattgctggttgctggaaatggtgataaaatcctgtgaggggaggggcagtgcagggaaggagacttggctttgggaatggctggagtgtgacatactgacttcttttcctgaaagtggctgagggtttgccgggactgtgttgcacataagacttcggtttcctctggcattgcatcaaggaggccagagtatttattattgtttggttttcttgcttaacacacaagacttaaggatctcccaactgtgatgcacggtctcgatgtggtttcaaatactgtccaattgatcttgtggtttccatcgagggtgtgaaatccctggttacccaccaggcaggcagtggtttgaatacctgtgatctcccacccctctgggtgtggttctggagtgccgtgggaggttaggacaggctggggcggaccgccagcacaaatagaacatacagtcattcctgcgtctctgtgtaaggttccagattcatgggccaggctcggcttgtgctgggttactgtaaaccaggatgagagagccacagccagagagccacggttcattctcgcactggtcatgtgaaaatcacacccccacagccttgccttaggctttgaaggaccccttcatgctgctgcttgtaccatgtagctaagaggcacgagggatgaccagctcctatggttacttgactcagcggtcgctaggttcaggactttgtgaagggtttttggccagggtaggtatgcttgtgagactgacatcagtcctgcccacggggaatttagagcggggtggtggcagggagtctgtgaggcactcggagaacaagactggctaaaacacggttctgtacaaaatattgtgctgcagtttggctaaaacaggggctctaaactgggacagttttgcccttcccccataggggatatttggcagtgtccagacatggttagctgtcacagctaggggagtaggaagttgctactggcatatctagttaatagaggccagggatgttgctaaacatcctacaatgtacagttcagtcccgtatgacaaataattacctgactccaaatgtcagtagggctaaggtggagaaaccttggggtagaaaccacagactcatagtagtccactctgcttgggaagcaggagtcacaggactgagggaagaagtaccatattgttttaataaaggggaaataggtagagctttcctgctgccttctaagcagtgtgtgttcattatctgcccagaaatttagaattttcacattggttgttcctttaatcactaggtactctgtcttattaatgacaggtacagagtcattttttgtgggccagtagatatgaccaagcccatctgaaatatggatatgaccaagtccatctgaaaagtcggatggaactgacgtttcatcccttactcaaataaccgggattactaccccccaggaggagaggatctcagtggtacccaaatgactttgtacatacaacttaaagaaaaagcaggcatagttattttagcagcagcccatatttcaagccaggtacctattgctgtgggttgggtttattgtaatctatcattagtaacatactaacacccccactcccccaaggttttctacatcactgaagtctattttaatcttaaagtccaagctctcagagttccaaaa

SEQ ID NO: 54954 - DNA, 584 bp, Homo sapiens
aactggagagacagaattcttaccttcagaaggtaatccagcggggaggggataggatgtgcattggcccaaaccccaaagccactcctccctgttctcatcctggggctctctccactcagcaagctacattttccagggagagatcaaagttgggaatttctgcccttgagatcatttgggagaatttcacccaggcatcagtttcccctggtttgggctttaggagggagaggggtatgtttctggacagtggaatttccctgaagtgacacaaaacaggctattagcaaatcctgtcagtgctgcccaactcgtttttcattttttattctctctctttttttctttctctctctctttcctttccctccctcccatctccctcctcctctctcccctccctctccactcttcctctcccctccctccccacttttcctcccccctccctcccacccttccctacccttccccccacccccacccttcccccaccctgccacccctcccccaccttcccacccttccccccaccctcccctccccttcctccaccctcccctacccttcccccagccttt

SEQ ID NO: 54955 - DNA, 513 bp, Homo sapiens
tgtttgtttttttctctaaaaacaaacagcaaaagacagctgaaaacaagaacttcaccggtgggcaggcaagaattctcttctggaaaatgacgtttgtggctctttcccaagttggccttcaaagagcctgcctgctgttgagccagaagatgtctcgtgtgaaggctggggtggcggctgtcttggaacctctgtgagcaggaggccctaagccgcagcagtggatagaggtgcagctctctgcctctctgccctttggtctgtgttcacaggtgacccgtgtcagcctgcatcgcaagcacacaccctgcgggccttcaagtctcactgttccgtatgaggaaacagacagcggactgaggaagcgatggccccagagaaagggcccctgtagcctggctctcacacagtattttatctttgattctgaataaatattttttgtggggttttttttttttttttggtggcagttgtttgttttaaactgaccacttggaagaaacacct

SEQ ID NO: 54956 - DNA, 1447 bp, Homo sapiens
agtgaaggggcagatcctgattgtttggtttgcaaaagggggttcactgaggtgagttgtcataaattgattgaacagatttctttttctgtttcttttcttttttttttttttgagacagggtctggttctgtcacttagtctgagcgcagtggtgcaatcacggctcacttcagcctcgacttcctgggttcaggtgatcctcccacctcagcctcccaagtagctgggactacaggcgcacatcttcacgctcagctaatgtttgaatttttcatagggatggggtttcaccatgatccccaggctggtcttgaattcctgagctcaagtgatcctccctacttggcctcccaaagtgctgggattaccagtgtgagccactgcgcccagctgaacagatttcaaatgagttctggtaatatattagttttctactaccacattaccatgaatattaccagaaactttgtggcttaaaacaacacacatgtattatcttacagtcttggtgggttaggaacctaagtatagcttctctgggccatctacttagtgtctcacaggctgcagtaaaggtgtgggccagggttgggttccatctggaggctctactggggaagaatctgcttcctatgtgcctggttgttagcaggattgagttccttttgattgttggactgagagctttttttttttttttccgctggctgtcagctggaggcccagaggtaggtgactagatggtacttgcagttccttgtcacgtggagttctccaacgtggccactcgcttactcacagccggcaagagagagaggctctggcaagagagaggctccagcaagatgaggggaatggtgatgtaacatgtaatcttatgtaacatcatcatgtgtttcctatcacctgtgcatacactatcgattagaagcaaatcaaagatcatgtccacaaggaagagaagaggatcacacaagagcaagaacaccaggaggtggggtcaaaggctaccctgagcggccagtctgtccaccacaggtagctacgtgttaccatggctatagaacattccatcttttcctaagtttgtggatgtggagcaactggagtggcatacactgctatcggaaatgtaaagtgttaaaccactttggaaaatggtttggcagtttcttgaaaactgaaacacttaccatatgatccagccattccactactagatagttacccaagagaaatgaaaacaacccacataaagacttgtgtacaaatgttcatagcagaatattcataatattccaaaagtggaggccaggtgtgatgggcttatgcctgtaatcccagaactttgggagggcaaggcaggaaaatcacttgagcccaggcaacatagggagaccctgtctttacagaaaaaattgtaaaaattagccaggcatggtgg

SEQ ID NO: 54957 - DNA, 2612 bp, Homo sapiens
atatgtgtatatatatgtatatatatgtatatatgtgtatatatgtgtatatatatgtgtatatatatatatgtgtatatatatatgaatggaatgatattctcataaccccttggaaacattattacttctgtttaacagatgaggaatataagacagaagctgagtaatttgcagccacacactgctaaatggtagcattgggactgtaatccgggccttctgattctttttaattatttgtattaattttaattttattttatttttaaagagatggagtttcgctatgttgcccagggtggtctggaactctcaggctcaggtgatcctcctgcctgggtctcccaaagggctgggatttcaggcgtgcgccgccatgccctgccgcaggctttccgattctgaaccatagagtcaatgaaactgtcctccatcccctccagagatgtttgcctggaccctgttttcctcaggatatcaatgaatagttcatgagtttagtgagcaaaggtcaacctccatcaggcgcatgcgtcccttccttttcccatggaggaagagacgcctcttttccttccgctttgcttgtcttttggccccggcgactcaccatcgtcagtgcgcaaccgttcgctaactgaaatgatggcgactggaacgccagagtctcaagcgcggttcggtcagtccgtgaaggggcttctcacggagaaggtgaccacctgtggtactgacgtaatcgcgctcaccaagcaggtgctgaaaggctcccggagctccgaggtgagctggaagtggactctcccggcctgatagtccggggagtcgcagtctttcgttgctgtgggaaggaggtcgcgttgcatcttgggaattgtaggctgtgaagtacttgctatgagtaggtcttcttcgcggaggcgcgtgttgcattctggggtgtgcagtctctttggttagggacagtgtgtgagggttgggggaagaagcgatgccatgggaacctgtgctttaaaacagctctttgggaggccgaggcgggcggatcacctgaggtcgggagttcgaaactagcctgacaatcatggagaaacccccgtctctactaaaaaataataattaaaaaaatatatagccgagcgtggtggcacatgcctgtaatcccagttacttgggaggctgaggcaggagaattgcttgaacctgggaggcgaattatatatataagtattatatattacgtattatataatatatatacgtatatattatatataatgtgtatgtatatattacatatataatatacatatatattatatataatatatgtaatatatattatatatattttcaactagaggtgtttatagttaaccacctgtaaatattcaacatattcatcataataaacgtacatttatttagcattttatatatgctagacactgttgtcttttatggagtttaattcatgaagtctttagaatgactaattgaaggaagtacttttccttttttttttttttttttgagacggagtctagctctgtcgccaggctggagtgtagtggtgtgatcttggctcactgcaacttccgcctcctgggttcaagtgattctcccgcctcagcctcctgagtagctgggattacaggcacgcaccaccacacctggctatttttgtattcttagtagagatgaggtttcaccatgttggccaggctggtctcgaactcttgacctcatgatctgcctgcatcagccttccaaagtgctgggattacaggcgtgagccaccgctcctggcagcattgcttcttgagcagtctccacatagctattttgtttgattagctgagaatttcatgtgtaaaaaactcattccacagtattcatttaacaaatacttattgggtgtctgctatgtgccaggaactgctctaggtacacggaataaacaaaactaaatccctctacttgggaagtttacattttagtgaagagacagacgataaacaagtgaaacagaaaaaaatcaggtggtggtaaatcctgtgaagcaaaattaatctgggaatagagagtgatgaaagggttaatctttgtttgtttgtttgttttgagacagaggaggagtcccactagctctgtcacccaggctaaagtgcagtggcccgatctcgggctcactgcaacctctgcctcctgggttcaagcgattctcctgcctcagcctcctgagtagctgggattataggcgcctgccaccacacccagctaatttttgtgtttttagtagagatggggtttcaccatgttggccaggctggtctcaaactcctgacctcaagtgatccttcccgctttggccccctaaagtgctgggattacaggcatgagccaccacacccggtcgaaagggttaatcttaaacagatgatcagggaaggggtctctggggagagagcctgtgaggagaaacacactgacatttgcccacagcataatgagtggttatgactcataggcttgtctcttgcatgcctgcgcttctcctcctccatttgagttgtgtgcttagtgagggtccattgtgtttttttcta

SEQ ID NO: 54958 - DNA, 1036 bp, Homo sapiens
ctgtagagcagcgcggatgacagtggaacagcgggtcaggcggtgggcgcctgagcgaggggctagagcgggatgggcgggcggagcaagcctgccagcctgggcggggcctcggcacaggagctggctgcgggagcccgccgtcctgagtcgcaggccgaggagacagtgagtgcgcgccctgagtcgcaggccgaggagacagtgagtgcgcgccctgagtcgcaggccgaggagacagtgagtgcgcgccctgggcgccccgccccagcccccagccccttccctgggcccccgcaaggcgggaacgcgagcgcctcccccgagctgtgtctcgagacctttgtcctcccctcacccctcggcccgctgcctgccctttactggccccctccctcatgcccgtccctcagcaccctctcctttcaactaactttcccgctcccgacagtggctgcacttcgtgacgctgagatacagaaggacgtgcaggtgagagctgtagggcctggaatggcccaagtggagcctaggctaatggaagtctggcctggcccgcaccctgtcccccgggactcctggagtcggggtagggcagggtctaggcttcgacctttccagggaactgaggtcggccaagtggaggtggaggtggtgacggagccctcgcgctgcagtcacagctcttctccctctctacccctcactccactgtgggacgctgggtcagacctactacgggcaggtgctgaagagatcggcagacctccagaccaacggctgtgtcaccacagccaggccggtccccaagcacatccgggaagccttgcaaaatgtacacgaagaagtagccctaaggtagagtgccctgtgctgtccccaggaagaccccaaacagcagttttcccaaaagataatgatgcaggtcactagggaattaacccgtagccaccaacccatcagcttgccttgtctattgtaaaaatcctaaatctcagcacccatcatcttactgctctaagaacctccgatgagt

SEQ ID NO: 54959 - DNA, 3554 bp, Homo sapiens
tctatctatctatatatctactattcttctaggcccctgtgatacagcagtgaacaaacagacacactttctgccctcagggagcttaagttctagtggaagaagacagataacaaaccaaatcaataatttacatagtgtattagaaagtgatctttgctttcaagaaaaataaagtagacgcggcatagagggagtgttttccgcaagtttaaaatcagatggcttttgagcaaagcactaaaggaggtgaacaacaaggctatgctgacatctgggggaagaaagtcccaagcccaggaaacaaacagtaagtgcaaaggctcgcaagggaaaatccctggagtgatggagaaacagtttggagagaaattaatttggcttattatcagtctccttccactaggagagcagcaggtaatgaggtccgagaagtaacgggaggtagcagaccttcgagcctagtaggatgttgtaggtcctttggctttctctaggatgagatgggaagccaatggaggcgtttcagccaagggagcaacagaatctcatggacaagatcacttgctgctgggttgagaagggaaaggaacaggtatcgaagaggaaagatcagttaggaggccactgcaatcattccagaaattactcataccagaaattaatcagagacgtttgatgcatttacaaaagcggtggtaggggggcgcgggatgtgcttgtagaatacaaaagaggtagagaaacattaaacattttgaatgttttaagtttcttttttttctttttttttttttgatacggagtctccctgtgtcacccaggctggagtgcagtggcgcgatctcggctcactgcaagctccgcctcccgggttcacgccattctcctgcctcagcctctccgagtagctgggactacaggcgcccgccaccatgcccggttaattttttgtatttttagtagagacggggtttcaccgtggtctacgatctcctgacctcatgctccgcccgcctcggcctcccaaagtactgggattacaagcgtgagccaccaacgcccggcctgaatgttttaagtttcaaggaaaagaccaatttggcagctactctgctacctcgtcacctccaggtgacgttgggagtactggggagctaggtttccagaactttttgctcttgagtgacctaagaccctagcagagtttggtcagtgtgattaagaatgagcctctgtgggtctgtttaggatgcttgccccctcccatttccttaacttgcctgaattcctgctgggaatacagattcggggcccttcccactctgtaaatatgggaaaaggtctaggaagtatatactcctagcaataatatgtaggggttctatgactaggaaatttggggaactgtccccctgaccgctccatccgtaacttctgcacaccttttggggtacgccgccgacctggaaagcgttgcagggcgctcatgctgcccgcaggtggcgccacgtgatcgcgagccgcagagagcccgtaccctaggagtctcgaggcgcgaggactgctggtccgcagctgtgccggggccaccgacgccgcttaccccggcggagcgccgcgcaggtggagttggggacagcggccggtgccccggctttttaggctgtgtgcatcccaagccgcctctagttggcttctcgggcttccggggcaggagggcgcgcggctttgtgcctacgaattgagaactggagagccagtaaccggtgcaccgggaacctgccgccttgcgccgcagggctttagtccaaacctggccggtccaggctccgggatctactacaggggcccctggggagcgcgggccccagggacggctccttcccattggcagcaggacggatgccacgcccctttttcttcagctctcatctttgactggctctcgagtcccagatggccacgccccctcccctcgcacatacacaagagtcacgcgcctttcagttggaaacttggcgtgcagacggggacggtggctctcgtcgccccacccacttaccttgccattggtccgcggagcggcacacggtcacgcccccattccagccccctggctgggagggcgggcacccgcttgtgattggctggtcggcctgcctctcgcgggagcagccggcgctcctctccctccctctttccctcccgcgagcctcggggttcctcagctggctgaggtggagtcagtgtcagtcagggaggcgaactgctgagcactggccgcggacgctccgttgcagtctcgcccaggggccggtacctgcgctcgcgccgccgggttgaaaggatgaagccgcagctggagcagccaccctatgattggctgtggcgcttgtgaacccaaagtaaagatggcgggcgggcaggcagccgccgcactgcccacttggaagatggcggcgcgccgcagcctcagcgctcgcggccgggggatcctgcaggcggctgcggggcggctgctgccgctgctcctgctgagctgctgctgcggtgcgggcggctgcgcagcggtgggcgagaatgaggagacggtgatcatcgggctgcgactggaggacacgaacgacgtgtcgttcatggaagggggggcgctgcgggtgagcgaacggacccgggtcaagctgcgggtgtacgggcagaacatcaataacgagacgtggtcccgcatcgccttcaccgagcacgagcggcggcgccacagcccgggggagcgcgggctggggggccccgcgccgccagagccggacagcggcccccagcgatgcggcatccgcacctcagacatcatcatcttgccccacatcattctcaaccgccgcacctcgggcatcatcgagatcgagatcaaaccgctacgcaagatggagaagagcaagtcctattacctgtgcacgtcgctctccacgcccgccctgggcgccggcggctcggggtccacgggtggcgccgtcgggggcaagggtggctcgggggtggccgggctcccgccgcccccgtgggccgagaccacctggatttaccacgacggcgaggacaccaagatgatcgtaggcgaagagaagaagttcctgctgcccttctggctgcaggtgatcttcatttcgctgctgctgtgcctgtcgggcatgttcagcggcctcaacctggggctcatggccctggacccgatggagctgcgcatcgtgcagaactgcggcacggagaaggagaagaattacgccaagcgcatcgagccggtgcgcaggcagggcaactacctgctgtgctcactgctgctgggcaacgtgctggtcaacaccacgctcaccatcctgctcgacgacatcgccggctcgggcctcgtggccgtggtagtctccaccatcggtatcgtcatcttcggagagatcgtgccccaggccatctgctcccggcatggcctggctgtgggggccaacaccatcttcctcaccaagtttttcatgatgatgaccttccccgcttcctacccg

SEQ ID NO: 54960 - DNA, 945 bp, Homo sapiens
tgcagctgccctagagcatccagggacctcagctcatcatttgctaactttaccaaatgatgggttaaaattctcttccttggtaaaattctgcccacaccctatcttttgggcacttaattatacctaaaaatagcattgagaaaagcagctatttcatccacaattagagaatattcttgagtccagcatcaaagccattatggtgctttgatcaataagtttgttctccacggaagtgaggcttaatggcttaggtgaccgactaactttctccttagttgctctagaagtcacctgtgaatgagccctttcaaagggaatgattttgacttctgaaaacttaagcagattagaagccttgagtataggatttagaataagaagtactcagtagtaaccctggttgtctaactacacaggcttgtatgatttgaacttttgttgttgttgctcttctggtttccttaaacaccagacagatccgattacaattctaaatatttagttctgtgcaaacaggaacagctcaacagttcaccttcactgagtaacgtatgtctatttagataagcaaactactgttgcaaaaaccctggcaaaatgtcaggatgagcaggggaaactttcattatcttttcagccatccgaacagttccccaagaatcggacatttttgagacttaactagtcaaggttaaattactcattgttcagtgagtaaattctgtctaaagacttagctggggtcgtctttattttatttttttcattcttctttttttttggaggttacttcaacaaataaagttttatttttatttaggctttccttgtattttagggaagagaaaatatttgctttatgttcttaaagtgagtttaaaaaaaaaatggtacatttaaagatagtttggggacgggcatggtgactcatgcctgtaa

SEQ ID NO: 54961 - DNA, 1173 bp, Homo sapiens
ggcaaggcgggagagaaggcagtgcttgggagaaaagtgagcccccgtgattgtcccagctgaccgactggagatcacagggcaaggagggacaggctaaatggagccccacagcctccctgacgaaggagacagagtggagaatgtaaggaaaccaaagagagtagaattcccagaaccttggaagaatgcactgcacacctcccagagaaatgcggcgcattcctgagtcttcagcagagtcccgtcgaatgtgtgtgtgtgaggagaccaccaaggctgctgaaaaataagggatggccttggagtcccgggcttcttgtggtgagtcgatgaaattagtcctgatggtgctaagacagacaataatggagaggctgtgagtattgaggggcagggggaggagtggtcttacccgaaacgccagagttctggcgctttcgctcgattttgacaatgagtgagacctgtagggtgatagtcttgctcccacagttccctcttgacttctgctgcttcccttgactcctgctgtaggaaacagagtcctgccgagagttggacttcattgttaatcatccgggttaaagggcaacattgtcggtgttctcctttttctatggactctttcccccagaatacaactctatggtttcaaaacaggagtcattgaacaaaatattttctagcaaatttttgagaaaatactggttcctagaggtaagaattacttctgccgtgtatgtgtgaatatatatgtgtgtatgtatatgtagtaatcttagccaaagatagttgcctatggttagatcaattcctggtaaagaaggttttgaaggccaaattagaattctttaaggtcagagagagttctgttcatctttgatgaatgtgtttaagtgagacgtggcattctgagtgagtgaaagcgtcataggaatttcatcatgggactgaagcagccacaattctgacttcttatataaacagacctgtgaaactgcagtttctaccgcgtcagctgggcgtgctgatttggaactttttcttagggtttgtagttgttgagatgaccttttagattttggatcaggttaggaaatgatagtaatagaaggttcttagtaagttagtcattatttcatatgccaagcattgtgctgagtattttat

SEQ ID NO: 54962 - DNA, 854 bp, Homo sapiens
caagtattgtataatttcacttttatgaaatacctataacagacaaattcatagagacaaaataaattagaggttactagcaactgaggggtggagggaatggggagttattgcttaatgggtatggagtttctgtttgggatgatgaaaaagttctggaaatggatagtggtgagcattgtgcaactttgtgaatgtgcttaatgccattgaattgtatacttgaaaatggtttaaaatggtaatattatattctatatattttaccataaatttttttaatgctggacttgagatgcctgtagtgacaatacaccaatactgcataatatttcttgctttaaatagtttttctcactcatttaagcacctccaatgccagtaagtttggtgaggatatacaattgctgacagaaacatgatgagggccctggactctagtccaagtaaacacaccatccaaaaaatgttcacttaaatgtcaagtgagttgagtccattccaataacaataaaacaagatcagagtgcatctactatgttcgagaggacagggatcaaaggtcctgagatgcctctgctagtagcaagataatgctctgatttactgacatcacaggctagtttctcttaatttcttccccggtactcttaacagctttattcatcacctctcccacacttgaggtttgttaatgccaagtgcttaggtttgggataactccccagaggctaatgatatggcctagaaaggaggggagggcagaaaaattcaaaagagagggacctaaaatgtatttccaatccccctaagattttttaattgagaaaaaaatgcactatttaattttagaa

SEQ ID NO: 54963 - DNA, 527 bp, Homo sapiens
taacatgaacatgcaatttattaaatttgaaattttgtaaatagcaatcttaatggctttaacttgtaattcaaagcagtattacctcatctgtcactggttgccgttttgaaaagtgtaaaactatctgagtcaactagttcttgaagtcacataacaaaattcttcgtaaggtccctagtatagtttttttgtgacttaacttcaagaagtttaacctgaatcaggcccctcaaaagcatgtatcttccgagacagtgctggagaaaacacctctgtgtttaatttaacttgtcattggatatcactgttgctccacacaaatccatttggaatagaatttctttggcaatggtgaactttatctgtaactcctccccttgcctaggagtcacaatttcctggccaagtgcccaatgacagttagtgcaacaacaaatgagactaaggattcaagtataaaatcttcttgggcatctgttttccttatgggcttgcataattacacattgaaaatttgctacaat

SEQ ID NO: 54964 - DNA, 1675 bp, Homo sapiens
actctcagctcacacctattttttttctcttttcgaacttcaccctttcaggcctggatgtcttcatctggataaattctaaccgttgttgaaaagccatgtggtaaatatttttgaaacctaaagccttctctacgcaataacactaagttttcatggtaaatgacacagtttcaatattctccctttcacattatggtcagtagtttgcattcgttgcttgaagaggcgaaatgaatagtctacagacactgggaaccaagtacagctcaatcctgaagaactcatcggcccctggacgggcgcgcacacacccccctgtaatggtgactagtcatttcggggcgctgtacttcagagcacgacccccctcaaacatcaaggccctaaaggtgaaagcccaggaaaacgtcgattcggacagcagcctctacctgctgcttttagaagctgtggcctgccggagtcaaacccccaaaacgtttttcttaaactaagggttcaggcctcagatcggcatctcgccctctccgatttcaggagccccgaaaaaaggagaagaataggccgccactgaacggctcagccccctgaccaggagctgtccggatgttttttgtggcggcttgcaattcgctgtgacctttccaggaagtgttgcacacgggcgtgtggcaaacgagctggccgtttctcgcggtcctgctaaaacgctgtcaacctggcgctccaccagaggccccttggcttctcgggaggcgaccgaggagctctgggggcggggaggcttttacaagaagcgaaaagacggcctcaggggtggccgggaacagcctggaatcagctggaggacgtcagcaggactgaggaaagggctaccaccagcgtgaggaaaggggggaagagggcggaacgcggcgaacggccgcgctgggaggctgaggcggggtcccagcgagccggcggctgggaaacaatggcgcgagcgtgacgtgggccggaggcgtcgcggcggcgcggaggaaggggctgccgtggggcgggggccgcaccgagggagttgggaggcgtgcggcgtccgcgagcgcgctggcggggactcggcctaaggagaggggccttggggccatggtccctgggggccgggggcgggggcaggcggcggccgctaccctggggtcgcgtgttcggccgcgcacctccccacctagctccccgttcgcccgctccttccccgcccgcccacggggcccgccgcactcaccggctccagcgcaccgcaacaatcccagcgcgcaactgccgcagccgcctcaacgcgcgccctccccgcccccgccgcccggcaccgccccgcgccgcccctctgctcgcgcccggccagggaccggcgcgctgttccgtcccccagctccgccgcagagttcggcgaagccgacgctccctgaccgcgctgcgtctgtctgtcccgcgggtctggagatcttcaaacgatggaacaccggctttgcccttctgagggtctccatcccttggcattctgcctgcgcccctcagcctggccctgggctaacctctccactgtgtctcattcagaagaagcttttccttgggaggagagggcatcctttttcccagtcacagaatgttttggtctaatggacctcaaggcccc

SEQ ID NO: 54965 - DNA, 789 bp, Homo sapiens
taggtttatgaaagatttttaaaacaggtctgtaaagctacatgcccaaaatatatcagaagttctctctaagctagggataaaggaccattattttattgagagaatgttcaaagggagtattggctttccttttaatgttttggaagataagtgtaatcatgtattgcttttataacaaaaaattaattcttttaaatgcaaaaggatagaacaattttgcctcatgactttcaagggtaagaaaagccatgccaactcatgaaacaaccttctaacaaagggctgggaggctgaggaaccataaagagcttgcttgaggtctctaacctgacattagctgaagagcctgggcactgcttggcaaaagaggccaccccactgtggccttggatggcctctcatcaacttcctgccaggcactcatgtgactgtcctatccaatctgacctacactgttttccccagaatacccagaaactctgagtcacccagaatatcagcagcattcacaagccactcatcagtttttctgcttcttggtagaagctctcctcaaaactacgcattgagtgcctactatgtgcctaacactgacggatacagacatgagttgctgccctcatggagactgctgactacttggaagatgaacgctaaataaacaaaaagttgctttactacaattttgataagtgctatgcaggaaaagtaaaagatgctatgagggagaacaaaatggagtttagagttaggatcgggtgagggtcaggaaacagttccctgagg

SEQ ID NO: 54966 - DNA, 1204 bp, Homo sapiens
ttaatgcactgtgacttttggcaaggcccttaaccattcagacttggtttgcttatccacaaagtagaggcagtaatatctgctctgcatttctcaagattatgcggagactcaagtaatggctgtgaatgtggttttaaagcacagtacagtgataagggaatgaatatttgtaaatctcagcccctaccctgttctagtcagggccccaggtgcccccactacgattatagcaaggggccaggcacaatggctcacgcctgtaatcccagcactttgggaggccaaggtgggaggatcacttgaggccaggatttccagctagcctgggcaacatagtgagacccccattggtacaaacattaaaaaaagaaaaaagattagccaggcgtggtagcacgtatatgtaggtctagctgctcaggaggctgaaggaggagttcaaggtttcagtgagctatgattgcaccactgtattccagcctgggcgacagagcaggactctgtcccttggggaaaaaaaaaaggattataccgattaccaaggactctttcctcctccctttcctttaaccataatacagaactccagggtatctagactcccaggccttgggttagagctgtagagtagggaagaaccattgttttctctttctcagagcactggtccccaggtttctcctggatgaagtgagctgctaaatttaaacactcaggaatccacaaatactcttggaattccagcttagtgagcttgttcaataatgcttcctgttaaactaacaaagggtgatagcagaagaatgcccagagacattccattcccctgcgtccacggaattctgcagctcaactttctagtgtgttacattagaaagaaactttagattggtgtttctcaattctggctgaacattagaatcaccaggggagcctctgcaaaatgcccatgcccaagttgtacctcacaccaattaagtcagaatttttagcagagggacccagatattagcttttttttttttttttttttgagacagagtcttgctctgtcacccaggctggagtacagaggcacgatttctgctcactgcaacctccacctctgggttcaaccaattcccctgcctcagcctcccaagtagctgggactacaggcgcccaccaccatactcggataattttttgtatttttcgtagt

SEQ ID NO: 54967 - DNA, 768 bp, Homo sapiens
aaggattcagagatcaaaccacaacaaggaccctgatgctaatacccactcatgagctaggggctgcaggacatgccccagctcctaggagacaagtaccctgctgagcagacaaatagcctggactttgtaacagccaaagtggcccacatggcactcgcggggctgtgcagcatccaggcaggggacactgcctggcattctaaaggcctgtgctgagtcatctttcacaggaaccagcttctcaagtctctgggatcctgttttacaggctgttactaaccttcccttggcttccaggccaaggaagaagaaagaataaatattaaccaaaggtacggctgtggcagggtgcccagggcccctccctttccttctctccccgtaccccctgccctagaagctacaataaactgctgatctcccggtttcatgatcatcttggctgatcctgcagaaaagggacagaggtgagcacctctcagagcagccctgaggctggagaggacttggtggtaacctgctgtttttctgggaggggccctagagctggctaaggagaactcacatgactgcctgggcctgacttccagggaggggctctcaccacaccagactgtttctcagggtaatttcccagttgactggcacaaaggggtgactgcataacactattccctttcttgggtttcgatttcctcctctgtaagatgatgaagttggactccaagaaccgcacctcgtcctatcattccatgagctcagctg

SEQ ID NO: 54968 - DNA, 630 bp, Homo sapiens
tctcttgaacccaggagttcgagaacagcctgggaacatagggagccctcctcgctacaaaaaaaaaaaaaaatgtttaattagcccggcgtggtggcgcgtgcctgtagtcccagctactccggaggctgaggcgggaggatcgcctgaggccaggagttggaggctgcagtgagccatggtcgcgccactgcactccagcctgggagaccctgtctcaaaataattataattattaacagaacgaatgagttggactcgcagagcctaagtgacctgcaagaacttcacaaaataagcgggtaaagacccaggccgggccggaggcctgtcggcgccacacgcctaggcagccggggcagaggtcgggggaggtccgctccagtgctccgcgcggcggcggcgcactaggatcgggccggcgcccggcagacgagggccagctacgtccctgacgccgcttgggcccagcggggtcgcgcgggggctctaaatacctcctcctcgtcctccgagtcctgccggcctccctccagcctcaacgagaagtgactcatgtcctcctcctcctcctcttcttcctcctccagctcctcttcttcttccaactcctcgtcctcgtcctcgaag

SEQ ID NO: 54969 - DNA, 1297 bp, Homo sapiens
atattacctcataagattatttaattgtagcagggcgtggtggcgcatgcctgtaatcctagctactggggaggctgaggcaggagaatcgcttaacagcctgggcgacaagagcgaaactccgtctcaaaaaaaaaaaaaagaaaaaagaaaaagattattgaattgaaggagatcacataatgtaaaacatctatcataatgcctaaatatagctggcctgcaataaatggcaattattctcaggcaaatgtaataggtggtcaccaatgcccacttcctgcctttctttcgctcggttttgaaagttgctctctttcctattccgtttctccttccttttcgctcctcctactgccgtaaatggcctactagagttgtcgtgaaatgctcctccccgccctccatgtggcgaaaatgcaatcacgcttgacggcgcgaggtggctcagccgcaagatggcggcgctggcggaggagcagacggaggtggcggtcaagctagagcctgagggaccgccaacgctgctacctccgcaggcgggggacggcgcaggcgagggtagcggcggcactaccaacaacggccccaacggcggcggcgggaacgttgcggcgtcgtcgtccactggcggggatggcgggacccccaagcccacggtggctgtctccgccgctgccccggcgggggcggccccggtgcccgccgctgctccggacgccggcgctccgcatgaccgacagactctactggccgtgctgcagttcctacggcagagcaaactccgcgaggccgaagaggcgctgcgccgtgaggccgggctgctggaggaggcagtggcgggctccggagccccgggagaggtggacagcgccggcgctgaggtgaccagcgcgcttctcagccgggtgaccgcctcggcccctggccctgcggcccccgaccctccgggcactggcgcttcgggggccacggtcgtctcaggttcagcctcaggtcctgcggctccgggtaaaggtgagccgtggggtcccgggtaggtacggccgccgcgaaggggagcaagccggtaaggcaggggctggcaggcctgcacctctgcgggcttgttttgaatttcctgggcccgcctctagggccacatgcccgcccctttctctagtgcgcgggctgcgcagtcaaacccccttccgagctgtcagttccagtgagaagctgaggagagctgttgagcagagggatgtatggggaaggtgagcgcggagaggcgggatcttcacgctcttggtccctttcc

SEQ ID NO: 54970 - DNA, 2098 bp, Homo sapiens
gttctcctgcctcagcctcccgagtagctggaactacaggcgcgcgccaccacgcccggctaatttttgtattgttggtagggacggggtttcaccatactactcaggctggtctcgaactctggacctcaggtgatctacccgcctcggcctcccaaagtgctgggattacaggcgtgagccaccgcgcccggccactaactgctcttaaatgtaactaatccttccgtgcctctctccacctgtgagatgggcactttattaaaggtccaaagtgaccagtagctcttgttactttctctgttcctcgatattgctattttcctttctaacttaacacctacctggaatggtgagatcacgaggtaaggaaggcaaagatgagtgagaaccactcaggtaacagaagcagcctcttgcattcacggagtttacagctctctgttctggttacctcctaggaaaggccttcccactgatcgtctatagactgaaatctaacccttttacagcgggcctggcgaactgtaggggccgggccacattcactcgctttgaaaaaggctgcagcgcacctaaaggaggcccggctggccagcttcctaaagcacagctcggtgggaacaaacagctatggacatacagaagaaaagaggttaattcggccggtgatggggatcagaagccctagtcctcgtccaatattacgtcactgggtgacctcgagggacgcttcgcggagggcctcatttttctccactggcgaatgcaatctaagggtcttcggaaactgtgggagcccttgggcgcacctatccgcctcacctcgaggcttctcacccgctggccgcccccttgcgcccctcgttttttctagctcctttcccattccccaccgtttctctcctccaaagctaagaactcgagttgctcctcggccagaaacggcgggcggtcctgcaacgtgcaggcgccaggtccaagcccggactcccctcttcacccacctgccaaagccgcaaattccgcagctggtgtccttcaacgaatgtaaccacctctcggcccggccggaagaagccacctcccccgcacgcgtttagccggcccccgcgattcggcctaatgcgacgattggctatggctccaaatcccgcccttccgattcctgtctctaggtcacctccgcaacacagcaacggaagtagggtgttgagcccgcccacacttccggaagaattgcactggactgtgggtatcctggtctccgcgtgtgtgagtaccgcggcgcgaggttagtggtagctgggtgcagacgccgtggcgctggtgagtaaaggcagaggcgaaaaaggaggaaacctcatggctgtcaggtctgtcccaggcctggttccctgccaggcacacgctagatgagtgtggttcggccaccttagccccgcttcgaagccggctctgttgtagcagcccctgtaaccccaggctttgtgttcggaaagtagcctaagtatcttctgtgcccctggatcgccttacttttcagagcctcagtttccccttgcttgaaaggaaattaagggtgaaattatcagcaaactagaccccccaaactttcctgtttctatgaatcatatacccatccctgattccatatccttggccccacccggtcatcacttctttagtctaaagcccttgtagagtcttattaccaagtgtctgtcagaactaacctctcctgtcttctgttttcacttatacccagttctggttctcatggtttctctgctgtactgcatttgaatcctttttttttttttttttttctgtcactgagataacaggaaacagtgcatttgaatccttctaccgaatttacttgccttcaatactgtctctcttcatgtccaatctatagcctgcagtatatttttcttgcttactgttctctcgctttccctgcttaagtctctgacttgccaaagcaaactacccatatctaattcaaggtcttccacaaaaaagcccaacttctcctttaatttttttgagacagagtctcactttgtctcccaggttggagtgcggcggcatg

SEQ ID NO: 54971 - DNA, 405 bp, Homo sapiens
cttaaagggctatgtcataaatactttaggctgtgggccctgtggtctctgtcctaattgttcaacgctgctgttatggcatgaaagcagccatagacagtacgtaaatgaacagatggctgtattccaatacaacttctatttacaaaaacaggcactaggcacagttgactgacctgtgttctggactttccctgaccttgctgaaattctgtgatgataaagagcagttttttagtgtgaagaattacttaaccaggcaatcaaagtactgtttttatggtacatgataagtgttgagtcctctctatgggctgtaaggtctcattggctcagacctgttgtccctggcttatcctcaatcacttggtactttgcagctcagccatctctctgattctaaga

SEQ ID NO: 54972 - DNA, 954 bp, Homo sapiens
gggagaaaatgcacgtgccccctcgcgtgcgtgtgcacaccctttggctgccatagtacagaagtggctcagggaagctcaagactatgtctcagctgttccttctccagaaatttaatctgtgatgcatttggctgcacaaagcccattccaaaggtgttcaggagtccacgatccctgtgatcatcattacaaacccaaagacgtttgtagccagtgacccatttggctgcggggaagagctggctgaaggcttgccaacatggtcaaattcccctcgcctgctccctctgagctgaaactggcccgttttcaggtccctaggggtaagatggaatcttaggagctccagaactgcagagataaagtgggcttcttgcccagcttggtaacagcacagtcgtcaggggaatggggaagcttggtatctggaaagcaaccatggccactgtctccactcctaatcacccctccatgctgtggatgagcaaagccggtgctcagagaggtgaagtggcttgcctgaggtcacttggctgtttggtggctgagcttagagtctgggttgaccaagctcctcttacgcaaagcctggccttcctccctcgatggcacgccactgctctgcccattaacatgacactctgagcaccatgccaagtggctattccttgacccaatgcctcgagcaagaagtgagtgtctagaactggcagaaagccccaccagtgcacagaaaggtcatttggccaaaccaggcatgggagactcaagtagccagtgcttcaggtgctggcttgcagtctcaagcgcaagaccccaagccttgtatccttgccaacctgtatgctacccctgatcgcagcagctcaagatgctgctgtaatcaaaagatggtgagcacgctgagcagagagaaggctggggcctgtgagaatgccgcttaaaagtaca

SEQ ID NO: 54973 - DNA, 1621 bp, Homo sapiens
tatagactgcatggttttatatcttgtaaaacataaaatactgtgattcagaaagagatcacctttaaaaaagtccaaaatccccccctcttagctagcacgagcaggcatctctccaggtggccttgacctccccaataaccctcctggcaggagtgtggaagaacagaacatgcaggcttctggccactgtccttagagctttccaggacatggggatcccagggcaacctgtggcactgccaacgggccccgtcacaagaggagagagggatctgctatcgcacaccagtctcaaaacccacccacagttcacttgctttatggacagtccttggcaaacttactctgagtttggcctttgctcatttcccatggtgctcctgggccacttccccacaatccgatccaataaaaactcaggggaggcaaacgaactttagccggagcctgagagatgcccagctaagaaggggagtgtggagctggggctaagacagttggatgaaacaaaaccaatgataatcatgcacggcatatttcagagggaaatgaactcgggggttctatgagccagaagcttccgtcagtttcctgggattccacagctcagctcccaggatggggagtcctgctgagccctggctcccccagactttgcaggccatctgggtgaactgggtcaccacagctacacccccacaatgaggccaggattctaggtcagcactggaaacccagaggatgaggttatggaatctgaaaagatgctgagagggatgagggcagctatcccccactcccaccggaacaattacagaaaacccaactgctgaagggtgtaatatcacatggccacaggataagctggggagagaatgaggaaggggcaatttcccaacccaaattccccaaggtcctgaaaaattatactccccagaaagtgtttgctttacactttgctgaaatctgttacgtaacagtggagaaaatgtgtggggtgatcttttccctgcacttcagccggggaggggggtgagagacctgtcatttccactgaggacaaaggcagtgtctgtgtgttgggggcaggcagaggatctccagggttgcccactcacaggacacctgtgcaaaggtacacctgagtcagaggaggcaagtcacctctgtcagctccgctgcggggcttcgagtaggcaggcagtgacagctgtacctagaataatactccttggcccggcacccgtctctgcccttgctcactcctgccctcccagaaccagcgggccttctgctgttccctgcattcaccaaggcccacctgtccccagctttaacaacacctcagtggtgtctttcctgaccacacccctgccccctccctgctgctgacgtctccacagcgcctgcttgtttcctgacttgtacttgtcaacacctagaattacttccttggtttacttgtcacatgtctcttcgcaatatttgagccccatgagggctttgttggcctctgtcacttctggatcccagcctgacacttagtcagctcgtacagatttactgatgaccgaccgaccagccatcggaagaccagcttcacaggccccttggtgtt

SEQ ID NO: 54974 - DNA, 3054 bp, Homo sapiens
tccctagccagaagttctgagaagaaccaaccacctttcctgatgcaagctctacaacaaacatctccctcgcctgaggtctcccatgtcaccattagagatccattgctttgggtcttcaggtactgggggtttccagagccagacccccatgacattgctagcttactttgcgggcagggacgtggcaccatgagcatgacaaaggctgaggacaaagctgcccagggaggagcccagtgtgggcacctgggacgaaaggttgaggcctcacagcagggacatggctctgccagggaggactgtcactgctgaccaccttggtgatgactccaggcacaagggcagacacagtctgacctgagaggggagcaggcacttcgaagacctcagagcaggagggccacaagtcagaccctatacgcatatcacagccctgttctctggagccactggtggcaggagcctgcacccacctcccccaggaggcccactgggatttccttagcatctccacagctcctggccaccaggaggcacagggttctgctttggatctcaggagactcccttccccgcaacctccctgtgtctcgattcctgtctctacggagcaggcactgctgtcctatgctttgcctttcctttccgggtttaaacactggcaaggcatagagtgggactaggagaggagaacaggctcctcccctctggaagtatccaccaaacaccactcagagaggctctgagcacaggggccttccctgcagcaaaccgaaactgaaacaaaacaccccagaaacccatgcaagccctgggaggctgtgggctgatggatgtcctgggctcgagtcccagccctggccctgttgggggccgaacaagcctggactgacaggcttgggctctcctctcttcacctgccatgactcctgctgccagggacaccaaggtacctttgccccctccgtggcaccctgagaaccagctgccccgggcagctgtcagtacggcccctgtcagtgccggaccttgcctggcccaggcctggctgcatccccctcactgcgcttgctttccaggtcctggggcctccagctcggcagggggcagtcagatccccaaccagaccccaaccaacgcccgcaggcctggcccttccacaaacttgccagcgacccggggaccctggaccccatggtgacagcagggcctgccttccccaccagctggctgggctgtcctgcctggaccctggaccctggctcagaacgtggttgttgctgggcatccctgagctgagagcaccctgccccacgggcctccgagggcacggggaccccagcagggctggccatttattcccgcgctgtgcctgaaacgtgcaattaacacaggctggttaattaccccgagcaaggagacattcttccaccaccaggcaaactgctggcctgcagcccaaaccaacagggggaaacttcagccgcctcggccctctctctgccagatggaaataacgtatagctgcagcggtgggggaggagggaggaacaaaaaccagctcggcccgggggccagaccggaaccccagtggacggccattggccagggcactcaccgctctcgttcttctcgatgacatccaccacctccccggcctggaggctcagctccgagttctcctgcttcttatagttggacaccaccacgtactgttccaggatcatgggctcggcggtggcgtcggcacctggcgagggcagaaagcacgcggtgagccagcggccagccatggccccgcggccagggcgccccctgtccatcggcctcctcgggggtggctgctctgtcgccagcgccgctcccaggggcagcccgcagccggggctcgcagctcacagggcgccaaggacaggccatatagcaaggccccagaccggcccgctgcaccgcggggtccgggggacatggggagccagggggccggggaggggacgggcaggaggaggaggaaagagagaggcagagcggaggcggaggccaaggaagctcagaaagaagccttgtgctgcgatgagttagtcacagcccggcatgagggagcctgcggggaggcctggggccgacggggtctctccggcctccctctcgggccggcaggggcatcggggagggcggcgagccagcgggtgggcggcccatgagggctgaggccagaggcaaaggaaaggcaagcaggaggctccagcctctgcccccaacccctgcaaacccgagagaaaaggcagccctgctccctcgggcgggagagggagaggagagagcgggagagagcttctccacggcccaggcccaggcgaggagtcaagagggtttgaggccgccaatcactggggtttactcgcaacccttaaatagaaacacatgagacccgtcgaatgaggagccgggggtggaggcaggggagggggaggaggcctagactgtttacttgaaacccaagaagaaagtccccgcgccagcggctggcgagcccagcccgccccccgccaacttttcctcaagttcgctccgttcctgcccctcgggctcacccaggcgctgccaccgagcccaggccgggtacagtcggaccagcctcaggcctgcccccagccctgcttccagagagggccctctggctgcagagactgactcagtttctctctgcctttcagtgccggggcttgtggtcaggccccggcagtttgaggggcttgaggggtcaaaagctgggtgcagcagagggagggcaggtggactcccaggagcaagcagcttctctgtcctcctcagccactggaccagcacgacatttgctaagcaggcaccaggcaggaaggcagacaggctgggtgcccttttagcttcctagctgagtggcactggatgctgcttaaacctctgcacttcaactcttcccatcaccattattggcgggggggggggcggggggggataagacacttaaaatatgatgtgcttttttttttttttttttttttttgagac

SEQ ID NO: 54975 - DNA, 719 bp, Homo sapiens
gcaatgatcccataaagctccgtaagtgacatcagtacacacccacacccatatacacattcattccaaggctggttgttagtgattcaggaattataatttttccacccatcatgaggtgggctgttggggagctggaaagtgagtgtgaccccagggtggggtgcatgggtggagagtctggagagatgaataaggaatagagagaaaagcttgtcaaaataggttaagtccttcagagccaatgagcaaacctgaacaaccctcttaactctatcttccaagcggtgcaggggaaaataaagggcctctcccagttctgatcaaatattgaccctgtgcactcgctggccagagttcagactaaagcaatagcagcatggtggagtcggtgtttgcagagcaattactgtagcccagcgctttgtaggtcaggttgtgaaacaaccgtccatggagccagggcttcagagagtcttccggcccctcctcagtgggaccaggaaggagctgtgcaaggaaatagacaaaggctggaaacgtggtccagccacccgtgagaaagcaactgaaaagggcatctgccgcccctcctcccacctcaactgcacctccaagcaacccaggcccttaatcaccaaatgggcctcgacgttaggccctgtcctggtcagctttccctgggacaggtccttttcctggtcagatagggctgagtg

SEQ ID NO: 54976 - DNA, 1286 bp, Homo sapiens
gacaatgatctatctgtcaatactgaggccgcccatgaggcaggtggctagggatccttgcggggatcagcactctattttgcatagtttaaaatcaatcggatcaatttcatgaaaagttattattctctctgagcctccataccccataaaataaacacataaaatagtgttaagaatacctgcctcacagtgaagattaatgagaacgcaagaacaaccacagtgccttggacactgtaggcgcttaataaatgtgacttcccttcccctgcaaagtgcctagcacagtcttttgcacttatgaattttagtctcttcccctagaagattctggggcaccaataagtgctgggcctggcaagagcccactttgcaatcacagagttctgggcatgtcaccactgggacattctccagagtacctgagagcatgcggttggacctttgtaccttcctccttccaatcctgccaccaccctctggtcccaagtcagcttggcagagcaaacaagtctgatcacctcgagccagcaggcactccaatggagaggcccagcagtgggcagtggacatcttgggtaatgcccaggagcccagagagggcgatggtgtgcctaggctgaggtgataaggctaaccttgcaatggaaatcagggggaaaagctcaatgctcccagacattcaggagccagagtcctagaaattaaacaaatatatcctctcctgagccatcaaaaaaattacactcctgggcttccaaggggcttggaaacaacccagtgggtctaggaaagggtcagaaaatgggattctcattccacacactcccaaatcaatgactgacccaggcctactgaccccgacacacacatcctgaaaatgtgccccactccatcgtcacaccctggagagaatggcaaaggttaacacacacagcttggtttccttttcctgggaaacacagcagtcagaggccagcagccgcctccacacacagcctgcaggggaaatgacccctgggcttcctccccaccatctgacacactcacaccttcctctctgctgtgctcagcaaagctcaacttttgacacaaggcaaatagctgtcattagaaatttcgttgcttgagagagacaagaacaatcattttggagagcttttcggcaatttctgtcgccaaacttgcattccctttgactcagcaatttgaccgctaagaatttatccacacaattgtgtgtatgcatgtatgtgtgtgtatatatgtgtgtgtgtatgtat

SEQ ID NO: 54977 - DNA, 898 bp, Homo sapiens
gcagcccggccccagtggcaggggcgggccgacgagcccccacccgagcccagcgcgcagccagcggcctggcgcagcaccgggctagttcgctaggcacaaaaactcagggtggcttcggggggagagggagcggggaaagtgagccccgcgcgcccccatcctggctttccgcctcggagcggatttgtgcctttttgtccccacttttatgtccccctacaacttccacccccagatctctttaatgagaagtagtttattacccggctgttactgcccaggcccccgaggaggagatgggaatggggaaaaggccagctttaaatccttcaagccagagcctctttggacgaaccacctgaccctctgcaggtcataaagggtgaattctccccggaaaagtgatcgattcgttgcctgagtcgtccatcgatctgggcttgtgtaactaccctgtgcatcatttaccaatgacaacgttacagactctgcataacaccactgccttaagcccagggctcccctggggaccctccccaagctggcgacagggaaaggagcatacaatggtgggaaaacccacccggttggaggccagctcaccgtgagccccaggctctggcattctcacccctccctctagtctggaaaacccactttccaagccacttgtccgtggtccctggacttggagcacagttactacttaattcaatgtagcttccccccttctagttcaacatttttttcccattctgctttcaaacatttaaagggtagtgttttcacaactactccagttgttacacaatcacaataaagctttgtgactgtggaccaatgtgaaacatctgaaaagaggacaaataattttgtgacctaattgcattaatac

SEQ ID NO: 54978 - DNA, 983 bp, Homo sapiens
atattctaggtctaagctcgagttgctaccaagtgttctgtgcactctgggcactgtcaccaacccccggacttcccagtttgtgacctctcccagcagaccctgtgccttggtgcccagaggtctggctgctggaatgcccctgaatggaggcacccttgcagtgctgcacaatgtcctcagcagctacacagtaccgcctgggccgctggccttgtttcagctgcgggatgagtcagtgcgagcaggaagcacccccagcacaggcctgcggtgagtcaggggaagcagaacccagaacagcagggagcggccacctggcagatggcccaaaagccatattgtgcctgaggacagcaaggagaggggcagttctccacaagaattaaagttgcaaaagcctctctactctcaataatttcagcagtcagatgctttttattttcccaaagcccacagatgtttcatgctcctcagacactcactcagagggaaatgcttactggagaagaggcaatcatagtgccttaatctttttataatgggaaaagaggttaagtgaagctcctttagacacaggcttaatatctagcctggttctagggccaggattttaaagtcctcaaacagtctcatttatttgatctgaaaaacagaaaactaaaaatcaaatgcagttaatttttttttttttggtgggtgggggatggaagaaaggaggaggagagaaaaatcaaactgagttatatggagaccacagaacacactggagtcagtaaacagaatggacccacaaatctccatcagtggaatcttgagtaagttactaagccttagttttctcatctacaaaatggaaataatacctgtactttctgtttcaaaagactagagggagaataatatgaaattatgcatataaaagtgctttacaaactgaaagacgctattatttcgttgttggcatttggagaggaagcact

SEQ ID NO: 54979 - DNA, 1567 bp, Homo sapiens
gtggcagatgcagcccagggcatcccagggtggctagccacatacctggcacctggcgggactccttcatgtccaggatatccctgatgtagagttttgcaaaggctagaaacacaggatccaaaccccacaagagggaaggggtctcctcttcacaccggctggatccaggctgcatcaagaggcagggctgtggcttccagctaactctgaaaggttctgcatcactgagtcaagcatctagatgggacacagaaatgaggatgcaatgcgtttaacgtgggtcaaagtggcacggccctgacgctgctcccaggtgggcgtccaggactccaggaggggtgaacgcagggatccagggccctgtcaaactccatgccacggggcgtgttaagaggcgttcctcacgtcaggacgcctgcgttccttacggctctcccgctgttctccttcccacaaagcaccaacttcggaacggctaaacatcaactttcactctgggaagatacgtctgtacaggcgtagcagaaaccgcttggggtcccgggaggaacgggcgccctcgcagccctgcacgtgttggggcatagtggatgggtctgactgtcgctctgccctaaactttccgcttttggggatgagccaagaaaaggaggaaaaaagatactaaaaaatggacccacttgtagcccctcccgccgcctgcagctccaggagccctgagacctggcccttccggcgctcggagccgctggcggcgacgaccccgcccggcgcaggagcagttggctgaggtcgtctctggagttccggcctgagcccgccccctgccccgccagggaccaaccccggtctccccgccagcgcatttcctttctgctgcagcgcctcgccacggctccgccccatctctcccgaagtcccgcctcatcccacccagaccccacccatcccgccgcggccacgccccatcctgcccgaagccccgccccatcccgcccgaagccccgccccatcccgccgcggcccaaccatccgctaggccccatccagccgaagtccagcccgttccgtgccccgcctcagcgcagcgtacttttggttcaggcagcgctgcagccccgccttcgtgctagcctccaccgctgaggcctaggaggcgaccttgaaattcctgcagttctaacgccgctcttctagtcacctttcacccctcctcctgctggtggcgggaccctgaacctgggcctcctagaggttgggtcaggatcagactatttttctttttgattcctgatatgtaaaacagataaaaagtaagcagtgccacgagtgcattgtggcatattttaaatgttcatttacagttggtaagtgacctgactcacacacttaggactctagtttcacttggagatgtcaatatctaaatttgagccctcgagtgaatgtgaggtcttgactctgccagagactagccgtgcaaaatcatgacaatacattttgtctcctttacccttgttcggtctacagtctggaaggttgtacacttaagaactttgaaaag

SEQ ID NO: 54980 - DNA, 1966 bp, Homo sapiens
gcgtggtggcgggcgcctgtagtcccagctactcgggaggctgaggcaggagaatagcgtgaagccgggaggcggagcttgcggtgagcctagttcgcgccactgcactccagcctgggcgacagatcgagactccgtctcaaaaaaaaaaaaaaaaaaaaaaaaagaaagaaagaaaaaaaagagaagtggtcttaaacagtttttatgtatctgtgtctatcttgcctgcacacttaaaacaacaagagtaagaactaagattgagcgtttacgggtgcaggggccgcgcaaagggcttccatctattgtctcattcacaaccttctggtagggactattaggatcttcattttacggcgaggaaaccgaggctcggagaggtcacctgcccaaggtcacagatctctctctccaaagctcaagctcacaaccaccacacaaactcccctctcactgtacctggggcccgtctgagagcgaaaaagtccgctttcaggtcccaaccctaacaggtccggctttcactccacagtttttcccagatccagaatggagacaacatccgctagcacaatcaacagggtcgtcccacgggggccgctccatcaaggccgtggactgacaggatttggggcttggagggcaaatgagaaacaatcgtcagggaccgaagaacaaatgcgtccatcacaccagccccccgcaccccgagccccgtgctccgctcacgcgaaccctcgggggcagccagtctgagggacgtagcgcgcgtgcgcggggccagaggggacgcccccacgcgagcgcgcggtgagcagggcgcgtgaccgggcgggcgcgcagccgggaaagcgcgcgggcgcgctacggagtcggcgtcggcgcgcgctccaggccgaggctgtgtgggctggggagggagacaggcggcggcggcggcgccccagacccgaggggacgcgcgggccttgcgccgcgggagcggacggcggcggaggagaccctaggctcgcggcccgaggcgggagggctcggcttctcgactgcccgcctccgaggccgccggccgcttctctctcccagagtggccgccgcccctggagactcgccgtgacacgggcctaagccgccgccgcgggagtcctgaccgctcggacccgtcggatcaggccgggtgggagcgagcttgcgggcaggtgccgctcccggagggtgggccggaggcgaggcgcccaccgcgcggctcgcgggccgggctcggcggaggggccgctcgcgcagcacccccaccgcgggccggagcccgggtcgccgccccgccttctcccgggaccgcccggccggagctgcgggggccgagggacgccgcgcccgccgccgccagccgggctcgcgcgggagagcagggaagagaaactttgccttttattgtttttagtccttaagtgcaaggaactctgtgttgggaggaaaaatgtccttcttcaatttccgtaagatcttcaagttggggagcgagaagaagaagaagcagtacgaacacgtgaagagggacctgaaccccgaagacttttgggagattataggagaactgggcgacggagcctttgggaaagtgtacaaggtaagagggggaaaacgggaagttgtactgcgaaggtaaaacagccactggcctggagtggcgggaggacttctgctcccctggtccttatcctgtccttcttttgactgttacggttcgatgcaactttacttggctgatcatccaaggagtagctaagaagtcgggtttacggtggaacaaaatggggcctggatggagtttaaagagcgattggaaaaggagacagggttataaagtctactctttcaaacttcaaaggaaatgagagtgttctttaatttataggaggggtctggttgtgcccttcaagtattttagaatgagaaactcattgca

SEQ ID NO: 54981 - DNA, 2213 bp, Homo sapiens
tattacctggcttgtggttgccactattttcctcaaggatatatctgtagcacatgaactcatgctgagaatcaggtcttattgcctgacatactcattgacttaacattctactgattataacagtcatctaaaagtttttgaactgtcattatgccagtggtttccaatatgtgtttttgaggaccctggtgtcagcaatttgtcagaatcagatgcaaatcagaaaactcacatttggtaaaattcactttttagtggtctaggagctttgacaaatgcatatagtcatgtaaccaccaccatatttaagatatagaacagttccattgcccggtaaaattcctttatgctccattgtggtccactcccatctccagcctctggcagtatctctacagttttacctttccaaaatgtcatataagtgaaatcatacaatatctgtaaccttttgagttggcttttttgacctagcattgagattcatttatgttgttgtaagcatcacaatttatctctttttattattgagtaatattccattgtgtggaacaataatttttttatacatttatatgtttatggacatctgaattatttcccattttgtcaattatgaataaagttgttataaacattcatgtacatattttatatgaacataagttttcctttctcttgggtaaatgcctaggagtaaaatgcttgcctaggtaaatgtatatttaactttataagaaactggcaaacagttttccaaagttttataccatttgcattcctactagcagtgtataagagttctaggtgttctgcatccttgtcagcttttggcattatcagtttgttccattttagcaattctaataagtgtggagtgatattttattgtggttttcattggcatttctctagtgactaatgatgtgagtcatcttttcacatgcttatttgccattcatacatcttttttggtagtgtctgttcaaatctttgcccatttaaaaaccgggttgttttcttattattgaattttgatagttctttatatattctggatacaagtcctttatcagataggtgtttttgcaaatattttatcccagtctacagctagatgaccattttcttaacaaggtcttttggagaggaagtccaatttgtcattttttttcctactatgaatcatattattgatgtcatgtctaaggaatctttgcctaacctgcattcacaggattttttttttttttttttttgagacagagtctcactctgtcacccaagctggagtgcagtggcgcgatctcggctcgctgcaacctccctcttcctgaggttcaagcaattctcccgcctcagcctcccgagtagctgggactacaggcacgcaccaccatgcctggctaattttttctattttagtagagacagggtttcaccgtgtggcccaggctggtctcaaactcctgagacctggcaatccacatgccttgggctcccaaagtgtgaggattacaggcatgagccaccccacctggccaaggattttcttatatatttttttctcaaaattttagtattttcaggtttacatttatgcctatggacctttttgagctaatttgtgtataaagtgcaaagtgtggaccaaggttcgtttctaaaaatttaaaaattttttttagaaaatgggatattcctatgttgcccaggctgggctcaaactcctgggctcaagtgaccctctggcctcagtctctcaagcagctgggagtagaggcatatgccactgtacctggctcaagtttcatttttaaatataagactatttgttctaaaaccatgtatttaaaagattatcctttctccattgaatcgtccttccaaatttgtcaaaaatcaactactcgcataagtaaggatttatttatcaactactcacataagtaaggatttattcttacctctgttatgttccattgatctatgtgtctacctgtcaccaataccatactgccttaattgctgtaacaatatactaagtcttgaaatcagaaagtacagagcctatgaatgttttccattgcatagtggtgtacgttccggactctgaatcgagaaagtgtaaattgtccaactttggggttttggctattctagttccttcattttttcatataaatttgatttccacagaaaatcttgtt

SEQ ID NO: 54982 - DNA, 766 bp, Homo sapiens
tatattatattatacattattgcaatcatagtggttaccttcccattctgcccccaaaattgttaattttcatccattccttttagtggtggatttaggaagaaatgtgactcatttgttggccaatggtacatgaggaaaagtgttttcaggatgtttaggagaagtttattgcttctaaggagaaaaagcagaaacagccattttctttttcaggacattggtacatctgcatgtgatgtggacgtgctaatgcattacactcacaagggtatcaccacagtgaggagatgaggattgaaaacatccttgctcctcaatgacaacattgagagcctgaataaacaaccatgggactaccctacctctggattctttgtgtgtgagataataaacttccttatcatttaagccaatttgagttggtattttcagttattaaatttgaaagcatcctcactggttcataataataagtaatagtatgctccaaatatatgtaggtactgttatgaataataaacacaaattcatttaaagtgttactggagttggagtagcgccctggcattgcctaatttttcaatcaattgattacagaagtacaagttacatcaaaatatatcaagttacatgcaaaatattttgacttcacagagaggtattcacatttacaaaggctgagagtgattcaccccatatataaagactataacttcctcttgataaaggccacgtagacacccacgacttaaaagtactatga

SEQ ID NO: 54983 - DNA, 1507 bp, Homo sapiens
tagagatttgactagtttttttgtttaggaataaaaaatgttaagattctaattccttaagtgcaaagctgataaagtgtagaaaaagattttgtggacttaaggatttctttgtggtatatttaacaatatcagggttcacatagctacaataaagaagatgagtcttccaggaaacttttccaaaagcgttttgaattattcttgtttcaaaccagagcttaccatctagattttttaaaatgaatacaactgtggtctaggtacagaagcattaggaagatgggttgctattcctagcttttgttcacatattagattcactttaatgcagtaaagccagcaattgagacaaacaattaataaaaataccaattaaatttatgactatgatagcttcctgaatgtaaataaccacttgctagaatgaaacttcatttaaactgaagtaaggttcatccagaccctcagcagggtgagaccacctggaaaaactggacttgggtccaaaaacgtatgccatgtcctttaagcctttccatttgtgtctggataatgagccttcccaatctcttatcttccatacctctgaataaacatagaagacttactaggataaacacggaagaagtaacactgagccataccatgatatgagagctgcccagggttatttgacagattgactccctacagtcctcagaaatctgtcaggcttgtcaacacatagaaatgttctagattcattccttatcaagaacaagcaatagacaagttactctgagtctcagaggatttctgagaggaagatgagtcaagaattaatcatctgtggtttccaaaccttgttcaatcattaactgtgaacagcttggttttctcttcttggggatgacttgtacagagtatggctggagcagggtatgttttctatttcccatgtgttcttattccaactctttggaatatcccaatggacagtgactccaggaggtatagacgtactcttttattcatggtatatggcacaaataatacatgcagcaacaaagattttctttgtttttaaaatctgtatctgtaaagaagtgctcctctaatgtaagaggaatgaggaaaggaatgattgggctttccatagaaattgcaataaaatctaaagtatgtcttaaaaaccagggctccaaagcttcagacagtgggatgatggctagcagatcacatactcctggtcaagcatggggacgtcatggtgctctttgcagaacagcatgaaatgcagccatatttggttttgttgaatgaactaggagcaataatactagcaagaaaaatgactaaattacatgtgtatgaatctttacaaaacagatacacacacaaccttttaaaaaataaatatttgttgaatgttgaacaaacatttaaaataaatcaggctgaacatggtggttcacacttgtaatcccagcactttgagaagctaaggagggaatatcacttgaga

SEQ ID NO: 54984 - DNA, 3718 bp, Homo sapiens
taagattaaaaaataatactaaagctgagaatttaaaaattaaaatgaacattttaattatggctaaaaagtacgtgtgtttgtgcttttttgtataggtagagagagagactgagagactatttactattcttttcttgccattagacaagaataagaataaaaaaaatttttttgtaaaacctcataaagattttaggtctatatcatcatcccaccaacaataattacagacaagaacgaagcattttaccactccctgatgagtaacaaagtagccaacagtagccttgggtattgaagaaattttaaaacacaaggaaagcctgacttaagttgatattaattactattattattggagtctactgcttaaattgttctctatggcagggtaaggagtctttgcttcctggctcactgggccagtattttttcctgcctgaaaagtttcatacgaaacatacaatgtcctgtgtcagaaacaccaaagtcttcacaggctaatagatttgaagtcacttaagacattgaaatgtacgctatgctttatctaaaggtacaattaaaagtatgggggctatattccagatctctgacatgaagccgagaggaaactggatttccagtttgttatgtgaaaaggttaagtaaaatacaaacttctgtacagggagataattcagttctaataatgcatgaaagccagagatgtagatcaacaaatgcacatttctgaaatacgggtttttctgagtatatgttctgaagttctttgaaaatctggccaaacaatcccattttaagataccagttcacataataagcaagtcagaacatttgcaaggcaaaatgttgttttcctttctgcagccaggaaaaacacagctctaagcttaggttgtaacggtaaaaggatttgggagctgctgattttagagactcataaaaacaactcgcccttatgccgggaggtataaagaatatgcagagtctgcactgtgcttctagtgtcaggacaaatcattctgctttttctttgagattaactgatgccaatggatgagtaaagggagaaataaatgtacagactgagacctgcagcttggtgaggtgagtaacacctttatcacaaaatcatgagttctctcttcccctttgtaaattccttggggttaacttatgtaattttaaaaaattttaggagtgaaatatgtattattaatcatatgtgaggctctacattttctgctatttatggtttatattgtgtgggatcttacagatcacagcatctttttaaaatatatgtgcttttttggggggtgggagataaatcaaggggtgaaactgaaggtgatacattcccttaaatccattagggaatggtgaatacacttgcatatataaaataactactgagtgcttcctagatacctagctctgttccagctgcctctcaccagttctcatttaattctccaatcccatattaagaggtgaagaaactgaggcacagaatcacctcattaagaagcacataaagtatggtgccaggatttgaacctagacaatttgactgtaacgtgtacgcccctaatcattcccttaggtagtcctcaggttctgtaattattatacctgactgcttaagactcaggtaactcccttttggccacttctaagccactactgtcagatgttattaatagtaaagagacgatatcaatgtttaaaatggccattcaataagaggactgaaaacactggcccctggaaattcccaacttccacgtgactcagaagttactcaactctttcactaaacccagtgctccacccaatgtagctaactttgtcgtcgcgtagcaacagaacctcgccatactggaagcggggcgcgggggggggattttctcgactgaggatgctgctgcccggtagccagcaagggccctgtcggtctcaaacgtgaattttggaccgacacaatctcatgtagtgattgttctgcttcctgtgttgcgccacaacaaatttccttgggctacattttccctcagatttgagtaaaagatttgaggtcacgctaaggagcctgcatactgaggtacagaaacggttttttgtttacaacaacaacaaaaaacctcgcgacgggaccgccgagtttgcggcagccaaaaaagctagcgatgagctcagctaaagtgccgggactctcggatagatttctaacatgtttgaaatgtggaccccaacgctggaacccaacgctgttcttttgtggtctctggaaccaccacgctggaataggctggaacccaaccaacgctgttcttttgtggtctctgcctctggggagtccacaagctgtaaatctaacatgcagccagccgtgcggcttctggccgccccacgtctgagtaaagccttcactgtgactagcagggagaggagactgactggagccagagaatggaggcggcgggctggcgggggtggggagaggcactttcaggcgcacttcacagacgcacaaaaacaaggaagcctgaagggaaggcggttgaaaataaggcaacagaagccgcgaacggaagcgcgcccccctcaggattggtttaacattccgaagctcagcctcgcccgccccgaagacctgctgcggatcgcggccgcgcgcgcgcgcactcacgctgctctcgggcgctgggcggggagagccgcgcgcaccggttaattctgccaatcatgcgtctgggcctcccatcgtgtgggccaagccccgccccaaccacccgctggcggaggcgcgcgcgcagtcccaccgctctgagtcgctgagtgaagcggcgcctcgcgcgtcaggcaatctggccaattgcgcatcttttccgcctaccgcacggccccgcccctgccacaggatcgatttacggccgcaggtgcgcgcgcttttttgctctcgctgggaatggcggagggaggtaccctgctgaggggaaggggggatccctgacacctgggcttccccgggagtcggctgtggagtcgagttgagctccctttccgggtctggggaactcaacctcaccttatgcctggggtctccggggaactagtgggctttctgcaacggggggaaggaggggacgactcccgcccctagtttacccctcaaaagttaatgcctttgtcggaggaagcaatttcagtccactctccttttcagtccctgttggccgcttaaactaaaaggctacagacgggcttaaatgcgtctccgctgtgtttcttatgcctcgggccggcagggtaacgggttctagtcacagcttgtagagttcaggatgggtgacattcaggtcctattgtttttgagtcaaggtttcggctatagcttcttgaattatgaagctgtcataataaagaattcctgattatctaaagctgttattcttccctacttccaaggcagaatttgaatatattttggtggatgaaacgaaaacaaggagagtcttgtgactatgagatactagctggttgatgtatcatgaaaaacttagtggtccctatgtgggaaggtaaatggaaaactgcaaaaagagcaagaatgaattacaaagtgaaattagaagaaatatctggcttacttgtggatgctttgtacaccaatacaatatattatttgataaaagtcgactatagagag

SEQ ID NO: 54985 - DNA, 1015 bp, Homo sapiens
ataggaaactatacattgttcttttttaaattactagaacttatttttttagagcagttttaggattacagaaaaattgagcagaaagtagagttctccttcaccttcccctccacacacctactaccctactattaacatcttgcattagtgtggtacatttgttacaactgaagagccaatattgacatattattattgactccttagactgaattaatgtattatacatggcaactatttcattttcaacctcaggtggtgctgctgcattacctggaaaaaaagatactaaataaatactaacagtttacttagtgctgatgactcattagcaatgaatgtgttttaaaaacgtgttaaagcctggcttgcagagcttgggtggtgaaaaccaaaagatggctcctaagatctcaattgtgttggctgttttcagaagatgatattatgaagtcacaatatgagggtatcattctaaccggggggtagatttgaagatggaagtgtctggcatctccaccacagtcttcaaggacagcctctgcctcctgttcgcattgctttgcccatgaactttcaaagttacccaataacatataaatggggatttaaatcttgcaacatcatcgtatctttagtcctactgtgacacagtaaaatattctttaccatgaagtattgggttccaggtgtgataaagtcaattgcctgaaatttcccatcacaagcatctaggactttatttaaggttggctccttaccaaaagtgtagatataaacagatccctgataaacatacaaaagaaaagaaacacattgtaattgttgtgtatatagttcaacaaatatttattaaatgcctactgtaaccaaggctctatgtggaaacagaatatgggaaatcacagatcaactcagtaagaccttgaccctgaagggcttaaaatccagacacttgatttgtttgtttgtttattgattgatcggttgattcattcattcattcacttat

SEQ ID NO: 54986 - DNA, 1351 bp, Homo sapiens
aggtggagggggagggggatgtgatcagaagacccggatcactagcgggaatcctgagctagaaggaagagatgaagggtgcaggggacgttgctgggtaagagacggagggtcagggtcgcagaataaggagtgggaaagacaactggggacggggtcaaggaacaaggggatggggagcggacaggggaggtcacacggggagggaggctgagggaaggcactgggggcagaggggaagaggtcgaagctgcggggaaagccgccctaaggaaccggagggagaggagggaggaggggacttggggcaggaggttccgcgagacccagatcggtcgcggggccgtgaacaccgcacctcacggacaaggacgcgccgccggcggagtgggggccttcgtcgcgctcccggccttgcgccatgggcagtgttttcctcaggcgggagcaggcagcgcacgcagcaccccagggcgggtcggttacctttccgccgccgcggggctgcgggccgcgacgccgctgctgtgtacacccgtatcccggagaccgtaagccccgcgcccattggctctgcgctttggcccgctcccttctgagccgagcagattggtggaaggtctgccgctctcggccaatgggtgagcggcaagccaagcgaggggcgggccccttgctgttcaaagtgtggtctgtttaccagcaacattggtgctacctgggaagcttgttataaatgcagaaacttggctcccacaccagatctactcaatcagaatctgcattttaacaaatttccccaggtccgggccaataattgcaagtaagactcatgcctacaatctccgcgctttcgaaggtcagagcgggaggatcgcttgaggctaggagttgaagaccagcctggaagacatagcgaaacctgccgcgcccgtgccgcatctctacaaaaaaatttaaaaagcagccgggcatggtggtgcacgcctgtagtcccagctacttgggagactgaagtgggaggatcgcttgagcccaggagttcaaggctgcggtgagctgggatgacgccacagcactccagcctgggcgacagagcgagacctgtctctaaataaataattatttttaaaaatcaataaatttctaaacagactttcatttagagtgctgactgtgccaaacattgttgcaacgtcttcacatctcccatcagccccattttacagataagtaacgtgaggaaaagagaagcacataatttgtccatggctacaaagttgagtgggactttatttatttatattatttatttatttatttttgagatagggtctcactccgttgccca

SEQ ID NO: 54987 - DNA, 4771 bp, Homo sapiens
gcaaacaaggaaatcattgaatagtctttttcctcatctgtatgatggccctggaacccctctttcctgacccctaagttaaaagagctgtttgagaggactctctggccagacctttattcccagacccaaaactaaattcactcatgccacctgcttgattctgagcctgtgcccttattgtaactgaaatgcaggttcagttgcttcccgctttcagagtccaattattaataagaagagcaaagtctggtataaagaaagtgattttttattccaaagctagcttagggggagcaaaacaggcttcctgccttaagggtaccactttgcttctggggcagaaagcaggggcttttaaagggggcagttggtatgaactgcatgctggggagggagcgagtgggtgggggttcgcatgactcactttggtgctttatctgctgggttgtgccatcatgggcagaagtcatttgtaaagtggccttgtctcaggcatacttttggatgtaaatggactgttatctctggaggcagtctcctggggggtgagagtcctgctctggagcttttaagtaaacacccagttagataagcttgccctgtagggagtgtcaggtgaagggaaggtaaaagatgataattgcatttctaaagagctaagtaggaagtggggaacagggagaaaggaggaaacagagaagatgggagaaataaataatgtaaaaaataactcatcctctatctcttagaaaaatgggagtactgttatattaccagggctccaaaacacaaatgtttaataagtgggagagttttgaaagcagcaccattattctgaggttgataatatccaggtttgtgctgtctcctatgggttaaaatgaaaaggatgtatcctacaggtgacggtagggacagaggccctcccagtagtcacgttaagctagtactgacagaaaaaggaaaagcctgtccaggtggctgggcaaccctgcagcgaggcatagatgagcttgtaaatcaaaggaaatgaccaaggtgagtctcaatccttttagaggtttattttgccaaggttgaggacacatctgagaaaaaggaacacaaaatcacaggaacatctgtgatctgtgctctttccaaagagggcttgaggacttcaatatttaaagggaaagagcaggcagtaggggaaagtggaaagtaaaaagggaaggtagataaaaggggagagtagttgcattctttggggcctttgatcagcattcactgaatgcgcatgttacattcgtgaaaggaggtcgtagaggaatagtcagttatgcattcgtctagtgcttggtgaatctgcatttttacaagattaaatatagggtagaggaagcggtcaaattgcatttttctccagcgagaggaaggatgactcctagacctgtctttgtcccatacttgggaagataagctgttagtttacattgccaagatgaaattcaactgatctgttttagagtaaagatcttgcgggccaacaaggaatttccttggggaggtgtgtggcctttgatctttgtagctatttagcaacaaaatgggaggcagtgttgcctgactcagtttccaagcttgactcttccctttggcatagtgagtttggagtcaagagatttttattttcccttcacaagctgaacaggagcctttggagagaacgctctggaccggtgagtgagccatgaggtcgggccacaggctctgaagtcgtgaagccttgggacggagcgggtggtgcttcgaggtcagtgtcacgggagggaggtcagggtcagggtcagacgtggagccccgtggagtgcggagtggtgaccccttcgttcgggggcggagggatgactgagcatttataacttttgtgtatctccccgtgggtgcagcccttggccagcgagatgctttgacacagccccttaagatgttttaagggctatcccataaagccgggaaggcacaacgggtggagctggcggccgccgggggcaggcacttttgagctaaggaggaagcgggggagggaaggagggcgggaaggacgcgccacctacttcctgaatcccctgcaaaccccagaggagctcggcctgcgctgcgccacgatgtccggggagtcagccaggagcttggggaagggtgaggcctgcccgccgcgaagagggggtgatctcggcgacccccggcggcatgttcgaggctgctccgggagcccagccgcccgggagcgccccaccggcggggaacgggtcggagctgcagtgggacgcgggggcggtgggatacggggggtctcgacacctctctgggccgtaatcgccttcgcttctccccggcaggaagcgcgcccccggggccggtcccggagggctcgatccgcatctacagcatgaggttctgcccgtttgctgagaggacgcgtctagtcctgaaggccaagggaatcaggtgggcacccaggcgggggacgctccccgagccgtccgggagcctgctgcaggcggcggggtggggtggggtctcagcccccttctacccccctcccaccagcgtcctttactgcacattaaactattctcggccctttggaaaatagcaagttataggccattcccctaggaaaaataggccacagattccaacggtctaggacacctcatttagattaaccaaccatttaatggattagaaaagctgaggctccagtgatgttagtgatttgcccggtaataaccggcagcagctcttttagctttggtaggtcacgaattcctggtccagagtcctttcgctttcgccctattgtgatttcccgttcttattccagcttaactgttagttgttattctgaatgtattgttccctcctagaatagtaatttaccccagtacagcagagtttagaccctgaccctcctagggtagtgctgagtttactgcacatattcctgtggattgggctgttggttgagtcaaatagagggaagtgtctgtctagctcatccttctgcagagcctgttttgaaactagcatagtttttgacttacgggctatccacaggatatgtgcaacagtcacttgacttttctctgacaccaagtatccattggaaccacttcccttcccatgacctttggatgtctgttgattagacatttattagatacctttggtgtggaaggttctgtggaagtttaaaacaaaccccctattcttaaggaattttctgtctgtgtgcttagtgtttgtgaactaattttagtcttctaaggggataatctttaggggtaggcaattattttccctaaaagaaaggtaaaatgcatttaaaaaatacatttgaaggggatttgtcattacttcactaagaaatgcatctcatttggatgagattatgattctgaacacatagagtacttactatttcataatgtttctcaaaaacactgtcatatttgctgtgatagaactcttttattgtactaagagaaatctaatgtaaccaaaattgaaaaaagacattttttggtactcatttatttgaaaagtccaggagcatgacacagctggattcagaggcacaaagtcctgggttatgtgcttcaccctggacctttagtttgaaaacaaccctaccttatttactggggcagttttccaaaggaacattgaaactatcttcccctaatagtgtggggtagaggggaggaagagagtggttaacagcttccagacagtgcaaacaacaaaggtctactacattaatagaccagttttaagcttgagcccgaggaggcttttactgggaaagtactagattttaaccacatgatatgacttaacaaagcatggttttctctaaaagatgcatcttccaacttgctgtggcaggtgtgtagacttgttggctcacaatgccagcttaccaaaattcatgtgtgttctgacatacttttttttttttaaataacaaaagcccaggatctttttgttttcatagtaacaaaagtttttgttttatagttcaaaaatgttgataattctttggcaaggagccaaataattttttttttttttgcaatggctggtacttaagtgtccagtattgtcagcacatgaaccttttaaattacatgcacacctgtgctcatgttcaaattggatgttcctttgtttacatgggggattatgtatttaaatcctcaaatgaaatgctgttctagctacagctgtggatgggaaaatagaaaacaaaaggtattggtgtctattttttttttagtaatctgttctattgaacatttattcagccttgacaatcatatggacctagctcctttctcttagttcctctacagtctcaggcaacatacaagatagacctaaatacaatctgactatagcctggacttcacctgttttcttcctttttggtttactttgtatgatttactcagacaacattttttaaaaaatcagtacatggagatttaatctgaaagcttattttgtgggtggatttttttttttttttcgagacagggtctcgccctgtcacccaggctggaatgcagtggtgcaatcatggctcactgcaacctctgcctccagggctcaagcaatcttctcacctcagcatccggagtagccgagactacaggtgagtaccaccacacttggctaatttttatattttttgtagagatagggtttcatcatgttg

SEQ ID NO: 54988 - DNA, 811 bp, Homo sapiens
agtctgtatttcaaatgagcccctcaacccaggtgacgcaggcggtgtggggaccgcatccggagggcgacctggagccgactgacttcacaaaggcctcctgccgcaaaccttcagcggccaccaaagccccggctgccggcggcggaccacctctgctgccgcgcgcctaccggagccgcttggccctagtgctttccagcggatttcccctcaggtgcggagccgggtgccggggtcccacagccaaccactaccggttcctctttcgtcagccaccggcgccggcaggacccgcgaatcccgatctccaggagcctgtaaggaggccgcccattggctcagccgcactgctgggcaggtacttccaaagctttgaggattggctgatgctctgggcgccggggctagttggcgggtaggatcacgtgcgaggggcaggccccgtctaggccccgcctccttgctgctgctgccgccgccaatcctggtccggttgcccgagttcccggaggtctctcgcgggacctctctcaccgccaccggtgggtccgttcggcctgcgttgtattggaagggaagaggggtttgaggtcaattctgtttcctggggttttcacgaatttcggggcccacagtaggcttgccaactttaacttttgcctaacactttacgagaaatcctatttagccttggccactgttgcatcaaagaatttcacatccaacaaagtgcagcctaagaataaagaacaggtctttaaaccgcatacctttaattaaggtgttcttattttttctgatttggctg

SEQ ID NO: 54989 - DNA, 3778 bp, Homo sapiens
acctgtctctgctgatagctgtgaaaggaaaatacaaccttaggaccccaagctcaggatgccaaagggaaaagttaagcttgggaactcagtcatgcaaaaaacaaaaccgaaaacaaaactgcattccttttgttgccaaacagatagctataatttcacatgcttactttatcttacgtaaaatgtagatttactgagcatgagaagaatgcacccagggagagcagagagtcagtataactacttcatggttacccacaagtggagaaaatccgaaggcagaatggcccagagcagccgcaacatacagggaattagcaaacaatgaaagccacttaggcacgagggctggagggaggactcaaaaacacagcctattctgttttcgtaaggaggaaagacagtaatccacttttctgatactctattttcagggctcacctgggcctaaaactgcaccaaccacagatgaactttagctggcagtcagatagactcggtttgtaaaaggcaagagcactgggtcatatccaaaaaaagaacaagaaaatagaccgcgaccccgatttagatccaaaagaccagagtccagattgcgaccaatatctggtactctactgtttgtgaaatgagaccagtatctggtactctactagttgtgaaagggtgcttttctcataccagcagaggggcaaaaggcaaaatgaggcccctgcctggttccgtaaaatattttaccttcctggtcggtggctttttttttctttttctttttctttttttaagagaaagcgttttggatggggagtcccgccccgggagtcttcaccaggcggccagaatggcaaagtcacagggatggggttgagggtggggttaggggtgaaggggcagagagttatttgcagcccaagagcaagtctgcacagcgtgaggtctggcccactaatagtcccgaaagaggaagcggcggggattttatccggcctgaagcagccccataacttcactaccatgaaccgagaaaaaaaaacttcacgcctattcctcccttacaggaagggagggaaggggaaggggaaaagggggcagcaaatgagcagggcgaaccggcttttctttcttcggtagcgctctgctcagatgtgagaagtaacgggtcacctggccactaggaacaaaaatgtggtcccgctctgggctccgaggctgcgcgcgcctcgaggaggagctgcccgcagccctggctggagcgagcgcccgggacgcatcccccgacgcggcgggaacaggatgcgggaccgcgaggagacaatacgcccgcctgggcacgcgcgctttaagggaagggggtctccaaagtcagcccccacccgggaggagcaggcgcccgcgctccccacaccctcctgcgccccctctgtcggcagccatctccgacacagctcctccgagctcgcgctctccatcgcgcccttcttccttcagcacactaggctgccctgggacttacgattggcttgggtccccggtcccggtccccgccgcgggaggacggctccagcacaggctttgcgcgcaggtcgagggccgaggcgccgctgcttgcaggcggctgcggtggagcttgcggcccggcacttagaggggcgcgggcggcgatgcccccgctggctcccaccttctggcctgcagcggccggctctactgaacttcagagttactcatttcctggatgtcacaaaaactttttcctccttataagaacaaaacacccgcctctacccgcggccccggaagctccttaaggaggaccgtgtgggtttcggtggttgggcccaggatccgccgggaagaccttcccagtgagcccccagaaacttccccggcacggcagaactggagagtgactgggagagacggaatcaggccagtggagtaaactggagcgagtggacaggggcgcggggaggacgcccttaaaagtcgtcctaagccgcggagcggaaggggttaagtccttaccagtcggggagagttttctgcggcgcgttttacaagtggcggaattcctggggccacctatttagtctcttggaggaaaatataactctagacaaaacgccagcctttttctcttttgcagcttgaaaggattaaaatagcttactaccgtttttttttttttttgagaaggagtttcgctcttgttgcccaggctggagtgcaatggtggcgctatctcggctcaccgcaacctccgcctcccgggttcgagcgattctcctgcctcagcctcccgagtagctgggattacaggcatgtgccaccacgcccggctaattttgtatttttagtagagaaggtgtttctccatgttggtcaggctggtctcgaactcccttctcggccttccgaagcgcctgggattacaggcgtgagccaccgcgcccgacttttatgataatcaaatgcatggttgcttttctccgggattaaccgggcacaaaggagaacagtgaccggatactgtacgggacaggcgcggtagtttctggttactgttgtgacggtagatcaagtgttactacccctatgttagaaacgagagaactgaggcctggaggagcagcagcagcgttctggtcgagcttaatagtttatgaaatccataacttctattgtcttccctttgacctgcccaaatcctaccatcagtacaaaaggcagagcagggtttgaatgaattctccattaagcggctttgggggcaccaaatgccagtgaaggcacattggggaaattggaacacagtgtccaaaatgatcaccattgctactgctatttggtcttagatcacctttttttcgtcttttcctttaacactcgcctggaagactttttggctgagtctgaaagataaacaggcaatgagaaaatgttctaaaaatagactccctggcccttggcccagggtacttttgttttcaagtttctactgctgctcaaattctttccttacgtaagaggttatggcagaattttgggggccagtatgtgtgttggaggtggtgggggcgatctggggaaacggtcttgaaagagctgtatttccaaaatgtctagaagttggtccggtgggttactcacaccctccgcaaagcaggtgggggaaatttctgtgaagtaagagcgctgggctgagctttgtcatccttgggctaagagttcagcgttgtgctggaatgccaaggttagtgcttgaatgccctctgggattgtcatcccgtctgcaaagttgtttcagcaatttctaaccagccatgtatatttatataaggaatatttattatatttgttttgcttttaacctgatgatttcaccttctgtgttctgattggttcctgtctgttctaaggtccacccttctacctggcttgtaagtcgttcatgaactggcctctgcttatctcaccagcctcatatctcactctgtgtcccacacaaaactccttgcagttcttggaacctgtgcttcccagaacgtgatatgctctttgatatgctgtttgcatgatatgctttttctctccccttggatattcatatgtactctactttctgcctgccacagccaccccacctcctcctccaaactgtcaccccagtgcacatgcatgttattttgcccgactaattgtatgctcagtcttcctgtctcagaacaggcagttactccttcaggaagtcttcctggaaccctcatgtctggat

SEQ ID NO: 54990 - DNA, 2321 bp, Homo sapiens
gtcccagctactctggaggctgaggcaggagaatcgcttgaacctgggaggcggaggttgcagtgagccgagattgtgccactgcactccagcctgggcaacagagtgagattccgtctcaaacgcctccacaccaaaacaaaacaaaacaaaacaaaacaaacaaaaaaattgatttcctcacagttatggaggttagaagtccaagatcaaagtgtcagcaggtttgaattcttctgaagcccctctctttgttgtgcagatagtctccttttcactgtcattcctctctgtgcacacatcacatacctcgtgtctctttgtgtgaccaattttcctcttcttgtaaggataccagtctgatcggccttattttaacttaatcacctctttaaaggctctatctccaaataccatcacattctgaagtagggggcatctggacattaacttatgaattttggagggacacaattcagcccctaacaccagtggagacaggggtgaagaagacgtgcatcatcttagagctcctgtagtttgacggtgtggtagggaacacaggtattaagcaactatttacatgactaggccattagttaccactgtgggatgatgcaagaagtagaatacacaatgctggaaaaggtagtctggggaagtgagactgaaagtaatgtgaagaagtgagatctgaaagaagattggatgggagccagccagctgaagagagaaagagagagagtcaagtattccagacaggaagatcagcatttgtgaattccaggcagtgggaaagagcatggctacccagggaattgaaagaaccagtgtaacaaggagtgagtgatgggagctggcaccagaaagtcgaaagggccagattacacaggaccttatttactgacatcctcatttcagtgcttactatatcctgtctcggactgttgtcagaaaatcttttaaggggagtgttggcgtgcacaatttgcttctcctgatgctcctcaagggagaagatcgtgtcttcaactccttttgtattctctctccacagtatgcaacatagggctggacatatagtaggtgctcaagaaataaattaagtggatataatgagaaatgagatgaatagaagcactcatttgtctaaattaggggctgacgcgatcttgttgggtgtgtttctcctagaggctctgaaaggtgaggactttgatactataatgccacctagtgattcttgttattacaacaacacaggggagcagggtggtgactagtcttctgtaatccagaaaattggaaatcaaacattttgtttcatcagcataaattgatatgtccgaccacccatcctttcatccattcatccatctgtgttgatgccccctgcatctctttcctatgagctgaacatgtcacgcgcctttctacctccttgtggttctttgattgctcagtcatatttgggtctttttgtcctcctataagtaaggtctcagataccagtatctagattctctgagctcccattgtgctttctgttaaaatggcatatactaaatgataccatcttattgcattagaattaactgtagatgttcccttctgtctttcccctaatacagattgtgaatgcaaagggcagtgactctgccatagtcaccttggtgcttcctgtgggcagccttgtgcctaccatgcagtacgttccttaaaaaattgtttactggattgaactgctgtcacctatgcagggcacctacttatgaaagctcttttaggagatcccttggacatgggaagacacacagccctgcacttgacatcagtgcaacgtatgggtgaccagggccctctaggtctttatttttgttatatactttcagaaatgttatggagtttctctggatcatggcaatcctacaaaccgatggtcccaatgtgtaatcaggtttcctgtgaacacacaaagcagcctgagctgggttgcctgtcccatttcaagctcatttctattagcttggcttacagtgtggttcagcctgcctctccagttcatctgccacctctccagcaacctccatgcacattatgactcagccacatttccctctttttgtccaccagatatacagtgtcaggtcatgaatgagatgtcactgcacagttgccagttttccttgcatttattcatcaacccaacacagttctcataaacttgacaaacttactctaaacattataagggaggataaaggcccgtggatagacaaagcaatcttaacacagaagaatttggaatggggaacttgccc

SEQ ID NO: 54991 - DNA, 743 bp, Homo sapiens
ccttaatatattacccttaaatcatttaaaactggactagcctgagcagcagtgaatatgccaatgcagctgggagcaatctcaggcaggcctagtgaaatggccaagatgatctaatagatcttgcttcatctctagaagtctatcaccctgcctctctcctccttattaaaccaaagcaccccactcccaggaaataaaagtgttacctgatatttatatatcttcagagagtagtgtgattcagaaaccagggagaatggtttaaaactatttattgaaaaggagactgtttcttgcatggaataatcttattgggaaagttaccttatttcttctactgcacttgaaaaatctagatcatttgtaaaaagcaaagggcaaagcagaaattgatttttgtcagcatgaggtcagtttttttgtactttgattagtggcttgaagctggtggtgagtcatgtgacagtgctggtgttttggggcagggtattcagactgagatcataatagctatttctgaccttgactttgagcagaacattgcaggaagtcttatgtcaccctgaagtctacagctatttgcaaccttctgatatctctgattgactgcttgtattaagcagtccccctctcctccctcactgtgccatccctagactctaatgttctgaatgtattaacaatatctacatggtgaagcccatgctccctgctctagcattggaggccttctaaggact

SEQ ID NO: 54992 - DNA, 2797 bp, Homo sapiens
tatggtgttcacagtcgtaaataatatagctaaggttatgcacaggggagagctgagggaaacatttgcagtaaagctgtgggctgccctggcgggaagacaggcacttggctttgaactggaatttggaatctgggtggggggagtgagagcaaatattttccaaatggttgccagttgctttggcaccaacagaactaggacttctgaagcagaagaagcaggatacgttctgcttttgtgagttggtgaaggacatcagagtggatcttcatttatccatttaccaaggatttatttagcaagtactatattctggacactaggggctgaggatgtaaagacagggcttttgcttcaaatagtaaacaagaaaatagtggatagaaataaataaattagtataatgtgtaatacaggagaagcatgcatagagcacagagatagcatgaaaaggaatggctgactctaaatgggggcaacagggaacaatgaaaatatggaggtaaatgtatgatttgggttttgaaggataggcattcacctgtaatggatgatgggaaggacattcagatggagggaaaaacatgtgtgaaggcctggaatcaaaaaagagaatgaggcattgagtaaaggcaatttgcagttgtttccatgtaaatgagatggtggaaaccatcagtagataaggagactggagcccatcatgaagaagctctatcagccatcttatgaaggtaaattaactaacatctactgagtatttacatcagttattctactgaatactttgatgtgcacaatcctatgaagcagatactagaattatcccattttacagttaagggagtggaggctcagagaacagagaatgaagtaacctgtcaaaagtcacacagcagaaatggactgctggtaacttgaagacgtgctggtgatagaaatagaagtaaatggatttgagaaatatttcgacggcaaaatcaacccattgattgcgttggctatagtaaaatgagggagaaagcaaggaaagatttaagaatgatttttcattttttgtcatataaaatgggaaggatagttacgccattcacagaacagtagaggttttgggaggtagaacatgggttcagtttcaaatgtcttgagttttagatacctttaggatatacaaataggatttaaaagctgaaatagcctatttgtcattcatctcccaagacttagtgtcttaattagttgcctaagcgttctgtgagttggcaattttggctgggctcagctgatcagttgttctggtcttggttgggattcctcatacatttgtagtcatgcccatgccagctaactggccctgctcctgggggttggctggctgtcagctggggtgctagggaagccagacatgtgtctcatcctccagcaggctagcccaggcttgttcttgtggctaggcatggttctcaaagagcaagtagaaacatgcaatgtctctggagacctggactcagaactgtaacaccattgtttctgtcatattgttttgggcaaaacaagtaaaacgccaacctatatttaaagcctggggtgattgactcttgattgaagctcaagttacaacaggaaatgagtgtggttgcaggaatgtgtgacatcatggccactgctgcagttggccacacctgttctccaagcgggactgctttatagtttagagcacatcttgtaccaccttccagctcttactcatgatgtctccatcctcatttaatgagcattattttgtcgtctgttgtgtgggatagctactctactagttgcttggggatacagaaatgaataaaacgtactcccagcatatgaggttaaggatggtcatgtagcctgttagtggtgaaagtgaagttgctcatcgagccacagactgtacacagtgtcctttatttgatgttctcctgatgtaaccatgttgaagcctcagccccctgggataggggctgcttcctggagctttgcatgaaatgtgtcacccaccagtgggttggactatttctgaacatgcttccgacagaaagcatgttcttgtttaagcagagccatatgccacatcttgaatgttaaaatttagccaccactgagtcatctagagatgaaataaaggttatgagattttaaaagcagaaataaaggattttcacctctatttttataatagtttttttctgaatataaaagaaataggagtatctgttgtaagaaattagaaaatctgaaaacatatagtgagggaaacagaaatggcctgtcacgcactggagattatgttaacatacgtgtacatttattttgtaaaattagatgaacactttatataaagatttatatttaacattgtcatcatatagtgtgtatattttttaaacacttgttaatggtatatgtactgttttatggattgcattttacacttaacattatacaagtagacatttcaatattgtaaagtaaaatgtagaaatataatttcagtctcatcatattaagtagtacagtttaattatatgattatttggctgtttatgttgtttctgataatgtgctattataaataatgctttatgaccttcctgaaacctaaatcatgtgggcatctgattatttctgctgtacatagtcttagaagtggaaatactgggccagagggtataagtgtttttaaaagatttccgatagatattgggaatttactttgctgaaaggtggtatagcagttacatacttgtcatctgatttt

SEQ ID NO: 54993 - DNA, 1344 bp, Homo sapiens
gtcagatagagaaagagacatatttgctatcctggtttctcggggttatcagagaggtaactggcaacctaatttcactacgttttgcttctttgggattctggtgtctgtctttttatttcatctttaacagctgctcgcattagccttttgggaatccagctaaagagtttttcatttttaggaagccacacgttctctatctttaaatcaaaggtgaaatgcagcatgccatggcaataatccaacatttgaaggccacatgcaccttccagtttaaactcattttctatgaagtcaaaactcatccttcgcttttgaaagtatccaaagcgattagctgagacagcagagaacaggcatgagaaggaggcccctggtggccaaaatgaggcttctccctctccgtttttaatggcatgcgaaaggcattaatccacactttcattttctcttagccaaatagaaatgtcttgagataatgtgaatgccttatggcataagtgactttctaaagtatcttattagaactccttatctgtgtaaattaggccgcattggggcttgatagccagaaacatatttcttaaaagctgacaaatgggagaagctcacaaaaagttaaccaaatgccacaggggaaacttccagaggacgcagcagctctagtgtgtttgcaaggctggtgcctttctgccatgtcacatgcaagtgacttccttgggggctgctttattcagaaatgaagtcagatttcccaaatgcttctcaagaaccatgaagaaaaactacatggtcacagatggatgttgggatattactgcagaaaacagacaaaaactttatccttgtagggtgttcaacacgcttttgagaatgataccctagatttcaagcgcatgcgttttcaaaaataaggttatagagtatttaggctgctttgctgattttcatgtaggaaagggtagagtgttggagaaaatccaaacaaaatgcaaagaaataagcaaacaaaaaacacttctaggaagtgtttccatctcttcagaatggagggttatgtgttgtttgatgaagttagcttatctaagggtgtgtgaggaagagctagggactagattatgttgccgaaatgcaatctctacttctttccacgccacctgccctgctcctcccccagaggctacaccatattgatcctcacactaagcctccaactattctgttcagatttacttggaaataaagggctactgtatttattttcctgagagacttggccagaggcctacagaatccatcatctacactgttttcctttattttaaagtttctccttacagg

SEQ ID NO: 54994 - DNA, 871 bp, Homo sapiens
gtagcatttccccgtatctagataacttgttatctttcaaatttgatccaaatttctacgtcatgagactgcaaactttttctgaaagaggccaggtggtaaatattttggatttgtaggccatggtctctgtcaaccactcaattctgctgttgtaatacaaaagtagccatagacaatatgtaaacaaatggacttggctgggttccaataagacattatttataaaattaggttgtgagctggatttgggccacaggtcatagtttgctgatcccagtcctaaatcaagtgggctgcagggttttctgaacaatacctgttgtttctggactcttggaaggtacttttcatcccttgaagatcctaagtgtggtaccagcacctgggagctaacagacatttttcctttctaacatgaaaatggcctcagcaggggacagccataataaaatcttaaatgatgaaggagggagggcaccatcttagacccactgacaaacgagccctacaaaaatggaatgcagctgttgctcaaacttgacctcctaagctctttctctatgttgatttctgtgaatcccccacagcattctttctcaattacagcaaacacagctcacaaacctgcccagggagtaaaattagacaatttgacataaaatagatgccttcaaagaggcaggcaggcacatggaaatatcagtaactgttgcctaacagggcaatcccctgggtgtctatagacttaattatgttaatcacatcatccatcttacatggggaggccagtctgttgccaagaagcctggagagaaaatgattttgctaaaaatgcctacctttcaggatgaaggaagtcagtcctcct

SEQ ID NO: 54995 - DNA, 2009 bp, Homo sapiens
aaaaatagaactaccatacaacatagcaatctcattactaagtatttacacaaaagaaagaaaatcagtatttccaagagatatctgcacacctatgtttcttgcagcactgttcacaactgcaaagatatgagatctaagtatccatcaatggatgaatggataaggcaaatgtggtatgtatacacaatggaatactatttagtcataaaatagaagaaaatcctgtcattgcagcaacatggatggacctagagttcattatgttaagtgagataagccaaagtgcagaaagacaaatatcacatgttctcactcatatgtgggagctaaaaaggtggacctgatggcaatagaaggtagtatgatagttaccagagtctgggaagggggtgtaagttgggggtgggggtggagacagtttggttaatgggtacacacatacagtttgttagaagaaataagctttaatgttcaatagcagagtagggtgcctagagttaacaacaatgtatatgtatatctcaaaataactagaagagaggatttgaaatattcctaaaatatgaaaatgataaatgcttcaggtgatgcatattctcaataccctgacttgatcattacaaaatctatgtatgtaacaaaatatcacatgtaccctataaatatatacaaacattgtgtatcaataaaaatcaaaaggacatgattacaagagggaatggaaaattccctcattatcaaaaattatcatgtcattatcaaaaggacatgattacaagagggaatggaaaatattagctaacgaaaaacagatctataaatgcaaaggttatacccgaagttattgaacaagctgttaccatggaagagggacaagtaaaatagctggaattccttcccatgtttatttaggtagatatatttatctgttgtgcaagaggccttgtagatgaacaaatcaaatagtttgtctaaagaacaggtaaattgcaaaggtcttctgtcttcatttgcccttgcaagtgtgtgactcttggtgtattatgagtaatctggcaacttgctcatgcattccttaatctgctcctttctctctgacttcgagcatttgtttcagatctttgagcatctacttctcattacaaaataataggttagactaaggtgatcattaagatttttctgccagtgtttcttaaaatggtgagattgttgaatcatctccattatttttgctattgctgcatatgccatgtactatatttgcctactatttgtatctctaagccagctcaatttaaagagacctaaaatactacctgaacttcagtgtaaataatatctatgaaaatatgaattggatgtgcttgtttaaatttataacacatacattgaaataaataaaattttcttatatttccccaaattatgtcatatattacattaatctgcctcaaagtaattaaaaatgaaaacaactaaattctatagtaaaaaaattctaattttatacaggatttttgatgttttccaaagtgttttaaaagtaaaaatgcaagtgtttttattgtaatgcagagagggagaagaaatatctgatttaatagtaagttactttcttccagtagcccaacaaatcaatgcagccatagatattgattccttatataaaggttagaatctctgacctttaagggatacaactggagaatagtgaacgagaggaacttgacctatcctatccgctgctcttcattaaacagacttgaaagaattaccaactttcagctctagattaaaacaacaatgacacataatgtctcacattgcagttttattttaaaggaggcagaagataaaagaaaaggaatacatactctaactacaagggaggtaaaatgaaactgtttcctcaaccatggctttagcaaagcttgtgaggtgctataataaatccgttatctggaaggatccacctaaaataactgagtaacaagaacatttac

SEQ ID NO: 54996 - DNA, 607 bp, Homo sapiens
tgcagtctggggttgggggagggtggtgcaagcacccccttagctgtcccggctggtgtctcagtagatcgtgtgaccctgcagtccactgactctgagcccagttcagcactaggaatcacctaggagttgcagtccttttggcctagactgcctttcaagtttatttagggacccacagtgctttagcccacagtggaaaggcttatcagaactcaagttctgactgctgagttgggcaattcccttctggctaggcctgcaataaatactccctccatgggtggatatcagctgagttcagaccagttttgctttctgctgtgacagagcaacactgaattcaatgcaatgtctcacaattgctgcactctccctcttccaagcaaatagattctctctctgcactacgcagcagctgcctgaggatggggaggagtggcattagcaattcgagactgtcttttttacctcttcaatgcctcttgcagcgatatgaaattaaaaccaggtactgtgagtgctcacttaatttttgtttcttaaaaaggtttttttgtatgcagattgttgttaaattggtgtccttatgatggggatgattggt

SEQ ID NO: 54997 - DNA, 500 bp, Homo sapiens
ggttgtttggctttgccttgtttgttgtttttctgaatgaaagcagtttgctgcacagaagaaaaaaatgaatgctatttgaattgcaaatttctgctgcagccattagtttccccctaatatttttaatattttcgagggtaaattaaaatttggactgtttaagcatttccagttgaaatacattgttcttagtcatcccctggaaacttagtcatcccctggaaacacagtaaacaagatcttcataatctctgctctagagtatgtagtaaccaaatatgggggagggaggggagagtagaaaattattgctagattttattactgaatgctcttttgccaccatctactatttctctccttaatatctgtatacttaaatacataataaatctgaccacttgtcattctgcttttaccattgggttaggatctgtgaagtggaacagaacctagtgcagtctataagcctggtattttcaggaacaagttttcca

SEQ ID NO: 54998 - DNA, 1034 bp, Homo sapiens
gcataagccaccatacctggcccccaaaactgtttatgtgcattggtccagaaatgacaaaggtttttagaatttattgtccatgatcaatttgctgttgccttttaggatcctctatctttcagcttatccttaatgtgtgtcctacattaaaaaaaagatataccttttctattcacttctccttggcctgacatcttaatattttacaatcccatcataaaaacatcagcttttgtggttgggtttttccaacacctccataccatttccacactggaaattcacctctgggtatctgtgtgtgtacatgtatgtgtgcttgtgtatgtgactcaaaagccattattccttcccaacactcaaatttcctttcaggaaattaacctctctatcactaaaaaaaaaaatgtcatgaataggggccagaactaaaggggccaaaatccttgtccttccactatgcagagccacagagtgagactgtaaccaacgcttagtcaatggtacacgtgagctcaggactttgaactttgagaaacataagaatggaacaaacattcggtgtctaggcatttgctaaacagcatcctgacttgttaaggttcctatttttcagtcctctggtgcagccttggccactggccattccttcgctgggacccatggcgattctgtaaacatcagttatcctgcagataaattccccttcagtgaaaacagccagagtggattgttgttgctttcaactggaaaacattgcctgacgatgtttatttccacagctctttcaaaagagcaatgccgtggttgtaatctcaagctcttagggcaatgtgaaatccccttattctcctggttctatatggaaaggttttgaaactgtctccatgtttctaattccagtcttgtcattttgctcttcagatttctttaaacccatgctgatcagatactgttctgcccaatgatgtcctaaaaacatctattaaaataaacccacttacagcagagcctgctaatcaccctcccac

SEQ ID NO: 54999 - DNA, 1011 bp, Homo sapiens
aactgtggttttataatccccaccaattaccacaaattatagccgtgtgattctggaaaaaccacatgctgtggagttgaatcctggaaaaatatacactggttgtctaatttccttcctaattttaagaagactcataaaaatccttgccctacccttcttctcctagaagactctcagggaccaaaaatacttgagaggcatttgtacttaaatcctatgtagcgagctccagaaatacttttttggctgttaattaactaattcaatgttgataagcctacttaatgtacactccagtaaaccagtacatacaaagaaacgtggtcctaccatcaaggggtttacagtagcagtaggacagaaaagtgatgaaataaagtcaacacaatggagctacaaaaacaactgcaagagcagaatctcagaagtcagaactcactgagaagagcatggaagcgggtggggaaaatacttggtaataaggacaggaaactgtttcaccatgctggccttcagtgtaaagtcctctgaaagctggcaatctccccaagtgcacaaatacagatgtttgctcgtttgtaactcctgaaccagagagccactagctcagaggcatcatcgtgggaaagccccctgcagttttcagagatgttgccttatgaataatggaaactttcaagaatgattttggtttaagaacagggataagtcctttttttagggttgtgtatgtcagcactctgccctggtaaattatctgcagacagcatagtctatcaaaatgaactcactgctgttcatttttcctgcctgccatgctgtgtattaactatcatccattattttaaaaacatttctggaatcaaaggtaagagcaaaaagaaaaacaaaagggtaataggagataaatgcactgcaaatgctggtcatacatgctagtaagacaggaaaaatatctcatggggaaaaacaaaagccaatttttccataacagcagtaatattcaca

SEQ ID NO: 55000 - DNA, 894 bp, Homo sapiens
atcttaaagtttaaatttcaaaatatgacctctaagtaagaatggcctggctcctgtgctcatgttcaaatcagcatcacgccagtgccccatatcctctcagaattccatgtgaactaatatgtaatatcctcttgctgacctaaggaattccagtatttgtggatcgtctgactgaatgactgtggttatattgatgatggacttttccaggcattaacaacatgtttcagttacatgagcaattattgtaactagcctcttgagttgagtcacatcagaataccctgagaaattgcaatctaccagcattgccattttatcaaattccaattttaggaatgacattccaaatactttgaatttcctcttgaaagcttaggctgattaaaggattaaatgttacacataattcaatgctgtgtaactcttttgtgagggctgagtagttgtaaaacatgtctatgatctaatccaaaggtttattgattttcctgttctttcgttcaagagtgttagctttcatgcacagctctgtgggatttttgaaggttggccaggacactgcagagatccactttccattctgtcagtttcttctatctaggaaaagacagccctgggtcagtgcaaatataacagggtgcagattttgaatcaaagtctgaattccagatttttcagctatttcctctgagactctcaaaatctcttcttctgtgtaataggagcaaggccaaatagagtatgtatggtggcagggtgagggctaatgcaagaggttgaaagggctggattctggttacagagccaattttaacactttgtatgactttagttaattcatttaacctgtttttattattaaaggggactgataaaattagaaatccc

SEQ ID NO: 55001 - DNA, 948 bp, Homo sapiens
tttatttgtaaatgacttgacaacaagtggttgaaaacgaatatgcagtatgattcagagaggggaaactagaagtaaaaatattcgcaacagaggtgatgcaagtgaaaatgtgaacaacaatgcaaatattttaactactttaacatttttactgtgataggttggtgaggcagactctggaacaatgcagaattctaactataataacatttttttaaaaaaggtatatgtaataattgggaacttttgttggggggtttcctgaggaagcttcagctgagatctaaagaatgggaaaaaatggaccaggtaaagacagaaagagtccaagtagagagattcccatgtatgtatcacctatgtgacagaaaagagctggacacgtttggtggacagaaagaaggaaagtctggctggaactgagggcaaaagggctagaattttaacagggagtcaaggataaccatggaaatgtcacattcagagccttgctgaaagtctaacttgacagtctggggcaggcagtgaaaaatgggtcatctaaatgctgtgaactctactccctgggacattcattaattaatagccaaacagcaaaccacagggcatgagctatgctagccaacaaccagagttgtctaagttgttaaattcagccccaacatttattttgacctgacgtgaacaaattatttaccatctctttgctgcatctgtataatgcaattaatagtgaactttcctcctcaggcttactaggtaaagataaagtggtatcacatttgttgagccctcatcaatacgacatgcctaataagtgttggccactcttattagaacttagaagagcccatcagatagtcagagacacagacatgaacacagatacctctgatccaacagagaatgtgctgaggaccagggggagctgaaatataatgctgg

SEQ ID NO: 55002 - DNA, 1037 bp, Homo sapiens
acagccatttgattcaaagggaggggagacccaacagagggacaagagactagaaaaataatacggctgaacatttctaattaacacctggagttaccttgtggtttcttcagaaatagagacgagatcaggatataccaggcaccagtctgctaagagcacagactagctcagcatgagccatgtcaggacagaaacgaggagacatattctgttcaagggagtttctatcagagccagtccataactaccttttttcttctgaatactgaagtcacctaaggggattgctttgagagattgcccttctttacagactcccctttggcaatttgagctccagccacgaagaaacaaagctatttaatttcagaacccagtagtttctttatgacatttggcagaaacaaaaagtgagaagttgtagaatgagctgcttgtagacattggttgttacagggtaaaagtgtcgggggggcttcaatcacaataaacgtcctatcaaccattataaataatgtgctcaggaatgagaaaggacctcagaaaggagcctagatgaagcaatgtacttttatggtttagtaagctgagcaatagggcaggactctagagattctaaactatcactatgccctgaaagaacaagtcatttactgaactctgctcttttgcctcattgggaaagcatgaagcacgatcactgccccaccttgcagggtgacgcagaaggagagctaggagccatccatgtgcaagacatagatataatgtccttctcttgccactgagctttccttttaattttaattgttctctgccaatttctgagaaagagaatgaggtgtcatgtattctggaggcacagaaacttggctttgcagaaggcagcaacttatgaggacagaggaaaactatctcttatcatataattagcacataaccatcgatagctaattcaaacacttatggaaagcaaaataacatttctctttctcactcaaccacttataagtgataaaaagcaagaggacaag

SEQ ID NO: 55003 - DNA, 663 bp, Homo sapiens
gatgtaaaaatcccccctggcctagtgtaggacacagatgttacctaagagcactggctggtcattaagtcaagaggtgaagtgactgtggaggagaaagagttagagtaaatggcccaagctaggaattaagtggcagtcacagccagtcttgggaaaaaatatagcacccacaagcattaggatggggacttagtctatcagagggctgatgccaatgcataacacagacaaggaaacagaaggcaatctgtctcatctacagttgcatcagacacagagtcaatatgaaaggccaagggacaacattctttagtgggagcctgcaaacaaccgaagggtacacattgacctgacgccacttccccacctcatcatgctgcatgtagccatgaaactcatagtctccctgaacccaagcaaagaagaaagagcagaggaaaaaagccactgaaagtttaagtgtctgttctaaagagttggatttatccagaaagcaatgaattttaactggaagtcagtaagatacattcaagtggcatataagtattccttccttaagcagaaatgggtgctggcgagcaagcagtattcagttatgcagaaataaagttatatttctacccacctcagtcacagtgtacaaattttaaatccactcta

SEQ ID NO: 55004 - DNA, 617 bp, Homo sapiens
ctattttttgacatttgtaatcatctagatcttttactccttgtatagtatttcctattttccttcctcaccttctaccttccattttttttgctcattcttcatatatatatatgtttttatatatatgtttatgtatattttatatatatgaagaatgatcatatatatttcatattctcattgttcttactttacttttctaaacagccctggccaatctttaatataactatggcttagaatatgtatactataatgactcacaagcttatctcaacacccatgacattcctctaatgaattacaaatgtacttatttggacacttcacagtacatatagtaagaagatgactagctgttctttgttttggatgagtcattggatcattaaatttgaatgactaatatggtttggctgtgtcctcatccaaatcttatcttgaactataatcaccaggtgttatgggagggagccagtgggaggtaactgaatcatggggatggtttccaccatgctgttcttgtgaaagtgagtgagttctcacgagatctgatggtttacaaacatcaggcattttccctgctggcacttattctttctcctgctgtcttg

SEQ ID NO: 55005 - DNA, 589 bp, Homo sapiens
agttatcttacagtatctgcaaaagtaattatggaagccatttggaacaagagcagagagaaacaactggcattataatacatagcatgttggaggcacagtgatattaacaaacccactcattaaaagtgggcggaaagatattcacctggaggaaattgcaattgctcactgccaggcatggtgtagtcatgagaatccatttctgaaacaggcaaaccttcctctcttatgttattgagtcacaaacccggacctttagttcattcatcatgggaagtagttcaatctaatggactgagtgggactgcgttgttggctggtgactcattcagttacctcagcaaattactcatgttttcaggatactgaaattattggtaaaaagatgtaattttaccaccagctgaccctagagggcacagttttattgataaaagaaaatgaaatattgataagtttaactttattgttcatttgtttgggaaaataaaggtaaaacaaaaatcttaaattcagtatctgtctcttaatgattccaggcacgttctagctacctgcactattttgtttcggtagggagatagca

SEQ ID NO: 55006 - DNA, 560 bp, Homo sapiens
tctacagagagatgaaattaccaaacaccatccactggaatttacccaactaaattatttaaaatacaagttctttaatagtcattttcctatatcctgcatcaaagtctgaaaggcaagatattccctaggctttggtgaaagatcaactggagtttatttttttatcgtttatacctaatgttatttttattattaatagactataatttttagagcagtgttaggtccacagcagcattgagctgaaaggacagagagttccctgtgccctttgccctgacacaggcagcctcccccactgtcaacatccataccgccatgggacatttgttacagtccatgaatctacatttacacatgatgatgacaaaaaatattgctttcaattcctgctactgaatattctgtgggttttgagaaatgaataatgacatgtatccaccattatacaaccatacagaatactttcactgccctaaaatcctctgtgttctgtatattcatcccttccttccacctaacccctgacaactacttatctttttactgttttgcct

SEQ ID NO: 55007 - DNA, 2845 bp, Homo sapiens
tttttataaatatacaatatttttttctttcttgtgttgataggaatttatttccagtttttgtattacagctgtgctgtaatgaacatttgtatacatgtctctgagggcatacatgagccggttgctgtaggtcatgtctaggaggggaaatgctgggtcatagcctgcgcgtatcttcaattttattaaggttttccagacagctatccaaactggttctacaatttatacttttatgaatcttcatttttaaaactatggtttcccaacacttaactcttggcctttaggcactgacatttatgtgaggatactttttgctgtcaaccttgctcaagaggctgtttctcaaatctcccaattcacttttgtgtttgctcaagagtcacgactcaggtataccattatttgaatcaattcctctgcctctgctgtgatttcatcatgtgaagccactggagtcgttttctgtccaaagtctatgaattcctttttcctaatcctcaattttttagagcattttcattttaaacacagcttctactataattgaaagtttggcttaatggcaaataaaggactgcatttatctaaatgtgatctattttaataggacagattgccagatgattcacatgctctggtctccttgtattttgacaagcttaatatactgtttcattgtgctgtggattaatagcaccacagggcaataatatggctactgagattttaaggtctggataactataggcttcagtgaatgccccataactgaaatgtattaaatatctaatgcctcagagcacagtttaataaaacaagctggactgtgaagtattcagtccatatttcaaagggaagcctatgttaagtgatcatttaaataaggatttactaccaaaaagagcccattctgatttgacactgagattaccactggtatttttttttgtcctaatttacttttcaccttatatttcctttagaaactggtagtccctacaaatgtgagtcaggatcaggatttaggaggcaagatagagaggtaggtaggtaggcaggtggattggtgggtgggtgggtagatagatagatagatagatagatagatagatatcaaaatatatacttttatctggtctttttttcaacaagaatttgaggtggatactagattttgttttactgtgaatattttgttagaaagttaagtatatgataaatgtagaaaagtacacaaatagtaagtaaacaacctgaattttccatcaaaatgaatacaatcatttgatcagcatctggatcaaaaagcaaaacattacaaaatcctggaagccttcttcagtcttcttccaaacattccctctaccaagataactactaagtcacattttagtttgtcaattataaaccaaacactttttaaaatgttagaccaaaaagttatttatgacatcagcgaggccaaaagaagaaaaggattaacttagggttacaaaagaaagaaaagaagaattaaagatagacttaggcatcttgatgtcctgtccattgtccattctattactttttacagctgctcacctaacattcaatttcatttaaatgtggcatgacattcagtaacaaattgcatgttgtcacattacctttccatgacagaggctgacactgtctgctctggttgagtatcttgtgccccaggccactctctggaatctagtagctgcagccttcagctattaacttccttaggattcatcctactttttttagcagaggtcatgctatttacgaggtaacctctgccagttactgagaaagtgacagctaagggtaggctttatttggctggtccccagccaatgactaaggaattattgagctccagccaatgaccaaataaggttatagctaatttcacccaatatagaattcctctaacaaataaccttcactctacagtatcctgttaggttgggtgactcttggttaggctgtcatgatggtctgaaccttcccttgccaaaaccgccccttcccacattttctctgcatagctaatactccttaataaaaatgttagcctcttaactctgctcaaaatatgccatttggagatcctaacttgcaaaaacatctaatatatcctgattgtctaactttaagtccaaagcctttttttgtgatgccagtccctaaacattctggttaattgaggtttcagtgtagtgtgcttcagtataaagagcttgaaatttcagattctcatatatttgtgttttattttcagtttcactatgtgcctgctactgtaggctagttccctttgctctccaataattgtgttatctattaaattagaagaataatatttattatgtatgtcaaagtgtgatcattaggatacatgagatggcacaaatcatttagcccagtacccaacactgaaatatcctaataaattaaagtcactcccatctattttgtgatcattctcattctaaaatatttcaaacatagttacgaccactattctctattttagcacttatgttatttgtgacaagattattgtcaatctaaacctagatggtacttttataatcatccaatgcaaaggacagtttctcatccctagaggaaggatcagatgatagaaagacaggggtattttatgttaaggaaatagtatacatatttgctgcttttggaagtatcaaagaggaaaattctcacaagaattttcaacacaatccaagctcagctagcaagactccagaagcagagtactaatttttataatgtctctgatgtttcatttagcttttggccaata

SEQ ID NO: 55008 - DNA, 1020 bp, Homo sapiens
cctggagaaatatatatacttatggccaactttttaaaaaaaatttgttttatctcctctccccccatctaaattgtttttgacttttagcatacaactgtagttatcttacaaagttcacaaaggattacagatgaaaaatagggcaaagaaccctcctaaagtttatcagagggattgatcgagggtaaatgtgtcttcaagattctacaacagattctctcggcttatcaagagtttatctttctcttttcttgctacaaacccagtgcatttcctccttcctctgaaaatatgtcttgtcacttgtgacttgaatgtagacagaaaacctcctaaaaactatctttgcttctcttcattgtgtggctttccttggctgaggcacccctcaaaaatagaagcagattgtgggtggctgtggccttgctttctggactgcaaagaggaaggcagcagagagggggtataaaattggccaagctacccatatatttctatttcaaactatttttacctatcacagaatattaattctagatcctagaggtcactaagatgatctaatccaactttcacccttttatgatgaagaaacagcatggttacatgacttgtccaatactcacaataagttactgtttaaactgaaagtaaacctgaggcctcctatcccatctcccagttagtgatatttattcactcagagccttcttcaggtgggctgaattcagtcaaactgatcagaatgtggttaaaatcagtgggatccaagtctggtaaatcttcagattcaccgtgtgaacccaaaagtatctgaggtggatcccagtccatttggaaagtttattttgtcaaggttaaggatgcacccatgacacagcctcaggaggtcctgacaactggcacccaaggtggttggggcacagcttggttttatacattttaggcagacatgagacatcaatgaatatgtgtaacatgtacattggtctggctgggcgctgtggctcatgcctg

SEQ ID NO: 55009 - DNA, 2455 bp, Homo sapiens
aagtaaacatggcactcttttgccctcaaaaagaacccaatataagtgaggcatgaatgcacgtgaatggtgtcacaaatctgtgtgtgtgattaattgccaaatactcagaaaataaataccttcaaaggagaagggactatgaaaattagtgaaggatgagcaaattagtttaatttagaagtttatacatagagacatattttaggagttacagtttaagcagaaatagaatgagggaaagtatattttagaccccctggagattaattaaacaagagtatttacaataggccaatatatttaaggaacaatgagttggtcctttttgatagagcagactacttgtgctttgaaaaatacaggaaaacacaaagcttgcaccctgagtgaatggtgaaactggggactggaggcaggtttgagcacagtgtaaaggagaattgcccagtgaaagaagggtcagcctagggtctcaaggagctgcccagcggagacgttggcacagtgaagtcttactttgggtgggaggctaatagatgatttttttgatgacattctaacattcagcttcatggctctgctgtgtttgtcttggtgagccaagaggaggctgtccaactgaagataacaaagagataatttctggcctctgccctgccagatgttcaaagtgtaactatcagcaagttcctctccccatgtcaggatctgactcactcctcaggatctctctcatagactggttgtgagaattcaaagagctaattcccttttcaagtaccttataagttgtctacggctatgtaaatgacagagtaaggaaaacaagacaaatttgataacagctgagaatcaattttgagaacaaagcagaacacaaatccaacattcaatcccattgccctttctttcccatctagcctcaaccctatcaatacctccaagtgaagacatctctctctagtctccctctccatttgtgctaggaagtgtgaagtactttatatgcatcatttcagttagctggcacagcttcttcatgaagtaggctttagttgcatcccacgttatagatcagaaaacaaatgtccaaggccaccaagtctgtaataagccaagccagtccaacctaacacagatttatttgatgccaaagtctgtgccacagatcacttttccagtgagtcatcaaggttatcccacagagatcctgagggcaggggccaactgcccaaatactgctccttaagacctggctttagggcaaccagggcttcccactgctatcaccttcccttgagttattcttatggcctccaaggggcctgaatttaccttcttagttaacaatatgtccatttgaataattagactagaatgtctcactgccattgagaaaagagaagcacatattaaatgaccctgtgcttattactggcatgttatgatgccatggaaatagacatgatagaatgtccctgagagcagcttccagctgcagctaagccactaacctgccatgttccttcaggcaaatagttaactatttggggcattataaaattagatgatgtatatggaatagacttatgagctctaatgcactaaaatcctaattattgtttttttaacagcagctgtggtataatgcaatagtatagattaggcttgaattaaagtcacagggatgccacttcaaacaatgggatgttacgcaaataaattatattttctgaccctcagttttttaattctattaaaaaggatataaaatactctttttacagtgatgctataaagataatggaaaatttgctttaaactgtactctacaaatcattttaatatattctagaattggttactcttagtagttaatacatattattttttgaaattatattagaaaaataaacacattgttagggtttaacttgtcaaatgctttcaattctttgggaggcttttaagtactcctgtttaaacaaattaaatttttttacaagggctaatccaagggctagagaagacatacagcctgagatgtaaaaccccattgtagtgatgcaagtgttaacaagactcaaagaagagattatattagtgacacagtcctcactgaacaagggctaggccagcccctgtagtttcccttggcaggaagccctagatctgttttaatcggtcatggcctcttggcccttggaagagcagctacagaagcttcttgctgtgaggggttcatataaagtgagttcttggagcaagatcaagaccttcttgcaatctgtgttgctttctcctttgatatttagcttgaactagaagtttgctcaatggagtggcctagaagcccctgccctgcatagagtgaattgaaggtgtcttatcacttgcctgaagtcttcagaacttcctgactccagaaaaataatgagattcacatcatttt

SEQ ID NO: 55010 - DNA, 2061 bp, Homo sapiens
tgtaagctacacccaatatgtatccctcaaccccctaccctgtaccttctgaatctccagtctattatatcactctgtatccctttgtgtacccatagcttagctcccacttataagtgagaacatatgtatttggttttccattcctgagttacttcactgagaataatgtgaagactacattctaagtggtcctttatttgttgcctgacctctgcattttactactcctgcatttttcatgcctctttatttcttatctgattttacgtaattccattttgtctcccagtcacttgtctcattggcctacactcatgtattcacatgactgccacagtcagcttttcaagcatgtctgacaatgccacaccactgctctaaaccctctgtgccctccactgcattctggacataatcaggattccatttgatgttgtgcatcgtctggccccttcctgtcattccagtgcctttgttattacacaggtgtgtaggggttcagtcaggatggtgggagaaattgcaaactaaacaaaaaccttcttggaaggctggaaggtttttgcaaaagcctcaggatagagttatggctgaaggcagcttaatcctctttgagctataacaagggtaattaacataggaatgtagaggagtctatctaactagcttgtttactcatatggtcctaagactaacttttgaccatctgcaggtacatgattgctttctactcaggggtgttggcaatggtaattaccttctagtggtgtttacttgagaccttttgtcatttaatgtgtgctgaataaatgccagcagggccagggagtcaaggccatggctgctaagctttacagcactgtccttggaatctgtaagtggcctggatgctcagccagactgacaggcataatatctgtgtaagtgtacgttattcatccactcttgggtcagggtctgtgggacagactcccacataggtgtactttctctgcatctctctgcatttgcacgagctgtccccttacattatactaaaagctatcttttatcttattaaggacatgcttataaagaaagcagagcccacaggcagcaagagcaggtgctctggatcctgacagtctggtttgaaaagtggagctcaccactcagtctccctaatcttccacttccttacctataaaagtgggataataaaatcacctattcccctggagttaatgagatgatatctaaaaaacatgtacactctgtttgagactaagtaaacattccacaaatgtttgctgtcaggcctctgaccccaagctaagtcatcatatctcctgtgacctgcaagtccagatagcctgaagcaactgaagatccacaaaagaagtaaaaatagccttaactgatgacattccaccattgtgatttgttcctgccccaccctaactgataggatatattatcccccatccttaagaaggtactttgtaatattctcccccacccttaagaaggtactttgtaacattctccccgcccttgaaaatgtactttgtacacctattccaaacctataagaactaatgataatcccattcccctttgctgactctcttttcagactcagctgcctgcacccaggtgaaataaacagccttgttgctcacacaaagccggtttggtggtctcttcacatggacccatgtgacattcggtgccgtgactcagattgagggacctcccttgggagatcaatcccctgtcctcctgttctttgctccgtgagaaagatccacctacaacctcgggtcttccgtccggcttacagtttcatttcgcgattagccctcccccagctgcctaacaatttcctcttgaagaggtggctggagctaaaggcatagtcaagtttaacgctcctttttctttatccgacctctcccaaatgagttagtgtttaggctcttttttatcaaatataaaaacccagcccagttcatggctcatttggcagcaaccctgagaaactttacaaccctagaccctgaaaggtaagaaagccat

SEQ ID NO: 55011 - DNA, 916 bp, Homo sapiens
gctcaaagttatagagaaatgtatgaaaacacattgtataaatacatgcaagctgtagagcacatgctgtttctctcctgcaagcacccctctgaaatttttatgtcagcaacaagaagcaatttgggaagaggaaagggaatgaaaatttcagaatgtgacatctgcccccctcccctcctaaaaatataccttaccaagggacaactcttctttatataataattgtagctaacatatagtgaacaaatgtttaaatgagaaaaaagaacgacctttagaaagccatcaatgtaataattcactaagaaaagaatcagaggttattgccaaaacactgggagacaggagttgggaaatatgatatttacactggctcagagattactactgatgacaaagcagggaagcatatttacaaagaaatccagggaccatcttagctgaatgatcaatgtttcgtcatcaacagcagagtacatggacctttctcttgctgggaagcaatgggaagaacagagcgacaccctgaggaatagccttgctctgactcttacctggatctgataatggggtaaaattagacaaaccaagattgaagcccattctataagatacttggcctttaccatttaaaaatttcaatatcatgaatgaaaaagaaagatgacaaatctactccagagcacagagattaacaagccatcatataactaagatgcaaaacaggtagtttaccttcctgagcaaaaactgaatgtctctgtgcctggggaatgatgggagaaaacacatgccctatgcagctgcagcactgaaagaaaaatcagatacctgatgttttatcaaagagatctgggttgggaatggagtggttatctcagggactctgctctctgttctctagacacacctg

SEQ ID NO: 55012 - DNA, 867 bp, Homo sapiens
agaaacagtaaccaaccacttaggaagccaaaaaataaaatggtttttaacttccagatactaacccccagtcatgatctgttactaattccttaccctcttcttctcacccaacctggggttggggtggagatctaaaatcctttacagatgttccatctaatttccagacaaaattattacctgtttccacacctgtgtctcctgagtgtgtcacctcgttaggttcaattattcttaaatttctcagttgaaaatcctggtgattcacccttaaggagagaaagaacaggaagttgcagactttgaccacaataaacgtggcaaggctcagttagaggaggcatcgcttaacttagcagttctctaacatgagtcagaagaactttcacccccattatcagtggcagaataaataaaagtttgatgtaaaacttgcaggtgtaaaacatccccatggcaggttaaccttctcagttgcagcttctagttcataaattctcacacctcctatttaactagactaagaagacttattttcaatgttttttccttacacaagttctatttggttctttttcacatctgcccgttctttctttatggtgtcctattcttgcactctggtttctatgccttctctttgtgccttcattactgtaggcccttattttataatttctcccatactttcaaatagatcttgggagactaaccctcatgtttgctaggtctgctgcctctccctcttggtggttcattccttctgcgttttgtgatcttttattaagagcttatcttcaatagaggctatttatctatgagaatgtgatgggtcctggtttgtacaagcagttctgttattgt

SEQ ID NO: 55013 - DNA, 1768 bp, Homo sapiens
ccagtaggggaggcgcctgtggaaaatggcttcccctctctcagcctttcactggactttcctttgaggtaaaaaagactctaccagctggtgtagaaaagactcttctgctcctaaaaggctgtgagtctataaatctagcacagatcaccttggccccctaaagaccacctgaggcctacagcctaactcatcattatccacttgcctgactccatttccagcacttcacttacaggaagctccttccagatggaagttctccacccctcccacatacttccacagggtgggtctggttttctgctcacccttaacaagctgtggcaacggcaaatccaggtcaaggtaggtttgggacccccctactcacaaacacaagcaggagccatggtctgtgttcagcaagaaagcctggccatgctgcaaagtgagtgcattcatgtctcaagtggttagcaggtgggtgaccccttggggatggccagggagtctggcctgtggcctccatgaactctgaacacctctctccgtctcccactttgtcagaggctctgataagtacatcctggttatggcaggggaataaactaaaacatgtttaacttgaggccgggaaattatctgtctcaccctcctatgcccaaggagagcccagggcaggctactggggggattttcctggagattataccaaaatattcccttacacagcctctgaaaccatttgggtagggaggggcccgcgaccgtctatccttgtggcggtgacagatcagtagagtgaattgcaggagtcagtattgtcgagattgtaacttgaggtttagattcctgggtaacagaagcgagggcaaaggctcgcccacctccccggacacgaagaggggccaacttcctccaagaacggggccttcccgcgggccaggaactgtgacggccgccgccccctcaggccgagtgcagcagttccgcgggcatacgcgtccaggaaccagactcgggccgccccgtgcccaccgaccctccggaaacgaaccggatctcgcccggcctcatggaccccttcccccggctcctgttccggggctccggcgagcgcggccctcgccagactgcggcgggccgggctcctcacccgcgcgtccctgcccgccgaggtgcaacacgcgcggccgcgcagcgagggctgcacgctgcccggacgccggctgccggcggagtgccctcaccttactcgcggtggctttctggaggctgccattcggcggtgacgtgccccagcccacgtcaggggagcgcagaccagctgatcacccgcggaagggccggcgcgaaggaggcgcgagagccggcgggcgggcgggcgggctagcgccgggtcggccacgccctcgcccgtggcgggcgctggcgccgcggccccgcccacacgcaggccccgcccacactcccggacctggggttcgcggccgcagcgcctgcggcccagagcggggcctgcccttccacaccagtccgcattgcctctccctgcagcgagcggggaaaggacgcagtgctgctgagtgtcttcatttttgttcgtttttgtcgtcattcctcaaagaggaaaaagggctttgccgaataaaggggctactgtcccagggattttccggcttaatttaggagggctgagaagagagggacgtggccggctccggaagaacctcgacagggtcttcgaggctttggaacagggtctcaagctttagaaatgtcccca

SEQ ID NO: 55014 - DNA, 2166 bp, Homo sapiens
aagaggaaactacattttaattagcacatttttagggaggaggggggggatgaagatgaggcggatggcgtgaggtatttgagggggacgagtctgcagatgaggaaaggaaatgaagtggattgtcgccagtgccttggaaacgaagggggataagggtggggaacgaagtttgttgtgtgtgttagggtggggttggcccaagggaccatgaatcattagaatggcgctcggaggggtgtgcttgcaagtgtactggtgcaggagggacgtggaagtcgtgggtggcagagaaaagtgtgcaccgctgggaggtctatttcaagaataggttgggatgagaaacatgtctgggcgaggggggtgggaggcccggtgtcacctgtggatggatccacagccctgcaattgcgtgttgcaaagtttgcccggccccgcattcattttgaaggttcttggcgatgcctcgacttttcgcctcaaagaagtgagctctcataaggttcagaggccgggagccaaagcgggagtgaagactctcgaggggtccaaatgaagcagaagcgagagcccctgtcctccccctatgtggaggtgaagcaggggttgtggggactaggcgcccgcgaaggcagctgtgctgagagcaaagtccaggccccacggggggcgtgcggaggttgaacctttgcagtggcctcctacagccccagcagccagcgtgggcggccgaggctgactcaaagcggcggctcagcctcgggagtaggagtagggggctcgctcatttagggcgggagacatttccgaggcgcccctcctccccttcgcggtcgggtttctatcggggtcgtttccccctctggccctccggggacgccgcggattcgagctgcacagtcagaagaggacgttgaaaaggcgccaggcagccgccccgaaccaggccctcccggctgccgggcctgcaggcccccaccgctgcggcttcacggacttagagcttgagggcgcggagggggctgcgggggcgggaccaggactcccgaggggcgctcggggcggggccagagagagctcggggctgccagaggcgaggtcttgaggaggcggggccgggaggcttcggagcccaagaggcggggccagaggcgtagggggctgcgaggggcggaccttgggggcgtgaccggggggggcgcttggggacctaggggcggggcgttagggggcgggaccaagggacgctcgaggggcgctcggctagtcccgccagagcgcgagccgccagcccgtaacggtcgccagtgtgaggggcgggagggaaagaagaggggtttaaattagattttttaaaacacagagcaagcgccagaggcgtcggcatcccaggtgtcgccgcttcctgctgcacagggctcggcgtacaggtccctccctcctcaagccccctccccttctcccgccctaccctctggggctctgcggcgcttaagaggcggccgcagcggcggatccggcggctgctgcagcccgggcggctgccgagaaggagggaggggaaacacaaagccggctacgcgctgcgaggtaatcttgcggggagaggacgcgccgtcgtcccgcctctcttccgggccgggacgcgggcacccgcgcgggggctagcactggggacgctactgggggtcgcgcgggggtagggagcggcggctggcggggccaaggggacttctcattggctgtccctgcggcctcaggtgaacccttttccggggcgggagtggggaccacggccaggccagaggggagcgtacctgcgggggagggtccgggggtggcggtgcacggcctgcggcgccgccgggtgggcccgacgcttcgcgcgtctgctggttttccctaggaaggcggggagtaccaaaatcagttactggctgaagcttaggtgaccccggggaccttaagccctgaaggtgcgctccaggggagtgagaggttcctgcgcttagaaaaggtggaggaaagggagcgaatgttggttttagttgtttttctcctcatttaaaaaaaattttttttgttacaagttgaaagtgttcagtcacctttctcctataatccgcttccccaccccccaacacagacacacacaaacacaccgcc

SEQ ID NO: 55015 - DNA, 742 bp, Homo sapiens
ggcttgtaaatcaccctgtggtaaaaaattgctattttagaaagatgctcatttcaaaattccctttcataaagcaacaaaggcgattatcttcagttctcacttgagagtcaatatagtagaaaagttcgcatgtgccttttcttcattgattagtattttcattcagggaataaaaaccaaactgataaaatttgtgacagcactggcttctcttaacatcaggcccctttttcccccccacataggcagaaaatacagactggttatttcttttcaaactcaaggttgatacatacacatatccaagttgcaatcttggccaaactgggattttgataaaaacagtcttgtttgtggccactagagggagtaatagatctaacaatccaatgtttccattccttgcactgaacttccctatttagtctgtaggcaccatgtttgttgtgaaatacccagaacttgaaagagaaggcatttcctttgttgtttattctcctcagtagatcgttctcgactttgtttccttagcaggtctcattacagatatcacccacagtggagaacacatagaaagttgtggtgtgctctcagaggctgtgataggatatgacacctcagagttttcatacctgtgagtgacaagacaatgccttcttcaataattgacttttttttttcttttttactaaggagctaaccgataatattttttgttgatgccttctgtgtaccaaac

SEQ ID NO: 55016 - DNA, 799 bp, Homo sapiens
gagcgagactccatctcaaaaaaagggcaggctcttttggatttccctctggtactcctgacttatcttttctgggtttataaaacaaatatagtgacagtccccagcctggacctggagctacagttctgctagactcttctcaatggttttctggctgtgttctgtccttccttgaagaccattttctttcatagacagtcaagatctaaactaattgtttttttttttttttccaaaagcaatagcttctgaagattttcactaagcaggagctagggaggaagtagttgttgcgtgctataactcacccctttcctgttgagtaatgctgtagaggttggattcagtggcaactggcttgctagactttgacttcagagtagatgagctcctagttttatgagagaacatgtagatacagccagcttgttggcatgcacaggcagtctcttccaaaggtgtttgctggactaaggagttaaagttcaacatttcttcctacctgatttctgttttggaaatgttggcttcaattgtttcaactgaaataaaggtcatttgaggctattaggataaccaagactgtatcccaaatattatctactggtccacatcgcggggaggggtaagactcactgcacccggatgtttgggtatcttaagccttttaaattatttaatttaaaatatcctgtgtggtaattgagatgttttgtttttaaattatttttaaaatagtgttttactttagaacatattttcaaaatatgaaattttttgatatgtaggtatggtc

SEQ ID NO: 55017 - DNA, 668 bp, Homo sapiens
gttctactctgtggtaagccttggggagaggcagggaagcctgcggggacgggcaggggcggtccctgcctcgctcgctagtctccaccttttattttgaccggtccgatggcgacaggctcgcactaggacccaggcgccagagtgcctccgtctgtcctgtaggttcattcaatctcccatacacacagactcacagcgagaccgacacacactcccatacactcacacacacaactgcaggcagcgaggctcgggaagtcaggccggcttttcgccccggcgccttctctgctccagccggccgggtctccctgggggcccggagctcggccgggccgcgcagccccgttagaggacgagctcggcggacccccgctcctccatgggcaaacgcgggcggccgcgcaaggaggcgcgctgcgagggcgcggggctggcccccgccgcgcccccggctgtgccccccgccgtggccgcgccccagcccccggccctgcccgaggaccccgctggggccaagcccaggtgccccttctcagacattttcaacaccagcgagaactcgatggagaagcacatcaacacttttctgcagaacgtgcagattctgctcgaggccgccagctacctggagcagatcgagaaagaaaacaaaagtaagtttg

SEQ ID NO: 55018 - DNA, 3090 bp, Homo sapiens
gaaactttgggatctttgagaaacaatagttggggaagaaggtgtgggctgttctgtgctttttctttattttccgggagacggctcttgagtgagcgcacagggcaagcaaggcaaacgccttcctggtcgatttctactccccccacccgcccacccccagattcacgtggatagtagtgcgtgggtgggggtgtgctgggaaccccaccctggcctggcttcttttttgtatttatttgtttcatttttgcccctaccagccaggtcacccagctttccccaggcagtcgactcagcgccctaacgggggcacgcgtgtgcagcgtatccagcaccgtcctcagaataatagctgtgaaaaggaggaagggaactaggcagacagaccgacagatagggggaaaccgggatgtttaatgtgtccgaacaagtaggaagatcaatgaggcgcgagtgtgtgtgtgtacgtgtgcgcgtgtgtgtgtgagagagagagaaagaaagaagaaaggtcccgattgcaacgtgtcagatcttgcaaccttccccccacccaacacaacaaccctcagacacaaaaacaccattgctgactgataccccaggtcttcagggttaaaggaaccgtgtgttggcagcgcaattgtgcagacgctgtaaggccaaaacgaggatttgtgttgtgaggtcggtggtgcgttcttttctttctcttctcgcctgttttcccggagtgcctgggttgcgagaaaggcgcatcgcaggctgtgcagccgaatcgcttcgcaattattcatgctggtcggagggggatggggcgcgggaagctatgtgtgcatttgtctggagggtagtttctgaaaagccagagctggtggggagctgggtgaagacgtggttttgtttggtgtgtttgcttttgttgcaggggggaggggcgcgatttcttcagctacccccatccccggctaccagttctctggagtctgtcccgtggcgttggctctgactaggggtacaccccatgagggcacgttggcagtgtgtggcaaacctggcttgcccccctaccccagccaccccccctcaccagcgaggtgtatggaggaggcggtcggagattcctcagcgtcccgccccccacttcgcacccgcagacaatcggagacctccccctgccccaccccccaccccccaccccgccgccctggccgccgccacctcgttgtttaccccgtgccggggctccggcgtggccaccagtcacgtaagcagagagccgggcgcgccgggcttgggctgccccgcgcggggcgggcccgtggcggcgtaaccgggctccagaggctggtgaagccgaggggcttcctcccagcccatcgcccgaggcgtccgccctgcaaatctgccagcccccgagaggggtttggaaccttagcacccaagtctaagtcaacttcatgtgcgtaataagtccctcggccccgcagcccccctcctccggccggctcccggcgggagtatttttagctctcttgcttcttttcgccgctgctgtttggctctaaatgacgtgatgccaacggcccccagatttccccgagagcttggggcgccgcgccgtgcccagtttggctgcagagaccccgctccaggccctcgccccgtccccaacagctcgaacaggctggggtgacctccggcaaactccgtgcgaccatccgccaggccctctgttatcccccttgcaaagagaagcggtccacgggggccactttatcccaccccctctcctcccctcctcctgcccggtctaggtctctgggtacggaaaacggcgggccctacatctgcctcgttttatggggggcgcttcttcgcgctggcggcgctcgtcgttgttttctgctcgctgcacacaatgcccgcgcgtcacggcaatccgcgtgtgcacagcaataacgcgagtcggggggcgggtcgtgcgtgcgcccggctcgggcactgcgggtcgctcggcgcgcgcggggcttgttttgctccagagctctgctttccgaaacgcttacatcattcagtcgttgggggagggagagggatctgggcgttccgataggattccagcatctaccgggtccctggtttctggaaggaagcagggaccctagctttttagtagttattattgggggtggggttgggtagtttgttgtgtacgtctttttttttttttttttcggtcactactgcaaaagggcatcgttggccgactcaggtgcacaacctccccgccttcatttcagcgagttcccctataatcacttgatctcggtttctccgccttctcctcctccccctcccagctagagacacatggtttccacatggagacaaacttctttcctccgactggacttgacctagctgcgtcgttcagccaatcggcagctccagcctcttctgacgtcacgcgttgctggggccggaggctgggtggggggtggagccaggctgcaagccaggaaatctctgggagctgtagtgcggccagctggtccagtctcttcttaaagggacgctcttctgtccggagatgagtgtcgggccccgattctccatttcgggttcggtgagacctttctgagatgcatggtggaccctggtcacgagttaacacgttccgtttttactgctgtttgcgaagtacttacttggcaggagcttgccttattttccatcgtagccagaactgcttttcgttcccttgttgaggtttccgtactggtagtgttcaccaagttgtggccacatggctgaattacttccagtggagaggttgagttttcttggaggaggggttcaaattaagtcacattgttgactgtctgctgtgtgcaaggcaggggggattccctaggaaaggcaggtacattctcccaaaactccaactgatgtgaatctctacggatcacaaattgaaggcctccagaaatattaatcatgaaggctgtgatcctattaccacaaattcagaaattatatgtaaataatctctgacatcatcacctatatgcattttgagtccag

SEQ ID NO: 55019 - DNA, 693 bp, Homo sapiens
tcaccagtaaaactggagttaaaaagcaacaaacttccagattcagccgtctcagataaacactgcctccccctggcgttccccccaccccatgtcctttccctttctccccagctcgggcagcacctgagtcgcttggtgcgtttccgtgtggttgggatgtcagccggcagccctggcgacaggagccctgggaggcggcagctacctctcgggtttagcattacgtcatcccttctagacccaaatttatctcggctgcacacagacccgcagctctgagctgccgctgacttgaggagagcttacgcatgaacttaggcaaggctgactcactgggcgagggaaaggttttctgctgttcttcacgtttctgggctctgggggaagaggaggggaggaggctgcagtagtcattttgggatgggagatggaaaaatgtataactgttaacggttctcatttaagagcttagagttcacctcccgtgtccccagtgttgattatttgaaaacgcccatccttaaagataattgcagaaaacagtgccctactcagtaaacactttgcagtttcagggaagttctcctaagtgcaaggtgtcatcaacacagtaactttggacttgtaacttaacctcatggccccttcctctctccccatctcgcctccctgaagaaaagatacaacaca

SEQ ID NO: 55020 - DNA, 1959 bp, Homo sapiens
ttactcttcttattttgcagatgagcaaactgaggcacataagttacatgagaaagtaggagatagaggactggaacatgatacttcgaataaagaatgtctcagcccctgggcaaccgcagggagtcgctgagaaacaagtttccccgggagtagactcccagctcgctcaaatccttcccattccacatcgtgtctggagggaggaaaaaaaaattcttccctcccagaagcaaagtcccgcaacttcttagtcttccctagagacaggaaaggaaacccagcgggactacaccttccgacgacctttgcgaatcttgcggaacgcaggcgccctgaaacggcgtgtgcactacgattcccggcagccgcgggcgggtgcgggactacatttcccagggggcagaggcaggggcgggagggggcgggccccggcgctgctcccgcccctcccccgtgctcgcggggagaggtaaacaaaccacgcgcgggctgcccgcggcacggcgggcgcggctggcgcggctggggcggcaggggcggcggagagcgcgccgagccgcggccgagctggcccgcccgcccgtcgcacatgttccggaacggcgcccggccgtagccgcctgcggcgcctcctgtcggcccgagaagggagtgcggagaggcgccggtcgccacccgcggtgcccatggagcgggtgaagatgatcaacgtgcagcgtctgctggaggctgccgagtttttggagcgccgggagcgaggtaatggctgggcgccgctgcgtgagcccgagcgctactaatctttttcggcagtgcggtgcggccggtaagggagggcacgcgtgtgaggtgcgcgcatgaggtgaggtgtgcgcgcatgtgaggggaggggtgtgcgcgcgtgagggtagaggagcgcgcgtgtgtggggaggggcgtgtggggaggggagcgcgcgtgaggggaggggcgtgtgagggaggggtgcgcacgcgtgaggggagcgcgcgtgtgaggggaggggcgtgtgagggaggggtgcgcgcgtgtgaggggaggggcgtgtgagggaggggacgcgcgtgtgaggaggggcgtgtgggtaggggagcaggcgtgtaaggggggcgtgtgaggagcgcgcgcgtgaggggaggggcgagtgaaggaggggagcgcgcttgtgatgggaggggcatgtggggaagggagcgcgcgtgtgggaggggcgcacgcgtgaggggaggggcgtatgagggaaggggagcgcgcgtgaggggaggggcgtgcacatgtgaggggaggagtgtgtgaggggaggggagcatgtgaggggaggggagctcgcctgtgagggaggggtgcgcgcgtgtgagggaggggtgcgcgcgtgtgaggggaggggcgtgtgaggggaggggagcgcgcgcgtgaggggaggggcgcgcgggtgtgaggggaggggcgcgcgcgtgtgtgtgaggggaggggtgagcgcatgtgaggggaggggtgcgagcatgtgaggggaggggcgtacgcgtgtggggaggggcgtgtgaggggagggccatgcgtgtgtgtgagggcaggggtgcgcacgttaggggaggggcgtgtgaggagaggggcacgcgcgtgtgtggggagggtcgcgcgtgtgcggggagggtcgcgcgtgtgtgaggggtgcgcgcgtgggagggatggtgcgcgggggggaggggcgtgtgcgggaagggcgtgcgcgtgtgggaggggcgtgcgcgtgtgggaggggcgggtgcggggaggggcgcgcgtgcgtggggaggtgtgtgtgctgagatcgtgagtggaggcgtgtgtgagaggtcgcgcaggtgctgggggaggtgcgagggtgcgcacggagggtggggctgtgggtgtgcggcgagcgggaaggagacgggtggagggaagttggagagaggg

SEQ ID NO: 55021 - DNA, 1319 bp, Homo sapiens
gtaaatgcttcagttattaacaacaacaacaacacatacacacatacacactggccaacaattcctctttgttaccctttttctactgcaaattttatctcctcctcaccaaaaaacaaactgcattttgattttgggaaaattgttctaaaatgggactttaaaaataattcctggctggcttgactggattggcagatgtccagcaatgccaaaccatttgccatctgccagtagtaagcatggttaccacttttaatcgtttagctctctatttcaggttgctcatattcagtacaaattatgaatattcgccttccagggatgaattaattcttgggccagattgttcctgttccatttaataaaatgtctttcctcctatatgaatattccccttaaaatgagctattatacaactcacatcttattagtagggccacttttaaaggtgctttgctattttcattttctgcttctagatgaacagctatattacaaagcattctttaaatgtgctgttttgtgctatgtaagatcaccattttaattagagatcagtaacagtatttcgtcatttccctcttccatcctggacaataatttgatacaataaagcagttacactgggctctgggtgggaatagagctgtgagagttagacttaaacttttgtagaagagaagacttaattcttgcattttgtacataaaattaggtcagtgtcttgtagaacattatcactgcgtctcagatctcacttgccagcacgtaggaagtttgttttggtttcaaaatgtactttaccccatggtggctggcagggtacaatactattgacatcactgtgtttcaaatagaaagttaacaagtagctactgttgtgattgcagattgccttcccagtccctgtgagagaatgctttttcttttggacagcaacacttctcagccccttggtaccattaaatcagccaatgggggctgccagaatagagatgaacaccaacaaaaggccaaagagtagaaaaactgttaataaggcaaaaatctttaatcagtttccaaattgatgtgaaagataattaaaaaatattctctcccatcgatggctaagttttgacagtagtccaggttcagagcctgatctctctagagaggagtatcccttccctctacccagacccctggaaagttgccaaaggaaaataagctattttgtatttagaacaaattgccactgttttctccagtgatgtagccctatttcccagactttgaaacttggaatacagaaagttcttgtgtgaccaaagaag

SEQ ID NO: 55022 - DNA, 3252 bp, Homo sapiens
tgtctacccatacttacttgtaaatctttcttcaattttagcaaatcttcattttctccatttccagataatgcagcttcaacttgctggagctgagctttgtagcttgccagctgctttgctaaatcctctgacatctagggaaaataaaaagggttagaccatgaaaactaaaccaaaaatcaaggcataaaaaactaactcccctgtctgcctgaattaccagtttttgcctctaactccttctaacactgcagcttaatttaccaccattacctttactctcagtttagacttcagctaaaccacaaacttaaaggcaacagattctgaggattataaacttgagatacattccatactttaaaaaagcatacagatacaaagaaatttctaattttcttttaactcctatccacagggtaggtgctgaattcggctcaataatcagtgttatctttttaaaaagcactactctgttggaaaagtcgaaactttcaaaaacaatccaaatacttatttttaagcactacagtatgcttccaaagccaaacaagtgcgtttttaaattaactacacaaactacgatctttacttgaactattcaattaagagtgtatttaaaagtgcctctccaaaacaaaaatctttcgcccagtcgcttaaatatttatcggtgcattatcttcagcaaaaagaacagcacaggtactctcccatttaggcattctaacgaatgtgcctttcgccaaatccagctcagtcattttcctgaaaataagataccaattaaccttttttgatggtttataagcaaatgtaccacgtttccgaggacccttctccttcgtaaaattcccgtccaaccaaaggctgggagcctgcaaaggccccctaagagttacagcgacccaggctgctctcctccccgccacgcagcacctcaaagcccgccacaactcgatcattcggacgtggaaatccacacgccagctccaagaccaccgccggagccccgccgcgctccaacaggcaggctccacagggagccgcgcggcgcccagccccacccgacccggtcccctgcgggccgtgtttgccgccgccgcacggaggccagcgccggccgggccgccgaggctcagctctggctgagagacggccgtggctccgggatccagggccagcgcctgggcgtctccggcgaggcgggctcctcagccttgggcctccgcttcacctcgggagggacccgggcccggccaggccttactctctccctcaggggggttgttaccttgtgtggggctgggggcggggcggcgggaaggggtcggggcaaatgagcccagtggtagtggcggtggcagcagcagcagtagcagtagcaggaaaatcaccgcgacgacagcaaggcgacccggtctgaaaaggaagaactcggtcggcggcgagggggaagggaggaacgccgggcactggaaggaggaaaagacagagacggtgaagtctcgcgagaaatacaaactctcgcgcgaggtcgctcgactcacgtgactccgcgcgccctctagccagtccctggctgtcagggacacgaagtaggcggggcctaggaaggaaatggcgtagctgggcttcgccaggcgcggaatgcaggttatcttcctggagttccggcttggaatttattggaaatgcaaattctcaagccccaccccagacctcctgaatccagagactcttgttttaataagctcaccagatgataccaatgtccgctgacgtttgagaaccactgcttttccggggcggtggtggtgggtggcggggggtgttggtgggggctctctttacgttgccctggctggtctccagctcctgggctcaagctatcctcctgcatcggcatcccaaaatgctaggattacaggcgtgagccaccgcgcccagcctgagaaccactactttatatgatacaagccttagtagtaacagaaagctaattaaatcgtgacagaaataacctattggagagaagattgatttctttaaaatctgttttgttaaaacctacttggttttaatttagttgggttaatctcgcctgatagggaacaacgtccaagttagtctagaatggtaaagagtggtaggaatactcacatttgtgttcaaaaagaaatgccccttgtgtatgtttgtaataatatatacgctttctggacggatacacaaaactgttcagaggtttggagtggaagccaaatgttttattgattaccctctttgctgtttaccctttttccttttcttttttttttaaaccatatatatataatttatttcaattaaaaaagcaataaaggcctgagacacaaagttttatatagatgacaggaagcaacctttcctgggaggttgggagtttgttgctggatccataaaaaggcccacttctcgcggatcacctgaggtcaggagttcgagaccagctcgaccacgtggagaaaccccgtctctactaaaaatacaaaaaaaaaaaaccaacaacaacaacaacaacaaaaagccgagcatgttggtgcattcctgtaatcccagctgctcgggtggctgaggcaggagaatcgcttgaacctggaggcggcggttgcggtgagccgagatcgtgccattgcactccagcctgggcagcaagagtgaaactccgtctcaaaaaaaaaaaaaaaggcccacttctcagatgggctcttttgaactgtgccaacatctttagttcctagttttcttttcaaggagccttcccttttgttctctacacacacacacataacccttgcagtgagtcagataacctgtatagatggaaactaggtcgggtttgtgagtgtgaaagattgaaattgcagcagagggcagcagtgtgtagctagaattaagaaggcagacaaaacagaaagcatgtgcttttaaataaatattcgtttaaaataaaatgtagttttagagaacttctgttattgtaattgtgtgttttaagaaccgatgcgaggaggaacttccttgaatataaagtcaaccttattgtgtaaaaatctcttaaatgagaacttttcctgaaccccatagatcagaaaataggcaaatattcattataagttccatcatagatttctataccatcttaataattttttcaggattgtttttaggattgtttttatctatgcaacattcatttataaagaa

SEQ ID NO: 55023 - DNA, 512 bp, Homo sapiens
taggtcgttctcgtgaaagaaccagagttctgtcttcaagggcttcgtgcaaggcctgagtggatgagggttcccatcagcctccatgctctactgccctctccagcactccatctgccaaagatgggcaggagtgcagttgatgcttcttattacactctatgttaccatcaggttaagtttgtcttgcaagcctgaggtctgaaagcctggaatgccttaccagcctgcctgagtaatgtctccctctagttttgaagtttctgccaaggaggaatgtcactggaatgcagcctctactaacacctgggcagctgtccctcagtcatgaggctggcccggctggctcatctggtgaatgatgtggctgccaggcgtggggctgagggcccctggtgaattggccacactctcccaatgggcatgtctccaagacaggcggcccaggttaagaacaccatctgcagctaggaacaatgataacaacaatagcaagaatgaacagcaggttt

SEQ ID NO: 55024 - DNA, 1018 bp, Homo sapiens
atgacatttggaaatgtgtagttttgcccaaggttacacacctcaccaatggcagcaccacgactaaaacccagcaccaagactaaatgccatgacttttgatttctacttgtgcccctccaccccacactctttgtcacctgtctccttagaagcatggcttccttgtgtcaaaaaggaagaaaacaagagtgactgggccaggccacttacatgcgctatttggtgagcaagacaacagagaaacctcctctatgtaaataataacagggacaccgacatgactttccgaatgagccaaagcagctcgaagaaacaaagggctaactggctctttcaagacagtggagaatctgagggtgatgagttttgtggtattcaatggcaggctgctgtgacagagggctgcaaatgccactccggggacacgttaatgaaggctctgcatgcacaacacgagaggcaattattctgttctccctggcactgggtcctcctggcaggagagctgccgccgacgcagctggaaagagttcagtgcaaagttcacagagacagccagatggagaatgaacaagacttgccgtgtggctcagccaatgccaaacagaccaaccgctcatctgcaggccttcccctgatcctcgggaacatatgcaggaagggcatggtgggcggaagaggtggagacttccgctggcagatgcgagaggcatctggggtgcttccggcctgcgtgtaggctgccatctctgaagctccccgggcttagggctgccttcccttctggccaggtgttgtcaacataggatgcgaggagtcatcccaagacaaaacatggccagacaggtgagccagaaaaaagaggcagtgaatgcacatcagtttgtggatgattttcctggcgcccatttcgtaggccgacccggcctctttctctcaggttcacgcaggggaaaggctcttcgaggtgctggaaagaagactttgtctccttccttttcggcttggaccagcc

SEQ ID NO: 55025 - DNA, 6203 bp, Homo sapiens
cctgctcagatatcctcctacctgcctcctgcaggagtcatcacatcctacgagacctgttctttcggtcttatatgattggcttatatacactgaaaagccaggaagtcgatctgaatttggacaaagatggaagctcagtagatgtgatctggaatcctcctctctctcttaaacacacacacacacacacacacacacacacacactcactcacacacacaccctcttctgctccttttttcaaggattccactcttagattctcataatcgtgaccaaaatggcggagcccacctccagactccatcctacagcggaacaacagccatgtaaagagaggtccttgtgcccagccacagtcccagcgttgatttggattggccaggactcactttcgtgtgccctcagggttctggagagtggattagccctactgaagcacatatggccagagttggggcccatggttctcccccaaaaaaatacgatcaattttaccagaagaagggggaatgggcccaagacaggcaaaataatgtccactgaagtggggcttttcaaactttaatgagcacactcatctcttggggatcttgtttaaaaacgcagattctggttcagcaggttggggtagggcctgagagtctgcatttttgacaagctcccaggggatgctgatgcagctccgctgggaaccccatcctggacagtgagggacccaaagcaccttaagacctggccccgaacacacttcatgtatgtgcaatgtgcgagggggactgaagtgcaggtgggcttggtgaccacctcagtcctccttgaaccccagggcccagatgccctcttagatggtttctcactggcacctgacaggacaggcaaggcaaaccttctttcttattcctatttggcagataagaaaaccgaggctgaaataaactccgtagctctcccaagtcatgctaggacaggggttgaactgggtcccagtgacccggctgctctgaaggacagtgcagtcctcctaagccaactccctcctcttaagggacaaagagcggtaagtcagagccctcactagaacccctcccactcttaggaaggtgttgaagggctgccagggaaaaaagaaagaaaaacaactgcctgacctctgtgtatcggtcacaccacaggactggaaattcccaggccactgagtagaaagctgcgtcagccatgaggttttacagccagcatagacccaggtgatctcctggttgtgatgcttgtaaatcaaagttgcaaagggcaaaggtcatgtgggcagctcatgggttatttttaaccttctctcccttatcagttttctccttcctgctctccaggtggttatcgttaacagatatgtctcacccagggtggggcccatcatacctgggctccaaggaaagaaatgagggtgtccctggtccctggcaccacctgacagagtggggctgggcatttgcaagagattttaaggaggctcctttgtggatctctgggctggcacaagaggaagatcattcagggtgatccaaatatggaatgggctcctggagagggagggagtccccatctgttatgggttgcattgtgtgaccctcaaattcatatgttggagctccaacccctagtacttcagaatatgaccttatttggaaatagggtctttgtagatgtcattagttgagtaggttgggtccctaatccaacatgatgggtgttgctattttagaggagaaatgtggaccctgggagaacagcatgtgaggacaaaggcagggatagaaccagggtgatggaaagcatagaattcataacgcttttcagctatagaagccacagatcccaaaagatggccagcaaacctccagaagctagaggagaggcagagcctcagaaggaaccaacactttgattttggacttccagtcagagacaataaatttccagaactgtgagacaataaatttctattattaaagccacccaatctgtggggttctctgttgcagcagctctaatgatctaatacaccatctttagaggtgtctgctgaggctgcgctgctacttggcagggatattgtccagtagagacattatgctagccacgtatataattcaaaattttctagccgggcatggtggcgtgcacctgtagtcccagctacataggaggctgaggcgggaggataacttgagcccaggggttcaaggccagctttggaaacatagggtgaccttgtctctaaaaaagaaaaacaaataataagtaaaataaaaatgtctagtagctacatttaaaaagcaaaaagaaacagatgaaattacagttgacccttgaacaatgaggggattaggggtgccaacccctatgaggtcaaaaatccaagtataactttgactcccccaaaacttgactataactagcctgctattgaccagaagccttgccattaaaaaagaaaatgttattaagaaaattataaggaagagaaaatatatttactcttcattaaatgaaagtggttcatcataaaggtcttcatccctggcgacttcacattgaataggctgaggaggaagaggaggggtgggtcttgtctcagggacagcagaggtggaagaaaatctgtgtataagtggaccctctcaattcaaaccgtgttgttcaaaggttaaccgtaattttaatgatagattttatttcatccaatatatccaaaatattatttcaacatgtaataagtactaacaagagctataaattagatgttttatatattttttgtttgtttcttagtaggtctgaaatctggtgtgttgtttacacatacggtacagctcagttgggactggctacatttcaagcactcacacggctagctacatttcagatacacggctagcggcccacatgttgaagagcgcaagttgagtttttcttcccctttgtatccatgtggcttcaggtaatttactgagcatgttagagcttcagtttcctcacccataagacgggacagtttcttcacccataaaatcaggcaataacggacatacctgtcttcagtgatttcctggcatggggtcaacctccacaaccaagccctgtaactgtggtacaggcctgtgggcatcaggcaggatatttaaaaaccttcccactccaaaggatcacacaattgcctcattcctcgctatgttcatcttgaacccccttcacactcagacctacctccagcctccccactcaaccaacctgagtccacctcctccaggaagccttcctaaggtcccagcccccatttaaaattcctagaacacctagggagagtctcgcaatttaacacttaattgttctgtgaattgtgttattactgtgagtgaggttttgaattccttgaaggctgggatgtgcctcctctgttttctcatctggcctggagttatgagcccggttcagttactcagtcaggcaacacacctttattgagcacctatcccaagtcagccactgggccctgctggacttatagtaggtgccaattaatggtgtgcaggttgatttagctttttcttttctttttcagcccagctcttctaaactccataggttgacttatctatgcatacctctcagaagccctgggagagatattctccgggcaccaggactcactgcccaagctcgagtcgctgtacctctgggccagggcaatggaggtcctggaaccttccaggaaaaagagttcaaaaggttttggcagtgaccttttccagtgtgcttccccccaggcaaagaaaggtttttcactgcagcctggggatgggcctcaggtaggcactttacgaagcccaggatgcccaggctcaggatgagacaccatcctcccctccccatttccctcttgcctggatggcatcttgtgacttgtttactacaagtcacatcctgatagaggccccactcgctggaaggggcaatgaatcaccagcgtctccatgggaatcacaacccagctagcccagccccacccctcctaatccactgcccttaccccaccccccaacacacacaaacagtcatgtccactgggtgagcctgctagggctgagcctggcacgggacaaggaaaggcttgcccaaacaagaggtccccgcccacttctgcctccctgagcagcagctctctcttctcctgtcagctctcggactggaccaccctccatacagattacagagggggcatttgtcccccaagagccatcccacacaagacttccctgccacctcctctcttattggaggtaaaaaacaaaacaaaacaaaaaacaaaacaaaaacttgggtttatacctgactctgatacctctgactgtgtggctttgatcaagttacttaacctctctgaaccttaaattcctcaaccataaaatgaggatagcagtattacccagaccactgggttggttgtgaagtttaaatgagaacattcacatagcatgcttggaatagtgagtggcacacagcaagtgtgcctgataactgatccttcatgatggtggtgatgaatatcatgggcttgtgtagcacagcaggaggctcatttggccaccagaatgcacattgcattctattgcaaagctaggaaacgtgatgtcaatcgtacctgcatttccgggattttgtagcctatgacttttgttgaggaatttgtaccgatgcagggcaactcatgcattctacaaatatgtactgagaactcattcattctacaaatatgtactgttaaggaagtgacgtgttcttggcagtcccaagagcagaactgggggatgtggatgagaggctgttcctggcagcttcccagacccgtatcatttgatttgcaaaggttgcacatcaaatcatgaaagttcctttcatgatttgctgagatgacggcaggttctttgcctatatattgggtctagtatggactggaggtgatgtccagggaggtgaggcaggaggggcctgtgcccaggtcttgaagcagtgttggtttgggccatagcttcacctcttccaagtcttgtgaccttgggaaagtcaattagctttacagaacctcggtttccttctctgttaaatgggcatagtaacacctagcctgtgacctcacagggttgccgtcagctcacatgtgtgaaagatagcctcttaatagctgtattttccattcattcattcattcagcccttacctatccacccaaccatccaagattattttgattatctactatctttcagttacaataggaggagctgggtacaaagggaaacccagaagacgtggggaaaatgctggccaccaggattccatagcagagacagtccatcttccagccctccagatgtcaatgttggggccagcagacaggagtcatcgaataagttcttgggaggggacaacccttcttcaatccactccaggtgacaagtggttcctttggtctaggtgagaagcagcccatcctctggacaggtgcccagggtggaccgttcccctctcttggaccccagccagcctgcccagccctccagactgaactcttgaccctctgtttttccatattttggcaggagatgggctctgaaagaagatacctggctgggctccagagagtatacccacacttcaggcaggaggtagggaggatggggcccagccatgctgtctccttctttcagaaaaataatgcttttatgcaggtctcccccagaaacctctgcttagttttctttggacagaactggaccatgtgcctactcctcattgcaaggaagcctgggaaaaaaggagcaggattatcatgattgcttagaccaaaggttgcaaactttttctggaaagttgtagacaggaaacattttaggttttgtgggtcatacagtctctgttgcaactactcaactctgcctttgtcacgcaaaaacagtcatagataatatataaacaaacgtatgtggttgtatttaaataaaactttatttatgaacacttaaacttgaatttcagctgggtgcagtggctcgcacctgtaatcccagcagtttgggaggccgaggcaggaggatcacttgaggccaggagtttgagactaacctaggcaacatagcaatacc

SEQ ID NO: 55026 - DNA, 2590 bp, Homo sapiens
acaccccttggacttccattctaaagtcagtaaattccgtttttgcattaagcaaaaaaaaaaaaaaaaagaaagaaaagaaagaaaaaaaaaattttttttttcagtcacatccaccattccagcaatacagagaatgagactcaggccccttgctcctttgtactccatgcttaacctctcaccaaacttcctccttagaggcctatctaccctcatgcaaattaactcatacaaacagataccgaggaggcccactactaacccgtaagtgcctttgcctttgtgctatttggaactgtttgatctatacagaaaaatttgtcccagatacagtccatacttggcttggtgaggtaggggtgggtgggaggaaagaaaggtggggagagagaacaaggcacagcggccaacactcgctctgcccaagcagatgctgaaccccaagttcatcctgtcactctgaagggatggtgtccacaccagaattggcctagggctggatgtgcagtagaactcaagaaaggctgcctgccttggtctttggaattcctcctactgctcccagttagaaggatgagttagaagaaagaagagaccgtcaatcaagttgctgggtttcgtaaactggccccacttcccaggaggatttatccgtgagccagaggcacctcatttctcactgcaccctttggcctggctccagccacacccccacccgcaaataagtccttttccttcctagagcaggagccagagaatgagtcagtacctcattctcttcattctttcatcactggtcaggcctcacccttccctcggccatcccctcctctgggcaaccatctggatcatgtgtgggcaaggctgttcccatacagccagcttggagggtcctctgtgtgagacaggagtgggcagggctgacctctcagctcctggggactggagagagagctggggcctccagggatgggccgcaactactggagtctctcccagcccctaaagaagggtatttcctggggccctgtcttcctcctcgggcatcaagtttatttctgtgtctgtcctagcaaagaggaatgaaaactcctttagggagtccccgccatgccccagaccccaccacgaactctgaattctcgtggcaatcctctatgtggcgaccatcagccacactggaatggagggacaaggctgtcgggaggaggcatttctcacgcctgtgccgtgaacgtgctacctctgcatgctcaagcccatgctgcgccactcacaaggggctgtagcattctgggccagcgcccttctctctctgcctcctcgcctacagcaagctttcttcaggcctgcggctggtgggccccaagccaagagtggattctttcatactctctggtctaaatcaagctgcatcaggtggcactcccggtgaccctcctgccttatttggaagaagaggaggaagccagataagaaaccatccaggcaccatgggcccttcttatgggtcaccccacagatggcatcattctccagagagtggggaatatgagctccgagaggccctgagcaaggtgtcaaaggaagagaataaaatgaaggagctgccttatagggccctagaggaggacaaatatttgcaagtggtagtcattttctccctgcaattaaaggaattctccactttaaagcaaatgaaaattaaagggaatgtgggagccagagggagcccctgggaatgttacggggggagggtagtctgtgaggaggggtctactgggcctgttcagtcagagccccgtctggagcaaaggttgacctcaggctctgttctgggtctccacagtattaaatcaccaaagggagagcttcagaagccccagatagccctggtgtctccaaagaactagagaaaagcagcagccttggaccttggagaatcttccaacatcacttcccagccctggtgtctccaaagaactagagaaaagcagcagccttggaccttggagaatcttccaacatcacttcccagccctggccacacattagaatcacccaaagagcttttaaaaatattcactccaaggccggatgcggtggctcacacctgtaatcccagcactttcggaggccaaggtgggaggatctcctgaggtcaggaattcgagaacagcctggccaacatggtgaaaccctgtctctactgagctgagatcacaccactgcactccagcctgggtgacagagtgagactctgtctcaaaaaaaaataccccagaccaaatggatcataatctctctcagaatgggggctgggcagctattttgtttaatctattcacacgatactactgagctgtacttctcaaatttcccttatgagaaaaatcagctggggggcacgtttaaaaacgaaaaagaaggccgggtgcagtggctcaagcctgtaatcccagcactttaggaggccgaggcaggcggatcacaaggtcaggagttggagaccagccagcctggccaacatggtgaaaccttgtctctaccaaaaatacaaaaattagccgggtgtggtggcacatgc

SEQ ID NO: 55027 - DNA, 766 bp, Homo sapiens
agaaagagtgagagagagagaaagagagagagaaagaaagaaagaaagagagagagagagagagagagagagagaaagaaagaaagaaagaaagaaagaaagaaagaaagaaagaaagaaagaaggaaggaaagaaaagaaagaaagaaagaaaaacaaaaacaaaaagaattatcaggctcccaatcaagcaaagccagcaaatcagaatatctggaggtgactggtgaaaatcagaacctctggggaattaggcccaggtcttttttgcatttctaccaggcttcccaggggacatctatgctgacagaaattgcaaaatcacattctaatcctctggtctttgccccagctcgctcagctggttgcccctttgaccctcgggcctccctagaggccttctctgtgaacacaccgtagcatctgtcttcttcctagcactcatcaatatttgtgattgtatatttatttctgtgtttctttaatgccagtctcccacctagatgataaactctgtaagggcaagaaccaggtctgtttggttctgtgtaaggtggtggtgaattaccagtgtaggctctgaagcttggactgcctggcctcatatcccagctcccctacccagctgttctttgatcttcagcaagttgcttctccttcctgtgcctcagtgttctcatctgtaaaatggatatttgaatagtagtacctgcctcacatggttgatgggaggaataaatgaaattatatatgtaaaacatttagc

SEQ ID NO: 55028 - DNA, 892 bp, Homo sapiens
aactgccagttgccaccttgctctctccacaccctggaagctccttgaataggagctggggctcattccctttgtatccaagagctggcacagtgcctggcacagagcatgcactgcatgagtgcttgtcaatcattagaggaaggaaaggactcaccccagtgcagacatctgcagagatggaggaagagagaggcctgagaaggggttattggatttgttcatcagaagtccctagtgactgttggcagttgggcgttgaggggttaacagggatccagagctgctccaggtgtccctgtcccctccacaagtcactccccaccaccacctgcccccccagcaggtgaaagaaattgggggaaagggaggatcgggctgattcctcaatgagttttctaatggacaggctccctctctttctctctctcaggcccagactcgccaactctgccaccccctcaatttggcaggggctcttatctcagaagctgctggaagaatttggcattttgaccctatttcatcactcctagggcagtctggcagacaaagatgctccacacagcagctgagctcattcacagaagcaccgcacacacacaaggcccctccaaagtgagtccccctcccccagtgacctgcatctttatgacacctgcgcaggcctaaggcacagtgctgcagggtggatctgacatgagttgggggtggaggtctggactagaactctgcctctcctggatcctggccttgcacaacttcacttgccctgaggcctgacattgcatccttggggtttaagtcacctgggctgggagtgctcagttaagatgaaaatgcccccagggtgaaacacagtcactgcagggaaaaaagataagtcccacag

SEQ ID NO: 55029 - DNA, 1647 bp, Homo sapiens
gcgatagagcgagactctatctaaaaaaaaaaaaaaagagagagagagagagagagagagaggagaacggatgcagaagacaccgaggggagaacgccagtgaagatggaggcagagacaggagtgatacctctacaagcagggaatgcacagggttgccggcaaccaccggaagccaggagcatggcctggaacagcccctccgtcaggacctctggcaggagacttgctgacaccttgcgttcaatgctggccccagaactgtgagagaagacatctctgttttaagccactcacttggttagtggtactttgtcacaggaaccccaggaaatgcatacaccaaggtaggggtggcaaaaagcagagctcagccatggcttctggggagaccctggagcccccacagagtccccagcactcagcgcctgaaagggccaggtccctttgggtcaaagagtctgccctgtgctcactcagctgtgcaggcagctcccagctcagagagagagttccctaataaacaggcaaaccaaacccatgttccctccaggccctcgagtcacctgccacttggcaatgagaggacgtcagcccagttcctggctggtggctctgacaggcgcccatctgctccggaagtgtccggcctggataaacagagccaggctctgcctcccacggctgacccagccaggtcaagcggaagcccagggcctcaggcctcaggtctcccagggctcactttccacactgacctggtcacagctggctaccccagcaggaatgggcatccctggaaaatggctgtgaagacggggggaaggaagagttggggacctacctcccaggccacttccctggatctctgctgggcccagggtcactgcccctcccatctgcccccctcctcactcacgcccacatgaagccatctgccaccctcgccccctggcaggcaccacagcctcatgactcagcgcccagcccagagctgctctgtgggtggccactccggaaccttgcagagagggaggtgctgggaagggggtttgagcgggggtgggtggaggcagaagacacgtgcagaccccaggtggctgttcacggagcaccaagccctgacagcactgccttcatccggttttgcaggcaacaacctctccagcagaggtgttgcctaaaataccacggcccaattgaaatgcacctgatcagttccatttttccctccaggtttccccacctgttctcgaggtcctgatcccaggccacgctgggaccctttctccagttccatctttgcttcttcctgtgccttccccaccttcttgcagcccctggaacacatccctggaacagcttattcacccccacacaaccttgagtagataaaggcccacaaaggtattagagacttcgtgtcatcctttgagcaaggggcttgaccccaagtgcccaccccaaaacgcctgtggtaatggtgacaccataggtgccattctggggaagggagagagtgagggtggaggatgtcatccccatagtggcagggcaagagacaggtccccgccccaggcatcttgggcaggtggctccaggttccgttctgagtcaggcgttttttacacctgctgctttcgctca

SEQ ID NO: 55030 - DNA, 3709 bp, Homo sapiens
gcagcctggcttacaattcattcctcggagttggcctcagctctcctctcctcgggaggccttctccagcccacgccccaccctgccacacccctactgggcgctcttccccacggactacaggccttccccttccctctgggctgggggcagctggggctgagtataagtcttactcacgttggtgccgccagccccaaaacaaagcctggcccacgtgggtgctccgcgtatgtgtgtggctctaggcggagatgccgggggtggaaagagccggtaacagaaacagaacgtgctagaggaagagcagcctgcagggaaggctggcacagataaccacaaaaagaaagaaggcccccgcatcacgtcttcaccaagaccccactggcaaggcgaggacagcgcctttgggtggatgcatctgtgacccagaggcaatgctggctgtcctggtgtctgatttgattgcatctgatttcaaaatttgatctctgcttccttctgaaaacctcattcccttatgtcagttgtcaacaagcccttgtctagtgcgggcagactgttttccatcaagcagtcccagccaggctaacaataaaatggttggcagtgagcttgggggcagaaacctgtttccatccatgtgtccccgcagctagcaaagccctggcacacggctgaccctcaataaatgcttgctgaatgggtgaattgtgtctgcttccccaggaataggggtgggaggcctgaagcccctggggaccggtgggggcagacagcctgagattaaacttgatccatagataatcccccaaatccagaagccacctggacaacagttggctgaactgagctccatcgtgggatacatgctgatggtactgctgagttcaccaagggtctccccgggaccagaaaacagctcctcaaaatacaacttattattctaatcattattggagagtgacagagaaaagagcgtcaatcctttgagggcagaatccatttaggaagattaaatggctattctcaccgccgacccccaacccccgtttttacttttacaaactttattatgaaaaatatcaaacatacagaaaagtggagaaaacagtataacgaatccggccacccatcacccagcctcagcgatgaccaacccgcgcctgacctctccagtcatctataccccacccctcgaggcaaatctccgacgtcctctccttacacgcgcagacctcggtagcgacgggaatccgttccggactcctctggggccctggccggctccctcggccctgctcagcgcggcgcgggcgggttctcagcccacgtccgtgaagctgaaggccggatcgtgcggcgccgccccgccccccacggcgcttcctcctcggtccgcaccgcgagggtcaccgcggccccggagcgcctgggacactcgaccggcagccgcgggtgatgcgcgagtgagtccctcagcgaagcgcggaagagagaacgaagaggcgccttccacttcctctcgctctaacgccggcacccgccccgcgcgtccctcgcccccgctgccccgccccctgcagggcgtggccacggcccgaggggcggggaaacacccatatttggccttatatgggcagccgcgtcacggacggcactcattcacataaaacgctgcgcggccggcggaatccccggcttctagggcggcgagcggccgggctggctatcgagcgagcggggcgggaacgcggagttgcgccgccgctcgggcgccgggctccgtcgcggccgcagccccgcgggtcgccctcccgtgcctcgcccgcggacaccctggccgtggacaccctggccgtgggcacccgcggggcgcgcggcgcggggccgctggccggcggcggcggcggcatgaaggtcacgtcgctcgacgggcgccagctgcgcaagatgctccgcaaggaggcggcggcgcgctgcgtggtgctcgactgccggccctatctggccttcgctgcctcgaacgtgcgcggctcgctcaacgtcaacctcaactcggtggtgctgcggcgggcccggggcggcgcggtgtcggcgcgctacgtgctgcccgacgaggcggcgcgcgcgcggctcctgcaggagggcggcggcggcgtcgcggccgtggtggtgctggaccagggcagccgccactggcagaagctgcgagaggagagcgccgcgcgtgtcgtcctcacctcgctactcgcttgcctacccgccggcccgcgggtctacttcctcaaaggtgagcgctcggggtccctgccacgctcgcccctccggcgcccccgggtcccctccctgcgccggggcgccctcctacaccctgggaccgggagagtcaccacctgcaggagtctgcaccctgtggcttgttgtgcgcttgggagggcactgcaaatgtcagcactcagagctccccctcttccccacccgcgttcctcgaaagcgcccggcagcgggtctgcccggtggtctgggtggagttggttatgctgcgggggctgctgctgtttagcagtttgggggccgtcggctcgtgccgggcacgagccccctttccagacgcgagcttcgccgctgtcgctggggtcagggctcggggccttcctgatagactgatctggcgggatcagcaggtcgcgatccactctcccttggtgtggcgccgtggtgccccccttcctcccgcctagccagctgtggtcttcaccgacccccttgcctttttgacctggcgagtcccttccctttccatttcattttattgctttttattgtttccctccggcctcttctcccctcctaggtcttttctctagctcagtttggagctcacatcctttccacccttttcacctcctccttcctccgccccaggattatccctgggacccatcctgagctgagcctacagccagccagccacgaaatagaggtgcgcgggggcagggtggtatggagattctgcggcctttgatttgacacctcccggagctaccgccacaggcctgcccatttcacctgccgggaagataactttggcttctggtggtgggtgggtgattgactctcaaaatccaaagcattggttttttctgggttacttcctatgactgctcctgctttgtgtttgagtcctttgtaacctcaaatgacacccggggagacctgacccacatgtagagatgagggtttagccccagcagggccccaaggccgtgccagccctggcgcggacaccttgggatgtaacagtgttggggatcagagctcggtgcagagagccggcgccgagttaggagcctgttttaaagccatgcaacttgagtttcacacagtccgggccaggaagattctggagacagttcccctctctgctagcacctcctgctgactggtcccctgttgatttcctgttggagagttaacagaggtagatggtaatcgtccttcttctaacagcctatcccccaggggatagagggttggccctctggctctgcagaggtttcagcgtgcctcctgatttctttctcttcctaatatggtttttatctcctgtggtttggagaagtttctgcctcagtagtatgaaagaggttccaggagaccctccctggtcccacctctcctccccatgcttctctaagctggccct

SEQ ID NO: 55031 - DNA, 1321 bp, Homo sapiens
gatcttggtgggggcaatgccttttgacactttccataatcccctgtctcccaaacaaccactaaaatgaaatggtgatgactgaattgcgtggtcagtgcttatttatatatagtatctgtgctctctctgttccctggtgatgtggtggtgattgaaagcagactcactccaaaagaagtagctctaagaattgccatggcttttgccactcgagtgaggcaccagcgaggaatgttctgtctctccacacctctgatgggagtgggtgaaagactgagaccatttaatctggaggattcctctgaatcccagcttgaagaggcaggaccctgtttatctgtccctcaactaaattttgtcaacagcatgcaggatccagcccacacccgaacctcttatctgtcctcctgatagccaactctgaagtaatatatttaaagccaaaagatggggtagcctgaagattcctatttccccaaccttcgtcctgaagtttgggagggcccaggtcattctgaactccaaattcccatccaaatccttgtttgtctcctggaacccataatgtcgaggtccaggcacgggaagtgatcaggtggtttactgactagggatgcctcttccaaggaagctgtgggtcattgtgagcctgcctcattctctcttgactgctggaagggaaggggcccaggggctatggcagagcatgggaagctaagctgcctatagcaccatcttgcacctctgccgtggcctcccgttgtcgtggggagcatggtcattgaggaggaccaggagctcatgggcaggcgcaatgggctgcttgtgaggtgaccacaggggagatctgggtgtactaagtgggggcggggcagttccagtgagctgagaggaagcggtaatggcaagatgactcattctaggaattggctgcagcttctgggagggagttggagactgccttgtaatccattaaccatttgtctactgcagggctttaaaaaagccagcatcacaacacccaaagtcagaaaagaaaaagggggttctttggaaaattcatggtctcagaatgcatgtttaatggatttgactccaagtgaattctctgggccagaaaaagacaagtgggctttctggaggccctaggaaatgtctcaggttgctctctgggttaccagcaaaggagtttcccaagcaaggctggcctgttgcacctggcagcccttggcattctgagggttccaaggccaccttttcattcggttcttccccactgaaatgggcccaagaaggcttacttatatttgcaagtttc

SEQ ID NO: 55032 - DNA, 1153 bp, Homo sapiens
ttccacatggcctctaatctagacacctgacctggtgggagtaacctttcaaacttttcacataaaccaagaacatacccaaatcataagaagaaagattgctagatgctaaaatgccagctccctgccatgaacaaaaccctgtccctggggataaacttcaaagtaaagccagatgaccttttcttgaacgggctccttggtcaggaatcctattagcttgtccagatgccagggttaggattttgtttgttttcctttaataaacatccttacagtatatgacgagcctgtggctttcaagctgtggacatctggcctagctagatttctacttttgtttgtttgtttgggttgtgttttccccccatttctcagaaagtgaaagagaaataagaattggcagaatgttgcgaaagcacggcacatctttggccaagtgaggggtgagaaagccctgatgtgtcttcaagattcatctggggaaccccctaatgctacttcttagaaatgcttctgcatttagagcagccagatgaggttgtgttaacttttggggtttctgaaggcctttggcttcttcctcttggtctaaacagaagttcaaaaagggaaagaaatgtagtttcaggggtgtgttgggctgagctccaaaagaaactggataggatcccaggtctggtgtatcagcaatttccaggcactcaggagaggaagagatcttgagtcaaccatccagcctgctccttaaagggcgagcctgttagtgtccattggtggggacccataagtcatcagtggccacgtgaatctggacttggaactctgactcctttccaaagaactttgtaccacctctgctgttttcctggtttctagctggtggggatgctgtgcccagggagtgggtccaactcaggtcaggactagacctgcttggattgcctaaaaacctgtgtcttccccatggagagaagccatgttctgttcattcttcaatctctatgacagtggcagctatgtgacgtgccaggttttaatgcattcattatcccatttacaccttaccaattatccagagaggataggtattatccccagtttagagacaaagggtcatagattaaagaagctatccaagatcacatcaggt

SEQ ID NO: 55033 - DNA, 1720 bp, Homo sapiens
ttcaggctgttttcttttgtttttaaagtggattaaaagctttcagccttacctaaatctttgttgcaattgtacagatctgcctagatttatagcagatggtagaacagaaacagttcccgacggaattaatcatcacattattaaaacaaattttcgagcattgacaaatcccttcggggttgtcctccgagtgggcaattcgtaaccagcttggggcgtgctaagattgtaaacgttcctatggagagcgataacaaaggggcagcagtgactccgcacacagaattccaagaatcaccagcattccatgtgttccaaggctagcacagtgcgcgcgaggtccgcttttttaaacagcgcggaatcacgtggccgacagcccgcggcgctactggccctcggagtctccctcttggctttggcgcggaacctttccccctttgtggacgcgaccattggccccgcgctcggaggtggtacggaccaaccctacggtcatagattttccgagtgaagcttttgactaagtctcaggaaagcgttagctacagaattctagattcaaaagaaatccaccaaaaaacgctgtggaggactggttttgcctaaaagaaagagcagacctgaacttgactcctcctacgccctgtgaaggctgcaaggtggttccgtccgaggcgcggactccgcccccacgagcgccgccattttgtttggctgaggggagcgagcggcgctttgggggaggggtcgcgtaggcgcctcacctgaccctgcggccgtgcggttgctgctccggggcaggtctccttccaggccaggggcccggaatcatgtacataaagcaggtaaggccttcgcgtccctccaccccgtcatgggccggtaagggccgctccttgaggcgggagtgttgcggcgccacccgcagcctctcccctgtctccacaggctggaccagggctgggcggggactgtgggggaggagggagacccgggtcccgctagtgccccggctgcggggtcgcggagaattggggcactcctttgcagccccggcctccctgctggcgcttgtctgggagaggcaggatctccgagaggtgtggaagggccggcgggcgggccgctgggagggactgggccttcctgggtggccccagagctggcggggggcaccccgccggggcggccgcgggcgggaagggctgtgtggtcctgcaggggtggcctcacacggcccatgtgcctgggatgtgtggaaaggtggcttccccggcccgggggcggccctgggggcattggctggggtgtcgtcacctgtcactgcggggagccgttcttctccccagttaacccgcgaagtgagcgggaccctcctgcttgcaggatacggagcgccgcctccctcggttgtttacttctgtcaaaatggtcttcccgcgcgggactccaccacaaagatgagcccaggcacacggccttggagacggttttctgttgggtctgtcgggctctgagcactccttctttggaacgtgggttctttcaggctggccggcgtgagtgactgaaagcagcactcggtggtcttggagtcaggagagctggggcccgtcggcctgcttttatagacttgctattgtactgcagcgtttagggttcagttaagctcacacagtgtttttgattttgaaaggtccttaacaggttgaca

SEQ ID NO: 55034 - DNA, 1073 bp, Homo sapiens
agtctcatcaccaaaatatcacctgggacccgaggtgctgaggctcataatcagccacttagctctgaagacttcaaattcaccccagagggacaaacttagggggtattttagggccctattagggactcttcttcctatcttgtccgatgacggctctcggaggctcctggttttgatgtctggcattgcttttacccggtgggcttcagggagccgtccctgccgcgctttgcgtttctccgcgcacttggacagggttctgccacgagggaggcgatgcctggcgccgcgggtgggggcagtggtgagacttcggcccctggtggccggagaggtcgcagcacttgtcagtttatggctccctcggctttccccttcttaatccgctttctgctgagctctccgaataattcaaccctcgtgtttgaaaactagaagcctgagaggtctcagcgagacagtcaaaggggaggctcccctcgccgagtgtcacccgggaccctgcgtccccgctctgcagagaccttctctccgggctgctgccgtcctccctcgcccggcggagcttccgtgatcgtcagccaaagcccccggggcggtgcgccgcaggcggtcttcccgggtgttcgcggaagctgcgcgctcgcgcccccacggttctccagcgacccctgaagatgcttccgtccgcggataggggacgtttcagacctggggtgggcacagcggtccccggtgagatggtcttttctcctggagtgggaaggcaactttcttttggagtgccagtgcccccagagtgctaggttgtaccgtggacttgtacttgagtttttcaaataaagcttgacacatacttagtatagagcagtagaaagcagggaggaaaaactcgtcatgggtccactatctaaaatcaactgatatttggaatagttcctttgcttttttgtctatacatacgttagatttattttttctagtttttaattgtactatgaagctcaactttgaactttgcattttttctcttattattattttacaaacatacatactggctgcataat

SEQ ID NO: 55035 - DNA, 828 bp, Homo sapiens
ggagatgctttatccggcacctactgtaagtgtaccaggtttcttgaggcagtgcctggaaaccttgatcctggtctgcctgcatccccctcaggaacttgactgcttgggctctgactgcatgcctaccatgtgtcaggtcttcgaggaggagtcccagtcctcaaggagtttaaagttttgggtagagaaacgtgtggattgccaagttactgcaaagtggactgtgataaacactgtcactgagctctattaagcaagtgacaccactccatgaacttggatgatcatagctctttcccatctacacagcaggttaatcattctcaccctgtgtaattcacaagaatgactcgggagtaaatgagaccaagaatgtgccagagttgagtgtactagtggtgctaacattttggaatcagagatccctttcaaaggctgatgaaagctttggactttcacctcagaaaaattactctggagcgtgcgcttatatgactttgcaaacagtttcaatttcatggtttttatgaacatcctgaaacccatccatggacccttgtgggggacctgtaggtcaataacgcctgtttcggtgcttgttccctgaaggatgttttaaaagtcccagataaattcacattactattattaggaatcctatgtttctcagttacttctatgttaaaaatctttctcctaaacaattatttgctaaatatcccttataactaggtattatttagattgatgaactttaaggataaagcaaaagcaagacaatctgattggccagatttgtcttctgttttgtgtacatgtataaca

SEQ ID NO: 55036 - DNA, 513 bp, Homo sapiens
gtatgtatgagtccatcggaaggatacatttctgtaaataggattgctgggtgaaaggtatatttgcttttgttttgatgaaaacagtcatctagcgcatgagcatgtctgtttgccccatctcaaggttttatgccttctagttaagcatcggctactacatgtagagctcaggacactgacccatgcacgaaaggtacataagtcaaagttactaattaacatgtatcttagtaggagtttggggtatttgttcaggattgctgatctcatggctagattagtgaacattcaccccaagagtgaaaggctctggaatttaaccacaagcttaggctttgaagatatggtatctcccacccatctccctctgatggcagattaactaggcggtgggcagaaccaacccttccacacgccagcctgtcttccttagagagcacaagtgcatttgcccagaacattcacactttcagacctggagatgaaacacaattttttggcagcaaatct

SEQ ID NO: 55037 - DNA, 2417 bp, Homo sapiens
tttcctcttcatatttctgtattttaaaattttcaaaaaaaaccaaatatggatattaaaaataaattctcacctataataccataccctcattttataaaaataaagaatattttcaaagaaataaaaatggttcagaaggatggaaagaaaactatactatgggactcgttagttaagttgacattaatcctctgctttaagtctttcctgtgatgacactagcagaatgtgtatcattttctctgcatttgctgcaggatcagttctctttggcaggttttgagccgttctaataagtccagcatgaaaggcaggcctctcgtgtcagttctaaacccaccagctgccccattgtgactgcatagtcccctggttctgagactgtgctctgcctgataagcgacgtacggagcacagtggactgaaagcccggggatctgataccaaacatgttagttaaactcatgtttaactaacccaaactcatgtttaactggcccaaaggaagtaggcccagaaatgtggtttttggagctccctttaatgaacgtgtaaacagaggatagaatattggccttacagtttaaaaaccctccttcaagtcccagtcaagtcccttattcactggatgacctcacacggttcatctgatctttcttggtctcagtcttcttactatagactggaaatggtcatatttgacttagctgtccatatggctgttctggagatgagacagctaatgaagtgagaacactcattaacacaccaactgaaaaacacaaaacaaaagagagatgataggattatattgctgttatgaatcattccaagaggtgtcatggtgatatgaatcatcatatggtaatgtcatggctaaggcccaaacacagaatagcagcattgacccagtagtctcgaaattagtcacagaggccaagctagtgaagacccagcagccctattgttatcaagaaagagcactatccaaaaggtgtgtggcctcatcttctccttgcaaagagagaattcatctggtatatgttgataggcgtgtatccgaccacagctacctccatcagccctgaggacagaggcagcctgcattccagtcccagctcttctctgtctcggtgtgtgacttaggcggtttcacagaggacgccaacttcattggcttttgcggttttttgtttgtttgttttttgttgttttctttttgtttgttttgttttgtttttgtctgtagaatgagtgagttaaactaaattgtctgtaaggcctcagctcactcttaaagtgtgatcactagctagagtttgaactttagccccaatatgactgttgtgttgtcattgtcacctttgtaacctgacattcaggaatgtccctctctagttcatattctgacctagcttctgaaagcattatagcagagttgagaatttttgatctaggaaagataaatattaaaaagaaattcccaccaaaataccataaataaggaatgttttaaagaaaaatggttcagaaggaaggaaaactataatgtagttcttgttagttaagttgacattaatcctctctttgctttaagtctctcctgtgttgacactagcagaatgtgtcataaagacatggaaagatcataaattctcaactctgctctaaagatctgaccttcagcgttgcatttatttggccacacctttatagtgtggtcatacctagaaaatattttcttgcctggtcatcagccctctcacctcgattactttctatattttagcacaaaagaagaaatggcgcattcaccactcagccagttgcactggaagtgaatttaaattcctgaactggttatcttggaagatattgtgcttattgcagatgtggccggtgcatgagtttaggcactaccatgctctgggctgtggttcttggctcctgcttctggatggctggacattaccaggagagagcctgctgatacatctacgcacattcactctactgcacttcagctgtgtccttgttattccacagccctttaagtcctggttcaccaaccagatgttaagactctcttggatccctcaaatcccatccccatgcctgctgcctcctctctcagcagttgcccactccttatcttctaatcctcttttctccctatgatgatgatagtgaccctgtagctccaactactgggtcctcacagtcagtccactcctgcagaggaaactggagggtgaccaggaaccttcaagtcaatgtgggccacagacaggaaccgtctttaaaagatggttaaatgcccgtggtttacgtaggttggctttctttaagcaaataaaggaaatgcattgcttcatgtccagcaaagtacagggtggattcaggagaagctggct

SEQ ID NO: 55038 - DNA, 579 bp, Homo sapiens
ttattatgattttcattttacagatgagaaaactgaggcccagagagatgagatgacttactcagccccttctccccgccacctccccagcttgaaagtggcagagtggagattcaaatgtggccctgaccctttcagagcctgcaccatttaaacactgggctgtcctgcctcccatctctcatcctgtccaaaagcataataatgtccttgcagagtgtgagtcacactgcagcatgtcattcacctctgtttgggtcacaccatccaagtgcatccctgtgacccagataggacatgccctctgacctctagtcttgggaggggactagctgacacggggaggtgctcaaggattttgtctctcatgaaccttttctaaggctttgtaagtcactgtgagtctacctgccagattctcccaactggatatgaaataggtggggtcttcctgggggaaaggagaaggggtgggaggtgggaggtaggtggtgggggcaagggtccattgagaggggtagagggaatccaatttgtgagtctgggctcctgttcaagatgggcatgagatgtatggat

SEQ ID NO: 55039 - DNA, 1483 bp, Homo sapiens
cagacacagactcaggtctgtctgattctcccactgccctgaccctggtgcctggtgactataaaacacacacttgacatgagtctgttctcagagaggccccaggcccaggtgtctgtagttcatttgtgtatcctctcaactctttctagccaccgtggcagcagaattattcatggagctgcaggattcataaacaaggtgctcactgcttggagcttatctttagtcctataaagatgagactaccaccaacacagacaaacatgtctgaaagatgaacatgcttgggaatggatgcatggttaaacagccaattacacagagagagaggacaaacattacattcattggaacagggagtgggaaagacatgggtttcctgtttatactgagcacagttggagaaagctatcattatcctggttcttggggtttagcttgtcaaggcatctgggaggagtggaattttagaacttagagccacataagcatatatattttttacatccggaaaggactttagacctataggtcatctccctcgttccagacgtggggaaactaaggctcagaaaaggaaactagtttgtctctgtcatgcacctaatcagcggctgagctggggattgaacccaggccctctgtcttctaggaggatgctctttccactggaaagtcccaagctttttatagctcaagtcgcctttcattatttacttccaccccaagcagccactgtcccgcatcttcatatttggaaagattttatctgccaaagtacttgtattaatgagtaactaactggtgacccatttttattaatcaaagacagagacacaccaattagactttctgattagcctaagagctaaccagtgttaaaagacaaattgtaaatgaattaaatttaacagagtttaatttaattgggcagccctcagaaccggaagaggttcagagagctccgctgcaccacgtgggcaggcagcatttatgggcagaaaactgaagccagatacagaaacagcttgataggttacatctccgtatttgcctaatttgaacatggtctgatcgttggctgcctgtgattaactgaagcttggctgctgtgattggctgagactcagctatttgttagaaaagtacactacttcaggctttcacctaggtgatgtgctaagttaaaatgcagttccttacataagaactcaaagtatggaggcatcctcaggccaaattgaatttaacaccacattaccatattgataaagaaattcaaagtacgatctcaactcgcatttttcaatgtaaagaataatgtttagccccctgcttcctgtggtattattacctttgaagacctttaagggcttataagagagcccgggttgggaattactgcgtagcatggtgacgcttgctcaagagcactcaggattgccggtgcccctgatgtacaaactgtacttttgatgta

SEQ ID NO: 55040 - DNA, 1043 bp, Homo sapiens
gctctaggagcagggtgggtccttggagcagtgccagggagcaccctacccgcccaccaccttccctccccctacccatccttcccttccctggtccccctaccccagggctggcagttggctctgaaagtggataacacagccctgcttatgttgcccaaagcttggccttttaacagctggcttcttctatagccacagagccagggctcctgtgtaggctgcatctctgtgtccccaggggcatctcctccccaaacctgtctgtcctcactctgcacctccacctagccaggcccacccagttctctaggaccttcccaggcagagctgagaacaaagcagggtttatgacagttctgtcaacactgggtagatggccttggttcaccctgcactttgcaaaccacgcctgcctgactgcctgcctgatgcccacacctattcaatgcctccaaagacccaagggctgcagggaggctcctggcaccttcctctcttcatgtctaaaaagcactgggagacttgggtcactgagtgggaatttcacagccctggaagagagagaccttggtctagattgattaggccagccagatgattaataattaaacttgacctgttcccagacacacacataccctgcagccaggaattaccagagagtaggggctgagaaggaggctttgaagcttggcatgggaccagctctgaaagcccccagggaactaggcctcttagtctcaggggttcctccccacctatcccaggtctacaaatccacctcctaataaaaccttactgactttttccacaggctctgagctcagagcaggcctttggcaatccctagggtgcaggcagccttggcagctctgctctggggtgggatttgcaaagcagtttggacttcagctgcacctgtgttgacacacgatttcttcctgagctcctcctgagcacagcctctccccttatttatattcccattgctgagcacccagcaaagggcatggcacactcagcatacccaggactggctt

SEQ ID NO: 55041 - DNA, 1792 bp, Homo sapiens
aaattaaaagaatattttatgacatatgcgaattatatgaaaatcaaatatgaaatacataaaatctctttacacatcagcattagcagatgaacatttgcaattgattttaatgatagaacactttgagccccaactaaggaaaatgctatttatgaaaaaagaattttaatcttcttattaggagatatgttttatctaaaaactgtattcattattatactttgaacttcactaatacaaatatcataggaatttgttttctcttctgctttttaagtacctatatcataacctcgattttgccacttgcctgggaatcccagatttgttttgagacagagtctcactctgttgccaaggttggagtgctgtggtgccatcaggcttattaccctgccaggctcaagcaatcctcccacctcagcctcccaaatagctggactataggtacttgccaccatgcccagctgatttttaatttattttgtaggggcgaggtcttactatgttgcccagatgtactagctgattgcttacagaaaatgtctgccaatccccgctcaagtggattatcttcaatgacttaagctgttttatatggcaggggaaaagggagcctaagtagattcttcctatattcatttagtcaccaggttcttctaggagtcttctatggtcctgagtgtgcaattggtgaacaaagcggacacatggacatggtcactgtcctcagggactttactatccagaggcaggtcactggaaattgatcagcctgcatgtacatgtcgataggatgatgagtcaaagtgaaccctgacagctttggaatttgaagtgtgtcagctggtcagtgagtcacattgcccagggcacggctacctagaagtgctctgtgtgaaacctaccgggaggaaggatcaggtgagtgccatgagaccagcaggggaaaagccaagtccaggaatgtcaaccaggatagggctgctctgtcatattgattcaggcagttggtcagagagttaggcaaaagcagcaccagcacatgaaaaacaaggtggagagcggcatcccagggcaaagctgcctgctaaggccttcttcacattttctgcctagggtagctaatgagacgccttagcctctaagagctcaagactcctgagcacagcaagggtgcagggatggtcctctcaggaggctaagtacttctttgtaactttgtttcatttataactttgtttcatttctttgtttcatttgtagcttcgtttcatttcttcagattagaaatttttttttccttatggctgcagcctttagaggagtccacagtaatcgccttttgtcctctcagaaaatctgtggataagacaacaggcacatcatctttctcacaacttaccactgaggaaacggtacagagaggaagaaaaaaagcatcccagaaaggcaatctagatcactcagtgactaccgcctagcacctccaggaacagaggcaaaagttgaaagcagggtgtgtccccaggacatccctgcaactcaccctttctcctctgcttccagaaacatccaagcaatgcctctagggctagtcatagacttaatcttgtctgcctgggtccttaagatctcagatagaatcctgtaagctattcttgctaaccctatacctcgggagcagcctagcaatgtgaaatgaacatgggctttggggccgaatgaacctcacccagagcctggttctgctactcagtagctccattatttgaccttggcaatgaca

SEQ ID NO: 55042 - DNA, 1397 bp, Homo sapiens
tataaaaaaaaaaaaaagttaaaaaaaaaaaaaaacaaccaagaaaacacaggctccaggaggagctctaagggatttttatctgagtaaaggggatagactgataagagaggtcatttcttctgctcgttcacaggtcttttgagattttctttgctttcacactgatgtggttttactgcactagctccattttacggatggggacatggatgccaataagacaagatgactcagtcaaggccacatggcaagtgagtgggtgtcttcctccatccatggccctgtcagttttggcttggatgagccaagtggtagaagcgtgactggggcaaagctcaccagcacctctcctggacttttcttcagaagagagggtcagcagtagcccctctgggaggtttaaacaactccatgatacacctggatcccttctgctaatgcagcaggccccttcatttccagaaattagagcttgccaaacagctgtgtttacattcagagccgtagtttatcgctgctggtcctggaagggattgttcaagcttatcttctctagatagcaacgtgctgagggttgcacaattctgacctagattgaaatcagctgcaaaacacctagtcctgaacacacacacgcacacgtctcaggagactcaaggcactgcaactcactgacacattctctcctcaacaggccaactctctcccataatcctgggacctgggccaaggcaaggcggtacggcagcaaaggtcccaggggactttgttgaggcaggactgtttccctgagctgggtgccggcctcctgccccatgtgcctcattctcttgtctttcatgcagggagacagctgggtgagagggcacagagaagaaagacagtaggcatcatgctgcagaagattcagggccagaacaaagggcagccattgacagctgcacattttatgcaaatcttgaacggtttcatccagggaacaaaacccttgtgaaaatggtggaaaagggccctttcccttttagaaattctacggtctgactactccagatggtagaagactaacaaaaagctccagcccccatggctctgatctgcccactgcctggtcagaaacctttaagagctttcaacagttggccctataaagtccaaactcattcaagactctttatggactggccacatctttagctccctcccagcccagagtcaccctctgcctgctctcaaccttcctggtcttttatctgtacccctccttgtgcacttatcactttccactatgtacaatggttgtttttatgagtcttatcattcctgctggcctagtctatcagttccttaagggcagggcctatgcttgtttatctttgtacgttgaagctttagta

SEQ ID NO: 55043 - DNA, 2541 bp, Homo sapiens
gaggcagtggctaagtccccgcctgggaacacaaaggaagcctaaggttctggttatcaccctcaggggaccgtgaccttgaaagagtaaggatagtaccagccaaaaccaatgcagccaagaggaaaagtcacagagaacagcgaggggaggtggaagtttcaatacagaaattgtagccatggctgagaaccccagcactggaggccggaatttgtgcgtttgaacgccagaggcttggctagtcatgattagcaaaggaacttcaaagagttttggagcctgctttatatctgtgaaatgggaattatttccatctcaaaggtttgaggggattcgctgagagaaacttcttagcatgggatctccagaaactggaagccacagagaaagcagcggccagagggaggaggaatcggacaggctgatcacttggagtgttcgcctaagcagtttctagaaatggaggcagggaccatcaggaagctcaaaacctttgcttcagccgagtttgcagaacgccctgtgaggagaatgggtgagctgggtcgaggaagcttcatcctcgtccccatcccccagcactgcccttttcccaacgctcccatcccgccacgcctcccaacatacccccaccccgacttcccgctcaactcccgctccagccagtcccaggagccacatgcgcatgcgccctcccgcgcccctccccaactttccacgtttcactcctctcccttttcctcctcagctccggctccgccgccacgattggccagccgaccacccggcctcggccaataagcgccgccctctcgcccccgtgttactgggtagaagaaaacaaaaacaaacagagcgagaagggccagagactctccgaggcggcggcagagacagaagagcggggtcggggccggctgaccaggaacctgggcgagcagcggcgggggcccgaggggtcagtaccagtaggcgcggctcacacgctcgggaagactgcgccctctcccccatccctcctcggaggcagccgcaagatgggagggggcgggggcggaggcgtgggggtcgcggtcctgtcaggtccgggcctgcggtgcgggggtccggctgccttcttgtagccccgcaggtccagccgcgccctccccaacgccccggactgcgggcatccggcctggttccctctttctgagcccagcctggagcgtgtcggcgcgggcccgccccctcccggagccatctccccactgagaggggcgcgcgaggcgctcgcccttgaaggtccccctcagccctcctccccctctggcggaggttgaattcgggggccgggattggaaggcgtgtttccggctggactgaaatcctgtgaggaagattcgcgccctccccgccccctgccctccctgggaatcctctgaagatgcggccccctgtccttcgtgaacccggagccccggcctcggccccggcccagccccttccgggggccgacccgggctgggacttcgggggtcctagcctgagcccgctgcgggagaacaggcccggccgctgtggggaggggccgcgcgctatcctcgccgggggcgctgggaggcgaacacgtgcccgccgccccatccctgcgcgaacttcgtcgcgcccgtcttccggcaaagggtctcttttttttagtttaggtaaaataaaatctcccagagaaaacaaagccgggaagggagccccctttctgtgaaacgcatgccatcttctccatttgtcagtttgatgctgtaacgtacatggggttttgcaagagcttcaaaactgtctgcagacgtcaatttcgcccccctcccccttgtgagaactcgctacgtagccagcaactgtgtagtgtctacaaatgatgaaaacgatcagaaatgcgattaggtgtcggggaaaaaagggtttcccctgtttttaacttgtatttttactttaattgttacaatcttgatattcttaacgtgacttttttgggaaaccaccaagtgctttttaagcaaggagttactggtatttatgcccttaatattccttcattataggcttattgaatacgttaatatctcagtaagtgtatttgaattataattgactggctttttctgtggtactaatgtgaaaggaaaaaatattaggactgcaaaaataaatgccgcttgaatattatctgtagtgcttgcttttgcattactgtagtagaatgcttttagctggttttaagctgctaattagccgttcgtagccgaagaatgaatacaagtaatcctagttaataaatggccaaagcttgactccccaaaatgccagagcaatttatgaggtatatttcaggaaatacatatgtatatatttcgtgggggagtggagggtctgtctcttagggaatgtcttggcagttgaatacttctgattgtatatttcgtgtaacacactggagaaaagaacagtgtttaatgtcagccttcattttcttctaacttgtatgtatagttttctcatcga

SEQ ID NO: 55044 - DNA, 498 bp, Homo sapiens
ctaggataaaataaaaccattggtctagttaggattatcaaattaaagtaatacaattgtaactctttagaagactttgatcatttagattcttaaaatttagactggacttttatgatttgtctgatactgtgaggtttgatatctttggatttgtaggatttgaatataagacaaatatttgttcagtgcataccatctggaggaatttgtaataggtgattcttgcccttttgaagcccagtcaagtgaaagaaatgatatgtaaacagattattaaaatacgtgaaacgttctgttatagaggaaaagtttccatgagtcctatgagggcagggactgttgaaatcttgttaatctacctagcataagatcaattgtatactatgtatctgttaactgagtactgtttggaaagcataaaatagagagtaatagtagagatgattctctgctgtctgaaggatgttgaggagttcgccagttaagatagttttc

SEQ ID NO: 55045 - DNA, 3113 bp, Homo sapiens
tatttaggtgcagacatggtagtgaagctaaaaacataagcgctattatatatatataacatactgattgtcataaaagatgtacaaaaaatgctaaactcagaggaaattacttcctgctgggaagaatctggaaacacatctccacgggtaacagaatcagatacagaatcacaaaaggtgactgctacaacagatttcagtaattaacagcaaagaaacaagagtagttcattttggctggcgtgtaagtactaaggaagcagaaattaagtcgagaaggtaggtttgcatctgtattgttgactggctggatattaaccattttcaattttacctgaaagttctggtctttttgctgcagctttaagcatccaacccggtattaccaagatgacttagagttcttgactcaagcatacagaagaaactacaagataatgtatgataactttgtaaagggccatataaaagcaatacagtattttcaaaaatcttcaacacgttgtttaagaaactgtagacctgcaggaatcccaccaccagaaccgcagtcaaagcttacaaagactcaaaggagagacgcggaaaggggggaaaaatcagaatgggaaggcaggtggcaggggaaaaagattgaggtcctgccctggtggtaggggctcatcttttccttttataggtgaaggtggaaaatgattttctgaagttcccgaattctcctccctccaaaggccaaggagtgaaagtacttaataggaacttgcggaggcgtggtcaagagctccgttttgccggagttaggagctccgccccgaggtccccgcccattccccgctggggtcctcccggccgggctgcctctggctgggttagggcggcctgtagagcggcctcaccccacagggagcctcacgggggcgggccgccgccaggccagcccggaaaaaaaccgccttccaacggaagcggccctgagccccgctcgccatttcagcgctctgtcccacagggaccgtccggcccgggtccggcccactggttggggtccacggactcacctcactttgcaactaaggtcaaaaataagcattccctggggcacgggcggccaggctattaacacccttccgccatgacccaattcggaagtgccaaatgcaacttccgggcaggagagggaatttcggagccctaaactgttgtccatctccgtaagtgaccagacgtctcagtaaaataagggccaggaaactggacgtgtaatccggagtatgaattaacttgtctaacatgggatgtgtggtcacccacggtacctctttgggcttacttacagatgcatcccttcccagacggctcagctgttgccccgggtaacggtgagactggcgaaggaaaaaaatctacgtcaccctggaaacaggaagccaggaatctccttttgccattatcagttatggccgccttagcttcaacagtaacttccgatcggggagttgtcactctaccctgctggaggcttactctgtagcccggctagccagaggcgcccagtgggcgggagacggcgtagaggaactgaggaaaggacaagggcggagagagagaagctggcggcactgcccgtctctgattgggcagcttctcttgccccggttccgcccatttttcttgcctagcgagtgacgggcccacggcagaggggtggggcggggaggctggagcgagagtagtggcggggcgggcggggcggggcgagtgggggaggggcgggcggggggcggcggttgggcagcgtcgcttcttaggaggaggaggaagaggaggaaggagggcgagcgaggaggatggcggagtcggggctcctgacggtaactcggggccgatgaggcggagggtgtctgttggtcggttcttcctgcctgccttcctgtccgtcgggcagtcgggctggctgtcggtagggggaggccccgtgcgccctgacaggcgcgagccggcagcgccggggcgaggcccgaggggccggggccctgggaggcgccgccgccgccgctttcctggttgctgtctccgggagtgcggggcccttggagccggctcgcgtgggagcctgcagcccggcgcggagaggaaggcggtcgggtgtgacagcggccggggccgggcctgcggcggcggcggcgggcggcccggacagcgcctgggcgacggcgagccggcgcgagggcgcgggccgggggcccccggcggacagtctctctcctctcggctccctgggcccccgggcccagtccgcagggcgccccgagtcgtgtaaatcgttggcgagggcccgggcgcagcggcggtcatacagggtggggtctcttctcgccccctccctggagtccaccttgctctcccgttctcctctccctaaaaacccttgagtgaagagtgctggatcggctctgggtgtgttgcctagcgaagcgagttgtagcccttcgagaccgcctcgtagaacatgcccgatggcaacctctccccgtgatagcacagcttttagggagagaggaaaagtagtctcactcttccccgacttccccaggctcataacacaagaggctttggggcaagacgatttttcccccagcacctcaatatccattgtttttgtaccatccccctccccccatgcctaggtggaagagtaatgactccaaagcattaacttgcctttctctttatttcttttctttctttttcttttcttccttcctttctttaagcaggcagtttgtgttattgtggaattatggatttacaaacaggtggaataaataccgattcgggagctagaaagaagatgctttgtgtgtgtgtttaagcccttacagttggcagtttgatttttcttgtctgttgctttgtatcgtaatgggggtgatgagaataaaagaggaagcactgttttgcaacctacccaaagaaatattttcgaagtctctggggatgctgaagcaaaattaggttgcagatgtggactgtatagtatttgcctccagcgtgataactaccagcagtgtctaggcttacacctgtgccatttcgtatacttttcttag

SEQ ID NO: 55046 - DNA, 560 bp, Homo sapiens
cctcttaagctagtcaggtaagaagttattttatctttaatccctagtaccaaataattaccagttagttaaatagagttaacaatagagtcataaaataagaattactaattttaaatttcaaaatgtttagggaggactgattccttccataaatattttactaatctttttgtcctttgccaatcttttcggcctgtcattttaccagcagactttttctgcttttaagaaccctgtgccattgatctttctttttcagtccctagaatatacacatcattggacattgccctttgtcactggttttcaaaggtgatcctcaggtctacctccatcagaatcatgtagagtgcttattaaagtacagattattaatgcccctttccctgaactgtgctgtttttcatacatatttcactttgttctttttttttcttttgccagactgctctctcttctatcgtcaccaccactgaaatcctttctgttatctaaagctatccgccaattaattgtagctagaactgttttagtgtagtgggttaggaacataggct

SEQ ID NO: 55047 - DNA, 488 bp, Homo sapiens
aatttaggtcatttttattcattctgttatgcagagtcacagacctcagaaaaacacactaataaaacatcacgctcagcttaatggtctctcctcattcgactccataatgataaatgaaatgccattagcataaggcaagtccatttcttgtggtctgtggaggagcccaggattgcgacagaattggaatgcagagaattgattgttcacagttcaaagggaaaactatggcacatttcataaccccatgccaaggccgccactctgggaatgaaggccaagctctgagaagggttggggtccctcagactgcaaacaggaagtgtctcagacctgggtatgtggactagaacaatacctgaaaatagcattggagagagagaccagaagagcaagaagttagagaaggcagccaggggcctctcttttgctctgcttccagtcaacttctgcagtctttataaaaacacctttatgctgagctc

SEQ ID NO: 55048 - DNA, 1275 bp, Homo sapiens
agagttgccaccctctccattcatgttgcattcagtggtattccctggagttgtgaaagcacagctttcaaaaatttaaaaccatgactcatacaaaatagaatgaatacaaataaaaatattcaactattaattaatgaaggaagcagaagggtggtaaagctgcttccaggaaaaattagaggaagaaaatgtatatagttggtcaaagggatattaaaataaatttgctaatttaaaaaaaaagggttaatgtcttacagggcagtcaagctgtagctttctggttatcttttatcccttatagaaactgaccagaagatctataacttcagaacagatggggtttaatcagataggaaatagccaattcaaacacaagcacattctcctaggtcaggggtcagcaaactctttatagagccgggtaggaatactttcggttttgcaggtcacaggatctctgctgaaactactcaattctaacattgtaacatgaaaataaccttagataatacataaacaaatggatatggctgtgttcaaataaaactttacttacaaaacatatggctgccagtcatagtttgtcgactcttgtcctagataattaaatatgaatttgggcgagccagttaatgcccaagggagatattgaagggacatgcagttatcctcttgctttatctctaatttttttaatttatctttcttaagagcactaaaatgggaatggagcctcctggatttgccgatacagtgtcttgcctgcctctcatctacatagatacagtggagccttcatgtttattcagatggaccacttcctctctctgcctaatcttattagaattgatgggaacaccgctggcacctgacccagtctccaaatttacaatggtgctgattcctgcctcaagctggttgctgtcttgagtggaagaggtataacctctagagctgagtttcttctgcctcacttggaagcgaggcctttgaggtcagaaggaagtctagttcaccactcactgtgtctctgcacctctatttcattatctatactgtgaagataataatgtacctacttcatggggctgttacatagtttaaatgtggtactgcactgtgtgtaaagcacctggcttggagcaaagtacgtgcactgtaaatattacttctcttgtctttaggattcctccctggttctcatctccggtgacttcaatgctaagtggctttagcattgacacaggaattatgctgatagcacagctc

SEQ ID NO: 55049 - DNA, 555 bp, Homo sapiens
atacacactttggagtctttttctgaaaaatttctgagctccattcagatgcctagaattggtgcagaccagcaacaccatcctaggcaggaagctccaaaaccaaaccaggacccacatggatcccagtaaccccatgtaagaggttgaccagatgccctaaggagctacataactcacacatatgggtcatcctagcgtttaggacgctcctactgattgccatatttctttcacaggataacataagattgggtcagcagaatggtgttaacatgtttattttgagtgactcactcacagcaaacaatggttgagttcaggactctgggctgcccaatggtccactgccaactcttaggtttagacttggtgtgcaagcctggtgtgcactggctttccttaacgcgagttgccaccttcagtccacagtatccgggtgacaggggtgggtaatgccaggcattctatatcctgagcatcccctattgttggcacctatggcagttactctgcctcttccaaagtttccatgccatatggtaggcagtctat

SEQ ID NO: 55050 - DNA, 895 bp, Homo sapiens
cttctttctcctcctcttcctcctccttctcctccatcattaacctagctaacattgattggttgtttcctacaagttgggtagaactctaagctttctatacggattatctcattaatctattaacaactcaattgtctgactgatatgtctcaatcaggattcttgattccacacaacagaaagcaagactatgcagaaagtacatttattggaaggatattgaatagcttgcaaaatcaatgaaacacctgaaacccatcaagactggatgtccagaatcccatcccaggtccatccataggcagggcccggcaaagaacaaatgccactgctggacacaggtcactatcgtcaccactacccctgcacctagagacactcaccactgcctgcagcaactctgtcattgcacctttgaggcactttctcaggtcaaagtcctcagtagaagcattcaatggcctcagctaaggccaaaggcccttcctagtctgccatgggactgagatgtcatctggcaggagggctgctgctgacatgggtatattggggatagacaggatgttcaagtcacaattttaaaaaatcgttgccaaaaccaatgccactcccactaaagaaatgttgaataagtactttaagactatctgtttgaagaggggccaaattctcaggtggggcacctgactagggcactgcacttcccagtctcattctgctgataagggtgggcagagaagattcccaggggaacgtctgcagcctgcattctcatggatttgtagtttctgacaacagagtcacatggctgggccttccaagtattgccacacagtgtggtctggaaaccagtggcagcatcaactggaagctcgttagacattcagagtct

SEQ ID NO: 55051 - DNA, 760 bp, Homo sapiens
gtacttagacttaagttctatttttaaaagtttactatatatccaagtattatcattctcatatgtgatctcatcatcaaattatgagaagtaatatcataagggcttcaagtagttgatttcttgcactaattttcatagaatttcaagtatttctcatctgagcctatctgcctgcctactccaggtatctatttttagaattacaaggactgctagcatttggctactgattctcttgcctcacagacattcacacaacctttcgaccctccttccctgtcccctggcctagagtcagataaaacaaagacctttttctctcacactggtgcttacaagcctatccccatatgcctagaaattgtaagaactctaagtaaagtcttgggtaaatagtaactcaaacaacatttgctcaacagagaaaatgtcttttaacaccctacagattgggcagatttcaataatttatactttttttaagtattaaatagtcataataaatcataagagattcaaacctaccggtcttctcagacaaatatttcccacattttggcatacttcatatgcaaatcaatataagtcaaagaacattctaagtgacatctacactcccctgaaattatctgtaagtacacaagtggtaacagtaatagttctctctgtggctatactgcttccaattttcagataatctctcttgtgtcagaaactcatattctattcactctcagtaatgcaaagcaattcagct

SEQ ID NO: 55052 - DNA, 4344 bp, Homo sapiens
gcacccacaaccttgcctggctaatttttttgtattttcagtagagacgggatttcaccatgttagccaggattgtctcgatctcctgacctcatgatccgcccgcatcgacctcccaaagtgcggggattacaggcatgagccaccgtgcccggcctcgctgttacttttaataacagaaaccagtcatcaggatgcagtgaacccaaagcttagggtctcgagaaagcccctggttgatgaaaagggcaaaggcttggaggctagaccagcctgccattgagtctcagctctagcacttaccagcttgggcatattccttatgctctcttagccttggtttgttcatctgaaacacagggtggtggtaatccctctacctcataaggaggaaatatgagatcagccagggcaaagcactcagcacagtgcctgagatacagtcagcttctggacaatggtagcttcattaagcacttacttcaaggctggaaaaacgatttggagctcctcttcatgtttaggcgaaagcctgtaagtgcttaaccctggctaccaaggcaggtgagagggacgggaaagctgatcttgacagggagaacagagcagatctcagaactgaaagcatctcagctcagggtctgtgcttgctaatcactgtattctcaaagccttgctcacagcttgggacatggtcagtgctcaataggcccagctgaatgaatgggtccaaccgagcatgtgaaacagttacaatgtttttaccatcagcctgctatcattcattcatttctcactggctctttcagccctagagtggtcatgatgacatagatgtaaagaaaaaaaagcatgggctctgaagtctgccatttactgtgttaacttgggcagtttccttaacttatagtttgctcattcattaaatgggttgacactcacctcagtgacctcagtggctcattgtggggactgagttaataagataaagcccttagaagagtgttgggtatatagaaaacactccatcaatgttagccattatcacaagaaagagcctaccgggtgtcacagattcctaggctctggggtcctggctgagagttataaaggcatgaaccctgccttcacagctgtcagtctggtgggggcaatggatcaggaaacaagcaatcataagacaatatggttagtggtccaataaggggaagttcaggggaccctaacctcatagcagaagaagtagatttactcagaaagagacctgactaatctcctgacttggtcagacccagaggcagggtagggtgaagaatgctttaagcagacaagataacatgtgataaggttcgaccatggtgggtccagaaaactgaaagagtgtttctgtggtgagacagaggtagagaaggatgagaaaagaggcccaagaggcacacaggatccagactatgctggcaatggcaaagggagaaaatgttccaaaagagcagagaagaatcacatccaagaggtataaccccttgcactgggcttgtcctccacctcttggcagtttccataaatttatgaagaggagcgtgagtcattatgacaaacttctaggccctcatactctggataatctcaggaaatcccacgggacccctgcagtgaaagctccctgaggaccacagcagtcagcacaggaagcatctccaccatcctgtggggggatccacagactcatcccactgtggctaacaaagcagggacgatctggataccaacactgggaattaagacaacacggacagaagtacttgggaataaagacagacacaaagagtggagagaggaaatgcggttggcatggttatttcttaacctgaaatgcatatagggaaaaatcagtgttaagaatactgacataccgtaaaaacattcttttccactcaatactaaaacaaaagtattgatttccttggttttgcatcgtatcttcccctctgctgccatctccagccaaacctaacagagagaatgaagtctgtcttttctgctgtctttgatcttcattccagatggttaaatcctgctggccccatatggagcccagctttcctctacagtgagaaagtcctttgacataaagctatctgcccgatccaagctcagaaaacaaccctgagtagggaatacagtggggataagaatgaatatcacccgttaaacacagatcttaaagtgggaatcaaactttcataaaagacattctcagctcctcctctttcctctgtagccaacatcacgaggattggtaccaggatttgtactactaagcagagcctttgaaggccatgtgccgtttgcaaatcagatttggtgacgtttcaagctaaagcaattagatttttcataaactgtccaaaaccttctcaggatttgggggttctgagccaggatggaggatttcatggaggccaaaagagtagcaaaaactcgggaaggatttcatgaggagcaaatgcacacagatgtgaatgttacatcacaaacgtgcttgcacctcttgtcagctgcaaataactatgcccaagcacctcagttttgcctttgcacagaattccatgattctgagttcttttctttgactttcttcttcctactgtgtctgcctctcctgcattccacgctgcttcccaggcttcctcgtcctacccccgtgtctcatgtcatgacatcctaagaaattactccctgcaccccaggtttttaaatacctgtatccttgacttggtggtgtttgaggaattatttccaatcagtcgattagcaaagctgatggagactctggagaagacagtcccaggctgtgggtgaataagcaaggtctggttcctctgggtgcctgtttgcacggccagaggctgacagactttgggtgctccacagtaacctcagaaagagtccccccgcagcagcaaattctcccaatgcagttttgaaacaccgcaagaggaggaagcctctttaatcaaataataaccagtcagagataaggcctgctaggctgagcttggccagccaatcacaggcttccttccgactgcaaggacaaacagacccaggcttctggagtgcatttcagggcttgttacaatttaatgatgcaatgaatggtgtcttcttcgcattgcctggtggggattttctaactggggagtaaagctctgagctcagtaacctcattctcagcggaggtgtccacagcttgagtgttcacatggggcgtcaggctccgggcctggctgtttccaatttgcatttctcactgctgaggggaagggaggtttgactggggctgagcggggctggggtccccatggggtgagcctatttgacaccagatgtgcagctcactgactgtgaccctgagaaggttgtggagagatgttggagatgctttatgtgcatttcgtatttgtctttaagcagtcatgactttggtcttctctatttcttcatcctctttccagctgctgccaccctcccctttcaaaactattattgctctgttcggcttatgaagagctctagtaaagacagtaggttctgggaactaagaaggtgtaggggcgaataaaggcccttgctagctgtgtccatgtgactttaaacactgtcagtcgcttcctgcttagttgttgcaaagactacatgcataaaaactccctctccttcctctgaggctcttacaggccctatagactggtagacaaaccctcaaagggtcttgatatattagagctcaatatttaaaggaacttaaggggaaccctcttattaggtaaatatgcattcgttcaacagttatttattttgcatctactctggtagagatgtgctgactgggggcactgaggtgagccaaacctggcacagttccctgccctcccaaaacaatgtcagcacaggaggtagcagtttgtgaaagaagtccttagtgcagtggaaccaatggcagggactggtgaagagggcttgtcttgaagggtatgggcctgtccaaaggaaccacaacaaaaccagcagtggtagacaggaagcggatccaagtcagagggacaagtacagtcaaatattctccaaggggaccccctgcagggctcctactggggaaaggagaaaaagcaaaggtgtgtatctcctctccttttttatttttattaattaattactttttttgttttttttgagacagagtctcactctgtcccccaggctggagtgcagtggtgtgatcttggctcactgcagcctctgcctcctaggttcaagcgattctcgtgcctcagcctccca

SEQ ID NO: 55053 - DNA, 9744 bp, Homo sapiens
gtttgtgcctaacctgaatattagcaagattctagtcattaagagtcccacgcaaacccagacatatttctatcgatttgttttttaaaatgactcatcaatgcctataacacccctcaatatcgtaagtttgtttatggccaagaacccacctatttgctatacctggcatagatccttgtacttggtaggtattcaatgaatgccagatgggtgaaggtgacctgtgagcctggggaaggctgaaatgactcagagcaccctgcacacatacctgtcttcatgccaaatgggaacatctcaggctttcctcccagggtccctctttgaagcatggcacacattgttcctgataacttcaggctactccactatgcacccccttttattattgccttatgtatatttgcttgttcaggtgtgcatgttcagtcttcccagctagatcatgagctgccttgaggttgagaacaatgttctctcagatctctgtagtctccaggcctagcacagagccaggcccagccacaccatttacccatggcgtgggtaaatgatccatgccatgccagccacagaggagcactgtttagattccccttcaagagaaccttctgcaggtgcctggttgactgacagcctctcggtgctgtcctgttgactccaccatgccattcctgccagggccacatgtaccccaggccactcctggtcagcagctgaatacaatggtggcataggagccaggcctctccctttctccccatgtagccttctctcatcagtctggcagcctttctcagagctgccctgtggtctgaggctcctctgacctaatccttcctttgctctctcctttcacaggactcagacctgtagcatggtccaaggccagcctaattctgctccatttcctttcacccttcataaacacctcccccaataaatcttttacatatctactcctgtttcagtatcttcttctaggaggactcacactgttgaataggtgaagtgcctgagatccaataacaaccagggatttccaagctccctgtcttgcacatgaaaaaaattctatcgatctcctagtttacagctaaatatgtggtgtgtaactcttatcctaaaacaaactaaatcaacttttccacatcaaactaggacattctattttgaagtcacatgttgcagtggaatgaactgagggcgttagggaacctatacagtgatacctggccttgtgaccttaagcaaatcacttcttatgttccctcactttctttattcttaaagtaaggctactaggatcttccttcctccttcatggagatgttggatatatttatgttttttagaagtactctaaactgccctaagacagggtttgcaaacttttctgaaaagaacaaaatagcaaatattttaggctatatgggtcatacagtctcttttacaactaatcaactgtgccatgtagcacaaaagctgccaatataaacaaagactacagcaaaattctattcaaataaaaacttgtggtgggctggacttggtcccagggctgtaatttactgacccttgccctagagtcatggacgcttatggttggaaaagataacaggcatcacagggttttaggtaactagatccttcctctgacattcatcatagacctgactaatccatcaggaagcgccttcctgcagagttcagaagcagcctcagcatccttcttaacacagggtgaccaatcaagctaagatgacatgtgtagtgatgtctatcatttcctcttgatttgttcacatcccacaccccccaactgagaaaactgagaccaattattcagtaataatgaatataaaagtgttttgaaaagtataaagtattccttcaatgtaaaacattcttatctggagcaaaaaaaatcccagccatttaaaatacaatttaagtaataataagttaaattatttcatacacaatgatcatggttatttttttgcagcaagaacaactaggcccaaagtgctgttttcccatctcctggaaagtagggatgcattcttttagtatgtacagataaatgtctgccttgtttctccactggcagaaaatgagctgagctttctggccttaggttgcagttcaggaggcaaggtttaaatttcctccactgcaagacacaggtgctgagagagagttgcaagctatcttagattccctccaagcaagtgtctgtattcaaagcaaagcccatcataactgggaaacaccgtgttcccctggcctctcttctccttgaagctgtttgtttttgtgttttgggaaggcaaccttgacatttcctctctctattcaaacttgttgatcagaaagatcaaaaagccttctgtaaaatatgcaagtactaaggactaaaaacatccttttctgcccctaagaatccaaagacccttatgaatattaaatagatgaatctttgccatttggaagtcaaccaccccttttggaatcagatgacagccatggagctctcggcaggaaaaatgcatgtgcgatagtcaccgcaagttctccagcctccaggatcacctctttgtttatatccaaacaacaataatcccagaccagttagtatcacagtcatttccacagaatgcatatagccttctcattaagcagaacactcaacattctagtttgaagcacatgccttaggatgactttgcctggtcagggccggcctggtgatcccatgtgccagcctcactccccagcaagaaagtggccccaggggtctccgccagaatggggtggatggcaccccaacctggatttcagcttctggtctagaatgcaggatgtgctgccttttcacaatgtgacactatccagattccctcaccacacacacaagcacaaatttgcccacaattccaaaatcccagaggagagcccagcactggataagcccctctaatggccttgcctgggagctgctggttcctggagggaagagtcctgagggtggggaccattgagtcaagtcctggaaagccagggactggggttcaaaacttctgggtactgagtacctagtctgggtgtgaccaccgtgtctgggtgtgaccaccaccacctttccattccacaatgccaccctcctacctatgccagccagtcagccagcctgattccactaccaggatgtttacatggggaagcaaaggggaaagaatattctggggactcatgggtttgtgggagtctgagtgggatcccctggcactgtgatctgctacacagcagttcacagtcccctttccataagtaaagccctctctgacctctccatataaaatgtcagcttcccctcgactccccaccaccacccagcatctctgtccctgctacctgccttcattttcctccattacatgaatcatcataaaacattgcagagctcattgtctatcaactatccccctccactagggtgtcagcttcttaatggcaagcatgttttgttttgctcgctgcggtgttcccttcatctagaagaatgcctggcacaataaatatttattaaatcgatataatgaataaacaaaggaatcacaagtagccttgtttctagagcccagctcagccccacctcccctgggagcctcccctgactgctctgaggatcacaccatttttcccatggtgctcatttattttgtcaacaagcttgtattgagcacccactatgtgccagatcccaagctaggccctgagtttacaggacagaccaagcaaaccccttgcccaaatagcttgcaatgtagtttagcacataaaagtcatctagtttgggtttccaattgcttcctgatcttccagagatcaaggagatgctaaaggagggagaagactgacattgcctgagcacccactatgttctcagcatgtgatatgtgcttttctggaaccaggtgggttttgcccctgaaaagaaggtcatcgttgtggagagtgtgggaggggaagaagtaggacttgcagagcacaacaattagaacacagaggctgcagggaagtgtgagccatttcccactggaaatagaaaaggaggctcagaagagacatgggcaaggatcactaggcctggtgtaaagaagcccagttgcaccctgtgttggggtgatcagacccaacaccaggccatgggggctatgaagtccagcagagccaaagaaatgagaaaagacaagaaagtgggaccagggggccaacactagtatggaagctgcaaagaccccgagctctgggagcccatgctatttattggtgatcaaacagagaaacaggtggtgaggttgtgagggttgagagaaagtgatgcatcaagcgactgagctgcagctgtgatggtttagcattttctttgaagcatatggaacgtgttctgctacttgagatagtaagagtgctagaagcaaggagtcagcaagtctagacacattccagaggccacgaggggttttatgccctgagccctggattccatccaagccatgaggggttttatgccctgggcttagattatagtgcagcagggcagacttccaccctttagcacagagcttggtgttccaaaggccacgaggggttttagaccctggaccccggacatgttccaagactcttttacattatgtcagacacgcaagccctgcctcagcttctctcccaacattcagcttttctcccaacaccgtgacccctcaggcatgccactctcgttctctaagctgtttccatttcagtaaagggcaattgctagcctcagcaacctctaaggctcactacataaagacatctatgatcttttctaatcaacacagcatcttcctcctttacttcctgtggaccctgtcctgatacctcagtttagaaaatgacttatgacagttaatgtgatctttccacaaaggagggtccattacacctgacctttgatttaggcaaaatagtttgggggataaaggagcatgaaagagctcaggggttttcactgttctgttctttccaattaaccttagagccttctctcctgctctgccctctcctgggacctccccatcctggagcccagccataagctgtcttggttcttcagttgctcaagtgactcacctgattggctgtgaggtccaaagcccactaggccttccacagggctgaagccaagaagacggccccttgagtaacttctccctcatcatgctggttcccatccctgaagaagatgggccaagacaggcgaaagagggcatgagctgaagacacgcactgagcagttgcctctcatcttgctgtgagtggctaggcagaggttaaggtttcctgtccccaccccctcccattgcccaattgtccacaaggaaaaccacatagcaagtactgggtggcttttggaaccacaaacagtccggatcaatttgttctaaaggctcattgagcaaccacattgccctcttccctcttgcctgtctggccatgaggctccctgctgagcaattgcctgcccagacaggcaagaatgccagctcctcaattataagggtctggatgcataaagcatagctcgactaattgaccacatcccacttgcaatcacgacaagacaacatgaatagaatcatagtttcctcactaatcatttcaaggtctttctaaacacaatctttcttccaaatgtgttatctcaccaccagcctgagataggttgctagtgataataattaactgatggatgacaggaagctaaaaactattctttaaacaaaagaatatgatagtatcattttaatagctctgcttagcattttgataaacaaacaacattttttgtttgtggattctgtaaagatgtctaaatcaataatctcaaaaagacttacatattctgtaaccaagatatcagaaagttaaaatcaaacaattcaattacgaatgtttattgagtatccaccattcacaaggcactgggctgtgggttgatacacagatgtataaagctcaatccttgacttggagatggtgagttggtcactcatcagggtttgaggacagaaaagttttgcaacctacataaaaataaaggagtgacctgggcatggtggctcatatctgtaatcccagcactttgggaggccaaggcaggaggattgcttgaggccaggagtttgaaaccagcctgggcaacatagcaagacctcattcctaaagaaaagacaaattagccaggcatggtggcatgcacttgtagtcccagctactcagaaggtagaaagatcacttaagcccaggcatttgaggctgcagtgacacatgatggcaccactgcactccagcctgggtgaaagagtaagaccctgtctcaaaaaaataaaataaggccgggcacagggctcacacctgtaatcccagcactttgggaggctgaggcaggcaaatcacttgaggccaggaattcaagaccagcctggccaacatgttgaaacctcatctctaccaaaaaatacaaaaaagtagctgtccgtggtggtgagcatctgtagtcccagctacttgggaggctgaggcacaagaattgcttgaaccgggaggcagaggttacagtgagctgagattgtgcctctgcactccagccagagtgacagaatgagactgtgtctcaaaaataaataaataaaataaaataaaaaataagggagtggaaactcagccagatatgaacttccactgaaataaatatctgaaatatgtaacttgctggattaggcatattattgtgaacaggaccctcccaagttctaatttgacagttgacaatttggcatggagcatggagagatacaggacagacatgaatgatgctagatttgataaaatgtcatgccatcacaaaatagtttggagagtattcagccgcaagtaacagaaaatgcacaaataatggcgtaaccaagtatgagacatttttcttactcatcaagaattccagagttagactgctcatagctggagaagttgccatgaaaataatcaataatttctactattttctttctatattgtcctctgcttgtagattttgtcctcatgttttcaaaatggctgcagcattccaggtgtcatgtccacattgcaataggaaaaatgagagaaatacaaaggacaaaagtcttctcttttgtaaatgactgcctttttatttgcaaaaagaagcctttctcagaaatctactttcatctcattgaccagaacaaatcacatggccactcccaactgcaaaggaactgggtattttttactttgcaggctccatagtaaaggaaggcaagggagaaggcgatttaaataggtttcactggaccaatagaatttgccatgtatttatcacataataatcacgcggtatatgaaatttacttgattttacattataaaaagctatttttctgccccactgaatgtacaacttggctctacttgccttttttaaattaggtttttagatataattatgtttttaagaatatatttttaaggaatagttgggtaaaaattttgtagtgattatctctcagtggtggaattatactttttttaatttatttctctgtgctatctagttttgttcttttgtttttttttaatttgccataacaaaagtgcattgttgtataataagaaagcaaaaaaaaaatttcacaagaacgttcatgactcattatggtatattgtcaaatggaaaagcagtgtatacaatgcattcccaattttcagagagtagcaaaagcctagagcgttgcctctgaatgctgggaatatattaatagattgctttcattttctttctctgctttttggtattttccaaattgatcacagcaaaaaatattaaaaacaaataacaatcgtggcctatgtagctttccacctggacttggaggaaatgaagtcttccaagcataaactgaaaaacagaatttggggaataaaaatcacaccaaaaaaagagagagagaagaaagaaagagataaagaaaaagaggaaagaaagaaagagagagggagggagggaaggatggagggagggaggaaaaggaaggaagaaaggaagaaaaagaaaagaaagagagggagaaaagaaagaaagaaaaaagaaagagaaagaaagaaagaaaaaggaaaagaaaagaaaagaaagaaagaggaagggagggaaagaaggagggaaggaaggaggaaggaaggaagaaagaaaaaaagaaagaagagagaaagaaagaaagaaaaaagaaattctactgaacaggccttgtttgttaagaccaaaaggaaaacaataaaatgcttccctccttgtttcctttctctaaaagcagtttctgctgagaaacattaaacccccttaacattcttcaggggattctcaagtccaaggctaagagccggatagaaagagggtgtttgttcctttctggtgagtcagctgtgaaacatggcccattgtttcaacaaatatggccaccagaagcagtcctctcatggcctcttctctttccaggaggctgagaggctggggagcaagaagatgcctcctttgcctttcagacacaccattccacacagaaattcagcagtcatttcatttctcttatttatttttctctttccaataaacacagctttctcccaaaaagcaagagtccatctacaattctcctgaatttgcagagctaaaggccatcatttcaaaggcctagaaaatgcacgtctaggtaaagggttctcctactggatcaatttcaaaagcagacagtccattcattaggcattcattcattcattcactcattcatccatccatccactcagcaacagtgcctggcttgaggatacagtgagaacaaggcaaagtaaacacggccttcgggaagcttatttggggaggcagggtgatagggaaagacagagaataagaaaaaaggaagcacatcaataaataattttaggaagtgagagtgtgatttaaaggatataaagcagggtaaggttctagagagccacaaaggagtaggcgggtggtcaggaaagagtctttgagaaggtgacatttgaattgagacttgaacgatgtgaaggagggagccatgagaagttccggcagggcacaggcaggcaacagcagagttccagatggggcaagcgacaggaggtgagcccagaaaggcagcacaaaagcacaggggcttcgaggctgcaggaaggagcgtagatttaagaacaagtggctatctacagcgtagtggggatcaaaagccaaaggttgcaagcagctatgcactcacgcaccagcacctgttttccagttgtgtcagagaagattaaggatgacagtaaaaagtttctgctttctcacagcttctagtctagaccaggagacaaaaataatgcctaatgcaattatggaacaattcggggctaagtcatgtgactctaatttatgtaaacacatttggagaaggtgaaatcagtgagagcagaagcagtcagaggattgcatggggagagagtgggcttgacctagaggataggaagtattacatcaaggatggcaaaggttaggctgcacgcacccactcctccttccatggcaaatacctttaaccattcacagct

SEQ ID NO: 55054 - DNA, 4535 bp, Homo sapiens
ccagtaatgctgtgactcttgcagattcatagagatactgacttggtggtcttgggtaagatctggaagaatttcctagattaacaggcagagactcttattctcttccctacttcccccaacaaacagagtctctctctcactctgtgctgagctgcctggagccggggaaggggttagagaagaacccctgtggccaccaccactgggactgtgctgggccagacccaaagccaagccaaggactgagtctcactcaaggcttgcagtcaccattgcctgacaagtgcctatgttcactcaaggtgttagagctctacaattagcaggtagcaaatccagccagccttgtgtcctttccttcagggcaatgagatccccctggcactggatgggtccagggttgccatctgggagctagggcatagagtcaagaatctcaggaatctacctggctctctattatactacagctgagctgacaaccaagccacatgacatagtccttcctgctctttcctcccacttccacaagcagaggagtctctctgccacagcctgcaccaccccaggcccacgatgaggactgcctggctactactgggtttcactcaaggcccaagggctcttcagtcagcttgtggtgaattctgccaggcctgagtctctcccttcagggcagtgggctcccctctggcccaaggcaggtcaagaaattccatccaggagccaaagcctggaattggggatcccaggatcccacttgctgctctatttctctatagccaagctggtaaccaagttgcaagacaaagtcccctttaatcttccctctcctttcctcacgcagaaggggtcttcccccctagagccaccacagctagggatgtgctgggtcacacccgaagccagcacaactctgattctcacccaagggccacggcaaatacttcctgtctactactactgattattaagggcccaagggctccttagtcagcaagtgatgaattctgtcagtactgggcctttcccttcaaggcaatggagtcccttttggcctagggtatgtttagaaatattgtccaggagctgtggctaagctggtatccaagttgcaagacaaagtcctctttactctcccctctcttctcctcaaacagaaggaagaagtacctccaagagttgcaagctgtgctgcctggggttgggagaggggttatgcaagcactcccttggcctcccggcttatatcccactaggtcccatgcaccccaagtccactgtctccatggcaagcacagcactagggcttgcccaagaattatagtccgtgtggcctagactgcctttcaattttatttagaagcccagagcactttagcccatgatggcagggcttgccagaactcagcttctggccactgcaatggatgatttccctgtggttaggactagtctaaatgctctctccatgggtgttggttgggttctgcctggtgtttctttctgctatgacaaggcagcaatgagtttcaatgcaaatttccacaatcactgcattctccctccaacaagcacacagattctctctccgcaccacatggtggctgctggaagattgggcagaggtggtgcaggcaattcaaggctgtctttcctaccctctatagtgtctccttccttaatatgatattaaaaccaggtactgtgaaaaatcacctgatgtttggttcttatgaaggtgtttttttgtgtggatagttgttcaatttggtgttcctgtgtgggtggacaattgctgaagatttctcttcagccatctttctccacctccctcctgcacctctttcacagcttagtttgtgaacaaagattcgttcctgttatgatagctattattgatcgttcattcactcacatatgcatttattcaacagcatttatggcaggtgttgttgtaggagttagggacactacagtgaaccagaaaaacaatccagaaataatagatacatggtacatccacgcaatgaaatatttagcaataaaaacaaatgaagtacgaatacatactacaacatgactgaacctgaaaacattacgctaagtgaaagaagccagaaacaaaagactatatattgtatgattccatctctatgaaaaggcaaatcgatagagacagaaaatagattggtagttgccagaggatggcgtaagttgagggcaagtgaagagtgacttctaataggttcagggtttattttcaggatgatgaaatgttctaaaaataattgggctgacggttgcacaactctgtaaatttactaaatccacttacttatacacttcaaatgggtgaattgaatgatatgtgaattgtatctcaataaagctgttaaaaaagaatattacatttaaaatttttaagattaaatcaatagatgcagacatttaaaaattagtagatacaatagtagctcactacatgactaccgggattacttccgtgtatttagatttttttaactttttttttctgcagagatggggtctcactatcttgcccaggctggtctagaattcctggcctcaagcagtcctcctgccttagcctcccaaagtgctgggattccaagcatgagccaccatgccccatcagtatatttgttttaatataatgaatacttctgctagtgaatcatccagaacgcaaaagtaagtgaggcatcaactgacccaggctgagctcagaagctcaagctcaaattgagaaggctgccaaaaaaaaaaaaaaagatagtgtggattttctggggcttttattgtccccacccttttcagtttccattagtctagagaagtgagagtcagcagattggatgaaatttcctgaacctggagctgttgagaaaagtcttcctaagcctccttgagtgctgcaggcatggtttcttttgattctccagagacagagcctaaagcacacccttggaagcaggtaaccttttgcgaaaagattcaggaagcaggagtgagagaccacagagaatgagatctggagggggaagcaccagtcactaggacattatcaagctgattcccatcttgggaaatggagcccagaccttctggggactgtatgaggcaccacgtagaatgtaactcagaagtgtcttttatttatttctgttttttatttatttttttttgagacagggtctcataccatcatccaggctggagggcagtgacgcgaatagggctcactgtagccttgacctcctaggctcaagtgatcctcctacctcagtctccaaagtagctgggaccacgggcacacaccactatacctacctaattttgaaattttctgtagagatgaggtcttgccatattgccccatctagtctcaaactcctgggctcgagaaattctccttccttggcctcccaaatgctagggttacgggtgtgagccactgcacaaggccagaagtgtcttctgaaggacctggaacaggcatttatccctctccaagaacattaactgcctccagctctgggcaacacctacaggtgggctaagtaggttccctcagtttctgagaacgctctgaggtcgaacctcactgtctagaaaagagacacatgtcaggaaggcgggtgggggaagggctgacctcaccaaagaagtacccagtgaacatgaccaaaccactggcgaacgaatacagcatgtttcagacattgcctgtgcattgcttccttctctgcttgcagtcggtcctaaaaacataagagagatgctcttctgttttagcagaggagaaagcttgaataaattacacaagctgcctgaagttgctctggaagaatatgacaaggtagggattcaaatttggagaccaacctgatcacaaagctcaactaatatttctgtattttgatgatgacacattacaaaatatgttttatgtaggggctcagattacacacacacatatataactaaaagtttcataaaaacctcctttctcatgggcaatacactctgatgtttagttctattctgtttttaaatgccacttgcaatcatttaacttatttcacaattcactaatgggacacatcccatgatatggaaagaatacttgattacttatttattcaattacttgtgagacacatatagtgcccatccaagccattcccccattaataataattgtcatattatttgtagttagccctctccttcagtcttggccagttcccaattaaatgctcttaaaactgggtcagttttctttagagtgctaatcttaaagtgtacttacatatcccatttgtgcggttattgatttctgcctgtcttccacgaactgtaaggtttactcatggtcaagtctactttgactcacctgtctccctagtgccaggagcatgcatagtatacagcaggtgctcagtgttggtataatgaattcattttaataaaagtgattggttttgaggtcatcactctcagatgta

SEQ ID NO: 55055 - DNA, 2601 bp, Homo sapiens
aagttgtggtgaggatatggagaaatgggaacctttgtacactgttggtgggaatggaaaatggtatagcggctatggaaaacagtatggcggttccttgaaaaattaaaaatagaactaccatattatccagcaatcccactactgggtatatatcaaaggaaatgaaatcagtatgtcgaaaataaatctccacttctgtgtttattgtagcattattcaccatagccaaaataaggaaacaacctaaatgtctatcaatggatgaatgaataaagcaagtgtggttatacacacataatggaatattatgaagccataaaaagaaggaaatcctgccatatgccaaaacatggacgaactggaggacattatgctaagtgaaataagccagatacaggacaaacactacatgatttcccttatataatgtatctaaacgtgtcaaactcatagaaacagagagtagaatggtagatgtcaggggccggaggaggagcaatggggagttactattcaacaggcataaagttttggttatacaaaatgaggaagctctggaggtcggctgcacaaccttgtgtgtgtagttaacttagatttttgttgatgggatagatctcatgttacctgttcttaccacagttttatatatatacatatatatgtctccccttctcagcgaggcctaccctgaaccccactctccactcctagaacttcctttctccttctcttgctttgcttttccccatagttcttttcaccactatgtatttcacttatttgttgtggtccacctccctcagttaggaaggtcttcaacagagccctgcacagagaaagagcaggcacttgataaatatgtgctgaatcattcatgtctcatgccacagccactgcgctttactcctcttgcttgactcttaggacatagctccagttgcaagtttaacttgaactctgaggccaggcagcttctttcaaaactaataatgttcaagtggcaaagttcagttgcagcaaagcattaattgctcacgtgaacatcaaagtttccaaagccttgtgaccttgcttccctaagacccagaaaggggagtcctggacatcaaaggaatccatcaagtgttaccgacaatcattccagcgatgctgaaagtctaatgttttcaatgacccctggcctctcacttgagcaataaacccaaaagtgattttcctcttcaaatttcctttccctagtcagaccaacaggcacacacagaagcatgaaataatggtgcaatagaacagggctggactaagaagtcagggagctaacttctaatctagccttcttcacttcatatctgtgagtatgggtgagtcccttactatctgagccgcaatttcctcattttttaaaaaaagaattcaatctagatcatctccatatacccacttttcttgctctgaaacattagtgttccatgaaatgctaagtctctgcaaagaggatgctagaaccatccagggttgcatttcctcaattcctccatgtgaaccctgtcgtttttcttcatttctttcccccgcataaaactaccttctgtcatatcgcagggcaattctaattatgaggttcttaagaggatctcctgagcttattccatccctaaactggaacaggcataaagatctgttggggctctatgagtatgaaatgcactaatgtgtacaaaccatctgtctcagtgccggcatatagcaggctcctggtaaatattcattttgtccctttcacgtccttttcagggttctattctgatgagcctaggaaaagagagaatgcatgaaaccattagcccagcctccatctgatcacacttgccatcttcatcttcagaaatgacagcgcaactgcgttgccttggtccatacaattccaccagggcttggtcagatcatcatgatgtcaacaggcattttgtggatcattcccaatggctttattttttgcaacatatattctctcatttaatcttcacaacagccctattaaatagctatcgtattccatgctacagatgaggaaattgaggaacacatgttgctgagggttatcacaagctggtaagtgacgagttgggcactcaaaattaggttttccagtgcatagctccttcctccttcccaaagctgcagagtgaaatgggtttgaagggatgagtcactatctgaaaatgttgggtcgacatgcgccaagttggaggagttaacattggcctggtccctaacatatttttcccttaaggggtaataatgaacaaaccttaacctgttaagcatccgcatgcacacagtattacatctgatttctaatttttccaacaagtctgaaagcgagctgagctcaaagagattaaggaaccagcctgagaatacccgggcagtagctggtagagatgtgggccctacccaggttcctctggctccgtggttccccctccccactctgcaattctctctagtaatgtcaattgttgggccctaggggtgagattttaccaccataccatctgagtacctaccctgcacagaatcctgcttaccccatct

SEQ ID NO: 55056 - DNA, 1162 bp, Homo sapiens
ttgctactgagttagccaatattatcgagggaaacttcttagcagatgcttctctctgaaggacaggaaaggtcatccttcacctctgtagcaaccacaaaggaaaaactggaaggagtggcctgtcctggccttctaggccccacagagagaattaagcagttaaaatctttgcttctcaaactaagagacaggtatccttgcaggaatgcagcaggagctagggacacccgaggcatgagaaagccagcttatcttactgagacactgtattgtaatttttaaaattatttttatttttttgcagttttttaaaatggcaatataaaactttatattttgcttttatttttaaaaacacagatatattatgataaaactgtttttatagatttttaagaccagggtagggagggggcctaacccattcatatactcttatgaggtagaaaagtttaagaaacacaggccaagatggtccctaacatcacgtgtggttgtatgtctgtgccagctccaggcctgcctctccaaacaagactatcggagcttatcaaacacaaataacttaattaaaatataaaactggggcagaaatttgaagttcaccttgaaaagaattagctcaaacagcaagcaagccaggagcagctgaacaaactaagtgctccctggcccaggctgcaggattgcatggtcctgggggagcatttccactttgtgcccaggacaaaaggccttcatggacatcacatggactgaggcaggcgcccttgtgatgttgcaggcagataaggaataggccaatcattcttatggtgtgtaaaaggaaaacaagagctataagaactccagtggacagaaaggtcacaaatcaactaaacatcaagaatgacgaaattctaatcatttctggatactgcctacatgttgaaagcaattcattttattgcataaaactggagaagtgcagaaaagcataaactacaagtaaaaattacccataatctctttgcccagagaaaataactgaagaagtgttaacattttgttgtagcttagataaacagatagatagatgtgtgtgtgtgtgtgtgtgtgtgtgtgtgtgtgtatataatttaaatttggaattatactatacacaatgttttgttaccta

SEQ ID NO: 55057 - DNA, 1721 bp, Homo sapiens
ccgtggaactctccagcgtcaacaatacttggagcaaatcgcaggcctgactatgcagctcccaaattcctcaaattcaggttactggattactctgttttgttttttctttcaaaagaagaaaaaaatcattacactatgttctcccataaaaaaaatcttgcagctatgcatatatgaacacaatgctgagtgttcccaaaatatcaataccgttatttggaccagcctattggctcactaagtcacagacagataaagccctttaattacaaattgttaatgaagtggggaaatagtaaccagaaaatcaccaaataaattgggtctgtaaagacagagccaattaacatgaaagcaaatgggaatgcaaccagaaagacacctccagccccatgtcccaatactgcaggtggaaggtggtaaggggttggcctaaatttctcctacaagctcagatccggcatgttcttctgctttgaacttatttcccaatacatgagaagacacaggctggtaagacagaattgatggatgaacagttctataggatgtgatttaaaagcaaagttagtatcagaaagattcactgcagggcgtgaagcactttgggactcgaagcacccaaaatcttgaaggcaactgtgctggcatcgtgaaaaggtaggccatcagctccccatacatagagagtccctaagaacctcaccagaagaagccgaaggactcagatgaaagatgtcatctaaatggcttaaatatcatttaaagattgagtaacttatccacagacacacaggcggtctgtctcacattcatgccctggctcctaaccatccacgtagcccctcccatcattactgaaacaattgcatcatattcatgggctaaggcaatgatactttctcctggtatgaaaaagactcagacagcaatcactgcattttatgtcatcatttaacaattatttagttaaatgccaggcacaaggctgagtgatgggaattcagctgtggacaagctggagacagttccctgacatgcagcacttccagtatagtgggaaagataagaattcaacaaaaaataataacatgaccattaacacaaagttgatagcctcaaaggtgcttagaaaatgataatgcaagaggtttctttttgtaattaacttggaccagcagttctcaaaatgtggtctcccagtctctttgcgtctctaagattgtttcagagagtcagtgaggtaaaaactgttttcattataatactaagatgtgatttgccttttccactaggctgacatttgcactaatcatacaaaaacaatggtgggtaaactgctggcgcctcagcaggaatcaaggtagtggcgccaaatctaaatagtagtcataattgtcaatgcaacatacttgtggttttaaaaaaagctgttttcacataagaattttcttgatgaagcagcaaaaattattaatcaaaataaatcctgactctcaagtagataactttttaatattaatattgcatatgacaaaatggaaagcatgcatgaagcatttctgctccctatcaaagtataataattatcttgaagaaaagcactaagatcatgtaaattaaggggtgagctagccacttttttatgaaacaacattttttcttgaataaacaatctacagactagctatcattgttcagacttggatctttggcag

SEQ ID NO: 55058 - DNA, 3686 bp, Homo sapiens
aaggcttctatatgttttgttcatttttcttattttactcatttaaacaaatctgtattagcttccaggctgtgctaatataattattcgctagtacttctgctaataagactagcggaactttttgctttccctttcatgttacaaattgaagtgaattaataaccacttgaattaatgcaaacctggagccacacagctgagggtcatagtcaggcttccttaggcaagatcctgagcttttcctcagctgcacattgaggataaccatatatacccaacctcatatacgactgttgcaaagagtgaatttgtcaatgcatgaaaagtgtttatgatagtactgacataataaaggttgcataactatcagctggagttgtgatatcataaaataccttgctctctttgcaattcaaatttgaaaaatatcatataatggcatttttattttgtagaagaagaagaagggcctatctgaatgtcctggacataccactctaagggcctcacacagttatgaccctctctaaaggaaagaaaaaacaaaattctcttacacctgatcagcatactttatccaatttgaacatggctttctgatctcagctgattggaccagggatcgaaccacctataggccagtcagcaactattgagacagcttccttggcaaaagagctctgccaatagggtactagctgaccaaggagatcctcccttggggtgagaccaggaatctacagatgggctcagtaggcacttcagtgggcaaaatgtctgcccagggcaggaggagaagatgcaacagctttaggccaagatttacaatttctggatagataatctcaaaagtccctgtcagctttgacaaccactgacacatccagcctagaatcccaaattcttctctgcctttccccacgagtctgaagctcagcatgctgaggcctgaggcttggctgtcttgggtcagaagaccaagccacactgcaacgtgtaaagtctttacactaaaccctgctgccatgatctctacagggcctgctctttagagttcatcactggaggacaggaaagggaagatgggccccacacagttagctgccatcaaagcaatcgccacactgtctgcagatcttctgtcgggccagggcccaggaggtagctgctggtggacacttctaatgcagctgggattggcaggcatagccttgcaatgtttctaaaggaagctgaggtgggagaactaggtgacgaagaaaaagaggcagagaacctcagtactgcaaaaagtacatcctaggcagtacagcaaaaaagatggggatggttggagaaaattcggcttttcataattcacattcgtcatttcaatctttgattcgaacagttaagatcattttcaaccttatgtaaggtgaccttaatcactcaaatatcccactttctaactagattgctgccttaaagccctttcttaaagaaaatctgctgccacccttgtacataaactagtttttccagctaaatcactggattaattaaacagagcccctacacaggcttgggaatcctctgtgatgttttcctcacccacagccagtgtgcacagattagtgaatccaagagctgggtggcaggtccaaaggctatttgttctcttcctgccaaagactgaggtctgtctgatcaaacctaaaggtttgcagggagtaagatgtctaaccatttctggaataaaatcaggaaagaagttattcttctgataatccagaatcaatgggttgctgtttgtgagcacgaccttctccagggcttactatagagtgttaggacattctgggacccagtgtatatgctcagaattgtccagattctttctggataattctctatgggggccttttaaacccatgccaaggcctttactttttattcattagggagtcagctaacaaatatttgctgagtgtttactgaaggttttcaggctatgaattgataaggtcagagctgtcttttaagaagattgatctgtcaataatttgcctggtcagctgacatcaaggggagtggtttgcggttattacagcaggtcagttaggtcatcggaaagcctgaataagaatggtgacaggggaaagagcaaacagttggatggtgtaagaacccaaattattaagcaaggagagtggggtggctttagaactgacaaccatgagtcaaattcaagcaccagcacttatcccagcgagtgacttaatcttccaagtttcaactttcttatctgtaaaataggaataataaaacccactcatagatagatacatagataaacagacagacagacatacaatcttgcagaaaataactatatatattgaattactatgtgttcaccaaaacccatttccccttctcaatgggcagacagttagatgtcaccacatgatggagttccagccaataaactgggtggaactgacatgtgccacttccaggcctggtcttttcacattttccattgacgatcctccataaccttttcctatttgctggcttgatatagagaactccaaggacccagaagaggacagatccatgagatgcatgaggctcaagtccttgggtgaccatgggaagaccacctaccagttgggaatacctgtttgaaacttcactgtgtaagaaatgaatttctatcatataaagccactaagatttgaggctttacatctgtctatccatctatctatctatccatccatccattcttgcacagaacctgacttaataatccctcaataaataatcattaaaacatattttagcattatgggaaatacaaagatatacaaggtctcaatttaagaagacaagacacatacatagcagtcatatacaagatgtagacaacataagttttaagtttaaaaagttcaaagtccccagaagtagggggatctgagatggcatcacatagcatgtagccttgagcttgtcactgaaaaatggatatgaattatctggatatggagacactattcattcatcaacacttaaaaacatcaatacgaaatcccccatcatccagtatccacccccatagtctgcagaacactttggctcttaatatttctctattgctcatgtcttctgatttccagagtgatctggttcctagtttccatgcaatggccttcaatcatctgcaacttttgaaatcatttaacatttctactccccatttccaaaggctctgacaagaaaggaaggacctccagcttcagaatcttttatatcctctcccatgggtccatcacagccttgggtctgtggctttaaggaaatggctggaaaatgaaaccataactgtatatttatattactctagcattttgccattcttgcagctattgatcaattaatccatttgaattatcatttccctctagttaaagctcgaggctgtacgagcaaagaattgcattttggaaattagaaggctgatcaatccattgtattttaattattaccatgtgaagaaagcttgcaacataaacttactgctcatattttcctctctcaaataatgaattatagatgatatgatagaaaatatgctattgtttataactcacttttgctttccataatcaaaactattgctctttagtctttaa

SEQ ID NO: 55059 - DNA, 3458 bp, Homo sapiens
ctcccaggttcaagcgattctcctgcctcagcctcccaagtagctgggattacaggcatccaccaccacactcagctcatttttgtattttcagtagagacagggtttcaccatgttggccagctggtctcgaactcctgacctctggtgatccacttgccttggcctcccaaagtgctgggattacaggcctgagccaccgcgcctggcctcaggcctcatcttagtctctcttcaaagagattttcttgaccaggccatctaaagtcaatgactcctctctgctccattattctttatctctgaagcccacttgtgcccttcctccatatccttacatttaccccaagcagaagatgtagacacagatacagatagatagttgattactgcccggcagtaacacacactcattacatatttggtagatgaatgactgggtaaataaataaaagaatacacgaatgattctctgggaggtttcaggaacagaataagttatttgccttggatgttttagaccagtaatgagatccctaaacttgatctgaggaggagcaatttttagttcttcagcctgatgattgccagtgggggtgaggagggagaggggaagacagataagggaggggctgatgggaccataagagatgtgactgtgggtccccctcttctgagggaaaggtcaaggcattgcttagaaattagccagaaaagattccaagatctcctggaggggccagtttatctgcctggagcaatgtgggtttctgaagctgatagcttcagggtcagctgagagatgggggaggcagggtgtcttactcttaattcctgatgcactattaccagtggatcttttctcacttctcagttctccttttccatcactttctctggggaattgttaattcctggggagtagtgtgaggtttgagccattgaagcctgcagggaaacacccactcatttgcaaattggcaaacagagccgcccacaaagtagaagaaggcttgattcagagctataaggaaacaatggagttcatttaacatttaatgaactcaaaatagagtactctaaaaaataagtcaataaagcagttttttaatctttaatgcacgcttgctagcattatgtctgaagtattatctgttacctcagtatgggtttactggtgttgtttatcaaatgattcattgcctgtatgatttctgggctgtgaatgaaaatattgattggaattttgcaaatggaaatgcttttgtttctggccgcagctttcccaaatcattcagggccttcaaatagaataggtaccttctattgctaggcaattcacaaaagaaaggtacaggtcagacaagctcatcttttagataagtctgccataaaattccctttcttgggctcactcgaggtcctgtgaatgttaagatcttccattcagtttgtgtgtttttgaagaaacagcaaaattcagtgtgcttctcagtgagagactttgcttttgcattccatctcccagtggcaccccctccccctccaccttcatgtgagggagagagagtgttgcaaagcagagaggggatgggctggggcattggtatgggggcgggggtacttaccaggaaaaatagaagcctcctgacttttatcagagcaagtatcaaatactgtttggcccaagtacattttgtcccattctctttcgtatgcaaattaaacatctagagaccagcctgccacaaaagttaaatctacttcccaatttcattcagctcgtccttgaaaggagtatcatgtacctgatggttagctggattcccaccctaagaaattgtaggcgacatctctttctctgtcccaggatcttatcgctatcagacttctctagaaatcaaaagcacctgctcttttgttaaggtggacttctaaagagagaaatattaccattagcaaacacccagagttcacatgagaacgccactgacaggtccttccagcctgaggataccaacctcagatgaacacacttcagggcagcgagtcttcatagagtgcttactgtgtccaggcactgtgctaagcaatttatatgccttatttcattctatctttgcaaaagccataggcaatgagaagccccattttacagatttgaacactgtaggcttagaaaggtcaagttatgaacccaagataacaccattggaaatgtgacagtgccatgacctctaatttcagaacctgtgatcttagttacatatgatgtaatccagggctgatgacaataatgtgtgttatctaggggtgacccactcctactaggcttccctctttgaatttcccaagcagagctaagcacagacacaaaaggctttcctggtgccttgccctgatcgggaaaaataagccatgtctgtgctagcagacatatatctcatttaatagtctgagtaacactgtgtcatagatattagcatatcctttcaggagaggaggaaattaaaattcccagaagccaagtaatctgcccaagaacacacagttagtaatgactgaggtggactttggatttcaggcaaacagcagagtccaactgcccaggcttctcctatcacatctcgcagcatcttgcaagcacccatcagacatttctgctgggaaagaggaaaggtgtctatatccactgcagccctgtccatgagtgacccctgccctgctaagtcagaggtaagatgacactgttgacttgcctgggccaaagttggttgaaaagagatacatatctgtagaatcctcttgaaatgtgaacaagtactccaaaccatgtaaaaaaacaatactgaggccggatatggtggctcacacctataatcccagcactttgggaggccgaggcaggtggatcccttgagctcaggagttcgagaccagcctggccaacatggtgaaaccccatctctcctaaaaaaaatacaaaacattagccaagtgtggtggtgtgtgcctgtaatcccagctactcgggagactgagccaggagaatcgcttgaacccaggaagcagaggttgctgtgaactgagatcacaccactgcactccagcctgggtgacagagtgagactcagtctcaattaaaaacaaaaaacaaaaacaaaaaacaatactgaattgccagtgatgaataatcgtttatgtcacatcagaagcctttccttatgcagttgggctgttgtactcttctgtggcttgacttacctgccaagcattctgatggtccctttttcctcctctccatcccatagtcctatctctgtgtcctctcctcccctagttcctcagggaaagaagccacatgaagtgcatgcatcttcccagggcctggtccagtataccacaggggctcaataaatgcttactaaaaaagaggggaaaagatacacagagagtta

SEQ ID NO: 55060 - DNA, 3371 bp, Homo sapiens
gcaaagcctcctgtagagatggcagcttaatctgggtgtttacctcacatctgccattgaatgattcaattcattcagcctctgttagcaatggtgcaatcaaatgactccaggaattctgaaataacgtattgacctgcagggaccagaaattgctatcaggcactgggaacctctctcaggcaatggtcacactaggcaaaggcttctgctacccctggaatcatctctctgcagggagttctagtgccgttgttcccatctggcagatgtgcaacatggctgaaaaagggatgcctgtggctttgggtggtctgcacaattgtcctcaagctctagtgtacacacaaactgtgtagggtgcctattacgtatgcaggtgtactgtaaacctaccagatcagaaggactctggggaaacccacggaatctgcatttcaacacagccagatgtaagacatcccgacccatttctacattcttcctagttgacatggcacctcaaagttggagatacatgcacaaagttcagtgccaaaggggagaatggaaaagtccactcccacaatctccagatgatttttgctcacaacactgggcccctttggaaaaaaaaaacccagtttgcaaaagttcctggagagatggcaggagatatatcataaggaatttccctgtacacatggatgccccaaaagcagcatacttatctcaaagagcaatctgacatgggaaaggaggctcatgcagagagggcataaaagcctcctgtgggcttccaccatctagaggcagctgccactgaagtgtgggtgctgcagctggtgccaagaagcagcagtgccaaggcatctagatctgcctattttttgcctcctccccaccccctgacaaagctctgcttacattattttccactggctgaccatgcctggggcactctggctgcaaagagctattttaagaactcccatcttgagttcatacgaggatctcgtgtttattgacaaaatgatcctacagaagtcttgtttcacaacttggaaaatgccacagtttcatcactgttcagagcccaccacacacagacccggctctgacccctggtccagatacaaaggtacagcattccctcacttcactccctcactctcacacttgacttccttagtgcctgcctttagcttggccccccgttgtctgtttctgagggaaaaggggtggggtagagaacatcatgaaggttccctggggtaactggaccgctctctggcgtgtgtgccgagtttaccatacaagaagaaagatgcttcagagttgcattaatctggggcctgctatggtgctattcagtggtctgacgctttcgaaacatagaccttttcctgcagagcgacagaccctgctaccccgtgctacctgcagataacaaacccccacaatagtgtgggcttctctgtacagtcccaagaatggttgcgtctgtttccaacacctagttaaaggaacggcacttaggtcatcagtctttgttaaatgaaaaagtatgtttgctgaaactagggtttctcaatgttggcaccttgacatttggggtgggaccattctccactgtgggggctgtgctgtgcactgtaggacgttcagcagcagccctggtctccgcccactcactagataccagcagcacttcccccagcctggacaatcacagtgccaaatgtcccctggggcacaaagtggaccaagcgagaaccactagcttaaataaatgcccatctgtgtcattttttaaactgaattattacctttgagacgttggaatatcatacaaatattgtattctcattatagagaatttggaagaatacataaaaatacaaagaagaaaaccaaaaatgcccataattttatccctttgtatcagcctgtgttaacatttagacggtatccttcagtcattatttctgtgcttatattaaaaatgtgaccacatttttacaaaagtaactatgtagatatatataatttaaataatataccataaatacaaattttcaatgcaaaacctcacagttcacacacagaaatgtgttgggtgtgacttgagcttaggcagctgtggcagcaggggcaatgctgcacctggtgccattgtccttactttgtatgtccctcaagggctggacatattccagtcctcggagggccttatctcctagggattttctttctttgggacacaggtgtaacttactaaaagtgtgactcttataagtcactcccctcccatcgtaccttgtctatagaatgaggacagtaatacccatctcctagctcatcaacttgacctcacagttgtgaagatcaagtgaggtgctgctaatcaaaatgcctgggaaggttagaggtcatataaccacctcgggagccttgtgtgtaaatcgctcagcagctcttgctggagttcaaggagatgacagttcactcttctttccccatctgcctcagctgccccacggatgaaaccgtcctcgtgcatgagaatgggagagatcacagggcaaccttccaattcaatgctttccggttccagaacatccccaaactctccaaggtgtggttacactgtgagacgttcatctgcgacagtgagaaactctcctgcccagtggtgagctgcctctctccagaaggacaatgttacctaaagggtgccagtattggaggagctggagtttgagtggggagatcataaccaggccagggcagctgtgtgctgaggacatctggaggaaatggcactgagtataagggcagatgctcgtgagggcagatgctcagggccctatctgccctgcctccaacaacccacatggtctggcatgtgtcgcctaacctgctgggacctgctttctcatccttaagcaaagtgtgttaagtaatgatggcccttccctcatcagagggcagtgtaggtaaatgaaagtgataacagacttggaaatacttggaagaagtgaaaagggcaagggaaattcaaggtctaggtggcagggacaggccgtggaaataactcaaaaggtgggtgtttttagtcttgactgaacagcccgagggttcacctctgtgacttcagagagatgctgcagaaattcccgacactggatcatggctgatttgaccacgtgagaggaaggcctgggcaggctgtgctttaacaagccagcagtcatgccggtgctcactcaagcctgagaaccaccacttagacacttagacatgccaaatctcaaactgttctcctttctggtctctttcaactggagacctcggtgtttccaaagaggctgctatccacatagcctata

SEQ ID NO: 55061 - DNA, 5181 bp, Homo sapiens
agagctctgctgacaatctccaagtgagacctgaaggatagtgtgacatgaagggtgggcaaaacctgtgggaaggcgggaagctgtagcggctctatcttagaggacagtcaccaagctatggccaagggccaaggcccaggtgccacctggttttgtggcctgggaattaagaacagttttcacgtttttatgtggttcaaaaaaagaatcaaaacaacaatatttcgtgacatgtagaaattacgtgaaattcagggccaggcatggtggctcatgcctctaattccagcactttgggaggccaaggcgggcagatcacctgaggtcaggagttcgagaccagcctggccctgtccctactagaatacaaaaattatccgggagtggtggtgcacacttgtagtcccagtacttgggaggctgaggccagagaatcacttgaacctgggaggcagaggttgcagtgagcagagatcacgctactacactctagcctgggcaacaagagtgaaactctgtctcaaaaaaaaaaaaaaaattatatgaaattcaaatttcagtgcctttaaagaaagttttattagaacacagcaacactcgttcatgtagatattgtctacagcagtgcactgcaactacaggtggatttgtggtagcagagatgggatggcctgcaaagctgacaaaatgtactatttacttttttcttttcagaaagcttaccaacccctgctttggagagaaagcgttgtgagatgaaactttgtaaacccccagtataaactgtctgaaaggcaatggagcacctgatggtttaatcaggggaggattgtggtcaggttttgtgttttatttatttatttatatttatttttttgagaccgtgtcgcccaggttggagtgcaatgacgtgatctcagcttcaagcaattctcctgactcagcctcctgagtagctgggattacaggcacgtgccaccacatctggttcatttttgtatttttggtagagacagggtttcatcatgttgcccaagctggtttcgagctcccaacctcaagtgacccgcccacctgggcctcccaaagtgctgggattacaagtgtgagccgcagcccccagccaggttttgtgttgtagaaacatcactctgagacttctcctttccatgatcttttcttaaactttctgcattctctctttactcactacaggcaggggattttccagtctctatagcttctcaggtaaggaaaagagacacttctgggatttcgtggggctatgctgttaaaaggcagagagtgttttaagagaagcttaactttggccccggcaaaacttttaaggattgaaaattatactttaaagcacacctgagtggcgcagagggggcgagatcaagaggtctccctctgaccagcccctgaactctgaagagagggaggaaccgaaggtaaatcggatgaagcagaactggacctcacttccccaagtcttagtaaagccatccccagatggcttcccttggattccaacatttacagaacaagattttcagtgatctgttcattcaacaaatatttgaattcttgttatggctctgtcttttattaactgagtgaccttgggcaatgacctcacccctcctccataccctagtttcctctgtgaaattgggctaataattgcccctatctacatggctgtggtatagatatttaattacagctaagggcactgaacaatgcccagcaaacagcaaacacccagtcagggtcagccatgattatgatgactgtactgggaactggtcttgtggctactgccgtgaacaagacagacaaggccccttcccttgccaatatgtgtagagtatttggggttcaatgggggacgtgatttagagagcagccagggaagccccttagaggaagaaacatttcagctaagacccaagatctcacctgaatgataagaaggaagcaactacatgaggagatggggtaagacagttcacttattaataatctcacagacagattttgctctcatcattacaggagaatcatgtaaatcaacttttaaaattccaatcctagattctcatcgtttttaagttctacactgaaagccctagagtaccatgcaccatcactgatttctatttgtcagaggtccacaacctaggtttatctgtcaggttctttgtactgataaatgtgagctacagaatccccaagggatgaacaaaatcgactttgtctaaaatgtgtggaattttatgaagacccctgagttaactcttctgttgagttggctttacccttgtagaactgtctctgagtgccatctccctccccttctggtccacagatgttctccaccacctcatcatgatgttggggatttgtgccgtgttataggagttagccaggcagctgccgctcctccacccacaatagtcctcagcgaatgacaaacacatttattgtgctgccaaaaagaacaaacagaagaccacattgttggggggcagagaatagcactttgccaaatatgcactccaataatttctgtgaatttggtgatgcctttttctttctaagaaaaacttaggctacttcccgtggcccttagatctcacagtccttctacagctgggggaggagcctcctttctccatactcaagtcagggctgcagtaaattcctttgaaagctattttaactttaaaaggttagcagacccaaccaagtactgctgagcattttgaagagaatgtagggtgcaactacaaagtcaacactaaatgcacaacgcacattaatagctgactttgccaaaaaggagctttgtcattgaggcagtgtcattctacttaaggaccagagctgagcccccacgcagggagttccaatctttcaactgatgacatgggagatgatgtgggattcagagtggaatacaatagttttgctcaaacctaatgatataaaggaaatagattcttgaaagcccctagtactgacctaatttgtttttattataccatttgttaaatatataaacatgatataggtagaaactccttgtttttatagcagatgtatacttctaaagtcaaaagaaaattacaaattaaataggaatatttacaaaaagaataatcacaagaagaatacaactcacattaatttaacctaataacacggcattgccccagtgaaactgctgctggaaacatgactataaagtgactccaatgacacaagtgctgtgagtttggtgacccaatcctacagataaatgccttgtgacactcaatgctattttttctctatttgctctactaagaagttttcatttataagaaatggtctgatctcatttagcttttacttaaacatcgaagcttacatctgtttttgtctcattcacttacaatcattagaatgaagctaacacaaaatcagaaacacaaatgcaaatgcagccaatgaaagcatgcagtagcacatcttggtaactggccaccccagtgatccagaatatgcccatataaatgatttacattgtcaacaaaatacaaactgaatgaaccaattctggtagagaattggctggattgtgataggaaaaggcagagttctaagtccttagttatgtaaagacttaattagtaggcttataatttgaaaacaacacatgggtttgtctctctgtatttaaggtatttgagaagttttgcaatttgcagtttgatgattcttttacaacttgtgttagtgaactcagagattaaactagttatgaaatctccggatacatgaagtgtatgtttgtttagtaataggctaaagtaaaatgactcaatttggtctagacttggtctctaagctggagttccaacgagtttaggatctcttctttctgtaaattcagagtttttatagtcaggaaaaacagaagacatattttattggttctagtagaaaactcttaaatagcatactcatagccatgttcaaatcctttgctgtcagaataaaccaatgttgtattagttttgctgtatttcatcattgtgttttatgatcttgtatctctacctggcgctatggaataaataaaatgccttaaaataaataacctatgactacagtttacagtgttaatatatcatgttgacagctaattccccaattctcccaggggtttctacaactagagcttcgtagactcgcatatatgccacagactttttttttttttttttttttttgagatggagtctcgctctgtcaccacccaggctggagtgcagtggcgtgatctcagctcactgcaagctctgcctcccaggttcacaccattctcctgtctcagcctcccaagtagctgggactacaggtgcccgccaccacacccagctaattttttgtatttttagtagagatggggtttcaccatgttagccaggatggtctcaatctcctgatctcgtgatctacctgcctcagcctcccaaagtgctggaattacaggcatgagccactgcacccggcttgccacagacttctaattattctatcctacctttacatttaaaaaactcccagtattgggtttctgatgcaaggaggtaaagccaatctgtatgattaacattttggggaaaaggtcttttgggtcatccctgcctatagagcccgaatgtctctcaccagtgactggatgtgttttgacttgacattaactaacaacctcatgatgtttgattacccttcttgtctcataacttcttctttgagaaaataagacaaggtactctcaaaacaatctcttgtaaattctcagtagttctaaacacaattagaaacattaagaaaaagaagaaaactaattctcccccaggtatccttagctgacatagaacaaatactgaatatagatttagaaaagtgttcttatcaaaattcttagttgtgatccataaagacagtctcgctctctctttctccatgtgcatatgtgtgtgtatgtatgcacgtgtgtgtgtatatatatgagggtgtgcatacatatatatgtgcatgtgtgcacacgtggatgtctgcatatgcacacgtgtgtttttgtgtgtatgtgtgtctagatgccaaatgcttatgatg

SEQ ID NO: 55062 - DNA, 726 bp, Homo sapiens
actgggttgaactttttggggacaggacaatgaggctcattcgtctgtgcctcctacgcccagaatcgggtctgatccaaattaggcgcttgatcaatatatgtttgttgccttgaaatgtctatggcatctcagagtctctctgatacctgatatagaggaggtgctgatcaaatagacatagagagacttgtttccaaactacaatcgcccccacggagcttggcccaatgcccagacccatggcaaggctctaagagtacagtacattttctgttactcgcagtcccctttcaaagaacattggcagagtaattaacctcaaagggcctacctgtgccttgatctagcctattgtgtcatcagtagtggccctacatgatcccagaatgtgcacactccatctcaggaggtaatgatccttccaaagcaaaatgccaagctgtcctctgttttcctggcacagagtagagggtagactcagtgagctagagtaggtgatgaccaccagggagctcttccccttcaaagtgccatgcccacctgccatagcgtttttccagagaaacctttgggttaatgcttcttgaaatctgatgcctacactaaaaaggtcaaatctgttagtcattcatggcttggtgagaacttacttactagcttactcttcacttccaatataaatgatgttggctgttttgatgggggcaggaggcagataattag

SEQ ID NO: 55063 - DNA, 819 bp, Homo sapiens
aagagaccgaggtgtagggaggttaagcaattcactacaaggtcctacagttagcaaacagcagcagtaggatgggggcataggcctctgctccaaaggcctttcacccagtaacctctgaggtataaattcacaagagagcatcaaactgctgtttattttgggcgtggaagatggggaagtgcatgtgtgtgtgcacctgcatgtgtgtaaggggggtagggagagatgaggagaaataagagggagaaatgcaaaggcaaacacaaatatgatcaaagaaggggaggagggagcctgagctggaagacccggcatcacacctgctcctcccaggagatggtgctgcggaagggcgacctcctcggtgtttggtagacttgtttccaaaagccttcgtctccacggccttttctgtaggagctgagggcaatgagaagcagtgacccatacaccttttggaggtgcatcattttctgatttgtcagtacttccttccaaaaacggtcctaaaaagtaataaaataaatgttgttattcggtaggaaatgccttggcaagggcactgcgtgtaacacaatgtttaatttgaaccactacattctaattcctggaaacacagtgattccagaaggcctgcaatacaaggtccacattctctagctggcatataagcagtggaaggaaagccacaaataaaaagaaaaaatgttcctggtgcatacagctgctaagatgcagaaagcttacctactaacaatgattgcaaaaacttaaaaagcttaagactatagattcttgctttttttaaattttttt

SEQ ID NO: 55064 - DNA, 837 bp, Homo sapiens
tgggtcataacgagtgctccatacttgctacctcttactaccagagccattgagtggtcaacggtacccacctccaactgctgcaaaatgatgaaaacaaattctccagtgctgagtcccaggtttgctgcagccagaagaataatttttgcatcctctgagctgcacgttaagatgataactataagaatgaaaaccagagtccgccagttgcacatgcttgtgtatgtgtgctttctcacgcatgctctcactctaagtctggcctaaagtcactgtaaatgagacgtgaactttttctttccttgggcatgccttaagaaacaggaatgcctaaactagtccctgagtttttacattctttaaccaaacctgaagtgtacaaactagcagttatagcactgaagtctttgctgcagcctccccacaatgtacaagtgaaaaaagtttgggatcacctctgtgctctaggttttttttttctttttggctcaaaaatcagaacagcagacctggcttgtgacttgtcagccacacttcagctaagaggagttcacagaggacctttggacatgtggactttcaagggcatttggactttctgagttgggctggccggagggaggagtaggccatggtacttttctgccgtttaatcccatcaccgttcattttcagaatacacaaatgaagtagtgggttttattttttatttatttatttttgagacagagtctgctgtattgaccaggctgcatggagtacaatggtacaatctcggctcactgcaacctccgcctcctgggttcaagcaattcttatgtctcagcctccagg

SEQ ID NO: 55065 - DNA, 3985 bp, Homo sapiens
ccttccttctaggggattcttaggcctagaagttacccttatgattaggagaggccatgctatttcatcggatggtgctttggaacagaagttgtctgtgcgtggccagcagaggttcaaagtgcagccccctctgcctggggtaactctttaattccttgctactttgtcccatctctgcttcctgaagagactattaccgagggagggttctttctgcctgatttgtggcttcctcaatagtgaccagcctagtctataaactagatgcaaggccagctgttcggcgtcctaggtcagataagatgagctgtatccaggatggtgggttttagtaaaacctctagcaactttctagctctccttcctccagctccctctttctgcctgcctcccttcaatttctaaatcagtggcctgatcaagtttaggtgaaaagtaaaggtttggcatgtttgggctctacttctcccccagggaaaaggtgagaggcagaaaaaggtgcttgacctaagtggaatgcaatgcgatgagcctgtgatcacactgggggagaggcaaagggagcacctaccggtgcattcctggaaaaggcttcagcaagtccgtaagactacctgagcgtcagtttccttatctgtgaaatgggaaaaaggcagagggcagagagctctgaccttaccagcctcctgccctaagatactaggcctctggtggattcctaacaaatggaagacagtattcctgggggccctgctgggtgatgacagcaaggttctcttcagttcgggcttacaggttcctaacggggacattcctaaaggtagagcacaccgcgtactcactattctagaaataagagcaagtaaacatggctgtgacctatcagggtgtgaactgcaaacttccccttgtgttctcagctcttacaaacagctatggtgccggttctgaagatgcagcttctactaagcaaaagtttgaggagccagaggaaagcagagttaagatcaaactggaagatcatggctcttagggctgcaacaaaacaaaatccccaggatgcaaatcctgtcagtaatgatgcacacaggcacccacgactcctacaaagctgaggatgaggtgtggccttggctgactgacaagaacgctctggtcttgtttctgaaaacgtttgtgccaagagaagaaaattcctccctcctggaagccctgcctgtctcctctgtgcttcagtcatctgctatttatcctgtgtggctgaaacagactttctcatacctttgtcctaaaggaatgagtctttgacacctgaacaaatttgaggctttaagcaatactttaaacaacgaagtgttctcccagatatcactataatctccggggtagcaggctagtctggcctaaatgccagatttctgaatatttatttcacagtctctgttcctactatttcgtagtctctgctcctcctcctgcccccattatgccttggcatgaagagcaaaaactttcagaggttgtgaggaggagaagcaaccacctgctccaggtactcagtattcaaagatacggaatgactaacagtgatgccattaattccaaagccactttccataaaattttaggtttgccaagacacttttgctgtcatagtgtcccaaacactgagcaaataaagaatgtgtcctggccgggagcggtggctcacgcctgtaatcccagcactttgggaagctgacgcaggcagatcacctgaggtcaggagtttgaatccagcttggtcaacatggtgaaaccacatctctactaaaaacacaaaaattagccaggcatagtggcagatgcctgtaatcccagctactcaggaggctgaggcaggagaatcacttgaaaccgggaagcagaggttgcagtgagcagagatcatgccaatgcactccagcctgggcaacagagcaagactcctcaaaaaaaaaaaaaaaagaaaaaatatgtactaatccatctttctctggtgatgacacactcttgacccacagaatgtttctccatctgtgtaaattggcgacctttgtggcactgggcttggcatctggcagcttctttctggtggatagccatacatctaaagtgagacaggatgtccctgactcctccgccctctccagtttcttgtctggagaaaccaggagccctcccacttcctggcatttcctctctgctcctggtaaaggctcttgagccaagcacgtggtgtgtctgtccccaggctgtgagcccagggaaagaaagcttgcaaggcagaggataatatccttaaaggcttgaaaaggagggaggtgctgacatccccccagaatactggtattcctatctatggcacaggaaccccggcttctcccactaccttcctgtagaaggcagtgtcgcagaatggctgtaagcacaggttttggaatgagaaaagctggcatggacaagttatgtattatctgaacccaatttcctcattcgtaattactctgacaaccttttgcaaggattaaatgaagtagtaaatgtaaaatacacagcatagtgcctggcatgtaacaatagccagtaagtggtagcagttttataataaaggtttattgctccaggcaaaagatcataaagtctgttggatggattctgtgttgaccctaaggaacaaattgctgctgctgcagaaaccagaggaacaggtaaaagatgttgctgggacaggtttctgaagatgcctggatttataattgctaatatatacaggcatatacatagttttcaagcattacatgggatgatgaagctctggctggtttttagggggaaaaaagttctcccagaacaattacaacatgttcattgctgccactgggcaacactaccttttgcttatattctgtaggcattaagtcaaagggcctttggtttctttgtcttttttattttttttagactgagtctcactctgtcacccaggctggcgtgcagtggcgtgatcttggctcactgcaacctctgccttccaggttcaagctattctcatgcctcaggccaggctggtctcaaactcccgacctcaagtgacccgccaaccttggcctcctaaaatgccgtgattactggcgtgagtcaccacgcctggccagggcctttagtttctaaatcagcactgtccaaaaaaataacacgagtaacatatattatttaaaattttctagcacacacatttaaaaaagtaaaaatagcagttaagattacttatcaagagtatcctaaatattataatttcaacacataatcagtattttaaacattgagattttatgttattttctttataccacatctggaaaatttggtgtgtgttttatacttaaacacctctcaatttagacttgcctcatttcaactgctcagtagccacgtgtagttagtggttatagtattgaacagtaaattttcactctgagccacccttttaatcccctgggagatagcgatgtttcctatggggtgttgaaggttctgggaatttcaacttgacacctctctcagtggcctcagttctgtctatctgattctttaatgctctttggaagctcttgctgataaaggaacaagctgcctacatcatgacactgagaataatatttattcagcatacttaaagcctgagatggggccgggcacggtgtctcacgcccataatcccagcactttgaggggccgaggcgggcagatcacctggtcaggagtttgagactggccgggccaacatggcgaaaccccttccctactaaaaatacaaaaattagcccggtgtggtggcaggtacctgtaatcccagctacttgggaggctcaggtgggagaatcgcttggacctggaaggcggaagttgcggtgagctgagatcacaccactgtactcctgcctgggcaacagggcgaggc

SEQ ID NO: 55066 - DNA, 1851 bp, Homo sapiens
aaagctcaaatctaaggctgaaaggcaatttgctttgggtgtgtggttcaagaaaggggaggggtgcctggggttgggggagctttttattgtaatctgggcaaacaacattcttgtcagccaagtgctcacacttgggtaacactttcttcccacgaagagtaagcacgtgttctcaagagcatgcatgcccaagcaattgatatcagcagctacagttaagagaaagagttgctgccatcgctgagctgtggggtcagcttcttcctcataccctgtgatgttcccatggtgcagggttcactacagggcccagaatggagctgtgagcccttgccgcatagcagacggctaagaagaaagagctagggggtcgcacagctgggacccgtggagcattggcccctccagtgaagtgaagcaaggctctgagttggtaatgggctctgcagcaggcaggatgtccaggctgctagggaccccttctcgagggggccggacccttggcatccggtccacatgtctggtattgggtctggcttcctgtagggcaatgggtcttagttttctttgagagaccagtaaaaattctgaaaagaaacgcatatataaacacaccagtttgctagggggtcttggaacggatggtacgcagtcacagatatgtgcttgggctctagactcaagaccacctaagctcaaaatctgactctgagactcagccaactgttagctgtgtaccttggaggtttaattaggctaccccctagctctttcttcttagccgtctgctatgcagcaagggctcacagctccattccgggccctgtagtgaaccctgcaccatgggaacttcatggggcatgaggaagaagctgaccccacagctcagcgatggcagcaactctttctcttaactgtgttacttggcctctcttagattttcctctccttctaaatagcaataaaaacttccatagggctgctgtgtgattaaatgcgatagtacttaaatgtagtgttgccaccacgcggtaggagctcagtgatgttcgccatcatgaaggccttcagagaggatctggcatgaaaaacttgaatcactgccctgtaagttgtactttgagtgtcattagccttttgaaatatcagataaccagggaaagggcgaacatgaatttctgtggctgattatgacaccctggttatgagttaagggacttcgctccttccttctcatatctcagtacacagataaacttcagagtcaactctgccatgtgggaagctaaaggtcagtgcaacacagctctgtttttgcccactgcatgccatcacaacctctgccctgctattcagctaactccaggaagggacatctcccctctttctttgtgatccatcattgtgaagttaacaagaatagatccagcccatagctctaggtctttgcttctcttgcctgttgagtcatgttgtttgacttgaaaaggcttgacgtagaggtcaaaacagcctaagatccttcctaaataagtgtttcgcgtgcttcacatgtcccagctactgcagacatcatgagctttcccttttctctctggtcctcacatttcttctttgccctcaccaaaaatgcttatggtaagcattattttgtgactgttccatcatcttaatccagtgaaatattctaaaacaaaagatctagaggtttaagatgaatcttctagattctgaggtcagaggttatattaaaaggagaaatctggggccgggcatggtggctcacatctgtaatcccagcactttgggaggccgaggcgtgtggatcacttgaggtcaggagttcaa

SEQ ID NO: 55067 - DNA, 4083 bp, Homo sapiens
cgggttcacaccattctcctgcctcagcctcccaagtagctgggactacaggggcccaccaccacgcccggctaattttttgtgtattcagtagagacggggtttcaccgtgttagccaggaagcaatgcttcctattctagcgccttgctaaactatgtgtgctgcagactgtgttcgtgattccgaatcctaaaaacaaccgtcctaggcttgtctctcagcctagactctagactgatttggctcatttggttgtcttggagacgttctaattctgaagggggcagtggtcccttctagaagatagctggtctgcaaatgcacacctctgcttagtctgaatcctaaagttatagcttgagccaattaaagtggcttctcatttttctctcactctgatctcaaggagccctttttcttctagtaatctagaccttcctcttcctatcacagtctcaaggattgtgcccccaaagcagatgcaaagccctgtctaccccttctccttcccctgaggtagagctttatcgaaggtttctcttggtaaacgttagctttctgaactaagggccgtcttttttttttttcccgcttaagcccattgcataacaatctcttgttttaatcttttgcccaacactgcttttcttactgtcagaggttactacaagtgtttgaacaggtaacttctacctttgaacttctgttgtgacagattcaaaggttccaggggagtgtgttggccactctcaggacagtacacagtagcttcgggtgtgtcccagtcagtcctaggagctgtggaaagagtagaagtgcctgaatgtggtgctgaatcaatacagccagctgtgaggggagcacttcctggacccaggaagggagagtcttcttccaaggtaagctgcaatgatactacctgcactatattgaatatatctgtgagatagtagggaggggattggtgtggggaaagaaagtgggatttgttatgctcaacctaaggctctttaataacatgaaattacatttagttgaatagtaatctcagctgacttgtgtgggaggcaaagaaaaaaatcagttggaaaaggggtggagatatatgagctatccaaatgctagcaggggatggaattggaagggaacactgattttggtaagtgtactaaagcacaccaagccagaatgtgggtctccttcatcttccattaagaaatttctgtctcagtgtagttagaaggatcgtgcgtcagctgctgagggcagagagtcccatttggcagacagagaggaagggaatcagcagatattcgattaggtgctggggactgttctgggtagattatgtatgttacttcattggtgtatctcatcctataaagcaggtggtatccttcccatttcacagaggcatagtgcgtctccaggctgttaaacagcatggcctaagctacatagctccaaggtggtgtggctagaatttgagacttgattggtcagtttccacagcctgcccaataatgcagaattgttgtgggttgccaaagctttcagttaccccctgaaatcctgagggtgtcactcatgtgcacagaggattgataggaatacaactctgatgggcctttagaatgactcaaccttcctgaacttgagcatttttactggaggaggtcaataaaaaaaaaagaaataaaacctcatcttcccctggccctgagccctttggtgaaggaagacagcacccggtgaagggctcagaggtattagtgtggctgagattcgacacccactctgccatcctctgctctcctctagaggaagttgcctcttggggagctgagttcctgaaactaagcaaatgacaagtgctcctccagccgtgagatgagccagaggatggaatgccacaggccccacttcgtctcccagcccttcatctttcttccatgtccaaaggcggctccccagaggccaagggctcagctcttgtgttctctgagactgtggcacagctcaccctggcttccttagtaggaagcttttaagaactgctctgtagaaagaacaaaccctaatctagctccagcaaagagccaggatcatgctgaacttcctgtgagccttcgtgggggatcgaggctggagaaagtgctgcttcattctgaggtatctgtgaggtggggaaggggcaggaaaatttgtcatttcggcttcctaatctgagaatggtagctccagggcccccctgtagccacagccttaggcggatcaaaaatgagactaatacaggtcctggtaatactgggggtgaccaaggcgaaagaatcgatttttaagttaagttttgaggtgtgactgtatcagagggaaagaaaccatgccaattgaacgactcacagccctgtcgttcctgacttgcttattttcttggctttgccagaacttcttcagagaccaaggcaggcagctctggcgactggagagaggcggggtagaaggtgtttgtgtgggtctgagggctgaggtaccctctagccagactttcctgtcctccgaatccagcagggaacagcgtcacctctgcctctgtgaggcttctgatctgagggggcacctcaagtcattttagtttgtttgttttcatcttagttgaaagatgataggccacaggagggcagggtcaactgtgttgaggcaagctggcttttgtgtcggcccttaggggctgaggtgaaaggctttgacacggagccagggtagctttggcagcttctcccctcctggtcagaacacttccactttcagttgtgaaaaaaaaaattaaaaccaggaagtgaagtccccgagcacgttagaaagcctgacatggcctgactcgggacagctcagagcagggcagaactggggacactctgggccggccttctgcctgcatggacgctctgaagccaccctgtctctggaggaaccacgagcgagggaagaaggacagggactcgtgtggcaggaagaactcagagccgggaagcccccattcactagaagcactgagagatgcggccccctcgcagggtaaggggaccatcgagggggtgttattcagcaagggggtcttgtgagggtgtgacagaggccaagggggcatcctgacccccgactttctttaagcgacttagaatcaagggccggctgagttccacgggcacatcatgctgtctccctcctggtctcggtcatgccttcagaccctgtgtcaggaggagcaacgggaaggaaggatgtggggcatgcatggggctcactttccttctctcgactctcttggggaaggtgaaccaaaacagagacctctttttgtgggtctgagcatccagcatagctcccctgaggtgggctgggggtttgccctcaattttatgttgggtaagactgatgaatgagaccaatggggtgggagagacagatgaatggagctgagtgtattttaggaagtaaggccacaggttaagtctcaggtgctgcttaattcctaagtacttccttcccaatgcccactccctgagggtcctaaggtgaatctcaaagaccctcagggagtaagcactggaaagggactctaccactggagaccctcagggaataagcactggaaagggactctaccaccggagaccctcagggaataagcactggaaagggactctaccaccggagaccctcagggaataagcactggaaagggactctaccaccggggcttggtaccttctgagatatcagcctttttttggtggtctgaaaggtagaattgaatctatagctccaatgtgtaggtgattagtattctatatcagaggcagagtcttaaaaaataaagttaaggccgggcgcagtgactcacacctgtaatcccagaactctgggagtctgaggtgggtggatcacctgaagtcaggagttagaaaccagcctggccaacatggcgaaaccccatctctactgaaaatacaaaaattagcttggcgtggtggcgtacgcctgtaatcccagcaactcaggaggcaggacaattgct

SEQ ID NO: 55068 - DNA, 2861 bp, Homo sapiens
ctgggattacaggtgtgagccactgcacctggcctataggatttgccagcttcttagaaaccaggaatacagtgtctgctcctgtctgtctctcatatgcctcctcagcagatgagcagaccctcagctggagtgcagtcagaggtgactcttgtgcctggcagcatcaagcaagggtgacgtaaccccagcagccatgagtccagccatcactgcttatcacattctgctggaaatgcatctgggtctatttctcccctctatgtctgtacatcctgaggtcggaaagggactctctcaccaacttgtcctccctggcgcagggcctgacacttcctaggttctcaactcattgtttgaataaatacatgagatctggagtttggaaggtcagacagcccgtgcaatgctgtggtcaggccacactattagccttctttggggaagctggtggatctcccagtcttcatgggccattctattctaagagttgtgaggttgcgagtggctcaagttgaggatttgaggtctggggtaaagctaggtcagagacaggccatggttccctacaactagaagtgctctgtttaaatagaaatgagggcttgttggccgggcgcagtggctcatgccagtaatcccaacactttgggaggccgaggcaggcagatcacttgaaatcaggagtttgagaccagcctggccaacatggtgaaaccccatctctgctaaaaatacaaaagctagctgggcgtggtggcagctgcctgtaatcccagctactcgggaggctgaggcaggagaatcgcttgaacccaggaggcggaggttgcagtgagctgagatctcgccactgcactccagcctgggtgacaagagtgaaactccatctcaaaaaaaagaaaaaaaaaaaaaagagatgagggcttgttaaaacctttgcacagaagtggaggggcagtaatcgttcaagaccgtggtcatctcttttcttttgggacatctcgtaatagaacatctgatattggcaaggatgtgaaaactgaggaaaagggaaggaaaggggagctagatttgattgaggacttcccatgtgcctgacagcataccaactgttctacacacagcatctcctttaagtagcgattttcacctgctccttctgtgtacagtggcggggaactgatgctcagtgactctaagtaactgtccccagggctacacatgtagtaagtgaggagctgttgctctggtacctggaagggcacgaccttgaaagtttgcccctggcaatgacaccgttgacaagaaagcttgttgcctgcactttgaaactgttgacccttgaccactggttgggacaggcagtgcaagggctgattctgcagaaaactaaggcaagaagtctgctttcccaacctcttgcctcaccctggcacaggtgacagggtcctagcactttgtccggcctatctttttacagacccccttatcagatccagtggacttctgacactgcttcttcttaccccagttctgtcataatatacttggtcagcagcaggcctgggatgccctttgggggtgttactgacacaagttgtcccggggtcgggatttggactgtgactcacttgaagcccagtggtggatcaaggttgactctatcgacctgagctcctgtgggatttgtcacttctggggtcacatcctgtgggtgactcaactatcctatgctatcttaatggactgacttaagaggctcttggtatttgacttaacatgagatctcctgataaatgctactcagctcaactggccaatgtctggccccacccaggctctctggagtatgtgaaggcaatggctccagaggtgcagtgtctacactgggccccacacaccatctcattcatccttggagactttttcttccccctgccaccccccgccccccaaccttttaactaaagatggaccctccacctccagcagaaatacctcttcaccatttccctcccctaaatgtcccacttgtcccactttagtgcctctagcacatctggccattccccttctccacttccatttggctccatccaacctaatgagatgattggtctctccgtgaagaaagtagatagagagacacagacaacagttgagaaagatggtttggtggcaggcccactggttggaatcatagttgagatcttactagacatcagcttgattggtagaattgtcatccttttttgttttgtttcttaagacagggtcacactcttgtcactctgcacatccaggctcccaggctggagtgcagtggcgggatcatggatcactacaacctcaacctcccaggctcaacaatcctcctacctcattctcctgagtacctgggactacaggcatgcccaactaaattttttatttttgtaaagatggggtcccactatgttgctcaggctggtctcaaactcctggcctcaaacgatcctccagcctcagcctcccaaagtgcagagattacagggatgggccatcatgtctggccagatcatcatccttgcccctggaaagagacaattggcaataaagccagggggtcaaggatcacacatctttgaggttctagtgttccatacagccgtcttaatgtgctccagtctgcactgacctcttcctccttcaaaaccatgagctcactgcacacactgaagcattctgtaagagtttctaggactagatagacccataagtacccagatggcaggaactatatcggccaagtgttcatccctcagcacatggcacagtgctgaacacacaggtccacagtttttgtttactttactgaa

SEQ ID NO: 55069 - DNA, 746 bp, Homo sapiens
aaaacaaaagccgagtgtggttgtgcacacctgtagtctcagatacttgtaaggctgaggtgggaggatcacttaagcctgggaagttaacactgcagtgagctgagcatgttaggatggggctgcgatagcgccactgcattccagcctgagcaacaaagcgagactctgtcccaaaataaatatataaataaataaaataaggcccttcccatctgcctggggccatggctattataagacaatggcttgagcaactggtgaatggctgggaagttatcagcaggctgtaggtcaggatctcaggccatccttccttcttagctacttggaatgaatattgaaagacacagtttcagggcccctcggccctgtgactcagccttcacctttgctctggtttcttatcggttagagaaatggatgaaaaaggtttccacccacagagctgctgtccagctggattactcagtggctgagaagcattttacacaacatgagggcttggaagaggctgtgtgtcaaatgtagttttggtagcgggagagccacacttgtagaaacaaagctgaggtgtacacttaggtgcattcacatgaaatgccaccaaccaaggtggtagaactttctaaattagctgcctgtgttggaggtgggattatatggagctgttcattttattctttttttttgtaagtgtgcatatttcagattaaacagtacacatcaagtgttaccttcccact

SEQ ID NO: 55070 - DNA, 689 bp, Homo sapiens
catagcaagttgtaatgctgttgatctcagaaatccttccgatgctccaaaaaataaagcaatgagcaagacatgtctagccagcaggaaatatccttcatacaaaatggttaatttctaaaacctgtggcatcaccttgacagatctcttctgtttggtttatacgggggaatccaactggaagagtccttcctgacccttggtctgcctgggcagaggaggtactgtcctctgaccatcagattatgttgggtctagcaggctgccttcttccaggctttgtgcaccaacattaaaaaggcagtcatttctcaaaattgtttgggaaatgattaacttgtttcctttgatcctccctgctctgtgtgaggacagtcaagtagcagaggtggagaatgtgttctattattttcaacagtgctaagtaaacactgggggaaattctgccactagagaggtacaactgtgtttgagggtttgaaggcgtgcgcgcgtgtgtgtgtgtatgtgtgtgtgtgtgtccttctgaaaacatagagctattgagtacaaaaatatggccatttcctctaaattttctttcccctgttttttttttaaggtctgaatttcctgctgctgttcacaaagatgctttttatctttaactttttgttttccccacttccgaccccggcgttgatctgca

SEQ ID NO: 55071 - DNA, 2113 bp, Homo sapiens
atccaacgcttagtgaatagtttgagaagacaaagaattttaggaccttagagttgatctaattcagtttccttcttcatagaacagaaattgtcttagagaggctgagtgattagaccaaggtcacaagtaacaggtgaaccagaatagaaggcaagtcaacgacctccctttatgaaattctaagctgcctcttatgaagtcttgaattaagccaagtatgagtcagacatggtctatgccatttgcctgcagtctcctccaccccgccacccaaacatcaagagaacagtcaatttggcccaaaagtaaaggagcgacagtgaaagcaaagagagcatgcaaggaaaggaagggaggagatagagcgagagtgtgtgtggtgtgtgtgaaattatgaccagaagagtatatgagaagaacctgaattagaagattcgagggaagaaagaagaggaagtgcctccaggagcgagggaaatggaaggcagggcggcgagctccggagagatttgtggaagggcatctctgcctggactggatctgaagatctggaagaggatctgagctacatggataatacagactaccacgcagcagacgctgttgacttgtgcctcagtttcccgcccgagtcatggagcagagggcttagaaataaatcctcacccaaggaagaaatatcctggtaagccaggttggtctcaacattcaggagagcctgctcccactctggtgggacaaagaccaccaaaatcgtgcttatattccctgccttgactcccacctcagtgtggtccctggtgtctgctcctcagccatcgcatatccggggcggcctgggctcacccggaacagattttttcctccttggatgactccgtcatggacacctcagcccaggacaagcagagagcaaaccctggcagcgagaggctggagtgcgggacctgctacaagccgagcacctctcggccagcgccctcgccaggactctcccgctcaggccccctgcgcagtctctgttactgtcacttccggaggttcgccgcctcaaacctccctccggaagcaagctgctgtgccttgtagcgtgtggatccggagccgattcccagaacacgaaggggggaaaaaacgcttctaatgatccctcagaacttgcatattttcatacgcttttctggggggaggcactaattggggcgcttttcctttgcgaacttacttatcttaaagtcggagcggaaaataaagcacgcacgcaacccaatttccggagaaccgagattgcgacgaacaaccaggaagcggctgggttgagagctgtccccggttctccgttctgctctcgggggcaccttccggggttcctaagccgcggggcccctcgctgcccctcgaggccctttccctgacctaggctttggcctgggctactcgttccggagccgccatgtcgtccgacttcgaaggttacgagcaggacttcgcggtgctcactgcagagatcaccagcaagattgcgagggtcccacgactcccgcctggtgagagccttgcccggctggacgagggtgctggggagagctgggagggtgcgggcggtggaacgccgcccgagtaagtgtgtctatgaggcgcgaggctggagtgggtggtgccggctgttcccaggagggatacggcttggcttggttgagggtaaggagtcaagttcgggtgtggggtgccgtgaaaagagccttcggaatctgagccatctgagttcgaatcccggctctaccttcttgtaacttgcataacctggaaacgtttcttaacgtcttaagagtcttaatgttttcatttgtaaattatagacatgtgagtattcaaagaaaatgaatgaaagtatgtagcctatggatctacaatctacagcggcgttgttgtgttagtaataatattgttataattatatgcggcaaaatagaggtaagaatcagggtgcctagattcaaatcctacctctgtcacttagaagttgtgcctcttaacccgggaggcggaggttgcagtgagccaagatctcgccattgcactccagcctaggcaacaagagtgaaactcc

SEQ ID NO: 55072 - DNA, 982 bp, Homo sapiens
gataatattgggaaatatttaactttattgtcaaatagattcagctctcatagtttaaatgtagcacaaatgtatttcacccaaatgtaagcagaaaattcctatttctttaatttttttttttttttttaactacagagatctagaatacagatattaccatttccttctggcttagtcctagcaaaacaggttgggctttttttttttttcatttctgtttttaaacaatttaataaaataaataaaaactgtactagaaataggagattttatttcctaaaggcatttggtggaattatgacattgaagcaaaagtatcagcatttaaaagcctgtttctttctacaaaatgggagaacagagaaatactccaaaaagggagggaaaaacactcaatttatcaaagtggaagcctgtatcaagaaatcctacatcttgttacatccaggatttcttacttttgctctgctcatgagcaacagacagaaagttcagaaacacaaaggcaatcaatatgaaaactgtgaaagtctcttaattaatcaactcacacaaactctccaagtaagaggattttacaaacatttcaattaaagctttctctttttattactaaatttcattgacaattaaaaatgcataatgagagtcgacatgattataaaaagcaaaatatcatttaaatactgagcttttagacgtataggagactgactttctgatgcttattcttttgatgaatcacatagacaattactaattggatagttattctataacagtgacattttggaattttcaaaacaggtagctctttgaacatgtttgtatttctctcctcatgttaacatcatcattttggcatactcagacctagaagcttcatgactgactcactaatgaaattcagcaatcatacatatgcaaagaactacctaattcattgaaatatttaagaactgacatggggtgactagat

SEQ ID NO: 55073 - DNA, 2192 bp, Homo sapiens
ttatttgatgacacacacctgctgagtggatgaaaagcaactgttcctggggatgacctacttcaagggcgcagtcagcttctgaggccttcagcaggttatcctgaaatcattttagttcaccttgatatcacctgttgaacatatctaagactggtgtattcgcagacttgttgtaggcacagttgctaaccccagggaagagatttcggagtcagtaactactttgtcagtgtattgagactgggaagacacgctgctttaccaaacctactctgagcatatggagtgctgttcttggcactcgggatgcgcatcagcccagggacctgccagctgggagcggacccctagaaggggatctagtgggaacataagtaagtatggtccagcacagaagggatggatctgaggaagaaggcatggaggatgaggatccgaggtgagggaaagggccatgaaaaaatttctgacgaagtgttctcctgggagtttccagcacagagagagatttccagttgagatcagggaagagcaaggaatatttgaaatgcatggagacactgtcaccagttcatcctttgaaggcaacatgtcttggcatgttcatttctattctacaaacatttatggaacacatgctgttgagacatggcaggccttaggtagtgaagataaaatataaataatccatgtcgctctcccaacatgtatactctagtgagaagacataactaagcaaattttattataaatttgagtataacatacccatatgtgtacacaaggagttcttagctaagttggggttcctggagttggtgatacctggcctgagctttgaagaataagtgtgtgttagccaatgaagagagaacagggacatggaggccttaaaacaatatgttgtgcccaggagctacagattgaccatccctactctgaaaatccaaaattcaaaatgccccaaaatccaagtttttgagccccaatatgatgctcaaaaggaatactcactggagcactttggatttctgatttttggattagagatattcaactggagtgttattttgcatatattcccaaatccaaaaaaaattaaaaactcaaacacttctggtcccaagcatattggataagggatacccaacccctacaaactgttccgttttacttgaggaaaaaagacaaggcgggagccagggtttgagccagtggtaccttagaggggctgtaggttccccaccaccccaagagccccttgccatgaatgctgccagggccaccccaagcaaacatagttggagtaagaggactgtgcttgctatgtaaacgcagcttcgtaacaagtgccgttgcacctctgctgccctaagctcctctgtatggaaaatctagagattccaccgaagggacattggctcagtgctgagagttggaagctctgagtcatgactgagttggaagcttacatgttgatttacaaggcgtctttgcccattacatttatttacatgtccagaggtcatggcctgaaaggcttggctccaaatatgatgtgccctttctattgttgatgatgtgactctccattcagttctctttttctcttctcctggttatctgttgctgagtagcaaaccaccctagaaatgcagtgacttcagcagcagtctctcaggattttggcgggttaggaaaatcaggggttgcttggctgggtgttctggctcagggtctctcatgagccttcttcagacagagatcagagctggaactatgtaggggggacaggagcctggagtagctcgggactggctgggcacctttctctttctgtcattagtcaaaaggcccttccatgtggtctccctgcatatgctggtttgggcaatcttacggtatggcagcctcagacttggcagcccagggcacctaaggtgagagctacaaaagcaagaggcagaagctgtgtggctttttcttacccaatctaataagtcacacagtgccacattctgtgcctcattctactcagcaagacagtcgcaagggcctgccgaggtttaaggggatgggatgtgacacataccccactctttgatgcaggggtggcaggttgacgaagaccagtggggcaggaaatattgttgcaaccagttttggaaaatacaatctgtcacatcccc

SEQ ID NO: 55074 - DNA, 1408 bp, Homo sapiens
aagttaccaggcggcctgaggaccgaccaacttaaggaggggtttaatcccaacctcacagcccctcttcaccacccccatacccagtagggtccattccacacccctagcagcacatctgtgacacagcaggctgctggggggacagtctgaacccgaagtcaccggctgtctcactaaccagagaaagggattttacctcaggaaagtttctcaggttctgtggaaccagtccctgcgtaaagagacaggtttccttctttcttttcttccccccacccccctcaaaatgagtggattcagaaacattatctgctaaaagtaaaagaagaaaaattgagaatatgttgcacagctggtgaaatcagtagtagagggtgtctgggtatgtgttgcaagagtgacacctggtttatgtttatcaacaactaagtgagctataaattttgtggaaataactttgctttttaacatcccttttgaacaacacaggccgtttgccctatctaataaaaaggaaacagttgtcctgcttaccatgcatgggacattgaagggataaaggagcttgtccacagtatgtgggcccagaaatgcacaatagctaaagtctgatgtgacctttgtctttgcaaataaagagactgataacccaggtgtcaccaccacattttttaaacacatgcatcacaaagggctcagcttaatgactattttcaagtacaaatgaatttcctgaaatggaagaaaaaaaatagaatcatacttgggggtaattaggggctcaggctacccctagtgttctcggacaatatctaacaacaaatgttcactgcaccaatgccctgactcctgtatggagttttatggttattgatagtagcatgattatggtaaccattgtatgtaccaggcatggggctatgcattttatgttagtagatttttttttaatctgcacaataggcctaagagatcaatgtttttattataccattttataagtaaggaaacaactaactcagatcatgccctccgtaagtggccgagctggtctcagaaccaggtctaacttctcagccttaacaaccatgatgccttttaggggttttggtttgggtggttttgattttttttcttaaaagtttaaaaaaatagccttctttgctccttgactaaaaaggttccaaaccactttttaccctagaactcatacaggccaacagagggaatggaaattggccacagcactgtcactgaaaggtaataattaatgaaaaaggtgtcacttaaagaggccaatgaccaaaagtgtgtttctcttggattaacttttctaacactctttaaataatgtgttgatagcagcagagaccaaaaagaatgcaaacagacctgaacattttaa

SEQ ID NO: 55075 - DNA, 863 bp, Homo sapiens
aaaaaaccatatggccccagattcttcaatgccacagctatggtgctcttccatgttaagagacttaacagatgaaatatggttttccgaacctcttttcatttaccatcaaaataacaagcgatgtcttgtatttcaacagagacattcttttcactcagttactctgcaaagaatgtgcccttgtctctgctgtagatttttattttatttgtaaattgtgcgtgctgcatgctacggaatactgaaaagccatacaccctggcttgttggttgacacatagtatgtgtgattacagattgtttgaataacagtggactattgaactgccatccagatgtgtgtggagttaactgtgggaatgtccacaaaggaggattatctttcttgttgctggggccaaggcccccagaaagtggaaacataagcatggcagctactcaaatagaacagtagctacaattggctcttcagaagcaaaattaatcattttttttaaattatgcattgcaattaagactgggtttgttctctaaaagtaaatcatgcaaagaaaatgccaaacaataacacaaaaatttgcagctttgaatgccctttgtgaatggtttcgtcattttgtttttaaacgtttagaaattcagaacattgtagattaaagataagacctcaaccattgcaagcctccgagccatcatcttgtagacttgatctgtgtttcctgcactctcttccattctttgtactgtacaggatactgtaagcattgattagttggtgttcacaaatactggccatgggaaaacaatgcagaattccccctgtgaacactttctttctttctttctttctttttgagaca

SEQ ID NO: 55076 - DNA, 740 bp, Homo sapiens
ttttctttcctggaatgaaagatctgttacttgttcaacagtgtcaatgctttctatctctggttggaatctgcagcagtcagttggcacccagccatcaaatacctagatttacctttgtgcaataaaagtccctttagcaatgcatattgagatatatcattttgaacctattttaaattctgtagcaagcaagtaaaaaaaataaataaatcatgaaacatcaggcaagtcaaaggaaacaaagaaacgaataggaaatcctctctagattccgttcccactttactttctgtagtttgatctaaagaaaaatgtggaatttcctgcagagtgattaataggctaatgtggtgactgacaggcactctgagcttgacctggcaggtaaaggctaactggcacgttaagttgattacacaatttcctctaaataagttgacaagtggtttgcacagttgccttgacttttgcccttataaatgcacacttataaatgaattgctttttcaactaaagcaatccttattttagatgtgacatgtgttaagtaaacagcttgatacagaaccccagcatcctagccttcctagccaggtcagattatcagagttgctaggaaataagagttttgagcctgaaactcagctttgagatgtggttgtatccctagggcataagaaacccaaaactatttttcttccctctagtattgtgaagcagattattagatttgagaa

SEQ ID NO: 55077 - DNA, 812 bp, Homo sapiens
tagagtttcaacttaagcttttgtgggagaacaaactaactgagctgcctctcacctaggatactcctacagcccaaactacgagttcaagagaattctatcttggaaaggactgagtcttattagactgcttatccctaatactctgcagagtcatccctcatttattttttaatgaaatttgacaaaatatgtacactaagtctcctgtagaatggccataatttgtgcttaggaatgcataattttatcaggatctctgtaattagatattgtgcaatagaataaaaagcaaatactgtgtgtcccatggcaacctcggcctttagtatctcactatctttgagataacaaaggtttccacagacacacgtaccacatgggatttttaagtagacatccaggaagagaacgaaagttcccctgttggttttcccctatttttaagtgtgagtgtatgaatgtgtgttttgttctcttccttttatattgcctcctggatttgggttgttttcctttatctgtccggactgtaaatgtggatatgaaggttcatagtcctgtagaataacgtcagtgcttgagctagtgtttggtgtgaagtacctatcttttgaagggagagaaaagaattacgactgtggtaagatttaagaggacagaattaagattatgtaagggttgaagaaaggtttgctgggaatgtggtgtgtgttttagcagagaccccaatgacctgccagggcacgtagagagagcaggctacttgagggcagggagtagaccaccgccatttctgtgacctcacatct

SEQ ID NO: 55078 - DNA, 2128 bp, Homo sapiens
tgatggatttgagttgccgtcaggtacagacaccgttagaggcagtggccgcttgaatgagaaagagtgtgatagtgaaacaagagtggacgtggggccggaaggcctggctgtgccgcagatggctgaccctgggcatatctcttcccctctcacagcctcagtgtcctcaactctaaaatgaagaatctaagccagatgtggtaatgtgtgcctgtaatcccagctactcaggaggctgaggtgggaggatcacttgagcccaggaggtgaaggctgcagtgagctgtgatcgtgccactgcacaccagcctgggtgacagagtgagaccctgtctctaaaaaaaataaaataaaatgaagaatttagactagggcatggaggccttttccaggtctagccatctacagacctgtgaggagttaaatataccttgcatttctagaacatccttatttaattctcttcaagttctttccaagccctttgattgaagtgagctgccttgatcctatctgggagtctgcagccagcaaagccgctctgcaggccccctgccattgtcaagtccatatttaagaatggcagtggccgtggtgcccaggctgaaatttgctgtacacatttggcaacatagagtgcaatgtaactacacattactgatctaaacccatcggacttatcagtgggctctgacaggtacttgttggctgccttcccaggctgggaaggtatcccggagccagccaatgtgatgccctcccctcccttttgatgtttatgggagagaaggctcggctgtgctcaggagactgtcagcatgaggcccagatggataccagcctgtgggaaccagaagcctggcaggcttgggaagcagcagcttcctggattcctgcccccaccttcccatccagccactggaagtttcctaggcagcttctccagcctctgacaaccagtgcctctcacctttcctgaaataccatctccttttacagaatgatttgccagctgcacacatgtaaagagcttttcagagtgctttaaaatctttaatgagctaatcctctcctccctggggtggtttgtgagttggctgattttgttggggaagaaactgaaacccaaatgtcatggggtgacttgctctaggtcacaccaggtaaataccagattatgggcacagaacacattgtcccggccctggcattactctaatcgcggcctttgtcgtgaggcttctgtcattcattgattgctcattgtgacaccataagttcccatagggcagggactctgtgtttcctttgttcttcagaaggacttcagccagacctgccagacctgtctgtgcagctcatgccttgtcgaagaccaccacataatttaaccaaggagggccgccctaggtagattatagatttttttttttttttttttttttttttgagacagagtcctgctctgtctcccagactggaatgcagtcgtgcgatcacaggtcactgcagccttgaactcctgggcttaagcaatcctcccgtctcagcctccagagtagctggggctaaaggtgtgccccaccacgcctggctattttttttttttactttttgtagagacttgggtctcaccatgttgcccaggctggtctcaaattcctgccctcaagcgatcctcccaccatagcctcccaaatgtgtggagattacagtcgtgagccactgtgcccagccagtagcttttggcttttagatcatgagtgggcaaatcacagacagtgggctatatccagccttcctcctgttttagccacgggctaataatagttgtacatttttaaatggttgaaaaaaactcaaaagaagaatttttgacatgtgaaaattatacacattcaaaattatacaactcagattctagtgtctgtaaataaagattgtattggaacacagccatgcttattcgttgacatatgtcactggctgctttacactacgagaacaaagttgagtagttgtgacagactgcgtagtccccaaagcctaaaatgtttagttatgggttaaattgcagcctctcaccttaatttatatgtcgaagtactaacctctggtacctcag

SEQ ID NO: 55079 - DNA, 611 bp, Homo sapiens
tcaaaaaaaaaaaaaaaaaaaaaaaaaaaaagagtgcagtccatgcctggaagtagaggagaactggctattggagaacactcgtaatgcctgttccagtggaattcctgggctcctcgagcaagagcagagaactgtgccaggtgcagtgccgcgcctgtcccctgcactggaaccagccttctgtgattccggctgccacacgcaggagctcgtttccaggctgggaggagactggcaatggaaagattaaccgctccctgagttccacatggggatcagtactttcaatagtactttgtgagttcagcctcaaagtaaatggttaattcatcttgtatcaacagcactgtgattcataatgtaaacttggagaatccttgatgtttcgggcccacattccttttattttggctctgcattcttttaaagccacagtgtgctcacttaatagaatgcagcatgcaaatgcacaagtttttgcctggaggcaatttagcctggctgtttcaatggatgtcttctttcaagtgtatattctttcttaaattatttactgggtaaacacactttgcattttcaaaagggagattaagacggcttgctgcaga

SEQ ID NO: 55080 - DNA, 2040 bp, Homo sapiens
gccttagctttgcagtaagcatttctcggagggcagcgtgacaatcatgtggagcctttcgtttcctcgtggatcgtttgtagaaccagaaagctgcgtgatgtctctttcgcgcgcgcacacacacacacacacacacacacacacacacgctccccacccccacctgcaaagctgccgtttgattagccaacctggcctcggacggcgtttgtgggaaggccttccacttatctgtgtgtgttttttctcctttgctgtctcctagaatcatccagaaccgcatcctgctcgtcatcctagggatcatcgtggtcatcaccatcctgatggcgatcactttttctgtcagaagacactgatgtatctgctctcccttgataaacagcaacaacagcttgttctgagtaattaagacaaaatggtcacatgaatcattctgttgcgctgacaggccccaggtgaccctctctctccctcaccgccgttgggctgaagtgcaaagagtgtaaaaatattttctattcctgtttgcatgtgggttggtttccttttcgaggtttgtcttcacccagattcgttttttagaggggaaggtgaatgtttatttacctttttgctaatgtcatcaactagccaaaatagccccagtgacactcctagccctctggacgtgtcaagggccgtggtttgggagaggacatgatgagtcagtcacgagagcttctgtttgtcacccgcctcttgttgctgaaaagctcttctgtgatgtctgaggataaaaatgcagcaaaaagcaggggatggagtcagtgaccccgtccagcaagccagccctgttcctacacaggcctcatgaatatagtcatcaacctgcctgagtgctttcattgtaaaggtcggtatttaatgtcggttgtacaggaaattgacttagcactttccctgtttttctattgcataattttttttttaacccaaagatattttttttgctgagcctgcccagtattcactgttcacaactttgattactggctacaagaaatattttcttgccttccccaaatcccatactccccagaatctgctggcaaagtgagccctggtacaggatttaattgtgacctcgtcttccctgacctgtgtaagcatctctgtatcctttcggttttaatatctgcactgccaaaagcagtcctcatacttgcaaaaggtctgacaaggttctctccacatacattccagtatgtaaagagaccatgaatatttcagtaagagcaagaacatgactccatcagtgtgaaatttcaaatgtgattataaatatgggagagtcctataggagggtccaccagagataaacttcacggaaaacgttccctaacctcctttaaaagaatagaggatggcagattgttccaaaaggaatggcttgggtttttaactaacaaatgttagcaagcctttcttgaattcactatgtattcaaacttctaatatgctttgtgatttttttctttcatttctttctgtctgaggtaaccaggaattgcgttcaaaatgagctcatttgtgatcaggcttaaaagttgcccaagctgaggtcgtttccccccagtcacaaagcagaatgtttttctcaagacttcataggcacttactggtccgtactatctttggaatataattagaagctttgaatccttgaaaagcaaacctgttctcttcatcaaaaatgctaaccacctgtgcccgtggatcaatatcacctggatgtagtgcttgatatttttcccaactcagaagaaaaccattatggtttagagaggaaatgcagaatggcagaatccaccagagaaattgcacttatcgaaacaggccaaggcctgcatgtgttcggataaatcatttagtattgtgtaaataaagctgcagcctttacttcggagggatggtgtgggattttggccgagggaagcaggacagagaaggagcaggaagctatgctaattttcctgtcagcttaagggatccgtc

SEQ ID NO: 55081 - DNA, 2266 bp, Homo sapiens
ggtggcttcactttgcctgtgacccatcagactcagaccagtggcacctgccagaggctggccacataatgtcagcagtcaggtggctctcagcccagatgccagtctttgttaaacagggcaggtgactgcgtggacagctcagaaaagctcctgaagccacaaatattgcacccaagatggatgagagcagccaggcccaggcagcaagagtctgtcactggagccaggacttcctgaaatgagtgactgagccagggttagtgtcctgttgtggaggagggcagatgcggggagtgcagagtgagttcccatctctattgggattccagcgcagtaacaaggagccagcttaccagaggcgagcagggcaaaagcaagatggcaggatggggcacgatatgttgggggttgggtagcagagggtggacaggtgagggatggagggtttttctagcaccaggggatagcaagggcaagtaggcccccttgagctcatcactgcccttcttcaggaggagctaaagagggggaaagacagggtgcatctctccagggccccctgccccagtcaaacacccctgtggccatagctcctgggctcccagtgtgccatggggaaagcacttcctcatccggaatcgctcgttactcgtgctacatgaagaactcagacatcacagagggggcagtcgccaggaagcagagctctggactgtgattccatgaactcgcgcaccccctccttcccttcatccaaacaaggccctttggcgtgaataatagctcagcggctccgaagccgtattgatcggctgcaaacccggctccgccgagagctgccagggcttttcctgggggcaggaccagcaccgctcagcacagcctcctctccccctcccacttccccggcctcccccaggtgtgttcaggaggggacaatacctgggggagcccaggccctctccagctcagtgccacttcgttaccgcaactttgctgtttttcacttattttgccagggtaagcacctaagttagagagaaatgttttttcgtgacgaggccccacagagttgagaatgaacacatcctcccgctccagtttctccccagaatgttctgccaaggacccaggccatagaggcatcctgggctgacacctgtgggggccctattatacccccagcgctgacaagcacttcggcatcctgtaccacattttcgcgttactctcccctgtctcatcccatcagaaaagaggagccaagaacatggctaggactcaccacctccttgagggatggggactgttgcaaaattcaacagacgtgcatcagccgcaggctgggagaccagcagagaccaaagcctgccagccccactccctgagcctctgaccagactgtccctccccgtgtttgcacctcttctggacacaggaagtggtcaaggccttgaccctttgagggatgccaggcccctgcgcagtgacaccctcgcggtggtggatgcctgaaaccccacccctagagaggccgtcctgtggtttctgccctggaacactggaaaaatgcagattcatttttccctagacagcttcagtcctaccagccacagatccctctaagtgagttgtctgaccctttcctgggggcagattttgggtttgggggaagacagacccactacatgagggagcctgagtggtctttgggagaaaggttagaaggaaagaggggcttggttccctaggaccagctccctggaggttgccccgtatcagctgccttcagccttgccttaaaacccactccctggccaggaccccgttcttctaaggattgcgttctggcttagggctgcatgcaggcaaacatgggagcctgagaatgggctctgcaaaggagcagtaatgggttgagggtctcctgacaggtcccacagccatgccctggctgagaaggatcgagaaagagcagggaggctgggttggagtttggacagctaaccctgggggcaggaaaattgtgtccctcctctggccctcctgaggctgaaggaagtccaaatccgctgtggtgtacaatttggcatttggggaaggacccaaaagggattcttttctgccctgagcagaccttccccacactgccacatccaggggtcttggcacagaggggacactgtggccgtcagagactctccgctcaatttccatcttctctcattcatccacacccacccttccagagctctacactgca

SEQ ID NO: 55082 - DNA, 793 bp, Homo sapiens
gcaaagcagggccacttccctctcaggagggaggagcgcctaccatcctgctgtcaatgggaccatctccatggggcaggggtggcaggggatagaggatgagtggtgacaggcagcttggtgtagatcagaatggcccaactccacatacccagtacagctgaggggcttcaggcacattcctggacatctttgggcctcagtttcctcatctgtaagttggacagctgtgaggataaagagctgagagactggatacacaaatggaggagggccaggctgtatataaaaacaggactctgccccacagtctgcagcaacctggccaggaaaccaaccccttagctacacaaacagcccaggaagccagctggaatgacgggaagccaggctgctatctctggtgaaatccagaaactaaacaataacccctgccacaatctaccataaatggccaggacttgattaacagctgacagcttccctaatttttgtctccatttcctacttaggaccatccagagaaagccaaatatgcaccccaaccagttagataggatgcccccttctagttatcccacccacgagtcccccaacccaacagcctccactcagggcacaccgaaggcttcccactcctctgcctgtctctgagtctctgccaaaacacaagtgatggtggctaggctaactcctttgctacagcaaactcagaacaaatagccttcgcttgttctcattggctgctatcatttatttccacaatgccgaggcatgaaaagctcctactgct

SEQ ID NO: 55083 - DNA, 939 bp, Homo sapiens
atttcagcttggctgtgccttgcttacaagatcacatgaatctccttatttgagatcctgaggtccaaggatgagaactggtccaggtcagcaggcctggcttccagccccagctctgggactaactggcactactctcctctctgggcctcagtttttcccatcaataaaatgaaaagaaccaagctgtttctgtataaaggtccttcagctccaaattctatgatgctattattctgattatttggcagtctccctgtcattgcttccttttctgcactccgtgtaggtggatcacagacataacacagaaaacggggagcaaatgcagcaagcatccacctttcatgtttggcaacatggagaatatccatcttgcaaccaagttctgttccctgcccttaaggtgttaatggaactgtagctgtcaggggggttggtcatgaaaacagaagccactctgggtattccaagtaggaagggttccaatacagggaattggatacttacacaatcactggaaaggctggggaaacaaaggtcaggccagcagctgccagagactggtgatttacgggagctcacccagaagctgcaaagaacccagcagtctcagtggtggctgcagccaccaacctcaacagctggaagcaccagagcatgcgattctcaaggctttgggttttacccatgggtcaagctgcagctgcccccagagaatgacagtgattctccttcttcgcctcccaattctcccagcagtgcctctcattggctgactctaatgtgaagctgtacagggaaagggattctgggaaatgcagttccaggcttctcccctgagatgcagactgtagaagtgtgtgaccatgatgctaaggacaacattcagcaaagccacaaaccaggaagagcagagagattttatctgaagggcca

SEQ ID NO: 55084 - DNA, 456 bp, Homo sapiens
tcccccacaaaacttcctagtgatttgtcattttcccacgttgagaaagccacaggccctccccacttctccatggcactctcttgctcttaaattattgctgtatctctttcacttcccaattctctgccttctttggagatttcctctccagcagggcatgaaccctttctaagcagtgccagcatcatggggcccactaaagaggaagccgcaagtctggacagagaagtgaaggctcctgaggtgggggttggcacgtgggcattattggcagcccttctgggctttgggtcactgacctgtgccactcaccttttgtgaccaatggatgtctatggtgcatatctgcttcgcagtgcagtgtcccctcctttgctcttggtaacagcaccccagttttcctctggggattgctcctctcccattgcattcagtctggataggactgtcttt

SEQ ID NO: 55085 - DNA, 814 bp, Homo sapiens
ttccacatagcatttagccttagccatcatgtctcattagtctccttcagtctatgacagtttcacagtcgttccttgtctttcatgacctggagagcttttgaagagtagcactcaggtgttttgtagaatgttcctcaatttggggttgactcatgttttctcataactcaactgaggtcatgaggtttgggaagaggtgtcatgccattcacattgtatcatgtcaggggcacatgccaccaacctgcaatattactggtgatgttaacttttgacattaagcttaccaaaggtggtatttgtgagatttctccactgagaattcactgtattttcctttccattctctattcgttagaagcaagtcacaaagtccaactcacactcaaggggatgggaattgaacttctggagggaggaacctctgggcttttaaaaatacacagcacactaggcagggctgccaggagcagggagggtcccaggcctgcccactgacttgctgttgaccttgggtgagtcactgtgtttctcagagccgggatttccctccctcttatgaaatccatcatggtttcacggccccacagctgtctctaggagcctcagaaggatttagccagtaacactttgagctgctggaatatggatctgataggggacacagggtccttgttaatgacactggggtcctgttcctggtctgtaagcagtttccaatcctgatgctcatcatccccataacaggagtgccccctcaaagtggtggggccgtcactatttttacaaaatggtctcatgttataaacat

SEQ ID NO: 55086 - DNA, 980 bp, Homo sapiens
ggagcagttcttgaccctgagaacttggagtttgtgctgtcagtatcatcaccaccatcattattatcaggaacacactgcaatggataccttgatatccataacaatcccttgcatttctgaagtgttattggtcagggttctccagagaaatagaaccagtaggagatacagacatgaatggatggctagagagatgatagataggtagagagatagatgatagatagatagatagatagatagatagatagatagatagatagatagaggaagcgatttattgtgggacttggcacatataattatggaagtcaagaagtcccacaatctgctgtctgcaagctagagaatcaggaaagctggtgatgtcacttggtctgagtccaaaggtctgagagtcagacagctaatgtgtaagtcctggtctgagtccgaaagtccgaaaacaaagagctccaatgtccaagggcaggagaagtttgatggcccagctcaagaagagagtgatatcccttcttctgcctttttgttctattcaggccatgtattacatgatgccatcttctttactcagtctactgattcaaatagtcaagctttttggaaacactttcacagacactcctagaaataatgttttacaagctatctgggtatcccttagcccagtcacgttgacacataaaattaaccatctcgtgaagggattgtgggttccaaagctcattcacactccttagctcacatgaagctcatctccaacctccagggcaggagggtaagcatcccccacactcccattttacagatgcagaaactgagctcagagagtttaaaccaagggcatcccccagatgggagagctaagcatggcctccagactctgcactggcccgtgcctggagggtttttttttaattctccagttttaacatcaccaatcatcagaaaaatgcaaattaaaaccacaatgagat

SEQ ID NO: 55087 - DNA, 2167 bp, Homo sapiens
gaggtcaggagttcgagaccagactagccaacatggtgaaaccccatctctattaaaaatacaaaaattagttaggcgtggtggcacatgcccgtgatcccagctacttgggaggcggaggcaagagaatcgcttgaacccgggaggcggagattgcccttcagcgtaggtgacaagagcgaaactccatctcagaagaaaaaaagaaaaagaaagcaatggataaagtcactgagcacccctgtgccaggtaccatgcaaagcactcacacgtgctagctcaggtcatcttcccaacactctacaagtgaggtagaattattatcgtcttcaccttacagatagggataaacagcttaggaagtgacagtgactttctcaaggtcacagagcaagtaagtaagctgtggagaagaaactgaccccccatcagtctgacttgaaaccaacttgggtactgctgcccatggatgccccttctccaccccagctcttgccgtgggagcctttgtccccaaaatgctggactgagatggacgctcagtgacccggattagggtgctctgcccttgcctaggatgaggtgaatattcactatcatgaccagcttggggaaatcgggcctcgctgacgtcatcaattatgcatggtcctgggctaagcccttgcgctgtgggacttggggaaaggtgcttccagggagagggcagcagcgcgttgagtcacttgcctcttgtttaactctttccctgctgcctcgactctggaggcggggtttgggcctggggttccgttttgggcgtctctgacagggcttgtgtagagtaagccgggtttccaccccagtccgctccctccacttcaggcctcattagtgcccgcagctcggatttacacagatgtaaatctggccattagcacctcacgctctggcaaggaggtgtggccaaagggaatttaagggcagcagggggtgggggtggggagcaaactttgagcccaacttaatgtttaacttctcggacaatgggattgtcaggcttccccatctctattccaggcagtttcttggggaaagggtcgataaatacccacagataacagacgacgctgggtgggtggcaggaaatggatcgctaaattatacatcagatgcaaggtagctaggtcgggccaatgggaagcaacttctccagggaaaagcttccagagcccccagttctctccctaaccacactttagctttcctttgtctggaaagagaagccactaaatgcctcttaccccagtgttaactctttgttaggagggaatctgaagggaagataattccaggagcggggaagaatgagaaagagagaaagagaaacagacccatttctggtaaataattaacaccaaaaaatgtttccctaaaaaaaaaatgcccagcagaactttcaacttctccaatttgggaagtcaaaagtttaactgggcgccaggcggctgatgccaagacaggcctccagctatgtaacactggccatgcctgagcttggctctggacctctccttcctgaggagatgtggcatctgggtgacagcagtagagggcctctagctttcttccggagccgcaggcagggaggcagaagcctggggtctgtcatcctgggtgtttggaatccccccacagggcttcacagaagcacaagtatgtcatcaggctgatctcaagtcgagacataagtagcatcagtttgggaatcacacctgggtctccattccggcttggtagttacctgctgtgtgacttcacacagttacttaacctctctgaaccagtttacttagctataaaatggagtcaacaaaactgctttgggagagttgttgccaggattagacacagtacatgtcaggggtcagcaaactatggcgtgtgggccaaatctagcaggtgcctgtttttgtctctttatataaagtttttaaaacagccaccccctttgaatgactgattgtccatggctgtttgcatgctacaacagtggagctgagtagcagaggccctgcagctctcaaagcctaaggtatttacctgttagacctttgcagaaaatgtggctgaccctgggatatgtaaagatgtagcttggtgcttcagaaaagttcaaaatgtgga

SEQ ID NO: 55088 - DNA, 3001 bp, Homo sapiens
ctgggtctataggcgcacaccaccacacctggctaattttttctatttttggtaaagatggggtttcatcatgttgcccaggctggtcttgaactcctgggctaaagtgatccacccgcctcacactcccaaagtgttaggattacaggcgtgagccattgcgctgggctggaactttcttaatctgccttttattgctcttgaacacctgcccataatatgaggctctcccttttacaaggactacccaagtcctagggcagtaactccaaggagcttccttctctaatatccagacctctttatgttcccttcctctgtatttatgccactgtctttgccgcattgcactattattgttttcacgttatttcctaaggtgccctttgttactcttgaagacctgccattatttcaaaaccttttctctttatatgaaccactgtggagcaatagggtgagggagcttccgacttcgccatacagatggtctttattctcccttccttcctccttctttcttttcagacagttggaataaccagatagttgagaacgttctttgaaatgggaagtcacaaactctgtcctttgctgagtgacttaacccctttgggggaaaaagatttgtataaaaccaaggtggcattgttatgactattgaataacaatagatgagttaaatcattcattcgtttgtaacctaaatattcccctggggttatgacaggtttcctgtatatttatgcgcaaaattacatttgccctgaatcttcacccctttgactaagaggagtctaaagtctgtttgtgtgtgattctcctattccaagaattacaaaatgttcttagtcatgtcctcgtttttctcccttgccagttaattcagcccacaatcaattatccgtccatcctttcacctatctgttcatctgtccatccgtctactcatccattcattcaacacatatttattgagcatttaaatgaggcaggtactcaactagatgactagtgagggctttggtggtgagtctgaatatctgccctctgggagaatagacaaagaagtagacaaacattacaatatgtgttaagtccagtacagagtggactgggcacacagagaagggacagctggccagagttagggactcagaaaaagtacccctaaagaaatgctatctaagacccaagggataagaaaaagcagggaggaggcagggcgcagtggctcacgcctgtaattccagcactttgggaggctgaggtggtggatcacttgaggtcaggagtttgagaccaccctgcccagtatggtgaaaccccgtctctactaaaaatacaaaaaatagcgaggcatagtggtgcatgcctataatcccagctacttgggaggctgaggcacgagaatcgcttgaaccagacaggtggaggttgcagtgggccaagatcgtaccactgcactccagcctgggctatagggcaagactccgtctctcaaagaaagaaaaaagaaaagaaaagaaaagaaaagaaaaagcagagggcaggagagaaggactttttttctgaaaaatatccaatgatgtatctactactttcctaagcaaactaattcatcttgctgattccctgagcctctcacataatgatggattttcatgtagaaagagcagagatttggatttagtagctcaggacaattttgcttaaatttttctgggtggaggttgcctcatttgtaatatgtgcaaggtaataattcctaacctacagagttgttagaagaattaggtgtgttacaggcaaagcccccagcacatgagagaccttcacatatggtagatcttattaccatgaaaagcaaaaaaatatatcagtggttcctaagggtgagggtgggggagggctagtggggtggggactcccaggaagctctttaaaaaaaaaaaaaagtaaggacaaataaacaaacacacccatgctccgtcgcgggaggttctgagtcactaggtctggggtgggtctctaacatgtgagctccgtaggtgattctgatcttagccccgtaggtgattctggtcttagccacggttgggaagtgccgctgtaccctgcaaaggcaaggatctattttcattcatagagctgccattttaagtacattaaaaccacaactaaaagcacagtaaccatgatttaaagtaactattaaacagagttggaagggcatgctgatggtcagtaaccaccctccctgggtaattgagaagggacttatgaatcagtgaaagtggaactgcagaatttctcaggctcttagaaatgaggcctgtaaaaatgtctggctggagtcagagtggaatttagctgtcatatttctcttgactgaccactgtaaccctttggtaattgatctagtaaattagtaactcatatcacacacagcttaagctttctagagttcatgattgcttgctgaaaatagacatctggccatagaatttccagcataactagtaaagaaaaattcagacagacatttgctcgtgaaaagtctcaatatttcaacccacagtctgaaatttcagttgttcagggtggaattcttgagtatgtttgtaaatgttccccgaatggagagtgttcaagctgtttgtctcttagtcactcgctcactgtaagacaacacaacagagttgacgtttgaatttgcctagagcttcaagacagtcactatctatgaattgctggaaaaaaaaatctcaggaataagcaagatttggtcttcagaggtggttgttttagagataggataagaggagactaaatattcttggtttgtcctgaatcatgtcagcaaagaaaaagcctggtatataactctttccgaatattacccaaggaacttcccagagaatcaccagccagagcttattaaaccaacctgcaggttcctgggcactcttccaacctttctgtgtttctgggggtgagg

SEQ ID NO: 55089 - DNA, 5544 bp, Homo sapiens
tcaatctcggtatcattatttttagtagtctttctgagactttagcctataaaacagttttgctgaaaccccaaactctctaaatattacatggcaaatttgctttcttttggaaacctcggtgctgatgggccagctgaagtgcaggtgagctttttcagggaagggtgggacaacagtacatcctggactctagactaatactactcctaagaggcaatttgctaaatcctactgatttatttttttcttttttctctttttcatgttgtagtgtccagtctacttcttactgggtatttgcaaaaatgaattttcttgctctatcacccaggaacattgtgttttgggagctgggtctttcctctttaacataattccattccccattttgtagcaaatcagtctgctcctcctctaatacctaaaagtcaacaaatacctgcctcaagccccaggtttcccatcttctcccgaaggtcttctagcatcggtttggttagcaatttcctgccagagccacctacatcttgattattttggtcagtctttcggggatttcatttcagacccccttcgagaaacactgtagcccaactgatcccaggggttggtgaactttcagttttattttccctgacggtgttaacgcccaaacttttcacctcctaagtcaaaaaggactttgactctagctcatttcctactacctccaacgtcagttaaaaaaaaaaaaaaaaaagcaaaacaccactctacatttaaaagaatcatatatttttccttaaggatacttttaatgtttctgacatttagcatttgttttttgcataaaaagtcgttttggcatatccatcctagtgggacttaacatttcatgaaatgattcactactaataaacaaaaaagggaggagggaggcctcatgggttaatagtttctttcattgtagatgaccaggaactttgaccagccccttcacttccccaagctctctgaaagtggagggttgatctttccttttgaccacttttgtcgcatcccgtctaagggtggctgatttcactgctgaattaaccaccaagcacccccccaccccctcccccagccaccactttctcaaatactacccttccttttccccctcccttaagacttatttctaatatttctaaagtgcactgttttgggcctctccccatccccgccccccaagtgggctttccttccgccttcctcggctcggattcctgacttggtcgccacccccttctcctcctctcccaccccgcattgtctttctgaaaccgccccctcccggagcaagtccctgcaccctcgcccagaatcccgggctcgcacacactccgcgcaggccgctccccctgcacactcctccctccgtctccccccggcttccccgcccctctcttcctccttctttccctcctccctctcccggcgcccgaaaggatcattgttagccgcccccgccccgcccaccccggctgtttatttatgcacacgtcactgggccggccccgccctccggcatctcattaaggcagtgtgttcctctcgccctgtcaataatctccgctcccagactactccgttcctccggatttcgatccccctttttctatctgtcaatcagcgccgcctttgaactgaaaagctctcagtctaacttcaactcactcaaatccgagcggcacgagcacctcctgtatcttcggcttccccccccctttgctctttatatctgacttcttgttgttgttggtgttttttttttttttaccccccttttttatttattatttttttgcacattgatcggatccttgggaacgagagaaaaaagaaacccaaactcacgcgtgcagaagatctccccccccttcccctcccctcctccctcttttcccctccccaggagaaaaagacccccaagcagaaaaaagttcaccttggactcgtctttttcttgcaatattttttgggggggcaaaactttttgggggtgattttttttggcttttcttcctccttcatttttcttccaaaattgctgctggtgggtgaaaaaaaaatgccgcagctgaacggcggtggaggggatgacctaggcgccaacgacgaactgatttccttcaaagacgagggcgaacaggaggagaagagctccgaaaactcctcggcagagagggatttagctgatgtcaaatcgtctctagtcaatgaatcagaaacgaatcaaaacagctcctccgattccgaggtaggaaaagcccctcgggctggtggggttttttatctgtttcctgggcttggcaaatgttgctgaaaggggagaaatcggggctgggggcggcggcggggcccggcgggcggcgtgtgcgtacggtgccaccattgcaaaaacttgtaaccctgtttttttctacccccccctcgacctcgccgattctttttctcccccttctcccccttctgcgtggcgtttgcccctcgccctccccacctccacccctctgggaaggcggaaagacggcctccgcctcgctccgaaagtttccgagacaaatcccgggaaagtttggaagaaggtgagtacgccccgcgcgccccgcagccgcccggagccgccccccgggccggccgccccgcgcgccccggccccgcgcccggctcggcctggccctgcgccggcccggtcggggcgcccggcccctcggggcactttctaaaaagtttctcctcactctctcccgctccgcgcggccgccgctgtcccctcgccgccccgccatgttagcggccaagaggcaagatggagggctctttaaggggccaccgtatcccggctaccccttcatcatgatccccgacctgacgagcccctacctccccaacggatcgctctcgcccaccgcccgaaccgtaagtgcctccgcgcccggcccccgcccgctgcccgcccgcccgcgccgcccgccgggccccgcatgcggcccctgccctgccccctccccgcctccccctccccgcctcctcccctccctccctcccctcccccgctcgtggcccaggaggcccgaaactctccaaacttttctgccttttgtggactggatttgtttgcacttcgccacgttcttgctttcagtttgctgcctcgtgatgttggggagacctctctgtccaagcagggctttgttggtggggaggggggggaatccgaagaactttcctttgcgttctggttccccctccccctttggtggtggtgtttgtttcttcaccctgggaagatgactctgtggctcttcctttgctctctctccctctctctccttctcttccttccctcttctgtggcgtcttgggctttccccggttaaccccttggctgccgctgcgggccacgagtgactgactgtgctgcgcccgatgcgcggggtagagagtgggtttcctccaggcattggacttgagaactggctagcgcgcagagcccggggccctggagaggctccttggctttctcttttgggcgactatgtatttagctttctagtggagattgctggctctcggccctccttcccccttcccctggaaggtcacacttcccagattggtcccaccgcaaacttgggggctctgaggcgtccttttctttggcaacccgcagggccgcgagcgccctgggcgccgtggcgggctccgctgcccggcgcactggctgcgggctctcccgggccgcgcagggcagcagggctgagtggggcggggaggcccctgcggcccggattcttggtttgtgtgcagccggaatggactcctccaagcggacttgtgtatttctagggaattttggcgccttgggatgtatggcggggtcggcgctcgccagcttccgtgtaggcccgtcgtgggccccaggggggccagagaccagggtgtgcgggctcaaggaggtgcgggggccgagggaggctggggcgcctctccttcaagggagtgggccgccgatcgccggccacccaactttgggggccccagggcagcgcggggtgccgggctcggggggcgcttcctgcagggtcggtcccgcgcccaaccctgacatttgttaatacggctcatcccctcccccaccggcctgtgccccctgccctcaccctgaaccccctcctcctcatccctccctccctcttctaagaagcctggattacgaatccctggacgcaagacgcatttgtgcccggcttcccggtattgtcattttacaccttctccagtttggtcccctaccccttatttacacacacgacttttgttttttctttttcggtaactctagatagcaatttgaaataatgcacccactgttcagcagccatggattcggtgctaatggccgagggcttgccggacgggagtcgatcagatctacaagtgtttttaagcattaaaatattaactatcaggtttgacttgcttttttgggccctggcaaaatggcaagggcatgctagaccggtcattttttttatggctagggaagagaaataattattccccccctgcccggcgcccagacatgcttgggaagctgggagagcggttcggctcaacccccttctccagggccagttccaccaggctgcaggggccgcgctctgggcttgcagctgtaggggaagcacagttcgcttactttgtatttttcttgggagcttgtggggcatcttaaacgggaccgttcggctcagaatcgcagtgttcgcctaccaataaaccggaccaagcaacattccaaagaatccctgagaatttctgcctctcctcccctcccccttccgatggaaacctccctggtattattttaaaatccacttaaccatctgaatattgagctttgatggcgggcttgctagctttcttgactctttttaaactcgctgtctgatactggcaatcttgccatcccttctcaaacttgagcagttgtgttgtcttgtaattagcaaacagggaaattgctaaaggcaaataaatgatttcccggtgagaaaaggaaggctcccaatgatcggtcccttttgtgggcattataggaatagacggcgtctagttattttaattgtggacatagcgggtggcctggtgctgtgacatcagattgagtctcagaacacatttctgaactcagtaggcagttttagtacttacatgtcaaacaccagcagacatctttgtgtacactgccccttcgtccttcctccctgttacctgggttagattatgtgctccaaaattaaagttatttatttaggctggtcagcagagcagtggaaatgaggatggtaggctgttgtgtgtcattcctgacgtcttcaatcagaaggccagcttgcaatccagatttgatacagctgcgggaggaatggaggaatgcataggcaagatagcgggcttcccatactcttctgaaatccttagtgttttatagggtgtgtttttaatggcaag

SEQ ID NO: 55090 - DNA, 1298 bp, Homo sapiens
atttatggcgaacatgtttagatttcaatctcaatgcaaccgtattaattccatgctaatctttataggttggggtttaatgtctgcagtatggattataggctcaacattcacccaataagtcatattttaatgattataaattaaatatgccagcgctttccactttgttgatattgaaactttctgaaatcccagaaacaaactcaggcatttgggagcctaacgagcttatctggaagacgtgtttttggaaacttttgactgtttaagggaaggagctttgactgatgccctctgtgtctgattgagaaagagttttttgaggaaaacaatcctcgttcttgctaggagttcttcaccttgattttaattttactgatagggatttcatttagagtcattgctggaagttggtcagctttctgtttcttagcaagctgtgaaaaagttaccggaaggtttccaggggcttgcagatcaagaatgctgttctgtttgccgtgctggatcgctgcagttctgcacgccattgaaaaaaatatttgctttagaaaactagcattttaatagttgcaccagaggctgtgcttttaaagattacagtagaagtctttccaggtttcgaatgcctccttacatcccacgaggtgcccctggctgtgtgcaaaaagtgcctagatttctcggtggagaaatcctggtgcaacttctcttacacacgtgcagtgggtaaactagaaggtatctaagaggattttacattttgtcagatgtttcacaacaggcccccctgaatcacattaaaaatgcactgtagagaaaggacagctgcaaatttttgtgtggacgcgtgtttctggaccatgactaaaactccgaggacctttcccccagctgtctggaagttatgtggaagttggtttattggcagttaagtatgagacaacctggatttagcaaatgctctctcctgcacaggaagtagatgacattatattgggggaagggaggagatttcaggcaaggagtgatttacctttttttttttttttttttttttaaatgctggagttgccaaataaataagcactttccagggaagtaagtgtaagctttttagtcttggtgagtggcattagataatatctttgactgcatttataattcttttgaggtgacacattttaaagtttggaaaaggaggctgaaccaaattcttgagggtcttattttcaaaggggtgtgtgatgtgggcatctgagtttcttctgggagtgaatattggcaactatgta

SEQ ID NO: 55091 - DNA, 502 bp, Homo sapiens
gcgctttcgttctggggggttctgtgtgtttgaagcacttgggttgtgtgtccctgaggcctccgtcacgggcaacctcattccttctctagcctccatcccctgccccctgcccaccccaggcctctggagctggctccctttcctgctcactctcttttggccaggattttaacatatatcacaggctggtaggctaagagcttgggacttcccctcaccacactcaaagcctttgatcttttgctttggaggtaacatcaaaaggaaggctgaggaagacagccaggctgtgaagttcaacgttcaagttaatagcttgactgaaggttgtgctgcgttgtggcagcatcaccgaggctggagtaaacagagtgattctgccacattttcctggaaatgcaccccaatattggaagagggcttcttttacattcggaatgaattcaggctgtagtcagagctgcttttccctttccccattttccttggaagtgtgaaa

SEQ ID NO: 55092 - DNA, 484 bp, Homo sapiens
tctataaaatgatgcatcagcctcctgagtatttgggatcacaggtgcccactaccatgcctgggtatttttttgtatttttagtagagacagggtttcaccctgttgaccagtttggtctcaaactcctgacctcgagtgatccgcctgtcttgacctcccaaagtgctgggattacaggcgtgagccactgcacctggcctctctcctgagtccttttgtttgtgcctgctttggggattccctctggctggggtggactgccgggatctgtttgtccagtgtacatttcctggtcacctagcaccggccagctgcggtgctgggaggaacagggcctggctctgggaggcagctgggagagtcaggaagtgaagaaagttcttgtgggtgtgatggtggaaacccaagcagcgtccagagggagcacaagagggagggacaaatcttgggagggtcccgggccaatgggacccagtgtaag

SEQ ID NO: 55093 - DNA, 1672 bp, Homo sapiens
ttttatagatgcgttaaccagggcttgttttgggaggtagagggggtgtgagggggacagaggggagggaaccagtgttgaatgaattctgaggccctgccaaagcagccagctagctaggtgttgtttaatggactctttgcatctacagaatgagggaggtgggatgaggggaaattatttcacaataactgaaggtcggagagactaactctctgctcattgtcacacagcagttgagtgccagctgggatttgtcacccaggtcacctgactcctaagccctgtgatcgttctcttctgtctctagtatacccagcataatgcccggcaaagtgctggcatcaataaatatttgtcgaatgttaaatgaggcttaaagagaaccattcatgcttggcacaggggcacagtgagacaaacatgtttcctgccctcgtaaccttcgcttccaaattctgtgaccttgggcgggttgcctgagctcttttccagctcagtttcctgaaaactcatccggaaaatgggtaaaatatcagagtgcattctgtatggtaagactgcaaatgttagatgattctgctacttattattgttttctttttctcaccacacaccttccctttttatgtacacctcctaggaagtaagtttctgataacatactgcattgttggataacagcaacaaaaagcacttcctgacattattgcccaaatcaccaaatgaggcaattaccaactttggaataagaatagcaacggtggtaagagctgacatttcttgagcgcttgccatatgctgggtgtactactataagctgctgcctgcaattatgatttgggaacaactctgaaagtagttacctcccattttatagaagagtaaactgaggttcagagaggttaagtaacccccccagggtctctcaggaagtagttggtggcctgggattcaaacaccagaattggtctgacttcccactctttaaaccacactcaaaactgaactctccacgtgtgtgtgttctgggcattttcgcatctcccttggcttgttgacagcgtggacttttgctttcccattctcatagaacatggccagtgcaggaggaggaaatccacactggtctttggactgaaccagaggctggcgatggtcccgaaacagggtgccaagtggctgacccttgtttttatgccttgcgctggtaagcttggggcaccaggagttctttgaatttctctttcttgactgtccacgccttctttaggcaatcttttaacaggctatgttttaaatcttattgacatctctgaagaaagaggaggaaaaaaaaatcaagacatggccttagagaagtgacaggttttctttgagattttgttttctgttttcctttttattttgtgcacattgcaaaacctctttgggatgatgatttcgtgtggtttcttggtagcccttgggcagctgctgccaggtttcacccaaatgcattgtgaccccctgtttcgtgggacggctttgcctccacatggctgattgtgctctgtgtgtccgctgtgggcagagtgtgattgtaagaatcagaattctgctgggcttgcaagcatttaaaaaatctctataagtttgagaactggttggaagggagagatgcagcgactta

SEQ ID NO: 55094 - DNA, 474 bp, Homo sapiens
aagtcacttagttttctgtgcctcactttcttctgttttaagatggatttggagattattggctttgaccacctaaaaaggatgtagtgacaatcaatttagaggtctaaaagagcctttgaggaagtaaaatggaatcttcaaatggactacatgctgattattgacactgccctagcactgatagttgatgttgactgatggtcagaattgcttggcaagttggaaaaaagtacgtacagatcctgggccactaccaagtttcatttaacagatctggagtgcatcaggaaaaaagtccctctaaacaagccagcaaggtttggatactgtgcaacctttttttttttttttttttccttttgagatggagtctggctctgttgcccaagctggagtgcagttgcacaatcttggctcactataacctctgcctcccaggttcaagcaattctcctgctttagcctcccgag

SEQ ID NO: 55095 - DNA, 1093 bp, Homo sapiens
agaatgactttttattatcattattattaatattttttgagccaggttctcattttgtcacccaggctggagtgcagtggtgcaatcacggctcctgcagcgtgaaactcctgggctctagcaatcctcctgctaactttttttatttttgtacagtcttgctgttgttgcccaggctggtctggaactcctggccttaagcaatcttccggccttggccttccaaaatgttgggactacaggcctgagccgctgcatccagcacttttattatttttaaatggttgaaacacatcaagagaggaataatattttctgacacaggaaaatgatatgaaattcacatttcagtatctgtaaataagcttttattggagcacagccatgatacaagacatatactgactgcctgtggctgctttcgagttacaatggctgagtcgagtagttatgacagagattgtgtgggccgcaaagcctaagatatttgctgtctggcactttgcagaaaaagtttgccaaccctgccctgaacaaataaagggacaaattccacttgccccgtccatctgtggagcagagtcactgaaaggaaatactggaaatactggaagccacttggtgttttatcaaggatgtgaggtttcctggcaactttgtcgccatatcatcatcatcatcaccatcatcatcatcatcatcatcatcatcatcatcatcatcatcatcatctgccctttaagttttctgcttgtttagaaaagaaatttatacagagcccccagtagcagctgtaagggggcaggttcttggagcagcccatcctcaacattcttgctgctgatggaagattctcaaggatgaaggcccctctatgggagcaggatcagtctggctttagtagatgccaatttctgctaagactatttcctaaaggagcctctcctcatttgccttttctccctgttttcattgggggaggtggaagaggagaaaaataattagagatgctcacctttttctttttgctggcaatttaacagtcttttcagctgctttgattcctttcaggccattggtgttgtatatattt

SEQ ID NO: 55096 - DNA, 1104 bp, Homo sapiens
aaaatctcttcgttgttctctctctttgagtgaggagagaagatgtgaatcctggcagtggttcagagtggacacagcccctgtgtttgtggcataggctctgtgggccccatgccagggagcagtacccccgtgtaaaggagtgggggtttgtccatttggatagagcaaagatcctccacctcaaatcccacaagaacagttgccacaacctgggccctaagcatctcattttcctatgtagaaattaatgatctggaggagatggcaaaacattccttccagagcctgtgtggattttggccaggggtgcagcaagggggcttaggcacctttttcctctgctgtgtcttagcaggcgtgttgaccatagcaactcccctggggcatacacaccctcttgtagatggagacctttgtccaaagcagccacagctggcaactgtctacaatcttttgggctttctgctgtgctcaaggggatctgggaatggccattgcctagaggggatgggctggtggaggaaggtgggctctgggagccggggagaagggaaaagccatgaatttggacaaaaggacaaatgtggtttacatttgtgaaatacttgaatgcttgtcatgaatggtgactttggttctatgagtcagccctgtgatggggtatttctgcagtcttcacctgacaccaggggtgagaaggaggatttctggggaggaggaaagagttgagggagataggaaagtagagtggaagaaaggccttgcgttgttgacctctatccacctggtcacctatagtttttgggattgaggatgcatacaccttgagactacaaatttatgattatatttttgctgaacataaggcaatgtgccaaccaaaaccagctgttctttggctggtacagtgtgtctttgtttgtaaagggtgcattctgaatggtggctgatacatcatttgggtctttgtacagttaaacattggccagagggtctggttcgtgtttagagtcgccgatgaagggctaacttttctccagacacttggggctcttgttcacactttgcttttcactcttttaagtaagacatagtcacatc

SEQ ID NO: 55097 - DNA, 2893 bp, Homo sapiens
cgcctccagctaatttttgtatttttagtagagaccgggcttcaccatgttggccaggctggtctcgaactcctgacctcaggtgagcgtcctgccttggcctcccaaagtgctgggattacaggcgtgagccactacacccagccaatcagttgcttttaaactacttaaataaaaagagccaacccaaaatcttgtgcatgcttgggaaactggcagtggaatatgagaagtttttatttgtggtgcacacaggtgactcgggctgttgtgtattggttcttgcctcgatctgtagcaagcaatctgttgtttcttgcctgccttttgggaagaaatgaaaaaagaagcagcacgagtctccatacatcatgattgtgatggcactgggcctgagaccttttctgctgtccaggtaaaaatgtgaagaccatggttttgaggtttcttaataaattcaggtgttaagtgccaagtgatgctcccagcccctgagctagagcaactatgctgttcatgtccccaggaatggaagtggaccctagttaggtgctggtggccagccatgtgtacctagggcagggccaggtcgtgtgtgtgtgtgtgtgtgtgtgtgtgtgtgagagagagagagagagagagacagagagagagatagagagaaacataaaggtgatcggcactcagacatcctgtgtggtccacctcacttctcaagcaggtgtctttccagtctacaactcgttgaccacaggtggaattcataagctctgttccctgtcctgcttgggtcctccagagaaagaaatgttgaattatcatcttggtgatggtcaactctgaaagcctaaattttcatgatcaccaaagtgtttggatttaaaagggtggctcactccgtaattccggcactttgggaggctgaggcagaaggatcacttgagcccagaagtttcagactaggctgggcaacaaagcaagacccggtctctaccaaaaaaaaaaaaaaaaaaaaaaaaaaaaaatcaaaaaaattagctgggggtggtggtgtgctcctatagctccagctactcaggaggctgaggcgggaggatcgcttgagcccaggggtttgcggctgcagtgagctgtgattgcaccactgcactccagcctgggcgactgtgagaccccgtctttaagaaaaaaaaaaaaacaaaggtcacaagacattcttggctccgccctgcagagctgcttcccgatctccttttttatttgcttcccaacctgcgggcctcagtgtgactcaccacaccggactgcctggccctgctgcctgccgcccatccttgcggcctggacgactccatgtgcgagttgctggcgcagcgtccagaaaacagaccacaccccaggaatgatgatacgttatagcatttctctgctctgtaagagaggcaccagggtcgtgtgctgggtctggggtttgtccattccacatccggtgctgctgttgactctggtgtcggccgctggtgagctggctgtagctggtcacctctgggtggtttctggggcggtcgcaggctgactaacacaccaaaggtcagccagggtgttgaagctggcacctttcttcctggagcacagacgtcatcttggatcttttagatacttggacttactttatgcagaacattctggatttgtgaattagatggactctttattattttgtatttggattatttctttaaagagatcagagataaaaatatcattgttttgccagtttgctaccaccagcccacacccctcttcccgttgtccaaaaagggggtggttagagttttcttgagtgactgggctattatgattagcagattactaaagctgtgtgattttaacaagacgtaaacacatatgggaacccctccttccatatcttgctaatgtcaattagcaacatattaatcttgctaatgtcaatcctgtcacttcatacatttataaatattagggacatttaaaagagttgtcggactgtgcgggaccttggcacactgctgacggctgcacactcatcactgcggggctcatcacacattgacaccagcaccatattttgctgggtttcctgatctcggttgagtatttggatttgaatgggatggttttaatgttgctactgactactacagtgatccaaataaactttaaagctggggcctccacgccataggcagattttcataccagttgcctttacctcagtagttttcagctggggcaattttgttccccaggagacatctggatacagtgttggttgtaacagctgggcagggggtacttctgtcatcatctcatgggcacagggcagggatgctgctagggcaacccctcaccctcccaaagaattatcaaaaacatcaacagtgccaaagctgagaagctcagctttaatgtgttcattgagcaactaaagaatagactcagatataggaaagtatttatttatttatttatttagagacagggtctggctctgttgtccagatcataactcactgtaaccttgatctcctgggctgaagcaatcttctcaccttagtctcccaaagcatgctgggattacaggtataagccacagtgcccagcctgaaaagaatactttaaatgggcggggtaatggtggcttatgcctgtaatcccagcactttgggaggcagaggcgggcagatcacctgaggtcaggagttcgagaccagcctggccaacatggtgaaaccctatctctactaaaaatacaaaaattagccgggagtggtgatgggcacctgtaatccgagctctcctggaggctgaggcaggagaatcgcttgaacctgggaggtggagtttacag

SEQ ID NO: 55098 - DNA, 2676 bp, Homo sapiens
accttcaatttttcccacatcctcccttgattcgtggatggacaactatggaggccaatctggctgaggtgaggactgcttgagtctaaattcctctctcctcaaacccaattcaaactggcctgagcaaaatgaatgtattgatccataactgaaaagtccagaatgatcaggcatcaggcatggttgcatccaggggcccatgtattagaaccatctccttccagttctgggctctgcttgcctcccagttggttttactgcacagaggcttattcaagtccagagagatcttatctttccctacaagtctgtgaccttgattctgaacctgcatctatgggaagggcttgcagtgtctgagtgagcttggactgtgtaaactttcccacttctgaagctgggggtggggttcactccactaagctacatggctctagagtcagggggttgccccctaagtaactggcagtattgttaccagaaaaatcatgaatggacactgagcagaaaactcagcagatgtttatttcctggtctttaggatttgttgaagagttttttatttgtttgttttttaagaaagactcaaaaggaaaaaaaaaaaaaaactatagttattttctcatgatataaaaagattctgtagttgtatatacatttgaactttttgtaagacatctcctacccccctaaaattggaagtcatttattaagactttgtattctgtaagaggattggaaatgaataattaagaacattaaagaggaaagcagggggtggtgggaaagtgtggtcttgagggggtaataaacctcctacaggccacacacacacaagaaaaaaaaaagggcaataagtgtagcccagtaacataaggtggggaataaggttaggggtaaggttaattctacaagttcaaagccagtagcccctgatgcgctgttggacgtgaactataaatttggctctgaggttcccaggcatggaagaatatctagatctgtacagagaggttgtgtgtgtgtttaacatttccataatgtacaatttcctctaagagtaaaggccatgaggaaatgcccgtggaagataaaggagaccatgtggtctgtggcaaccatggatacatttctttcccaacgcattctctgaggcactttggtaactctgcctctttgctctcagcattgtgttagaaaataaagccagcagacaaggattaaaccctcatgttgctgggttccttctagaaacaattggagggctaaccaagtcacctttggtggaaggcagtaaggtgagtcattgctgtggctggactgaataggatagccttagctgtaaaattgggctgatctttcaaatggactcatgcttgccgaatgactcacgctcctgtttacaaatcagctctgtgaagaaatgcagagtgggaggctctgcttgccagacggagaccttagacctccaggggtggagaacggagtacttcctctggtgctcggcttcccttcctgggggcagatctctcagcttctggttggtggctctcaaaatccagacacaaggtcagctgcagccagcgtgggccctggagtagctccagttatggggcagcaatggccccctctcattttgagagctcactttgcctgtggatggttttaatccatctggataaacttgaggcccatgggaataccatatactatggtaaccatgtacactgctctaaagatgtggctgctgttgtataactttttcctttatttttgtcaatttcctattttccagagtcttgcatacccactatgtctactgtgatagtgaacgtaaaaacatacaagatgttggtgttatcctcaatctcttattcttaatcctgaacaaattacatgaaaaaatcgttcatggagtttttcttcatataaaactttttacaatgaacataaagggcatagctatttctttttttttaaaaagaaacgtagaatattatttcttggttgtgaaatcgcccttcttggaccccaagttgttttttacagccctaaattctcttgtttatagagcctgtttatagagccatagacaggccaatgggtctctacagcaggcacctgcatgagttgactgggacctgagctatattccccctctgccatttactagcagtgtgaccttgggcatgctccttacagtctctgagtcagtttcctcctctgtgaaatgggcatgatactacctacctcataaggtaggggtgaggattaatggagtaagaggcacactcctgtccagggccccagacagagtaggccgtcagtaaactgtagcagctattgtgatagggtttgaaattcaaattaacgcatatttcttgagcacccaaggtgtgtgctgctggatctttcaaggggtccagaattggtagtatagttgcttttctcaaaagactgtcgcctggcagaggaaaaggtgttaaggtatgagtgaagacagatcagccagacatggtgccgcttgcctgagatctcaacactttgggaggccgagataggaggattgcctgagcccaggagttcaagaccagcctgagcaacatagcaagattctgcctccacaaaaaaataaaataaaaataaaaagattagctgagtgtggtggcgtgc

SEQ ID NO: 55099 - DNA, 1667 bp, Homo sapiens
caccactgctgtccagcctgggcaacagagccaagactccctcggctgggggggttggtgggggcagggtaagaattttggtgatctctgaaaatccggatcccacagcatgggtgtgatagaaatggctctgcagagtgtgatgggaacctcttgtgactggtcgtcagaactaagtttgagtccaacactcacttttttggcaaggtgcttccccgctccgtgatgcaattcttgcatctgcaaaacaggcggtggtcatgggatattcccgcagtctgctccactgggtacctacagagatcccttgacatttaacacaggcttcctgtgatccaggaactactgtacgaactactgtaactacctcctatattaacttttccaaaccttgatagcaaccttatgagggaggtggtgtgattattcccattttgcaattaaggtaactgagccagagagagagaaagcaatatccataagatcacacagctgaagggtgagagctataaaaattgctgggaatgaagggccatggttcttggccatggttcttggccatggttcagagctgtgataccaaccatcttccacttgttcagggagaaggtgtttgatccttttcttcactcagctgccttaggagttgggaggaaattttgtttcaggatacctaagttcttacaagtctcaacaattgtactttctgttccatctacatttcaaattcattgtcccttctctttctttccatgtaattcagccagattcgaaccctttagatcccttcctctagggaattaaggttggtagaccagctgagtaaatgtgactcagaaagtcaatatccacctgggcagggatgagtcatttctttctagttagctattcatgtacattttaaagctcgccacacaaagtcattacattgaggctattaacatgtttaatagtgacaataatagggtgtgacccatggcatataaccgcattcagataagaagaaagagttttcttttttcttcttcctgtaattgctcagtcaataccattttcacggaaatacttgcaaacaaacttttaaaaagttcattgtccaaagccttccctgattccttgtttccttcctcttcaggggttctataaacttttcctgatcagtggccggggattagcgagatggtgcactctgtcctgattttgtggttgacctacccttttgctggtgttgagcctgtttttattgcattttttggggtgtgtgtgcgcgtgcacgcgcatgtgtgttttttcaggagggggcacattattgctgctacttgcttattaacctctcaatctagaaatttcagggaagaagagacttccgctaaatttgccaagctagacacataaacagggagttagccattttggtgagaggaaatgaaacttttcttgggtttattagaccacatcctatgtggcttattttatgtctgatttctaaaaagcatgtcatcacggtcaaagttttatttttgcttgttagtcatttgaaacaaatatagatattgcttcatttcctgggtactgtatttttcagtacgtggtatgtatggaaaatttgggtttacacaatgaagtgcactagaagggaagtatttgctaatttagaactctctaca

SEQ ID NO: 55100 - DNA, 819 bp, Homo sapiens
ccagggaaatatgttattgctaaccatataggcctcagagtgaaaacggcttttggagtattctgctttgaattatttattttagtctttctcagatgtcaggacagatttttaagatttgggcataatgtttaaaatgaagatggtatgtctgtagattttattgacccaacttggtccccccaggctgtcctcacctgccccacgacttagatgaaaccaggaatggcaagaggagagcatccaagccgcctgcaccagccctcagtgcatccccacccaggctctggaacaagctgctacatgcacgggaagaccagagctgccgtcttcctggctgttgttcagagcttatgctttcttagggaaaagtacaatgtagggctatgtgtgtggtggggatcttctgtgtgtgcttgtcctccccctgggaaatgatgagaggtgacccccgagctcccagctcagtgtcacactcgagtgaacagtagatgatgcttctgccgtgcgttttgctggggaaggtaacagccatcgcacacatgtaaattcttgtgtaatccaattcctgtctttgtaattacttggagacttgccatcgcagccaattgagaagtgggagcagtgaccctgggcagaaagcagaaattggagaggaggggaggggcggggaggtggcatccagaacacagttgtagctctcctggctttacagcatctaaaatcacttcaggatcaggaaaaagcaaaaacattataactgccctccacgcaagtaccccagcttttctgtcccaagttcccactccctctacctct

SEQ ID NO: 55101 - DNA, 593 bp, Homo sapiens
tcaaacatagaaatgtatgaaaatgatcctttgaaaacaagtttggcaccaacactatgtgagaaaacttgaaaagtatataggttgtggatcaccagttctcgaactcaggaccaccctgactgagttgaccatgatcagaatggatgcaagagttcactggttttataatttttgcgaagagctgtcttctgcccttagcactcccatgtcctgtaaccaggaaacaagccggtgccctgggttgagttcagcaagtttgttttgacttgcagcccatcatgggagtgaaactctcattatgtaatgttaaactgggcctggaatgtcagcagagcttggcctgccaaagcttgaagggttggttgggaatggactatgtttagtatgactaatccagctcggctgggtactgggtgggtgggtggctctctgaggagggaggtatgacttgggctatttcaaatcttagcactttgtataaactctgtagtccctcccctcacccccttcccctcccacaaaagaagttaagccttactgaccaaccagtacagtcaggggctgttgactgatacccaagccttgatgta

SEQ ID NO: 55102 - DNA, 2436 bp, Homo sapiens
cttgtttgtttttctgtctgtaaaatggggctgttttcatgtgagacttagattatgagaaatagtcacgcctaaacttccttgaggagatgctagacaaaaacaagatggttttgaaaaaaataacaccaccgtccagactgtactaagatgcctggttgcatttgaaaccagtttcacagtctgctttgggcaggtgattgcgacatgctttccatctgtgcctaatgggagtatactcccagctccacatggcagcaggaacattggcagggctcttctggagagaggagagagccaataggcgttgctatggtggaggcatgacataattcaattttactttattattcactggatgtgcccattgtatgttagcctctgggtatgtttacaaggagcttaggaaagaggtagaggctgtgttgtctgtagaggctgtgctgtcagcagaaggggccaggcatgttcacacacacacacatgcacacatgcgtgcacacgcacacttctcttccctggcatgcagcaccaatcttggggcagaggtgaaatcaccacccggctagcgactggcaaggctcagaaggacttgctttcctaaaatctcctcccctggtctcataattccctgtagcagcttggggcttgggtgtgtgcacacctaatttctctgagaacacatacgtgttgtaaagggcacagcaatttcccgtgcttacttaatagtgtttaaatcaacttactggatttgggtgcctttccttgccaacattcctaaacttcatgtgaacagcaaaagttcaaagtccaccaaaacatcatttatttgttaatgaaaaccaagcaatttcagaatgggatcgtactgtcctgtactgtcaccttctctctgatgttatggaggcatgttgtctttctccagaggcaagcaatattgtgttttaagcttatgaggcaatcatgggaggcgagtttggccagtgtttctgtgtattcagatcctcctccttttaaaaagaataaaataaaaggtagaaggcttttccctgattatgcttttctggtgggtttctatttgtcattgcggtttataaaatggcttcttctcctctgcttccaattcatttgttaatattaactcttggttgtagcagagagtcaccgttatctgaaaagcaaattcccttatttttgtcatattgatgtagtagcagtagttaattagggacctcatgagtgacaggagtttttgggttctataaccaaaaacccaaacactggccaacccggtctgccttgtcaagtcggtgaaatcctgacagcttgcagtttcttcagcctctctccctgcacttcagtacaggagcagcccagtaatagtcccgatcgctaataagagcacaaacacccgtaagcaggtgaattggaaatattgtcattttgactacatcaacaacttataacttaccaaagcaacttgatgtccttacttaattcttcccccgcacctccccaccagtgcttgattaacaaactggtcagtggctatttagacatgaatcacagggcataggacatcctcataggatgagctgcctgggctggacacactggccaggttgatgacttctcttgaaaggggggttctgtgttgctcgcaccttcacctagaaggagatgtgaggcatttcttagaacagtgttcaccccctttagaatttgtgaccctttgtccttgttagtcttgatggcttccagttctccaagccccaaagaactgtgtggtttctcttatttctgcagcatttaaagaaattaaattagttttcctgggctcctcaccatctaatttgtttcccattagagataaataatgacgtttggggcatcataaacccaaggatttccatgttagttttccaaggacctttttttaagagagaggggaataagaatatttgggtcagatgttttaagatgttaaatataaaaatcagccttttaagaatcaaatgcaaagccagtcacttagccttgaatttcccactgtgattccacttttcaaaacccaggatgaccatcatgatgggtttcgttggactatcagttgttacaggtcaaatcatagtctcatgattgttaaaatcttaataaggccccctctaatcctgtgagttttcagaaggaaatccctgtgaacaatcctggaattgctttgcctggtaacatcttatttactgacaatatccccagctgagctctcttggttaatatgtttgctctggcactgtagttcctttttaatcagaaatgcttatcagtaggttgcatggttggggaaaatggcatttattttgtagcattttcccaaggaatattggatgaatattcctttagtactaaatatataatggtctttgtcttaagaactta

SEQ ID NO: 55103 - DNA, 972 bp, Homo sapiens
ccacatgtaaaaaagaggctacttctatttagcagtaggtatttactaggaaaggagaattatagcaataaaagttactaagattattagcggaatttctagtaaattgctttagttttaggtacaaaatggaaagaagatgggaaagtgtggtccggaattacctgggcccggtatccctccttggccatcacaattgctgcaaccgttatagggaagagaagtgtagaaaccagaaacccctattgaaagaagcatcaattcatataattaattttgccattataaaaatcatttgtaaaatttgcattattaacattatcaagtcactagttggtaagacatcagacatgacgagagtgaagggcagcttagggagaactgggctttaaaccctcagtagatcggagttaggatcaaaggcgcttgctttatgtggctgtgctagactttgaagtcatgactgcacctacagcactcatttcatcaagttcactggtgtcttaatagcagatcaataagtttcaaagtcggagagttaatttgatactagtgctgatgcggtcgtgctggggaagccgagagagaggcagagaaagctgcctattaacaactccggttcagagcgcacaaagatgcagattaaggatatatccatggccctgaaaagacaggctctggccaggaatggggaagctctggattgataaagcaaaggctctttactttagacatctcaggttatttggaagtcagtctatgcttgaaaaatctttagtcggatacacataagtatgtgtgtttacacatgtctgagttttggtctagataaacaggtgatgggggaaacgtctgcacatgcctttctaaaataaaggaacatatctgcataaggactattgtaggttatgggatgatgtgggggaaaaggtaggaaaactgtgatttttgaagggagcattgaatgtgtgc

SEQ ID NO: 55104 - DNA, 1114 bp, Homo sapiens
tttaatatgtgttaggaccatttgctttaaaggaacacatccacaagtttcggtaggttttgttttttttttaagttagtcatgaaaaatgttatacagtaaattgttctgaattcttttacatatgggtgtttttaatgatctatattggtttttgtatccccccacctccaaaaaaaagaattcagcaagataattaagctctggatgttgccaagaattttgagagtactttcagttggcagaaaactttggagtgaagtggtccctccaagtttatctaaattcagcgagtttcctcccctgccttctctgaatggcatcagatagctattaaagcgtaatttcactggagaactgcaaagcattactttcaccaacttaggtgaagttctttggactattgaaattgcctttatgtttgctaagtcggcaaacaaaatatcaggctttgttcttttgattgaatgccggggtttgggggaaaaaaagaagagtaagaaagccctgccttttttttttaaacgccccctcccttttgtgggggggtgggttgttgtggaatcgggggagatcccagttattgtgctcttccctatcaagcgagataattctgtgaatggaactgtgcgtgagcatcttgtctggcggcgctgctggtgtgtgctgctcccctgtgccgcgggtgcgcggcggcggcgcgggctgcagggcgggtgctgccctccagtggagcccgcggccggcgcgggccctgggcagcatctgggcgcaggcagcatgcccgcgagccggcagcgggaaggacagcgccgcaaccctctctagatggtaagcgcggccggcggcgggcgggcgggcaggggtgcgcggtggccggcccgctgcatcccgcgcgcctgccctgctgcgtccacggctgtccagtccgcatgcatgctctcagcctttgccatgttcgctgtcactttgcggtaactttcaggttgatgtaccttgactggtaagctgccggggtggatgcagtagatttattttttttagcctctctttaaaacaaaacaaaacaaaacaaaaaaaacgaaaaagagaaattgactatacctccccccac

SEQ ID NO: 55105 - DNA, 2970 bp, Homo sapiens
gagacggggtttcatcacgttggccaggctagtcttgaactcctgacctcaggtgatccgcccgtctcggtctcccaaagtgctgggattacaggcgtgagccaccgtgcccggccggagtgattatcttttgccacaagctgtaagaggattctcttgaatttggaggcaattccttaattacttttattatttgtgatgttattgtatgaccaaacagaaataatctgcagtggtcgataagctcttccatccaattttggggtgagaaggaatgaaatataccatagacttatgttcatattttcaacatcatgaattaaattctgtgtgtcaaattaaaacacaagatcatagatagttctctcgttgagcgtaaaataatgatgggtgtaaatcttggttttcctttctagctgtgtgcaactctttggttcaatctaggattgtgtaaactgtcaggaatggtggtgaagagagtggaggctgtgttgcaaatgtgtatgttgtgttactgcaaatatcacacccagtacagtctcccatgttgaggttctagaccctagtttactcaaattacctgcgttacttaatagtggtcctgttggctttgatgagagtaaaccactattcttgatgtcttaggagaagggagttcctttgaaaacgtaaattcccgactccagtgatacaggtattatgatctctgtattgtcacaacaggctgctgcatcggcattttctggaagcagcagagcctgaaaccttgtattcttagggaaacctcccctttgtggtttggggttgttggggacctggctgagctgtgtaatagaattctttccttctgcaatattttggaatgtgatgaaatcctgacatgccctccagattacgtagttctgcacacatttgaggatttttgaaaaaattcaactttgcctgggtcactccctcgttaccttaaacttgcaacacatcagctggagatcagagggagcagcaattgtgtttgccctccttgtcccatggtgactctgtgtcattttcacgcgtgttatttattctggctgtagatgcccattaaaggatgcccatgtttgggatactaacaaggcaggatagaacggaacaatgcagttctgcctttgtgttcgtcttcctttctgtcggtctttgctgaatcacagggtttgagcatttgtgtttgttgagccacatgagtggaaacatttattcttcctcttggcttacctcctctttttctagggagaagatttacctgatcagtgaaggaaacagctgtttcttgagcttttctcagactccatggagtaggcatgattttcaaatgcaggctgagattcgaaagttaggcacagggtatacaagaaaaacaaaagacctttttatgcagctgttccttgtaaataaattagaaagttggtgtcagattttgttcactacttctttctttaattccccaggatgtaataaccattatgctcttaaaatttactctaaatcaaaattggtgatttcctttccattatatttaggaatccctagatttggggttgttgtatttggtggcgagggggtggtctggaaatcattattatttgttaaaagttgttttgaatttgagcttttggatttcttcatttgggataggttcgatttatttctggctcgattttgaagatctgctctcctagaaacagctgtactctcttacccaattcccaaacattctctgtgaactcgggcacttaacaagattgattatgttaacgctaatcatttaatacccaagtagtagagaaatatttggcaggagggtggaggttgcaaattcctgggaaattacttaggggtgaagtggctggttcttcatccctgagacctggcagaggattaggacagagggccccgttgtgcctgtcgcactccctcactgacctccaggttgagaattttgtgacgctgccggagggaggcagaggcaggcaggaagaaaaccctggaaactcgctgatcaggggcgagcctggaccgggtgggctaagatgtaagcttgcaagtgttttaaaggttggctgggggaggcacaatgggatgttttctttttaattgcaaaataaatgagaatgaggggaaataaattatgtttaatgaacttaactggaagtaattgttcaagagcctgtgaatgcacagctttactgggtcggcccttggctgcggttttcacaaagccaagcagctggtgcacatctttattttccaggttcgaatgttcctttattcctccatctcaacaccttctttattttccaggtacgaatgttcctctattcctccatcttaacaccttctttattttccaggttcgaatgttcctctattcctccatcccaacacctccagcccacccaccacctctcaccccccagcccttccatcctccttttgaggatagagaaaaggtctttaagaagagctgagcttggtcctctagacccttcatgtttggcagtctgtttggtgtgttaccagctgggtggttatagtatagaaagggccaccccaagaaaggccaaggacttgaagtgatcgagttagttctaggtatttgcatgtgtgtgagagaatttggatgaaaactgactgcacgtttctcctctccctgcttgctctgttcagtcatttcccagcaagaagaattttaatgcctgtgtgaatccatgagaaactatgagtcggcaaaatttcacagacggcagggagaatcatctctcttcctcttcttgctgtctaaatggatttgattccagagagggagagggagagaaataaaagccagctattgataatttacaatacaaataagcagcacccttcctaggaggctctcagggattggagacgctctaactctgcagcctgcgggggtaggttctgcagcag

SEQ ID NO: 55106 - DNA, 1196 bp, Homo sapiens
ccaagcccagttcctccataattgagcttaagtttcccagctctgtgggaggatataaaattatttctgctattataacttgggttgagttttttcttttttaataagaacattcattctgagtaataaaagactccaattcagtaaatgcaagcagtgaccttgcatgaacagtcatgatgctggatcttatacaactgatctggatattttaagagcagggcaggccaatgagttttcatgtaaaaggttagagaactaggttagaggaaaaaaagtctccgtctcatcactgtgactcatcctccccccgggactggcagaatgactcaggctttcaagtaggtgacaatgcttatagaaaaatgtgacctagcggttttcatcaggacttctcagttggctggttgtcacccttttgattgtcctgagtccctgaggaaatctgggtattttgggagggtattttgggccttttcacagaaaggtccaaaggaccctgctgacagttcacaagaaaccctctgaatgtctagattccaaccttgacactcacaaaggctgaagtaaaaagagttgaaggaaatttctgattaagccaccaggggaaatcaaaccccaaggctgtatttccaagcccacaaggcctgcttggaaaagcaccttactcatgtccagaatcagagtcagtcttaagctgaggtcggctggctccaagcacacagccagatttccaggcccatggctgtagcctttgtctctgttccatctgtctggaaacaggagccattgatttgcagaaaggggccaccaggaggctggggtttagtatcagcttttcctgggccagctgggtcacttcaggctgatttcttttttggtttatgtttttcatcagctgaatggggatgatcctatcagcctcctttgttgagttacagtcagaatcagtaagataatgtgcttggagcctttggaatgccatggaacacaaaggcactgagaatttcagctattatgttatcgatgagaggccctgctgttaggcctgctgatggctttcaggcaatttctgtgtctacacaagcatgctcaaagagtttacagatggaagaaaacaaaactggaattagatttggtagacacacacatgcccacagtatgttccctgaaaaagacaatttggacatactcaa

SEQ ID NO: 55107 - DNA, 1992 bp, Homo sapiens
aacaggaaaaccagagacaaattcagaaataaatagccaagggctagaaagaataaagaaaaaaaaaaagcattaaccccagatgtctttaaacacaaaaatttgtgcacaaaacaccagacgagacggtaagtttatgtgtttagatcagcttggacaaacaccgctgttcaggactgcagttatttttttggattccattctggctgcaagatgttcttggggagaaaatggactgtgctcacacaatcctaactgtttgggatttgacttaaaaaactggccagggccttgatttgcagctcactcttggcctaagcccggcgttccagccggttgggttttgttgctcgtggagtttggaagccgaacagttggggtgtgctgcgatggacagggccactgagcacacagagcctggtgctatgctgccaccttctgtctaatgtgtcatagcaagaggtggctgagctctggactgcctagaaaactcggtgactttctgcctttgagagtcaggtcctctataatctgcacattccggagcagcagtgccctctcttcctgtacacctgtgggttcaaggccttgggggctggccctttgatagcttcttccagaacccacgccagtctgtttgtttgcctctcttcctcattccctccctctctccctgccagatcttgaagtttccgtaggtagaagggtctggaaaaacgaggttgaaggcaaagacagggcttttcgttttcaaacgtcagcacactcttgtctaaattactgccaaagacaaatgggatgaagtggaggaaaggaaaagtgagattgaatagcaggaaaaaagccctgacagcaagatctattgccctgtggagaggtgtccccaggggtgagctattggttgagatatttaaaacttgagtggacaaaacattagacccttcaccacagggaacaattctacagcagcccctgggacctgaccctcgtgagcgcagaggtccttcccaactctaattttttatgatttctcaattgacttcccattctataaaaagtattctgttgctgctcagaaacccaactgctttgacattctgtttgaggtcgggatggtttcaatctactttcagttgtgtgcagcattgaaaatgcccctatacctactttttttgagccaaagaaatgtaaattcatataattaagcctagaaatatgtatttgaggaatgacataggggacactgcccttgacaactggccaagacatgactcgccaagcacccggggatttgctgtacagcctttgacaaatgcttaccctttctgagtcaccagttttcattgggttgtctcactggtcaggatgagaatatctgatgccagttgggaacattttggaaggactgtggtggtgaaagaaatagcttagttctgcacctgattgccaatcactccttgttgtgaggattgtacacttctcagcttgcaggcctggatcaggggagacaaaaggagggagagaggtgagatgtcggatgtgcggtcatggtctttgcttgcaggttctccctccctggggtgactgggttcagccatccagctgattatttttaggctcttgttaattgccaggcatggagctaggagcttgtgtgtcagagtggaagtgaacaaaaacagtggagaacaaatggagtcctcagggatacctatctcagtggcttcgaactgttcttagggtaaagtttaaaatcccacattctgcaaagcatcaggtgatctggcccttcctgcttctttgatctctccttggacctttctccagcaggctgagttccctcaattttccttggtgagctctgtttcttctcatctcagtgcctgcctgggtgctcagcccagacactcctggtcttgccacccctttcacctggtcagtgctgcttctcatctttcagttcccagctgtaaggtctcttgcccagagacg

SEQ ID NO: 55108 - DNA, 2783 bp, Homo sapiens
taaggaaggtagggtaagtattatgattaccgctagctaaatgaggagactgaggcccagagaactcaagtgacagccccagctcacataaaacgggttcactgagagctatgtcatagttgcatatatttatgagggtagattggacttctggtcacccgtattcagtgcctgttgacatcagatttggccatataacttcattggtcagtgaaatgtgagctctgtgaaagaaaaagctctaagagctatgtgtaatttgccatgtgtttttcctttggccagaaagttggcaaagttccagatagaggctgctttgtcaactgggccccacagtgaggacaatgtggaatggagttacagttggcccccaggggatgtgtagcataagcaagaagtaaagctttgtcattgtaagccatttagattatgggcttgtttgctaccacagcaaaacctctcctatcctaactgatacagtacgtttgctgaaacataccctccactcacaagacctgtaccctgtgctctccctccatgagacatttgctctcttagaaggtagttcaagtggccaaataatagtgacctctgcttcatattttagtgcacatccctctccttcataaagcccgatttgctctttatgagcacaaaatcaaatgattctgaccatggactgaagccacatagtggtcaatgatgtcagaaccttaatatgcaaacatgctaataatttctcttctcctttcttcccatctgaattccaatgtgatggtggacaaattatttaacatcttggtgcctcaatttcttcaactgtgagtgggaatagtaaatggaaccgtttgaattctgcctttccattgttcaaagaatgttctctgtctggtcaccacagggtagagctaccatcctgttaatctttaatctccatgtggacacatgataagggatggaagaaaatgttctaggctaacgaatctcatggaacttggaggccctcacctcactctatctggaatgcagtgggggctcttgatacacatatgttggataaatgatgattaatgagtagaaagtcctgccagctttggaagccatttcagaggaattttgaagctagagaattattgtgcggtagagtcagaaagctttaattgtctcagctaaatttctacagtctttatgaaggccaggtaacctactataaaggccaggattccccccacctcagtttctccatggagaaaataatggaaaagaaaccaacaggagttcgaagggacataggatgatatgatgcaaacaacccagatgccacagtcaagagactcaagtttgagttttgtttctgcccatcgactgtgtgctgctaggctaaccccttggcttctccaagcctcagttttcccacatgtgtaacaagtggattgggctaaatgatttataatgctccttttagttttaaccatgtatgcctattgttataagttgaattgtgcctccccccaccaattcatatactgaaatcctaataccaagtatctcagaatatgaccttgtttggagataggatatttacagaggtaatcaagttgaagtgaggttatcaggatggaccttaacccaacatgactggtgtgcttataaaaaaaaaatggaaaatttggacacagagatacatgtatcacatacagagagaatgcatatgaatgtgaagacagccacttacaagccaagaagaggggcccggaatggatccttccctctcagccttcggaaggaactgaccttgccaaaaccttggcttcagactgagcttccagaagtattcatttctgtcatttaagtcacacaccttgtggcattttgttattgcaggcctagcaaactaatacacctctcaatttcttcaggccatggaggtagtaataaatgggctaggctttaggtcaggatgagaagaaatttggtaaataaaaagtgaagcaggaaaggaagatgcattccaggcaaggaaggagcatcagcaagctccaaggtgggcccccaccttgtgtgtttgaggacattgacacagctcttgtgtagggctggagaggctgggcgaaggtagattataaagctagatcatgggagagcttgttcttcattaataggctgacattaaataccttgatttttcaacagtctggaactattacaagtttctgaggaaggattctctggtggatgtggggttcgtaaatggtcaaaatttaatcaggaccaagtctggttgagcaagggaaatcaccaagttgggacaataaataataaagtaatgaatagtttttctagagtggttagttttgtggagtaaatcaatctccctctggctacacagttgagcatattgcttcctgaagaagctattatgttggtcaaacttctgacactctcatcactgagcagtgacaccttcatcacccatccctccacccccaaagaagtgactcactccatcttggcatggctggaggcacccaaatggattcatttctcccagatctgggcatcagcctcattcctgagacagtcagcccaagtcaggcagaaagaatactgctgtgtctgaccggccagaaggtgcatctgccatgaattgtattgccttagacctgccacacgggaccccagccttgacctgactgcactgtggtcatcccatctatcccaagtccttcctgggtttccattcaagttttcccaccactctggatttggggcactgaatatta

SEQ ID NO: 55109 - DNA, 433 bp, Homo sapiens
atttggctttctctggttggtccttaagttggaagtggagacaaaaattagggaagtgtcagttattaatcaagtcccatctatttgaggcagattgttacaggggttgctgtttagcttcctggattgtcactagagagagcaaactggcttcccataaatccgacttacagcagactggcttcctgggttgtttgttgtagataggaggttgctgcaggttgtgggtcaaagttctatttttatacatggtctgaacattttctgtttgtatattcagtctcttagtccccggattgtctctagcttggttcaattatttctcccccaccattcttctccttgggaaaaataaaaatcattatgtatatagattcactctgaggtaccttcttcataaccacaacccacttctccaggatttcagcctgag

SEQ ID NO: 55110 - DNA, 532 bp, Homo sapiens
gtcatggaaggtgaagttacatccaacgcaaatgaaattacaaagttacatcctatgcaaatgtctgattgattgtgggaggggaccagagactgaagtgaagttacaaagtttcacctgtatgcaaatgaagactaggcccgcaacaggactttccattttttcatctatgacatagaaagcagggagtgcaaagggagtagcctctgatcgttttgttacttgaacatggaaagttggggttttcctttcaattcagttccaggaagtcagtgcaaatcagccttaggttccctgcccccacaccccattctcctgtctcatttgaaatgagggtattggactatgacagtgtttcttcatcctggctcctcattcaaatcacctagggggcttttaaaaactatcaacactgggccttacactttcccactctgacactgataatatttagtcaacaaatattatgtgagaatccaggctgggaacagtttctgctaggcactgggctccctctggggtagagttagag

SEQ ID NO: 55111 - DNA, 2414 bp, Homo sapiens
ctcccaggctcaaacaatccccccacctcagcctcctgagtagctgggactgcaggtgcctgctactaagcctggctaatttttgcgttttttgtaaagacagagtttcaccatgttgcccaggctggtctcaaactcctgggctgaagcaatctgccctcctcagcctcccaaagtgctgggattatagacatgagccactgagcctggcctcagggtgattttttcagcctaaatacctgtggccaagccatgggacactgaaagtgctcactgcctgagggtgctggggtctgactaagctgatgcagccatgcctgaagcaaggcccagatggacagaaggtcagaacggagagaagccacgtcttcctctgtgtcttatctggagacggttgggagggtggaacggggaggctgaactctgaagcatatgactggggaccatcagtgactacgaagttggggctaggtgactatgtagtgactgtcagatgttggcagctgcttaaacaagctgagctgggctgaaggctcagcttttatataccccttcccatagacattgagcacctaaggggggaggcattgtaccggggaccgtgggagagaccaagatggacaggcgggttctctctctagccacttacacaattcctctttggggagccagctctagaagaaactcaaacttcagtgagtgacagcaagtcattctaattgggaaatgtgcacccagggtcagggatcatgtgtattcatctttcccatgccccatgtgaatcacagagctgggcctttagtgggagttaagtaaatgtttgtggatcaatgactgcttcagtcaataattgaatttttaggggcttttggaaggacttgtgggagaggaggaaattgagtgtatgttgtatctgttaaaattaaacttggtgctagtaacagacatctgaattaacagttgcaataaataattagaggtttatttttctaccatataacagtgtctggaggttaagaatctatggcagtatggcatcttcacgtccatcagggacccagccttcttttatctttctgctctttggtcttaaactcatgaattccaaccccaagattgcctgacggtaacaagataactactggaactccattgattacatccatgttttaggtaggaagaaggagaatggggagaaagacagcctttctagaaggctccattgacctccaccaacatttcattggccacttctaatttcgagggatattaggaaatatattctcttgtctgggcacattctcaatctgagtaaaatcttgcttctgttaggaagaagggaagaataaatcgtgggtaaaaaactgcaggctctgctttgcaagattgggtcttctttatggagaaggagaaggaaaggtattcagcaacacaacacttgtttcactcctgtcctctgagatgcacaggtttgggacattctttattgtgacctgataatgtggcaaatataaggcatcggagcctggggcacttaattagttccttgactattcaaatcctcctgccaagggcttggttaattgcatggacttctccttcattattttcagctgtttaaagtgcctctaagaacactcatcctctattttgtgtaatgaagcctctggtgaaaaatggagtctgacaggtatgtggacagaaatgccctgcaggggcaggcagaactggctgtgttagccggcaggtagatggacaaatagatggataaagtctttggtaaacatggagcattactcaacagcaaatttaccacctcttgctgactcaaaccagctcttgcagaatacttaatgacttctgctaaacaaaacactagagtttctcactttttaaaaagtctacaaaaatgaaagctactgtgtaaaatgagtgccaaatttccactcatatgtttgttcagctttctttgcttttctcccaaaccataacgaaatagacgctatcaattttcccaagatggcaacctaacagctagccaggtgttctcagataagaagggctcccttgacacaaagagtttaacggggttgggatattttccagttttcttttccgagggctagggaagctggattgaggtttctgaagaggagaggcaggatggtgaaatgggagcccgtgggctgcttctgcctgttgttcctcttgacaaacttgctgaaggggtggatccccccctgctgaaaccaccagcttctactgggtgtgctggaaattatcaatccttgaaggaggtgaaattatcctaaaccccaaacctcaccaatattccagtccctggagaaaggcctactgaaaggagaatgaattatttatgtcatccatactagtaagttttacaaacatcttcc

SEQ ID NO: 55112 - DNA, 395 bp, Homo sapiens
tttctttcttgctggagaactttggccaggtcttcgaatctcagggagcaatgtgtaaggttctaataccatccttcccagagggtcctgagctcctaatgcaaatgagtgttccccatttcagaggtatcatcccgctgagggccagtggagctctccagcatcagtgcctggctgacctcacacaccttgcatgtggtcctgaactttgagtcatctggccttgtgcaacttggctgccaatagctacatttagcactattcactcacttatccattggtgactatttggtaagtgcctactacgtgtgtatgtgtcagggctgaggatgcagcctctggtgggaatggcccccagcccttaaatagcccccagcccttaagaagcttacaat

SEQ ID NO: 55113 - DNA, 1345 bp, Homo sapiens
cagagggacaattcctttattagaagactccatttcctaatgggtaataaagtcacttggactctaaggtcaaacagacctagatttgaacctcagctccactacttccttgctgtgtgaccttgggcaagatacttaacctctctgaaccttggttccttcatccataaagtggagataatagagtacctaattcacagggctgtggtggtaaccaaatgaaataatgcatataaaagtctagtctagtactggacacataacaagcattgagtgcatgagaattgtcttctatccaatacctaacattttaaagattttaaacagacagtgcatattttcatcactgacatgatttctgggaagtcctctgagggacacagagaaaatctaacctgatatgaaccaacagggtgcatttcttttgtctaagtcctccagtaagggacaaagtaggagaggcttcaggaatccatagattaacagcagctggccatggtccatcagtgtgttcttctgggaggggctggagggttccattgtctggtctcctgcgtctttgccatttctaccggtttacatgatgcaggcattcctgaggggtcacgtggacctgtgctatgggccccttgacctgtaggtggggatgctctaccaaaccaaaggagacatctctaagccatggccagtaaacagagaaggtcttcttgcctcaggcctatttttgaggagatctttggagaatgtttaccactgatggccagcatcagtggtaaaattaaaaatctggaaggttctggaaggttccagtttaggctagaaagacaatgtattgcggaagggttaagtgtgctatataataatacctaacatttactgagcaattactatgtgccaggaactgttctaggtatgttccaactttactccatcctcactaagacctatcagggaataaccatccccattgtacagatgggtgactgatgctcagagatgttaaatagcttgcctcagctttcacagttactaaggggcagatgcaacatttgaacccagggagactgattgcagagcctgcactcttaactactgtgctgtagccctgtgccagggctgggcttcagacttgaaggggaagggctgtcgtggggatcctgagcttctgaagagaggctctgctggtaaaggagttgcccgttaagtcctgagttcccagagcctgagcccagataaagagctgttcccttagctgttcccagagatgagtcatcctcaggaagccactgactcttctcagggctcctgtcctttcatctccttgtccccttcctgggaataaata

SEQ ID NO: 55114 - DNA, 4695 bp, Homo sapiens
agtaattgcggtttttgcattacttttaataagtaatgcatgcatatgcatgcttcactttgggggcatgcagtctaggttgcatgttcataaatacaacacatcaagaaacaacagcaaagcatattgcatggtctaccccatgtgatgctcaccaaaaccctatatggtaaggaaactaagggtcagagggactgctttatccgaggccatgcaagccttaagcatgttttgagaatggcagcccagtcatccttacctggcacctgcacccctgactgtcaccatttggccccaaaagttaagagcaagcatgccagaaagcgtttttcttttttcttttccttttctttgggggatgcttggggagaggggttgggaagaggaaggatgatctcatctcttattttaataatgaatcactggggcccttgctagtgggaagtccagactctgcacccctcaagcctcccactcctgaattgtgtaatcaccctgggggcttacccagtccaaagggagaatcagcctggaatccagaaaccaggaagagagaaagctgggagcagaaaacacaggtcagaagctggcctgcagatgtgcttcaggtgacagacaccatgttgccccacacaggttaaacatcaatgaattgttatcaacttttgggtatcaggagcattttgaatttctggcttcttttgaaaagtgaattgtcaggccgggcacggtggctcatgcctgtaatcccagcactttgggaggccaaggcgggtggatcacctgaggtcaggagtttgagaccagcctggccaacatagtgaaaccccatctctactaaaaatacaaaaaattagctcggcatggtggcaggtgcctgtaatcccagctactcaagaaggctgaggcaagagaattgcttcaacccaggaagcagaggttgaggtgagccaagatcacaccatcacactccagcctgggcaacagtgtgaggctctgccagaaaagaaaagaaaagaaaagaaaagagagaaagaaggaaggaaagagaaagaaagaaagaaggaaagaaaagaaagaaagaaagaaagaaagaaagaaagaaagagaaagaaacaaggaaagaaagaaagatagaaagaaagaaagaaaagaaagagagaaaggaaagaaggaagagaaaaagagagaaagaaagaaaaatgagctgtctggccacatgaggctcacattcctgcagggcaaagatgctgacactggatgggactgcctccttacctcaggcctgagatccccagctagctgtagtctccaccactccctagtgatcccccaaccttccagttaattgtcatttgtcccagttctcaggctgtgttcctctgcctccctcgttctactcatttcagatgacctgccctgtaggcatctgcatttgcgggtcccagtctcattcacctactgtcttgtttctgtccttgccacttgccaccagctcccctggcaccacacagagccccagacctgccctccccaagttccctcccactctgcttcctcatgagacctccgtgtggaggaggagtttcctctccattctttaaacatgcacttccctcctacctccaagcctttgctcatgttgttacccttgcctgttttccctatttctcctttagcaactaattttagcctattagttgttctttatttctaccataacaaatgatcatacttagtggcttaagcaacacatatttgttcttttatagttctgtaagtcagacacacgtgtcagcagggctgtgtctctgatccctattttcttgctggctgttggcttctagaggccacctatgtccttggctcgtgaactcctttctctacctccaaagtctagtctttctcatacttggaatctctccttcttttctcttctcttctcttctcttctcttctcttcttctcttctccagctccatcgttcctgcctgtgatcaccagcccttgagatgagctcgcagcaaagatctgagtgggagccaggggatgagtcagactggagccacaacccgcaggaaccagagtattgacagcccagggaggcctctgtttctgcaagaatcaattcccaggagcctattgacaaatgtgtcccttacttatgtgctgtcattgccttttctattgacttagccccgaggctaaagaggtgaaagataaactggatctgtgggcccgtcatctcctggcttctaaggctgcctccccacgcccctccttctccttccgtttttattcttctaaatgcccctctgagatccctgttatcacacacacccctaaggtgatatcaacacatccatttcattcagcaatgattgagcacctactgtatgccacatgtgctgggcatccaaagatgagagaaccacagtcaaggcctcaaagtgtcctcagaagtgacacaccagggtctcaagaccataaattcacaagatcccagaggagtcctcagagtagagagctgactctgattctaggggaagaaagcttcacacaggggcccctcaagctgtgtcttgttttggtttttgtgagacatggtttcactctgttgcccaggctggactgcagtggcacattctcggctcactacaacttctgcctccttggttcaagtgattctcctgcctcagcctcccaagtagctaggattacaggcatgcaccaccacgcccagctaatttttatatttttagtagagacagggtttcaccatgttggccaggctggtctcgaactcctgacctcaagagatccacttgcctcagtcttccaaagtgctgggattacagttgtgagccacagcgccatgcctcaagctgtgtttttaaagagaaaagagtagagctctccaaggaccagaggtggaagaagactcttctagagtgcaaataaatgaaggtatcagacaaggctagagtttaggatatgtatcaggggagcggagatggtgaggaataaagctgggtggagagaagaagaagcaaaagttgccaggagccagattggcagggcattctgtgtcaccctaatcagtctggacttagtcccataggcaatgaggcatggaggatgagttttaggcagataagtgacacaaccagattggtattttagaagatgactcctctggcaccatgaagactgggtttgagggcagggctgagaaattggaggctactgcaaaggtccaggcagagatgttgagaccctgagccacaggcagggcagtgagagagtgctgagaggacagatgcaagggatatgttgtgggtgcccaaacaggtgtcccgcagatgtcctctgcagagatccctgcctgggggtgagccaggcctgagagctggaagattgacatcctgcagactgggcgggttggaggagaaaatgaactctggagaaaggggactattcagggcaaaatcacctgtctccaggccaactgataagcactgcacaaactgactgtgcaaacaatcgcagggatggctgctcaacacgaagcactgtgacagcacagggatcaataatcaacattgagaaagagggagatccgtaggggcaaggaaataagaaacgcctacatttgggccaggcattatgtttaggaagcattccagctccttaattactacattggcaaaaatggatcaaatgaactacattttacagttgagaaaactgaggcttaggggcgtttctgatttgcccaggaatgcaaagctgatacagaagggaactggcactaaatcccagtccctggaggccaagtttaactctggctacactctcctgaccttgctctttgcaaattctggggcttctcaaatgtcatctgttccatgtgatctaacacttgaccattctctaattatgctactgggtagtagtggctgaacatgggagagctatgctatgtggcaggaactgttctaaacacttcagctgttgtgaactgacctaagccaatttgcccattcaacagctgtcaggctctttttggaaataataggggtctctgataattagaggaaggtgggagctatacatctccccctatcaaccttgctacctggtggttttacaatgaaagtcgttctgccacatgtacaaagaggcagaaaatcacccacatgtgggtcccagtaagtcccactctgcctctgcagcactctgacacacattttgcaggaaagaatcattttgcagtcatagctcaacagcagggtcagctggccttctggttggaccagaagtcagaagaaagaccaaatggaggtctagacctagaaatttcctctgaaagtgtcaggcagccagctttgccagattcttttatcttgtacattccagggcaaaagtgtctgttcagtcattttagccaacctcctatctttttttttttttttttttttgagatggagtcctgctctgtcgcccaggctggagagcagtggcacgatctcggctcactgcaatctccgcctcccagtttccagcgattctcttgcctcagcctccgaaggagctgggattgcaggcacccgccaccacacctggctaattttcgtatttttagtagagatggggttttgccatgttggccaggctggtcttgaactcctgacc

SEQ ID NO: 55115 - DNA, 6574 bp, Homo sapiens
cccgtctctacaaaaaatttaaaaattaactgggcatggtggcaagtgtctgtagtcccaactacttaggaggctgaggcaggaggatcacttgagcctgggaggttgaggtttcagtgagccacaatcgtaccactggactccagcctgggcaacagagtaagatcctgtctcttaaaacaaaaacaaaaacaaaaaccgatcccttgcctagaacatcaaagggtgggtgtctggcaagggccttgtgaagaagcctttccttttggtaaagaatcagccaactagagaaaccagactcccaaggcctcccatgcagggcagggactccctccagcggtacgtaacccaacacgtgagaaaatgtcacccagggaacagagagaccagattaacttgataacatctgaaacccccatctggatgagcactaaagcctttgtgtttggatttaaaaaccagagatcccaggtaggttagttccagctccccagctaaagacgtattacgtgattagccagcctctttttccttctaaattaaaaggattaagtatattttagagaatgttctcctttaggactaactgtagaaatttatttaatttcactttgtcatgataacaacactttagggaaataagagacaatatgtggaaggcctgcagttattacaaaaagagcaaaagtgttccctttttgtttgaaataaagagaagattacatgtcagggaaattaatctcattacaaagatgaacagcaaactcaccaggtcacttcctgttgacacaggaagaaaagcttctggcttgttttctgggaatctctccacaaagtcagaaggtcagtaattcatgcgaggcagtggaggggaaaagagacgcctgagtcacatgagtgatttcatggtttgacttgtctgaacatttccgtttttgttttttaccgtctgtacaaacactgtgaagactccagcaaagtcctcatgtgtgctgcctccttggcccttgctctgggatcaagtaaccaccaacaaaatcctcagcactgcaccgatgtcctgtttagccaccatgtcaccgtggccaccatgtcatggtaaccacctcccatcgtcccgcccatgaggattgctattccatcgccttgtttcactctttttcatagaaaccactaacgaaaattaactgtttactttttcactgtctgcccatctcctcctcaaccagttcacatctgcctccttcatccccacatcaccaatgcctggctcacagcagagcttctgtaagtatttgatgaatattaatggagtgttcatgaataagttgaagtgtgcttaaaatttcacaaatacttttagttttccacatccagtttttcctttcacattgagttggctatgctatctaaggcatcctggtgataacatgtccaactgtcacatggataaagtggtcattcatttgttcatttcatccaacataaacttattgagcgtctatccagtgctgggcatctatgccaaggattcaatggtgattgaaacagagtgcctgctctcctgagttttcagtctaatggggacaatgggaaacaaatattaatgaaatagcaatacggctgtgacattacaacctcataaatgctgtaaagaagaaatgcatgcagggcttctgaggaagtaatgtttgggctaagagatgaaagatgcattaactaggagagttaactaaattaacttgctcaggagtgagcagggttccagttaacaaatttatggttgtcataaggattaggggaaggacagagtagggctagagaagaactttctaggaaaagggactacagccaggcgcagtggcttatgcctataatcctagcactttgggagcctgaggcgggtggatcacctgaggtcaggagtttgagaccagcctggccaagatggcgaaatgccgtctctactaaaaatacaaaaattagccagccatggtggcatacacctgtattcccagctattcaggaggctgaggcaggagaatcacttgaatccaggaggcagaggttgcagtgagccaagatcacgccactgcacttcagcctggatgacagagtgagactctgtctcaaaataataataataataataataaaaagaaaaagggactactaacatgggcttgtattatggtgatcaggtggatgttgatggtataggaggcggggtggggggagttgatggctgcctaaaataggatggagacaaaaatatgtggataaaagaaaataatgtggaagtcatttaggaggtaaaatggcaggaccaggacttggctagtccttcaaggctcatctggtgactggggcattcttttgggctgggatctgtggggccctccccggctagcaacttggctttcagaagtagatgcagccactgatgcagtccacgtgccaaacagggatggcaggtaggggcagggctgggcaggggggcacaggtgagcacatgcctccgctggcagcagcatttcaaaacctggatttatgactcaagtcaggaggattcctggaacccaggcatagatttctgtgggcagtcagttgtttacaggagattaagatcatgcctattaaagagatcaattgtgtccacaagaacccacacttaataggtaattgctgcttgacagaactctacctgcaaccagcatagctaaataaggaacataggaaacaattgtcctgaaatatgaacaccatgttttttttcctccgcttgatcaaagaaagactccagcaaaaggggaaaaaataattaaaaagtaaaagtcttacctaatgaggtttaaaacaaaacttttgaagccaacaagcaactgtgggcaacacttcaaagggcccagaatcaatgtttgtcaatagcagttttgcatcctttaatttatgtctcatgaatataaagtgtgatgttattaggagcccatccatgccttaattctgtttgagatttgatgaaccagaagtctattaacattctgtacaaatcagcactggcagaggcctgtggcacaggcttcacctgatcttttatcctgaggctgggatgctagtcacgctgtcaggcttcctgctcggaacacccagcagctgtcatgtgcaccgtggagccagggggctatgtcagctactttctttggagagtttctccccagaagagaaaccacttcatgactcagcccagccccaaagttgccatttgtttaatcaagatagttagtttgcaaaacattaaacattaaacagtatttgatgcctagttaataatttgcatcctcttcatttgttcctgaatccttggagactgacatttttcccccctaaaggcatagacaacaaaagaaattttattgagaggaaaacacaagtccttaaactgcaaagatgtttgccaggatgtctgatctccatgttctgctgttaatggctctggtgggaaagacagcctgtggggtaagtgttcttttctaatatttgtagttgagagactccgaagtttactaggaggaccaagctaggctgggagtgatgagaaactttagagtgaaaggctggagttgccaagttggagatgttctaactacaagaaccaatgcaggcctgtggcttggtttcttttgagcagccactcccatgggaacaggtgtctgacttgagccatcttggagcggagcctccatgaatgcattccagcaaaggagactggggcaagaaaatgtgccccagggcatggattgtaatctgtcatggatctcatagacccctttgagaagccatggaaagctataaactctctccccaggaaaatatacctatctattggtgctgacacacacagttttccagcgatttgtggctgacactagggtaagaagcaatgtgctatggccttagaggggaagcctgctgactgcaaaagatcctggcagtgggtctgcataaatagtttggatttggggagaagctttgtgtttagtactttgtctccttttccctgtgacagcagcagatgaggcagagaaggtgagcaggggcccaagggaggttgcagtgcgcagggaagggaagtcccatcagagagtcttgaacgggggactcaggaccttccggagcagatgacttgtcaagatgttagttccttctgtgtgccatggtccaagagtgtcagatggatctctgtgggcatggaaagaggaccttgcacagaaatagagtctccttggagttccgtgctggttgtggtctgaggcatgaatgtgggctttggagccagggttcgaatctcagctttgccacattctagctgtggaatgttgggcaaggaacataatctctctgagcctcagtgttgtcttctgcaaatcaagtgctaacctctcatagatttggggagggccacaagtaaacgaggtcatgtatgtggcttgcaaataaatgtgagctctactcccttaaaatgtcaagaatgaacacaacttctccataaaaatcagagaatgctccgccttgttcgggaggggtggtagaaagtgggcagaggataagaactaaaataacagtcataacctctctgtcttattaagtacctttgcattttgttccccatttcactccatagagcgtttcctgaatgaagcagattaagttacagttttctgattagcatgtttttaaaacaatagcttctcctttcttttccgtcaactgtgctcagacacctatcttagctctgtattaagttgccaagtgactcacttctgaaagggttttcttttcaaatcatgacttgtgtgtgtgtggtggttgtaattacaaattgttgtcaagcccctacatcatttgatggcttgttggtgtctgaggccgagacacagcagaaataccacaggtctagagaaaggcaggagaaatcatcggaggcccacgcggggcccagagaacataccagtcggaaagaattagatcctaaactttgcgggcaaggagaaacgttgacacggtatgtttgaagttcacaaaaggataatggtcccgaaaaatcccttttttgcaaaccccattgaatttttagggttagcaatgaaattataagtcaataatggataaaagagaaaatatgagagttagccttcaggcaatgagcttagtcaattccaaagagaggattcggggctttggaatgctttcttaccccagatgtgtgccagacaggtggtcgggaaggcggcttgtgttccacaggctggcatacagacatcaggggaaagtggccaagtcgttcagatgctttggagagtttggggcgtcatgggggtaaagaagccacatagccagctgggctgggtggcctctccagccccacacagctaaaagtcataactaactgctaccatttaatgagaagtcctgagtgctagcccctgaactttccatgaattggttcatctctggaaggaccccaagaagtaattcctactatgctcccattttacagaaacgaagctggaaaactgggcctgtcccaagtcatacagctgatgagtggcagagctgagctctggattacagactggtttccgtgtagccagtctcctgtctggggccctgggtgaggatgagatttctttggttcgtacagcttcagggacatggcttttcctgtagggaaaggcctcttagaccaggcacatgtttgctgggtggagtgtaatggactccacgtgtctctgaaactccaaagaaaggcagctataggatctgtggtcactattcattggaaagacacccaggtactctcccatgaattcagatcatgtagcaaatgaggactgttctttgggatcatctgtcatggagatttttattctgatatccactagcccaagagatatgggtcaaaaatcattgctgtgaactccagggcatcattcattgtgccttgctgttctactcgaggtttggttttcctaacatatcatttttgagcacctgtccagcacaacctcatatcattatccctgttttatggatgagatacaaacccagagatgttaaaatgactttctggccaggattggggccaggtctgtctgactccacattcatcacaggaggcctgcttaactgtaaataaggcgtggactgtcttagaaatctcttcttgctaggattcttagagtgatttggggcccagctgggctcagccataatggaatttggcctctccaagcccagaaaccagaggacaatgtttgtcaagcttgcctgcttatctcagcccatccctagaaagaagaaagacaaaggcttctcctctcccctgcaaaggaggtgctttcaattaaaacaatgtttacatttctgggcttttaaaaccctagaactctagaatcttcccagggatagagccacaaaacagtttgcataggtcagaagttgcaaattggcagcttgaaatacactctgctcacagctcaagtttaacttggtggatagaagattgactccaaga

SEQ ID NO: 55116 - DNA, 1929 bp, Homo sapiens
accaatgtgcattgtctgcctggttctgccttactgcacttctctggttattgctcagaaatgctgtggatattgacttatcggaccaagtttgggatgggcaagtgaccaggctcagcatccgattaattcaagcatccacacctgcatgggctccaggaccaaacaaggtcttggacaggaagatgggagccactcttttcaaagcctccagaatgccagtctctttcgggcctaggagagactgaagaggcattcctccctcttactgccatctacacggtcttagggaaaggggagggactgattttcactgcaaattctcatagatttttttttaactgatctgaagcacaaatccaactcattacctttagcggtgtacactggtatttagggaaatcaggtcgcaggaaatcacatgtgtatacaggcacgggtatatttatattttaaattcattagagtttcctaaatgcaagagcaattctgctgtcacagagaaacagcatggcagaatatttggcagccgggattttaaataaaacatgctttttcttcataattaatataacaaggtttcctggcttaggacttggcaacgatcccaggaaaaatggttggcggggagggggttggtgcgccatgcctgtgacccgcaaacaagttccaggaaaagttgatgctgagtaagttctccttagtcggctcttccggcactctgagaaaacagaacaaactcactgacaacagtggctattaataataggagtagtaagagtaatcgtaataattaatagtagcagcaaccacgtatgaagtctttacatttgccagatgtggcatgctttatgtttattatctcatttaagcttctctcaaaccctatgagttagggaccaatgtcattctcattttacagacaagaaactaagcatagagcagttaaatcatctactcaagatggcacctctgggaggttacagctctgggattcaaggtctgcccaacgcctagttctatgctcacaagcactgtggttgagatcatcatgcctggcactgcccaaagacaaacaagaccgttttgtgtggtatcaaaggtgtcaaaatgggcagcagcctgagactccagcttccagcaggagacaaagtcgctcccatctggacgttccctcaatagccccgaagctttgctttccctttgctttccgacaccacaaggatcgagtcttgccggctagcaaaccagttcgttcagtgttttcaaaacttcagtcatgaatgaagccatcttcagaaattctgccaaagcccaaattagtttcttaatacttttgttaaagactcaccttttctctacctaaattgatttagttctaaaggaaattgtcattactacaaagaaagcgaagtgatgtcattgaattctagctggctgctgttgacatgctaaaggtctgagcctgaagcggctttatcctccttagaggaaagatcagcaggaggcagaggatagagacaccagcacccgccagtccttccccctggtgggattggaaggcttgacagtcaacctgagaaaagaaagactttctcacgctgtgttttctgttttattctaatgctgttacttcacatcctggctaggcaccatctcaatcaactcagatacccgcagtggctcacatctgatgccacggaaagcgcaggagtgagcacagcttcagcagaggtggtgctgatgcctagcgggggagttaccttcctgaagccctgggctatttgctggggctgactgaccaaaaagggaaacatgggggcttgtgcttatgaggcggccccacgctcagctgtgctttggttttgtccacttgcttgtcttaattttttttttttcttagacggagtctcgctctgttgcccaggc

SEQ ID NO: 55117 - DNA, 1341 bp, Homo sapiens
tgaatcctactgatttacagtgtaatcttcttgggggtggggagtgtatacgtctagtctattttgtcctatctttaatccagtgatgatttcaactcaggctgaaatgacatcgcttatctttgtagcaggagccagagaagaacaacatgagggaggatttggcctgggcactggcagccactgccctctgccacctccactactcgctctggccttgagctctttgcccagcaaggggactggccctgctgaactgtgcacacttgtccctgtccaccttccagtccagaggttgcagcctcaaccatggccatggtacagaggtctctcctccccagctgcccttgggagtaacgcacctccctggtggttggcaacatgtggcctaccaccaggcatagggtagaacatgcaaggaagaagagatggtgtgattagagtcccaaccttttatccagcaagcagaagatttctctgctcttagttcattcggagctgagcctctgtccccaaaagacaaatctggccctatctcccccatcactgcctcctaatccctctgagaacattttctaccaacgaatttctggaacacatcaactcagactgttaggctttttgttttgtcttccagaagttttggaattctggaaggcagaggaagaatcttagttgaaataatcactggattaaatataggacaaaatagacttgatgtatgtgcaccccacccacaaggagattacactgtaaatcagtaagactcagagactcgggatccttttctccctgccttcctcactaaccaaccttaacctgggaggacaccagactttgagactctggtggcttagggagtttaacattgctaagggcctgctcctaaccttgaagtcagtgtcctgagccagggatccattgagaaagcccaagtgcggagtagaataaacagtcgttggatctagaatggtcttgctaaatatactacaaagcagctaccttaccatgtgcagaagcagcagcgtccaccctttaagagaagacgggtcagctgggaccatgtgctattttagccctgttgaaactaggaatggatgtggtgggagaagtgggcagtggcttacgtgccttttgatctgagtgaagatgtttgttaagatgtgtttaccgcagtaggctggccaaggctcaatctgacttttgtactttctccagctgtcactggggccaagtaggccctctctgtggcctgccaggcctaggccagattggataagctttttttttttttttttttttaagacagagtctcattctttcacccaagctggagtgcag

SEQ ID NO: 55118 - DNA, 1235 bp, Homo sapiens
aagtgatctgcccacctcggcctcccaaagtgttgggattacaggcgtaagccactgcgcccggcccacagataagcctttttataaagcattccaagaacagtgcccctgattttgaacctagctcaacacctgcctctcaaggttaatgagcttttctgtttctttctcctccatccttgctttattactgtgtacacgtggcagcttcctggtccctcacaatggtgactaagagcaaggactctgatgtgagactgacagtctcctgttctggctccagcatttcctagttaagttattttagacaacttaatatctgaaaacctcagttttgtcacctctaaattggatataatcataatacctaaattatgaagtattgtgtgcaacaaacaagacaaaatgtccgtaaaatatttaacacagttgatggcacattgtcagctctaaaggaatgtgaactgagataacagttttctccctagttatctcttcctcctactcttccatcgatctttctctttgaatgtgcaagtctcaggagtaagggttcttctatcattttcttgtctctgggagaagagataatggaatgatggaatgaaaggaggcaaatactgtgtccacccttcccacctaccatcatccaggttagtttcagggatccggatataggcataagtaattgactatcagcctggactttcccatacggtccctaaatatccagccaggtgttcggactaccagtttccacattgcaccacggcccctctctgtgggtggacactgtgagtcacaaaatgagtgacttgcttcagattccggcgaccccctgacaggcagcccaagctgcacatcggcttcaggctccccgagagcccagcccaggaagtctcggctttctttttgtttggtttccctccgagcgccagctcctaggaagggcacgtctgccacctgctggctgtaggcagcatggcacccggctgtccctcaggctccagctggagccaggatgcgcaatgctggcccaggtgcaggtcctggagggcccttccttgctggaccccgaggaaggatgtccctcaaagtcttctgcccacttcttaggacatggcccaccctgttcggctcaaagagaagaattcgtagggaatctccaaaggactgggtggagacaggtctagacagacaggccctgccctgagaaaggcaaggcagggagcaaa

SEQ ID NO: 55119 - DNA, 1095 bp, Homo sapiens
gtaaatgtttggggttatactttctctctacaaaagcagccataaacaaacaggcatggttgttttccaataaaactttatttacaaaaacaaaactgctaggcttggcccaagggcccttatttgctgacccctgattaaagtggaagagagcatactccagttattaaatgagtaatactttctttttcaggttgagtactgcatattaaaggaaatatttatgtcattatttatttattcagcaaatctttttgaggaatgccatgtgccaagctctatgctaggtattgggtaatacatcaatgacaaaacagacaaaatccctgcctttctggaggacagagtctgatgtgagagacaggtgacatgcaaataaacaaatgtaaatctatgcactgcagtaaggattatggagggaataagcgggtgcagtgacaaaacagtggggatagggaaatgtcatattgatgggatatttcagggaagatgacacttaaactgagacctagcgaaggtcatagaggggggcttccaggcagaggcaacaataattgccaaggccctgaggtgggaggaatttatcttgcgccattttgaagccaggtgtggctgaagcttagtaaaggggcaatgggagggaggagtatgggaggagatttgtaggtcatggcaggtgtttgcattttattctaagaacaacgagaagccactgaagggttttaagcatctgtccatccccaatccccaggaactgtcacctgaagaaatcacctagatttcagcatgaattccgaatcctatcacagctatgtgacctccgagtccaaattttctcatctgtaaacaaggctgatgcaagcctcttcatagggctgttataagtatgaaatgcagcaatgtgtgatcaggcagggagtagatgaaactcactgcacctgacgagcacaccagtacctgggcagccgtgttccaaagcaaggacaggtgcagacaactgacacgaacccctgctgtggagaaggacaatgcttcagtactcagcgcgcacaggtggtggtggtggagggggtgtatcttcaaatagaccccatt

SEQ ID NO: 55120 - DNA, 612 bp, Homo sapiens
tgccaaagtcaagctgattgccaacactttgtgcaactcccgccaactctatgaccacatgattgatgacagtatgatctgtgcaggaaatcttcagaaacctgggcaagacacctgccaggtcagagactccaagtggtgcttgtggtaggagaggctagcaggatgtttcactaggcagaggacccttagagccctgggctgggagctaggttcagaggtccacctgtggtaaagctaagacacaggtgagctgtgtctgccccctggccctctggtgcatctgcatccgcatcaacccaggatgactcagcataatgaccacagaggtcacattgcctgcactgtctaatttaactctcacaacacactggtgaaggtgatgtcatgatcaccattttacagatgcttagagaagttatcttggcctatagcaattgggtggccagtggcagggctgggatttgaacaatacagtctgcaggacaccaaaggggcttgtggcctcagtgtagggcagcctttctgagaatcccagtaaacagggaactgtccagaagaccagtggctagaaggagaaagaagaaggcctagagctagagatttcacagt

SEQ ID NO: 55121 - DNA, 707 bp, Homo sapiens
tcacagcttggagcaggcaatcttttgtgtctttttccctattcagcatcagcagggaagacttgattagaaactgggtctgtctcttctagcagaactctcctttcccaaagcctcttggtaaatgacatttaccaaggttcctctccagctattacagttgtttacaagcatcgtcattccgattggctggagcctgggaggccccagcttgctaaatatttgaataccataagtgttgtaaccacaggaccaggacagcaccacaataagcaggacgcttttggtccatgagggagaaacttattatgcgctgttcattcttatagccccagggtctcgaccagtgtcttgcccatagtagtcacttggcaaacatttgtgacatgaataaatgcaattgaacacctttgtaccttgatcagcagatgctgtcacccttagggccacactccttatctatttaaaaaaaaatagtatgctttggcaaaacaaataaaccaaacaaacttcttatgcaagccaggaaagaaaggagttgcaggtagaagtcaataaaaaggttacagtcccaggtgaagtaggcccagggaaaacttttaaaataacacaactgtaagtgagaggttgggggttagaaaagagtttacctcactgctcatcttagcaatctgcagggagtgcagaagcctagagtcggctgttcc

SEQ ID NO: 55122 - DNA, 606 bp, Homo sapiens
gtctctaccacccagaattagatactttacttttccaggcgtatgacaaagtgatagcctaatgatggaaaaggtcccatctaggtctagtgttctgtgagtgagagcaaaggccagcaaactttttctataaatgaccagacagtaaatattttaggtttggcaggctacaaattctttgtcaattattatactcaactctgcccttgtagctccaaagcagccacagataatccaggaacaaatgtgatatgaatgtgttcaaataaaacttatttaaaaagcaggcagtgggctggatttgtcactgaggttgtagtgtgttgacctctggtctagagtaccagaatcatctggaacagttgtttaaaatgcagattccaaagcctcaacagtcatctaccacttcaaagtatctgaggctcctgatgaggcttgggaaaatatcactgctggtgactcagagcagccccaagttagaggatcacgggttaactaacagtttagggtaaaggaccagcttttagaggttagagacggaaaatatttttggatatttgcatatctgtttgtgagttgcagataacttgttatgtgaatgctttg

SEQ ID NO: 55123 - DNA, 2566 bp, Homo sapiens
agaatctgtgtgtttgtgtgtgggtgtgttgggtcggggtgaacttgaatccgtgtgtgtgtgtgttgtggggtcagggtaaactggaatgcgtgtgtgtgtgtgttgtggggtcagggtgaactggaatgcctgtgtatgtcttttgtggggtcagggtgaactggaatgcctgtgtatgtcttttgtggggtcagggtgaacgggaatccgtgtgtgtgtgtgtttggtcagggtgaactggataactggaatccgtgtgtgtgtgtgtgtgttttgtggggtcagggtgaactggaatccgtgtgtccgtgtgtgtgtgtgtgtgtgtgtgtgtgtgtgcgtatgctgtggggttggggtgaactagaatccgtggaagtgctcagtctctcccgtgtttgactgactcccggccgcatacccagtccctgacacacgggggcgcacaacaaatatttcccgaaagatccaggagcagcatctccaccagcaagctgggctgctgggtgggtacttccttcaaagctgagggagcgtcctacgcccacgcgcgcaggagggcgccccccgcaaagcaacgtctaggagaccacagtggatgccacagcgggcccgaagcggatcagccttgtggggtacgcatgctaatgtaggcgtggagtcccccagggggacgccagcagttccagctgggatccaggtttcgctaggggagagcctctggctatgggaaaggggtctccgagttgatgtgaaggcccaggtcgaggtgtacactgggggcggggaagtggaggtgaccacacgagcgccccatcactgagcgccgccgcgaaatctgcgctctttgggtcacttggagcgcggccagtttggcagatttgtttttttcccggaacaacccgcggcggctcggctgtcccgggaaactgcaaactttgctgtgcgcgttctcccgcgcgcgggctcaactttgtagagcgaggggccaacttggcagagcgcgcggccagctttgcagagagcgccctccagggactatgcgtgcggggacacgggtcgctttgggctcttccacccctgcggagcgcactaccccgagccaggggcggtgcaagccccgcccggccctacccagggcggctcctccctccgcagcgccgagacttttagtttcgctttcgctaaaggggccccagacccttgctgcggagcgacggagagagactgtgccagtcccagccgccctaccgccgtgggaacggtaactgcagcccccacctcggccggcgcctctccagcccgccggccgtgcgcgccttgcctccctccttcctgccggcttcctagttcccccctgcgcccccagcgtggtctaggggagcctggttgagtgggactgagtggccccgacggcctgcgctgaaactttgggaagagggcccgttccgctctctccatcgcttgccttgctcagcttgtcctcccttccctcctagccggggggctaggggacacctcgtactattcgagatttaggagaggagggctcgtgatctggcacagcggctaacagcgagggctcctttgcctgcgttccggtccccaccccttgcctgccggcggtgggacctcaaccctctctctgttaaatgggaaccacggtgatccccgcagactgttggcggggatggacagagttgattatggtacgcgtttcgcggcagtggctctgtcaagtctgagtacactggagctgagcgtccttgctgcagggctcttagagggaccttgaggaggtggaaaccaggcaggagacatttagacgtgtggagtgttaggctccaggtgacagctttgcggtttatggagcagtaaaattacttgtgggtgattgtgggtgtatcatttccagatctttattcttgaacttctgggctcctgggctagttgacgtggccctccctgttgtctcaacttacaggctatttcctccttttgggtctcgccggcctgaccttcacccttggtaccgccattgcctagattcacagtccaccttctgccacctgtaaactgtgtggctttggacaggttacttaacgtctctgaagaagctaaagtttctgcaatagcaaagtaaaggccctggtctagcagtgccatgagccttgggtgacgcagcggagcgcttgagtgcccagcagagcctccctttccccctcccagctgctagaggcaagagggggaggttttcaggtcttctctgtgtgccctttaggaagatttttatttgggcaagaagtgagtcacaaattgtatgatgtcacttttcaggggaagcagctgcagtccatttcccccttcatgaaagtaaaaagttcagacaatagctgggcagtgacttcttacccagctgtgtaccagttgccccaacatgtgggctcctgttcaacatgtttagaaataatcactacaggaactttttttcagtctctacaaaatctttttaaaatatggatgtggtttttaaatatcggcaaaggttgacagttgcatatta

SEQ ID NO: 55124 - DNA, 894 bp, Homo sapiens
atgaccctctgattccatgagtcaacattttgagcattcttcagcaagtatgctaaactcccttgctgccttccttctgtggcattttcctagcaaaaatgctaagctgaaatgaaccccaggccctggctcccccatgcctgctcctgaacagctgaaggccactggaggaaatcacacatcaggactcttgccaaatttacggtcaccaacctcaatggacccacactatttccagcattgagaaatacttgcaaagtaaggaaatacagtatctaaggaaggaactctggggactccaaaaagtaaagattgcatgctggtagaaaacccagcaaacaaaacaaagaaatagatcagtatagtgagaaccaagtgagagagtaacttggaagcaaagagaagagaaaatttcagcaagggttggctcgctgccattgcctcttctgagcaaagttctttgtgtcaggcctctccctgggtcaaaagccagccaatagaggggcagtcctagggtaaggtgctcaccctgatcccatcagtagttattcttgtgcaaagttcaacccagcttatttccttttgcaggcagttgagagagtggcagtttcagctgctaatggacactgatctcagcagacatactgaaagaacgaggaagggtccagaatcttgaggtcttggagaggctgaagtgaagaaatgtaaagcatagaaggaagggagattgcagttggaaagtggagcaccccagtcaaagttatcgaagttcatgcaagaatgggtagttccaaggtccagagtgtaatcataagaattgaacaatgagaacacttggacacagggtggggaacatcacacaccagggcctgtcgtggggtggggggagggggg

SEQ ID NO: 55125 - DNA, 2590 bp, Homo sapiens
tttagatttgtattcccaaatgtcttcttcggaaatgtcttctaacatggcaaaatgattttatcattcaagaagtattaatcttaagtaaactgaaagtccatttcttgtcacaaacaaaaagttatagaattattttgctgagaaaaaaaacaaaggtaacaaaacccccaccaactcaatgggaatctgcagtgttggtaatgaacatattggcaagctacaaaccttgtacctgacaacacctgctattccatttataccacaatgaaactaagataaacctatcacaggagtagcaactgtgaagttctccattatgggtgctatttcattcaaatatcttgtccttttccagggcttgattcataaaaataatacttcaaaaattaagcgctaatggcaaatataggttcaacagcttaatcttagaacgagatttgtaacattgttatgaagctactgtcagttctttcaagtggacaaccgtccaaataattcataaatccaaccacagtccctggacaaagggcttaacaggtatcccaaacactaaatgactatctaacaaaactagtcacaacataatcaaagagatgtgtaattcgcaaaaaactgcgaagtcactgccctcatccacgactagtggatactcaaccacttcagtttcccgcgacagtccatgatcttcctccagcagcaatgaacaatccctgcacagtgaacaaaaaaagttgatatgtgaaaaaagttcaaatatgtgaaagagtgggcttgtattgaggtctgactccgtattgcacccatggttccgaaggtggccagccctctgtccacctgactcaaaacggggtcacacgccagcctctcccttatcttttggcattagaggctgggaggccaggaagcggggccttaatcatctccaggttaagcatagcgagctccaaaaagccctcagagtcctgcccttctgaagactctaaggcccgccctcaaggaccctcaccgccccccacctgccactcggcaccccaagggagccgctccagctgcatccgctcctcccggcacccccatctaaaaatgtgttcgcgcccgcactttcagcactcccagatgacaaaacgctgtgtttgtgtataagtgaaagccactcgcgccagtcacttccagtttacaaagccttctctctggaggttatccctacccgctttacctttagggtcttggcgggaacaagttcccgctgccagtgccgtgtcgaatcggcggatgctgttcaaagagagagactttaaaaataatttttaaaaatacattgcccttttaagtcctacggatttattgtattttatttgtgttcgaaagtccgctaattcccaatgtggagggttggggatgtttcccttagcgcctctgggacgctgtccctaaggccttattccatgttgaatctgacgctctcaatgtccaggctcggctgcggcgtggggaccgaaaaggggcggggtgggtcggacggcagtttaattacgtccccgggaactgcgccgatttggacttttggcacttggacctatgctttaaaaagaaaaaagtgtcattggcgtggagtggggctagtggagggtgaggtgaatgcgccgtttggaaaccacaggacagtgaacgtttcgtctctcccagcgagactctcccgcgggcccggcggccgcatcgggagcccggcggaaacatggcggcgcccggaggccggggccgcagcctctccggcctgctccccgcgcagacctcgctagagtacgccctgctcgacgccgttacccagcaggagaaggacagcctggtctaccagtatctgcagaaggtggacggctgggagcaggacttgtcagtacccgagtttccggaaggtgaggggctggcgtcggggtgggggcccctcccggcacctccccttcctcggggacggcgccctcccgcgaagcggtgggctaggcgggtttgtgccgctggcgccccggggagtggcccttcgcctaacttgggccgctgttcgcgtgttctgcaattcccaggggtccccaagcggccaccgacgggggtttccctggcacggggatccacatactcgtctgtgtatcctgagttccgcccgcgcctgatattagccaagtggacactccgtgaatatttagtgtccccggtggcaatgattgcaacgtccacaccattctgtccattcaatctggttccccagtgtcttctggtcatctttctgcatcatcttgacatttattgatcactttttcatgtatcacacacagggtttttttttgtttttttttgatacggagtctcgctctgtctcccaggctggagtacagtggcgtgatcttggctcactgcaacctccgcctcccaggttcaggcgattcacctgcctcagcctccggagtagctgggactacaggcccgcgccaccacgcctggctagttgttttgttttgttttgttttgttttgttttgtttgtatttttagtagagacggcgtttcactatgttggccaggctggtctcgacctc

SEQ ID NO: 55126 - DNA, 568 bp, Homo sapiens
aatgttgctgattcctctgtgtgagcctaccaacttgtatgcacagaaggacatgtcccacagcgatcccactacacccactccttttccagcagaaccctgacctttgcttcttgttataagccagcataattacaagcagcagagactaccaaaaactctacacacacgtgctctcgcactcatacacagacatggagctgctgtgaacaaactgttcaagtgcattcaagttcaagagcatgagtgggagaaggggagagagattttaatctttggcctgtcacatgggagaagaaagaaaatatcacgtcctcatgcctgtgtcctgtaatgtttatcgtctgagatcacaggcaacgaatctcctccctgtgtcccgtttcctcccccagccctgggttggggatgctggcttggaattagagaagacaggatatgtgctgatcagtagaggaaaagtgaagactgagttctagatggagcctcaggggctagaagatggggcctaacctggggtatatgtgcactttgacccactagaaattatgtcttaattttttatgtc

SEQ ID NO: 55127 - DNA, 693 bp, Homo sapiens
attgttaatatttcatgaattttgtgagctggttatggaacacaggcattattaaaaattaagttatgtaaactcacaagtaaataaattgtattaaaaactaaggtaggaaatgtccagaactcatcacctctgaattataatacattttgctataatctgtgctcaagttcatttacgtctattgcaccgttaaagtggagctactctgtgacgaggcactcttgagtgtctctccccaactccatgtttaatgagtcaacttggcaacttgaaatcgaccatggtagaagtatggtatttacaccgtgaaaattggcaaatgctacaaattggagtttttattttctttccaggcagttgttaaacatttaccagcactgccactggccccagccaaagtaatctaaactctcatagccctcctatcttttctgctcagtgaatgggcatttcgcatttgctgcctgagttaccaggtacatttcgtgtgtgtgcttctatgtacacgcatgcctcctccccttaactgggttattgccagctttagaggcagggactgtgtctccttcaaccttctggaggccctttccttaaatgactgaacaaaatgtatccatctcccagcgtgaagcccagcaccatcctcaaacttcctggcacttccaaggggcttgcccactcaccatctcc

SEQ ID NO: 55128 - DNA, 620 bp, Homo sapiens
ttatcagaatgatttgaagttcaaattaacatcagatgactagccaaggcacccccatttatgttataaaatcacattttccaagctggaaaggatcttggagatctttgagcccaatctcctcatcctacaaatgaggaaaggtggggagagcagcgagttgaagagggtcatcaaaggacatgctgctggttggtaaacagagacagggccagaacccaaccaggtctcctaactccctatgaccataattctttccactacagcccgtccgagtttccagataaccaaaacattgacaaaaccctgccgatggcccaccaacttcagtcaatatttgctatgacaaaattccagcagaacctagagattttgaaatctgtattcatgtgacttgatgtgttcaactggaaagagacaatttttgacttttctctatgtgacaaggctatctgttgatttaggtcacccacagtgagtgttttgtactctcttaccaaattcacactccataagtgttccataaacatccagcccatttctcctgcttcttcacccccagaaagaacccgcatgacaaatactttttggttccttgaggtgaattgaccaggggtagc

SEQ ID NO: 55129 - DNA, 554 bp, Homo sapiens
acattctcctaggaggcctggcagagctagtgcacttgatccaaaaaccactggggaacgggcatatatcctccatttacagaatggggaaactgcgataaagagccactgtgcccaaggccgcacactcagtgtaaataacagaggctgacagaacccaccccgcgcctcagtcttccaggctcttccttcgctaccacataagtggacttttcttactgtctactgtggctatccaccctgcccaaggtgacacgcgcccagggaaggaatgtaatcaggaagtcaactcagctgcattccaaagccaactggaaattcctttcagatttgctgctggtttttattatactcagctattaatcccctatcagaacaggttatcaggatctggtagcagcttcttacttattaatctcaacacctctgggaaacagactgcagaataggttagttttgatgaacaagctcaccattctaatgtgccttacactgtccccactcactccacccctgtacctgtgccatccctgtacctgtgccatccctgtcct

SEQ ID NO: 55130 - DNA, 3038 bp, Homo sapiens
gttgtgtgccaccaagaactaaatctctaaaactggaacttcagatgacagcagtagcctggtaagggagagcccgttcacagtagtcctttaggtgtctgcacaaagcaaatgggtttctctctgcccatcattgtaagcctgtgacccttgggacaaaacactttgcctcataggtgcatcctaggaagaatccatcctactaaagttgccatcaactggcagagcactcaactggcagtggtgtgacctgctgtctccctgctctgtgctggagtggagcctctgtgatctgcctctgccacaggcaaagttctcagggaaactagagaaactggactgacttgggggaaccatttatgacaccaggtaaaagaccatggaatccaggctcttcagggccatcgctgtaggggcctacttcctgtcttagttcaggttctagaagcagagcctaagacagggattccggggcatgtgatttctccagggagcgcccttcaggaaaaacctccacgagcattagggaaggacgggccaagcaaggatggatcttgggtaaagccgagctgtgacctgaggcccaagggccgctggggcatttccacagggcagtcacaccgtccttcagagaagggggctggcctttgtgcctcctcaacagttagcctctggctgcagtagcagggctaacctcccaggtcacagcagcttgggacaaagtccctgcctggtaaaagatctggctggttctttcaggggaacgtaacatctgcatgactcatgcgtgcaaaccacccacacgctaggaatctgaagtggttgctcctagaaacagaaataaacgaccatccagtgatgaagagttttccccagcaaagagacaactccagggaagagctttccagtgtgagtacagagattgtggtttaaggtaactaatgatttgcataaagccaacttccatattacctgacacatggtaaaatatggacacagtgctttttgagaggtagagaaaaataactcagtacacaactttactgcctgtaaaacccaacaccagaaaattccctccaataagaatcggcaccagacaggcgttgaaatatttagcatcttctgagatgtaattactactccgctgtgtgcatctgtgtttgctgtcccctccgaatggaacaggatgtgatttcactgaattggcagatttatccacctggcttttgagcagttggtcatttttcagcctggtggtgaatgcctttccccatacccccagcacacaggcaggcaccctccgcccccagctcccaaatccaagagaaaaactcaaagagaactcaaccgagggtggatggtttttctgtcagttacctgctttctgttccttccagaacctacaacggccgtgacactgggggcagatcaggagtctataaatgacatatgactaagaagcagagggataccagctgcttattgacaaaatgggtggctcccagtgaggcgtggaaggacagaactggcccagaccagctgggaggccttggcacatacaacagagcctgctgggtcacagcacagccattgtcatcctgtgaaacgtgaacctgaccttctacccaacaagttaatatctcatatgggtttctccttggtttcttgcaggatttatacttatcaaggtagcactgatttcaaggaagtagcttctctgtttctttatggctgaatactgtgtcaactagtggtttgcccaacccagaaattcagggtgatgagactgtgccctttagggtggggtgcacccttcaaactcctgcatcttgtgggcagatgggcttcagtcccaaggagttagcctctttggggtacacatccggtgctggggccagggaaagaatccaggttccctaatcacacgaaaaaggtacctcctcctctgccaaagttcactgtcaactctgtcccagggtcccaatagcgctaacataagcccccctccaccagtgtagaatggtgggtcataaggtgctggcagggatgtggagatcagccagctcaggaggcttcacactggctttggcttacagtctttaaataaaagtaaaatgtaaagatgaggcagctcaggtcagtgcagaggggagacctgactcctgctcactcacccacccccgtccacaggccccaggggagctccgtgggtgcccctggaatccctcagcactttggaaagcactgagccaatgcaatcctccttctgcacacggagagactcagacctgaaagggaaagccacggggggtgggtcctgggtccttctcgccaccctatgcagttggcctcctggcccgcacgcttcagaaggctcctgttggagccctgtcccttccccaggtcaagtcctctccctggtcactgctccacaccaagtgccaggcctggtttttattgttctcagactcagttcctgcctctttatccccataagcccaaggccccctgcaagcccttttccccacctgtgtgtgttctgcaagggaggcacctgagctggggcagcgactatttaccttgttgaggcaaaggacaagcgtgacttcctttgtttgatgttgctacgttattagaaaaaataaaaccacaggcccaacaaagaggtttcagatatgactggatggcaccatctcccagggccatgggggttgaggccagagcccaggctaggtgatgagaaccaccaggacacaaagacagcagactctgtgatgtcgacacagaaaaatgacaaggggatgacgtcactctcctggaagcttcggagtccacctgcctccctaacgaggcatttcttaaggcctgaaatggctaaggcctcaccccgctgagtccttccttttcttacgtcctgtgctctctcttcgcttccccgccctctgctctccacctttgccctgtcacttgtttccctgctccctgctccttgcacccactccttctgtctgtatctggcctccacatgtctattctct

SEQ ID NO: 55131 - DNA, 610 bp, Homo sapiens
gcattagctcaggtgagttgcccagaaatagctaggaaaaggtcatgctctccttcttcagagtttcagcctgttgtcctcatatgcccaatttatgcaggactttcccctacatcatcgaaagaatgtgtttggcaccagggccttggtatcaagcagacaacatatttcttactttagaagtgcaactggtagaataaagagcctgagaaccggaactgctgccagaaatagcagggcaaattcacccacttccaagaaggtcactcagtctcagaacagggtacaggcagatcgaagcaaattcttggcaccgcctctgccatatctgcctgttgcataatggacggcccttagttctcttgattgagagcactggtgttgacctggcattttctgttgctctctgttatatcactttccagtccatgtcaaaacaatcactattgtcagtgaccttccctaataactcagtctctcttctgtatttaacagctgcctgttgagaatcctatttttaacaaacaattataacctaagagctgtcatctgtcaggttttaaatgtttgttaaaaataggagtcccagacatgtagccattaggcaaca

SEQ ID NO: 55132 - DNA, 1099 bp, Homo sapiens
tggctaaacttttcgtatttttagtagagatggggtttcaccatgttagccaggctggtctcaaactcctgacctcaggcaatctgcctgcctcagcctctgaaagtgctgggattacagatgtgagtcaccacgtctggcctaatggcttacttttatataaaagaatcacctagtattaatacaatagtgaggtccaaaatagtctaacagtgttagcttattttaacaaacaagagtcaccagaatatcaagttaataatgacaacgatgtgagaaatacctgttccatccgttgggccatctctttgtgtaactgctgaactgcatttttagctgtaacgtcttgagctattagttgatctctggaagctttaacttctttattaagttcttctattcttgattctaactgtaaagaaaattatttccaaattatttttatagctataccaaatacaccaccaatactgcaaataaatataaacaaagtaaataaacataaagaatacaatgaatatacttcagctattgaaataaaaacttttagcaatgtttctatatctcactgtcatttagtaaaaatctggagattccattaagttaaggtatctggcaacccctagaacatccacaaaggaataacacaaagaaatacagtagagtcccgccttatctgtggcttcactttctatggtttcagcaaccttcagtcacccacagttcaaaaatattaaataaaaacttccagaaataattcacaagttttcaattgcatgccattctgagtagtgtgatgaaaacttgtgttgtctcactatgtctcactgagactgtgagtcatccctttgtccagcatgtctgcattgtacacactacctgccagttagtcgcttagtagccatctcagttaccagactgactatggcaggacgacagtgcttgtgtgcagcaacacttagcccttaattaataagtgagtttacttattagtggccccagagtataagaatagtgatgctggcaattcacatgtgccaaagagaggctttaaagtgcttattttaagtgaaatggtgacttgaaagaaaaaaatcat

SEQ ID NO: 55133 - DNA, 1977 bp, Homo sapiens
atttccacaggtaacaagattatcaagtgaaagaagtaggattctaatccagatgttctgactcgaaatccaggactttttcctctaaacaaaatcaagatgggaatattaggtgaagttgttaaactgttaacagctaagcaatactcacacctgcactgtttcccaagattgctacttagggacacgtagaagggtttttgttttgtttttgccatttttcattactgatggagacataaatctgaaaccccttccttaccaaccaaggtttatgaaatgccttgacgtccttgaaagacaacataaagaacagtatccaccactccaaagaatcacttctaaggaacttagaatcacagtaatggaagtgtttggaagagggtaacaagtcttcacaacagtaaatataaaacacccacatacagtcaacttgagacgaaaaacgaaataggcgattgagtctaggaaagattctcgagcaggtagggcttggctgcagttcacacgcagcccaggcaatgggctcgaattcagacgctctcgaggcacagcccccacgacccccgctgacccctctttgccacctccaaggtcccggaaccgaaggaggaaggcagggagaggaaagggcttgaaacccgttccccagccctccccttcctccgcgccctcaaaggagccaggcggggagcccgctcgacctcgacctccacctcgcactcgccctcgcccccgccacggaacgtgcaggaaggagcggaaggctggcagccccaccgcaccgccaccgcgactcaccggtgtgccccgagtacccctcagacacttaccccacttatccaagcctcaggccacgccctaacaaggctgctggagctctggctcaggggccaacttttccatagcggggtccaaccagccaagagtgggaggaaaagaccgcggtgagaaacacagccgacgcctcactcagcggccgtttccccaaacccctgcggagctgacacatcaacaaagatggcggcgacactgaagccggcccggttacagctgagggggcgggggctccctggaggaaccaatcagcgcagcgcgggcggggtgacgcagcacaccttgaggtcctgggtaacctgtctgcagtgggctgggctggcggagctcacctcccacctcccggcccaggaggccccaccttgcggcccgagaggccccgccccgcactccgcctggctgggcacccacgcctccgcgacctggagagccgggtctcctgccctttggtcgggttcttcctttcaagctcctccggacccacgcagcctgtttctttctgcaggacgctcttgttggctattactcctcctcaccctttggcctgcatgagtcagggacataaagcaataaaagagaatttgaaattgtggcttcccggctctcatgcggaaaccttgcaccttacgtgggcggagtcggctggagcaggctacgatgggggagacctctgggggttccataacagcgcgttcgtgtcttcagcgtggcgctgctgccattgtttaataataaactgtcggtgccttcgtctctggcttcaagctgagcgcattgatggtaggaagtgtcctctcccggctgagtaacctggcacgcagcatggcaacaaaaagtgtattgggtacagttgcctcgcccggcccagagaaggaaggtcagcagttcagtctctggaggtttcgcaaacctcctcagtccggggaaacgatgttctttggtttaggtcttacacatatctcatgaatgaaaatagctgatgcagacgattctgcaatgtaagaatttgtaaagcaaaacttactactgttctgttaagcgtcttcgatactgttggcaaaacacacacacggaggtgtaatggcacctcactcctccttaaatgaaggtactacactgaagcacattttgcagttaaag

SEQ ID NO: 55134 - DNA, 552 bp, Homo sapiens
aggggccaactctgtccagatcagatcaacccagggtgggaagtggggagagggagtgtatcatgcttggatacactgattttgagtgaatctcctaagtgaagaggagcaaaatgaaccccctagctcagagtctagcgatcttgtgtccaatccatcaggtactagaaaaatctaattccactgcattttactcagtgtgataaacatttggacgctggctgtcagccatgacctgtacttagtgatgtgaacccaaggatgactaagagctcaggcactcagaatggctggaggtgactgaaaaaatacacagctatgaaaagccagccctaccaccccaggcttattcatgcatctcccccgttctgtgacaatggtggactgctaaccaccactacagccctcgcagtcaaatgcaagctttagagtcaaacgtagggatagtctgttatcacagcttcatgagaacttcttggacagtccagaaattaatatgaaggaaaatgaccttcccatgattcctccatagggtgaggggtggtggggagt

SEQ ID NO: 55135 - DNA, 730 bp, Homo sapiens
cctcaaagcccaaactcttgagtgcttaatgttttactgccttgatggagctgctgggaaacgcacacagacacgtacactgcacaccatgaaccccaaatccttaacaccattaaaaaaactcacatccccttgcttgtatgggttaaacattagtaaattctcatccacagggtccaaggccaatctctatgcactttgttcaggaacttcccctcgcctcttatgccctacgaaactctgtggggttcaatggcaactgacaacccgggccaatgcacctgcgcttgagagcggccgcaagtgcagctacagctaagtgaccactaggtggcactacatgaaaatggatatcacttcctgccacagggaccttttccacgcagagctatgctctggaataaaacccagattagaaagtaaataaataaaaggaacaatatatataaaataaaaaataaacataaatataattatcaaataatattatacatctggaattgagaacaattaaacagaatcacattttcatgccttttcttctccaagacctcaaagcactgtgagatgctagattgtttatattctgttttaacctttgttgaatagctgatttgtcagctatttgttaacatctttgtggactaaaatcagtctacagatgattctaattcaaaaaataaaagagaaaaaaatgagagtgagccgattggccaggggaaacggactt

SEQ ID NO: 55136 - DNA, 2147 bp, Homo sapiens
aagcttgatgggcgaattcctctttggctgttcttacctttatttaattattcagagaaaaagtgtttttttttccccctcaacttaagtatgttcacaataattgtgcattctaaaagcactgcatttgttcagggtcacaggcaagggacaagttcctaaaatatccaaatggtaaaatgtctccctctgattgatggatgcgaattgaggaggaaaagaaaaaacaaaaaacaaaggaaaaatatctcctgtgcatacgtgtggttcattcagagaataaagcaaacacactaggaaaataagagctgtaattcccagggcggcaggcaaagggatctgaaaaaaggcagagcgaatgggtctcgttgataatcattgctccaaagccaagtcaccccttcacaagtcacacatcagtgactagaccccatcagtaaactggtcgtgctgctgctggggattgcatacatagcttctgatgcctggtaatggcagatcgagaagagattacactatgcactagaatctggcctccaaaataaatccaggccattcttttccctgagacagtaaatagggtgaagttaaactccagtttttccatgggtaccactaagttaggttaacccaaggcactgggattcattcagtctgattattgcactgaaaaatacttcctagcccgtgtgaaaaatagggcatctgaacaggacagagattatgatcacagttttacaactgtgtacagcgctttgcttctgaaacataaaatactgccatctggaggtgttccgagaattgactaatttacctgtcttggttggttattattttccccaaaggttttatctgacaagccatcagcttttagagtctattctggtgaatttggatccagtaaatgagagaccagtaaaatgtgccaatgtagagctggggtcagagtagtgcattatagactaagcaccaaaacagtctggtgaggtcagcagatgctgcacctggaacctgatgagtcgttgttttcccatctgcatgatttgacttttctcttgaatgcttttctaagaagctgactagtaaggccaaggcttactttgtctaacacaagcatttggaataaaaaccacagtacgtttaaggtaagaggggaaccctttccctagccaaatggcctttgaacttagtttgctataagggaaaaagtcagtaaaaagtaatttcacctaaaccctagccccaagaattagtgaccacgagcgtatggcctacaaatgcagctggcatcatgttttaattgtgtccttacccgcagcttttcctcggtcttcgtagattgcttacagtcgggatgccaaacggtggagcctgagaagacagaatgcactactaagagccaggaaaatggaaagatacaaagtcctctgagacagcacttctgagaatggctcctatccctctttccccatcataggaaggtgttattgctttatgtccaagtgaatcataacacaaaaatcagacatgtccaaagcctaagtgagttttcctgatctagcccaagcttgtttgataaaggtcataattctagaccacagagaccaccaactgggcatgagtcttttgatgcaagagatatttagttcttaatcgtgtcttgttatttttaaaccttattatcatcctttaaaaggaatgcctgagtgcttactacaagctgcatttaatttaaaaaataatagctattgtttatataacatcaaaacaaccaagcagtttagttgacgggaataaagtcaaccagatagtctatgtccagaagcaagacttactgaatttttcattgattcaattatacatagtcacctacagagaaatgagaaaccaactagtagaaagggtgaaagttaaattataaatccaaaaattgcctttggccttcaatcttttaagtaattttctaaaaagtctttgcttttaaactagtgaagtaactatttaggtgttattttctgttcctgagtcaacagtctcactttctcatattatgaagcactttaatgcgtggtaccagcatcacagaattaaacaaaacacttatctccaatagaagctcttataagaatccaatgcctgctcatatg

SEQ ID NO: 55137 - DNA, 663 bp, Homo sapiens
agtcatatgacatggagagaggatgaagtaggttgcaaaacaccagatgactctaagccattttctttccaaacacttacctagaattctaaaggggtatcttcaggaagttggaccccagagggagagaccccaaatccaatggaatgtgacattgagcaggctattaagtcggctggtgctgctcagcgtgtggtaaaaaatattagcatagttccagggaaggaacaatgagaaattcatcatgcttctggcttcagacaactgctttccaaactcagacactgccctaacactcaaggtcaaaggtttcacatcctttcctttcttaacaccagaagataaatatttgccttcaagttcaacactcttgaaatctaactccaattggataatttttgtctcttgtgcaagggcaaaaacttaaggtttcttcttactcatgacctcattcctggcctcctttccaacacaatagcatgttggagtcaggaatgcacaataacagcaatccaaagaatcgctcccatgccagctgctctgagggaatcagttctcaatacacatctcctagttgccaaatagtacaattaagtgcatttggtgggaaggaatagggcagtatcagataacataacaagtgccctttatttaatatcttag

SEQ ID NO: 55138 - DNA, 2801 bp, Homo sapiens
aaattgtagaacaacatgcataaaacggtcctatttgtataaaagaatacatgccctcccacaggtatctatgtgcaagaaacaggagcaaagcaagatacagaactctacatcctatatgaaaaaatttacatgatccaaccccgtatttgtaagtatctgcatgccagtgacactatagacccaactctcaacaatagctacctctgggagtgggtttttttaaagtaatgtgagcttattgtaaataaataactgaataagtacacttctttgtacttctctgaaccacatgcaatgggccagatagtacatattttcagctttgtggactacgctgtctctgtctcagctactcaaggctggtatgggctaaagcagacctagagactatgtaaatgaacagacgtggtcctgtgccaataaagcttagggagtaagtggagaatgtttactttttacctgataccaagattggcagcccataggtgaaacctggcccactacctgttttttgtaaataaagctttattggaacagaaccatgtctgttcatttacatagtctctaggtctgctttagcccatacgtagctgagacagagacagcatagtccacaaggctgaaaatatgtactatctggcccattacatgtgattcagagaagtacaaacaagtgtacttactcagttattcatttatttatttacgatgagctcacactacttaaaaaaaaaaacttttagaagttgtctgctcagacagtggcaggggatgcctggacaatcatcaacaatcttcctagaagcaggtgggaacttgggagtttttaggatgagacaagaaaagctccataggcatgggaaagggaagttgtttaaaaacaaagtgaaataaaggtttgagcaaaaatcttttgaatatctactcaatccccacacaccctgcctccctgtaatggctttaatattccaaaagactttgaaagatagctttggtttgtacagcaagcagagaagtagttcaagaggcagcctgggggaggtgcagaggggatagagaagcactgagctgctctgaggtctacttttgccttactaaccaatgggctgtgtgttcctaggaaaatcactcaggttttctgggtctcagtgtcctcaactctcagaggtttagactagattaaatctgtggaactttcctgctaatgatatttctgggagtcctaagcaggtatcaccttgaacacagaaaaggaggtagagaagagatcttcctggttggtgcaaggccaggtccgggaaccagccggccaggttgcagccttttttccccgcccagcacatgttgggtgtgagcgagtgcagattaggcaaggccccaattatccctcggctgggagaggcaagtgtgaacaatgaatcagtcagaaactcctttccaatatcctcatcacacagacagttaaattgcaaaccacaagacatatttattaatgagtacatccaaggccatcaggccatttaagaagttgtattaaaagggcaaaaatccctccaatcttgctcagggatggttaaagggttcaggggtccctgctctttgtgatggatagaggagccaaatgacacatcagggttcgcccacagatccctcatacatgccatggttgagcacttctcactggtcctacccccagtgctgagggccttttgagtttttgacatccataaataacctgtgggtactacctccctgcttagctcaccaccaacccaggaaaaaaggaaccagctgggttacccccaaacctgggtgaaactggattatgtgccaaggaaagctttgacggaccagtctggcaaggctgcagcctctgccctgttggagctgtcatctggagttgtcctgtgctggaaaattcaagctgtaagacaacaagggactccatccctagaggccagcacaggcttcaggctcatgcctgaagactcccactgcagagggtacaccctcagctgctgaagcctctgggcagggccatagtaaacagtctccacctcaactctctatagacagaagtcttaatcattttagaattggctccatggagtcacagctccaagccagcttacagcattacatttatatgtcgacaagggcttctgatcttggccttctgttctgcagtggaacatcctggggccaatcaacctcacaaacaccggtgtcaaggcaggtgatgaacagcacttggttatattaaaaatgtagaagaactctgtcaggtttaaaattcttaggcattttcctagtcttttctgcttgaaattgctacctacagttgtcatggtggtttccttggtgtaagtttcatattctaggggaaatcagtgccatcgtgggagctaaaaaaaggagaactcattcccagggctgccaattgtaaccctggattaaagtgccatgtgactcagcagctgcttaacttttgactaatagatttgtttacataagaagaatgagagggtttaagcaatcaatgacgtcctatcggttaaaaaaagaaaaaaaagaaagaaagaaaaatgacgtaggctgggtgtggtgcttcatgcctgtaatcccagcacttcaggaggccaaggcaggaggaccacttgaggccaggagttaagagagcagcctgggcaacatagtgagaccctgtctctaaaaaataataataaaaaaaaattagctgggcatgatggcatgcacctgtagtcccgggactcaggagactgaggcagggaatctct

SEQ ID NO: 55139 - DNA, 1709 bp, Homo sapiens
agtaatttataccaatgagccgtggcaaattcacctattctataagtacgcagtgactcaacaagccttttgatccatttatagaatggcaacaattatattttaatgagttattttcacttacttgtcagaacctgttttggtaatctaaataacttcacatcctcttaacattccttatgaggctgtctgagagaaaaacaggctcagttttcttttaagtctccaatctcagctaagtgacaaatgaagctgctatagcgaccacactcctgctggcttatggccaaactcacgttttctttttttcttttccaacatcataaatctatttttttcacagatgaaataactttctggtcccatttcttctttcatgctagtatagcacattttaaaacactttccccccaaaaaaagtctttacagtatgattcgattaataactgggtttttaggaaaactattttcaatataaaggccagaatctctagatttcttttactgcatatcaaaggtggaaagagaggcaattgtcaagctctttcaacctagagccgcaataaaacatgaataacatctaaacattttgtttccttattttcatttattgggtatttcttaaagaaaaaaaaatctcataatttacagtaatagctaaatctactcattcccacgtgccacttccaccaccaaatcccccaaacaggactcaaatgtaaatttcacagagctctacaaaccacagacaaaacaaaacaaccccaaagtctgaaaaccacagtctcctttcaatcttgcgggtagcagcctaaaaaaacataagccttgtttaaaaggtcaacgcactacacttctcagtgaaataaataaccagcctttcctgcccttcagtctagttctgtatcgatgaacaaaagctcctgtcgtttcttttgtatcatcaggaaaacaaaaagtttacataaatgtatgtcagggcaataaaagtgacttctgtcgccagcatccagccaccacatttggaggatccgagcggcctccgacctcacgaaggaagccagaaatctcacatctgccacgcaaagcaaaggacataggtcaccttgtgcaatgtccgctttacctcaggccagggttccttttcttctaattctgttccttggctgtgctgagcagagaactcctccaggcttcaagttcagaacacggccaagaggctttgtagatgccagacctcagcccgacagactgaggctcccacctgcctgggttacatatcaggcttctctccgaagctcggctaaggcaacgtgcatccctctagagacgcactccggaaaccagccccgtgtgcggcgggcaggcacgctctctcacgcctcctctcctcgctttacttactagttcaacacaccagcaaccacaatgggccagtccatgttcccaaaaaaggagggggagtagatttactttctttctttttttaaatgcaggtaggaaagtaccatttctttgcattcactcactattgtctgcatgtgaaaccgacagtgattgtccctgaggcataagcttgtactgaaacgagattcttaggctttttgagtttctttctcggatttgagatgatggaaaggtgcctagctgagcacagccatcacacagcctgcagcctcctcgcaagtccctgcttttgaggtacatgt

SEQ ID NO: 55140 - DNA, 514 bp, Homo sapiens
tgctgttattacaattgccataattaatctgattatcgactgcttcattctgttagggaagttgggtattaaaaagaaaccagaagactgtaaattggtgcaacctttctggaaagcaacttcaacaactacagacattccacatcaatgtacctgagagaatgaaagcaagcacgtgtcaagttggccacgtgttccaagctgatcagacagaacacacacagaataaagccatgtcctggcaagtccacttagtggccaggtttggaccaagacagagtccacttggtacacaaagtgatgaaacaaccccctcttctgaccacatccgtgactgccactgctttttcctaatgacgcttctagcccaactttaattctctgaccatccagaaaaccttgagacccaatcgctgacctggtcctgcttcttgacaacacttaacctagaactgcttctaatcctttgaatcctctttaaaattacctagcacgtgggctgggtgcggtggca

SEQ ID NO: 55141 - DNA, 1075 bp, Homo sapiens
attaaaaaacccagactttccttatgttatttttgtataagagttgggcagcagttttgacatctttgaggcagaaatgattcaggcacttgaaaacctctccttgaccaaaaagtccccatcattagtagtgataagaatgttggtctagcaagtgtatattgttgaatgttgaccttcatcttcatccaggctgttcaatgttgccaggtcccaaatcagacacctaggagttgacaaatattgactggccacagtccatgttttttatttaaagcaagtcactcaaatgagtccacaattttcttttttagcatgtcatggcaaacaccatgcgtatgaggtcaacataagaaagaatagagtacaaaacagaatgtgaaaccgcaaatttgttacgctaagcacttttcaaggattatttttaaaaactactttttagcttctgaaattctatgctgccattagccagaaaagcaatacaaggtcagaagacacatactgggtggggaagtcaaaacattcatgtgggtgcaaagtcttcccactctggggaaaagggggtctcaatactatacatattttacatctcagatttacgaataatggctcgatgattttgaaaggcttatgtggagcctgagtatgtaaccttgaactagaccgtgcataatcacccatgtccctgtaggtcagtggctcaccttgctgtcttaatggccatgctggacacactgaaagccagggcaagcctctgaagtgctattttaagtgaaggttcttgttgtctttggaaaacaattaccacacaacaaacaagttttagcaacagagtggcccataatagcaacagagggtcagccttcatcaggaaagcagaaggcaggcagggcagcagccattttctaagtcctccacaacctggtatttggcaataaatcttatctttcctctgttttaagtatatatcatatatacttagagttttagttactttggtcatagttttcataaatagaggccattgcacattttgaatttctaattcttatttctaaaccagtcccacagaatt

SEQ ID NO: 55142 - DNA, 3554 bp, Homo sapiens
cctattatagatgaaagagaccattttaaacacacacacatgcctaggaatttatacttccaaataagctttatccttctaagcagttatgccatttccccctgatgtttttattgctccaaaatgttttgagacccagagctgctttcagaattagtttcaatctactaaaaatcagtcatattactttgtagaggacatcacacatacagtttccaactaatctactttttttactaggactgatagtacagtaagaaagaaatctaaggataagagtatgtgctactcaagacaaaaggtgtataatccaacctttaacagcccaaaccagcatttctctgttggaggaaggtgtaggctttggaaagataggctcacttacttgcagatagtacaagcaaagcaattgggatggtaggtcttgcccagagcagtcaccacttcgccctccacgaactccccacagccatggcagcgtgtcccgtacatccgctggtagtccagggtgcagagatactctccgttctttatgaagaagcccccttgtgccaggtcacagccacacactgtagagagacaagttcacatctggtcattatctgccacactgccgggcagcactgcctttgagtgaatactgactggttgctcaccctgtgatctcaatggtttggggctagggaggggatggctacaaagagctatttattattgggctctgaccctccctttgggagctatgcaatatctcatacaagtaaaatccactggctaggtctcaacagcttttgtgatatgtctaaaattctgagataatcaaacagtctttgatagaaagatacccttcattcaggctgtctcaaatatgagcaaaggtgtccctggcagtgtgctatttaggaaaggtgcccactgcctgcccacacaaccacatggtttgggccaagattgttaggagttgagtaataaatttccattataccaaaggcagtagctgaaatttccgatagctgtattttttcacactctggaactactttccactgctacgaaaaattcagatgtttcattttttctttgtgcagtaaatagaataagccaattatttatatattatagagagataaaaaacaaacaggcaaaagaggaaagacctgttatttggatgctttattgtgtctggattttggcatctccttccgactgtgcagctgtggattagggagatggtgcaaacaggcagtgggagcttgggcctggtctacgtgttcagacaagaccagagtaggtcacaacaatttgtctgcaaataaagcctaaagcagtccctgacagtaaagatctctctctgccaaatggctgagaagcaacagccaaagctggaaatctctgaccctaaccttgctatccccaaggtcaactgattccaatttataattccttaggcaaagaatccaggattcttcttgattatttggtattcagttggggtggggacaaggtgagttcaatcagtaaattgctttcctaaggacctgctcgaatgctcccagggttcatctgctgagttcccatgactccttaattcatctagatgaactagggcttcagtaaggttctgatgaaagtcacgactcccccaccttcagtcaggactcttcactaactacaagctacggaagacgttcaaggtgatccaaaacccacaaacaaactttccattgtggattcatcagtctttgtttagatcaacactccacagccatgaccttcttctttgcaatttacaattaagtaacccaagattatggcctgagtccatcatgcctgaaactgaccaccctataaatactcctgtgatcatattatctggaaaacagctcattcaccacctgctgcctcctctcacctgccaacctctcctctgcccccactgttctcccacctgcttcttcttccccagatgagtcctgtgggtcaggggaacccacgtgtggattggcctcattctgattgcaaattccttcagcaacaataggcagtctgggggtagcgggtcacagaaccttagagtgttttcttcaatatctgtctatgtgcagatcttatttttctacaagatggcaaggtatttgaggggtgagagtcttcttttgattcttcttcaggaacctaattgtatctaatataaaacaggaaacacaatgtttgaaataaactgaatcctgcctgaaacttggcaggttcccactgatttcactcctcagtgacatcaagttctgatgactcagttatttttccaaacttaggatttctcaaagccctgagaagtgacacaacaatgcatccagactactggtaattccctaaattctctcctccagtcagctatggcttaaaaatgcagagtcgttatacaaagatgtggtgtcaaaagggtaatctggtggcaatacacaaaaaatagattgagatagtttcaaagctaattctaaatgttttagaaattatttgtatttactgctttcttagggcacctgtctgcagccttttccagatcacatggttttgtgaaattgacatatagtatcctttattaataaagtcctagtttctgtgaacataacatagccttaaaaaatgaattcttaacactactgagagatgccaagctacattcaaactgtgccttattatgatttgatttggctttttccttaaagtagtgctcaaggtggcttacaaaccataccattatttctggtggtttatacaaggaaaccagtgtttgatgtgactcccagaggcaggtgttcctaaaggcatatgcaacaagcagtgagaaggggggcctatgatgccagtacctaaaatatacttaacattattacatttcctgaaaatggaccagctgtcacatcatttcagactcttccctctcttgcctccccaggctttactttcctgtttctcctcctctgtctactccttctcagtctcagtggccaggcccctaaatgcaggtcactcctatgggtgccatctcctccctctatgatgtaaggcctccctgggaacagatctcattcactctcacaacctcaactataactttatgcgagggatgatcaaattaatgatctctctctgtgatgtcttccccaagctttagaccctgatttgtagctgtgtgctgggcacaggcagaccgccatgcctctctcaaacccagcattttccaaacacaccctttcctcacagttgctctgccatcccccataaaaccttctgctgttctttttctattccctttctcatcaaaatggtagctgtatccattctccaactcttacatcaacatcaacattttctgttgttttttttttttttgagatggagtttcgctcttgctgtccagggtggagtgcaatggcatgaattcggctcactacaacctccacctctccagttcaagcgattctcctgcctcagcctcccaagtagctgggattacaggcatgtgccaccacacccggctaattttgtatttt

SEQ ID NO: 55143 - DNA, 4376 bp, Homo sapiens
tggtatttattggcatctactaaatgccacacatagtgcagggtgtttacataagccactttattctatcctcaccacccctctctctcagtgaagtgagtaatactgttcccatttgacagttgacagataaggaaacagagccgcagagctgaacaacctgcccaagaagcagaggaagctgaaagatccacgcccaggcctttctgactgctaagttcatgccccttccatgctgtttgtataaatcagaaaattgttgtaagtcaaaaataattatttttataagtattatcattatgcctctaatttatatggcaagttcaagtgccgttctaaaagcagcagctagggcttggcttgtaaaggggacacacgtagcaataaggtttttgataactgagcatggcacccaggtggtaacactcaaggcaactctatggatcccccatatcagaaccttctgtaccatgtattaaaaatgcaggttcttcagccccaatgactaggagtgggagtcaggcatctacctttttagtaaactactcaagtgattcttacgcatactccaatttaagagctatttccctttagaattcagacaatatgaatacgccagctatggagaagagctagaatttcaaaagtaattcaaaagaccatcctcttcagcaacaatatgagaacacagtgaatctcttgactacacaggagaatgcatttttggataagaaaatgcactgcagtttctcttgacacttgaatttcttattgctaagcaaggcagtcatgctgagtaatgatgagggaaggaaaatatcacttcacttcttggcttttctctatgtccgaacaaaggagccactgccaatgctggcaccagctaccaagctcagaactgggatcagcatctgcattttgcataagtttccctttggaaatatacattacaccacaaagtcccccatgcccagagatgacttgctttgccttcacccacagactagactgtgtttacttgcctttccttcacacaacagcctaggcatctcagaacaacctatttgtaaagaaatgggctgttcttactagagaagggcagcatccaaagagcagaagattcagttcttatttcatcccaactcaagtcagtgtcaagaaaggaatatctctccttttccaaaacgaataaagaggttaactttatataactgtctttgacagtctggttgttaccacatgtatgtttgttgactcgatgctacaattttgaaatatgctgagtcatttccaatacagacatgacattgattctgcactccccttatctgccaactggttgtgctgcaaaatttacttgactgttccatctttcaaggcccaagcggtccctacttattttactgatagggaaactgaggagcaaagagtttacattccttgcccaaagtcatcaggagttactggcagaggcatacttagcactcaggctcccagcactttccactgtactgactagtcaatgatttaccctggaacttgagcagacacagttcaaaccttccatggctcatcaattttgttgcctaaataaggattgtacaatgaaaaaccaaaagcatggctgcacactctctgaacaatgaggaaatacctacaaagagccaagagtctacctgcctgaaaaggtaacgggattcctccactgcagaatacccagtttagaggaattctcactactcagctaaagcagccaattgcattgcttactgaggagtttcacactgtctttcagagtcaagcaaagcagatcagccatgtctctgaactccagtgcaggacagaaagcaaaaatgccatttttgatgtgttacttttggaatgtctattaacgatctcaggcaatgagactgggggaaggagaccattaaagaaatcccagtaatcttcagtgcagtcaagcagaggccatggcaggtcataagaggaagtccacaaagctaagcagagtccttctttccaaatccagaactagcctcatcttgcccaagctacctctctctgggggacagactgtggaactagactgccagaaacagaacatctgggaaagcgtatttgaaataaaaatctccttagcagtagcaggtaaatatcacaagcctgtgacagagtccaattttttattttattttttattttttgagacagagtcttgctctgtcgccaggctggagtgcagtggtgcgatgtcagctcactgcaacctctgcctcctgggttcaagcaattcttctgcctcagcctccctagtgactgggactataggcgcacacctccatgcccagctaatttttgtatttttagtagagatggagtttccccatgttggccaggatggtcttgatctcttgaccttgtgatccgcccgccgtggcctcccaaagtgctgagattacaggcgtaaggcaccgcacccagcccagagtactcttagttacagcttgctctgggtcatctgaaatactcagtatcttgcaggtaacatacacattctccctctcaagcccccttccttccccactgcaccatcactccctaacccataagcctttggaacaacacggtgcttgatggcttccaaagccctttcctcttctctatctcatttcactctcacaggagttctcaggtaggaagagcaggtactgtcaaccccttcttagaaatagacaaactgaggctcagaggaatgaagtgactcacccaaggtggcgcagccaagaaataaagagttggcagtcacctagtgcagtgacttctaatccagacctctttataccagaataatcccctaattaccagtgcttgaaccttgattctgccctctccttcatttcccaacaaatttgtccaccttcacatcccctgtgcctcaatcccttttctcaccccagcagcccaggccctcaactcctttttctcagattactgaaaattccctacgcccttgcacccttttttatttttcgagactgagtttcactctgtcaccaggctggaatgcagtggtgcgatcttggctcactgcaatctctgcctcctgggttcaagagattcctctgcctcagcctcccaagtagctgggactacaggtgtgcaccaccacgctcagctaatttttgtattttagtggagacggggtttcaccatgttggccaggatggtctccatcacctgacctcgtgatccacccggctctgcctcccgaagtgttgggattacaggcgtgagccaccgcgcccggcctctggcgtttttctccagatgcaaccagcaaagcgtattctacccaaggaggtgcagcctaactccccactccttaagtatgggctgtacatagtgatctcctcccaaagagcacaatgtggataggaagaaaaaaatgactaactttacaatagagaaatctgacagacaatgccccagccacatgagcaaggtaaacatcaacagtgataagtcacgttgacagaatgtacctttgatatgatgtgatgaaaatgggcactttgcctctgtggtcttccttccaaaaacaaaacaaaacaaaacccataatccctatgaaatcatgagaaaaatcccaaatggagggacattctacaaaacaaaaacacctgacaagtactcttcaaaattgtaaagatcataaaaaacaaagaacatctgagaaatgatcacagccaagaggagcctacggagatgtgatgactaaacgtaatgtgggatcctggatgggatcccagaacagagaaagaacattaggtaaaaactacggaaatctgaatagtgtggactttagttcataacagtgtgccaatacggtccagtaattataacaagtgtgttacaccaacgcaaaatgttactaacaggggaaaccaagtgttgagtatacaggaaatacctgtattatcttctcaattttttttattcacctaaaatggttttaagaaaataaagcttataggccgggcaccttggctcatgcctgtaatcccagaattctgggaggccaaggtgcgtggatcatttgaggtcaggagttcaagaccagcctggccaacatggtaagacccacctctactaaaaatacaaaaattagctgggcatggtggcatgtgcctgtagtcccagctacttggcaggctgaggcaggagaattgtttgaacccaggaggtggaggttgcagtgaggcgcgattgcaccattgcactccagcctgggagacaagaacaaaagtctgtcaccaaaataaataaataaataagatggccgggggcagtggctcatgcctgtaatcccagcactt

SEQ ID NO: 55144 - DNA, 2495 bp, Homo sapiens
cgtcagctggactcctgattatagaaacagcttctgctcaaatccagttaatctgattcccccaaggcaaagaggtactaggattatcataattcagccaggaaatttcctccttataaatcacttggcgcacttgccctgatgtgctgcacctgccttctctatgtgaaggttaagctcagaaagggattttaaaattggcttggtgccttttcctcctcctcctaaaagcatgactcctttgacacactctttgactgagatgactcactgaaatgacacccttctttgacctctcctagcctttctctgaccatgttcaaccatttgtatacaactcccacctcttctctctaattgtaattagaagggacctcagattaggggactggattcccagtcctgcctttcctgacacatgcctcaacctccctgagactgtaaaaggggccaagaatacatgcccgaccttctagggtggtagcggagacaatgtgaggccatatcctcctaggagccttctatggtttcaatgtcccctccaaaatcatgctgaaatttcattgccattgtaaacgttaagagggggacctttaagaggtgattcagtcacaaaggctctgccctcatgaatggattaatgccatcacagcaggagtgagtgaattatcacaggagcaggttgctgataaaagaatgaagttcagcccctatcctcgctctcacaccctagtttgctcttctgcctccaccatgggataatgcaacaagaaagcccttaccagatacaaatgtcttgaccttggatttcccagcctcaggaaccataagaaataaattctgtttctttataaattatccaatctgtgatattctgttctagcaacacaaaatggactaagacagagcccccacagcctcagcctggcacacagatgcccatgtcagctgaatgtcaggaaagactgtcactaacctgtatgagcaggaatttctgaagcattacaaaaatcccttctgaaatttgattgaaccttttaaggtcacccagggatctcaaactatccctgcaccagcaattctacttagaaatgaatccagtctaacaaatgggcattggcttcagtctaaactctgccggcagaacatcacatctttatggacaacaagagagccacatccatcctgactctgagagtaggagggattgtggtcccatctgagccatttacagaaatacaagttaagagagagggtcagagtctattgtcacatggcctagggtcttgagacagggtttagcttaagcacggtaccaccattaccttctactctctaattccaattccagacacctcagaggaatttgaaaaacaaaaaccaaaaaccaaagaactaagatattgattgaggtgtctctttgtggcacaaatctgtctgtctccagcacaggaagtctcccagctgtccttgccttttctttctggctgcttctacttccaggacatactcagaatcattaagtacttaaaaacagcatttcaaacaaactaatgaaaaaagctaatacatgtgtggcacttcacaatttataaaaggtattcaaagataataactcctgtgatcccatcaaccccaattatactgattctgcagatacagaaattgtacttcgaaaatcttgagggggtttctggggagaagaaaataaaattttaagggattcacccctgcagtggggagctctaacctgcttgggagagccggctatgcccagcccttcccaactgtatggttgactccaccttggtagcttgaaattggctgcagtggaagcatttataccatggaaactggcaaactttacagatcagggccttcctcttcctgccctctggagagctggttgttaaacatttaccggcacaccattgtgccaaaggttatactgattccaaactgcagagtgaagcttttcattcaagtgcttataaatttcagaaacaagaatgtgaaccctttctgaaaaggcactcttgctcttgcactgtgaataaagacacaaacctgccctcacctgggtctctccagtgtctgcacacccactgggagatgaaagcatgagacctgtgttcacagcatccaacttgcaatgtcaaacattctagaatgctacacattctagaactactctctaaacacctaggctcctgactcctcccagacctgaacttcaggctccttcaagctctcttatgacctaattttgctgggtgtaacctctgcaagaaaatgcaaacacatataatctgtcaccttgctaggtattcttctattcatcccggtgacaagggagcataaccctggtggttgatcattctcttatttaccttcagaatggcctctgcttgagtggagaagaaaagattatctcccaaagtttaacaaagcacttagtgaagactatggcttgaaaagaaaaaacatgttaaaat

SEQ ID NO: 55145 - DNA, 2534 bp, Homo sapiens
agggcagggcccagaaatctgtgttttcacaagccttccagatgattctgatcccagttgaaatttgagaagcactgtcctagacagtaatttccttagaagtattaaaaaagccaggatcttcatagttaaatgcaagtattcaaacaagccagcctgtttgattgcaacagggacacacaaactcacccctgttccacccccaggggacactggaccataataacattaattatgtcagtctgagcacaaatacaatgtttcagagaaaagaggtcatgcataacaaattttcgctctccccactgttaacaaaatttgcccttgaatacacagctcctgccagtttgggataaacatacctctcggtatgagtcaccatcagacaaacacacaatgaaataggaagctgggctggtttttactgtggtgcacccagatcaaactcaaccacaatgggaagaaatcctgcaccactcactgatcactgaaccttctgaaaagttctctggctctttaatgctggctcaggaaaacactcagcactttgactttggcataggagaagccaacaataccaggatcctctttcttgacccctagggctgtgaatgcgatggcaaagagggccacctcctcaaaatgaatcaaatgccaagatatgcttcttggtggggtgagtctcttgcagtacatcttctgcaggaatttggaaaagtcaatttgtcgttctttaaaagaaactctctgtgatgcaacacaagttgttcatccttcctggtcatttggcctggcatgggaaaggcaagaagcaataccacctccaaagtctgacagtagctaacagtagatgaggcccaacctccatttcagatgcccactgtctacatattcttgacttcattcctgtcatcaaaaattgccctcaagagccttgaacacattcaagtcaatgtattccttctctcatatttatttatatcgtagaaatgacatctttttctctctggataaacattttttagacatcaattagttggtgttagagggcaggagatttgttaagattttttttttttttaaacatgtgaaatcctttcctttagctttggaaatcccattattcagacagtacttctggagtgaagcagagccacacttcctggtaagagtaacactttcatttataaaatagtacaagcaattcacacttgggttgctttctctcaagcagaatatgatgacaaaaactggagcacccctccccacaaagatgggaaattcacagttgagtagtgtgaatgtcactgatcaagaacaatttattttgaaacttgtagccttgtagtgtctcctttaatctatcacttccctttagaccttacttaggaaatgaccttgttggtggtgtcccctttaaaagactggggcttttgaagttaagacaaatccaagggcaggtaggggtgaggcattaaacttcaacccgtggctaggagtggctagcatatgtgaaagaagatgcctggatagtgactcaatagtcatcgcacacatgaggaattattacaccacagtgaaaaacctactgttcttagcctttcctgaggatggaatagaagtgggtattgactacaccaggcagcgtgcatgcatctgagtgggtggtgtctgtgtgggtgtgtgttttgggaagacagacagcattagaggcagcaacacttcacagctcctaaggttgttttacaagactgcatatgaagtccaatacttgagaaaaagagcactgtcctaagttgcacaggtaacaactgttgtttatctggtgtttacttaggtgcacagagtaattctagaagaattcgcagaagggatgcgccttcaaggagctctataaggaagccaaacttgagttagatctttgataaatacataaaaggggggggtacagtatgtctcacaaggcaggtagacagtatgactgaggttagagcagaaaataccacccctgtggtcattcaaaaggtaaaagggctcagggtggacattagcactggttttggagccagataggcagaaaaatggatagaaaatttagcttttctacatgctagctaagtgatctctgacctcctgtgagtctcctttccctcacctattagggggaagatactacttaccttgatgggttcgaagattaaagacattgtatatgaagctctgccatttagtatgtgttcaatcactgacagatttaataataacattaaaatgaaaataaaataagattggcttagaagaacatttttttagaagtaagcagggaggaggtattttaaggacttgaggagaaccccgcatgacaagcaggaagctttgaaccttaccttgtcatttatttgggtttttgagctgggaaatgattcagtgttctaaaaggattactttggtgccagggtgtaggtcacatttgagacatagtacatcactgtcctcaggagctgccaagaacaaggctgcagtggcttttggat

SEQ ID NO: 55146 - DNA, 6914 bp, Homo sapiens
tgggcctctggagtataggttgacgagcgtgtatttaggaaggcagttattgacagattaacctgcagaaatctcctgtgcttctttgttacaggatacagcaagggtaaggtacccttgaagacataagagaaataaccatttcatcaagattccggaatcaataagtgtctgcagctggaagtgaatgggtgcctggtcaggagaacaaaagataataaggtcaaaggatgtcagcaaatgccactccacactagtggaggcaaccagccagcgtgctttctctcctgcccatgtcagccccgaaccaggtattttatcctagagagaaaactatgaggcaagccagtgtgagctctaagtggcaagcacaacagggagtctatgccactcctccttgggccggccatgttcctcgggatggacattgccaggacccgagcctcctcgagttgattcctgacagctccacagggaaggaaggagctaggcttttctgagaacaagaataaatggagaggattggagaagtttctgaatcaagaaggcacaggttcctgttcctgctctgacaacgggccaacctgttttggttgtttgaagatctacagtgggggaaacactaacctatgcactggaaagttaaagatggagacacagtgccacttctgaaaggctcaccatcttgtgacagagatagcagctgtcaacacactggcaattgtggtctctcatccactacatggtgtgacgagacacagagaatgagtactttgtccacaatctgctgtgtgaccttcagcaacctacttaccctttctgatccccagttttctcatctctaggatgaatgcctggactaaacgatccccagtgcccttctcactttaagggctatgaagaagttccctttttcctatggaaacccttgtgtacctaccaaaaacaaacaaacaaacaaacaaaaatgaaacgaaacgaaacaaacctgcctttctctgttgatggctgaggtcagtgcaatcagaaagcagtggtgtggactggcacagacctcaaaataaaacagaacagcctttaatcagtgtctaagggttaagataatactagtatgtgacctcttggtggcctgtccaaagtgttccagttagaaggtggccagtgacttgtagagcaatgtgaacccaggcaatctaagctttgggaagtctccaagacttagaaaaagagctgctatgtgaggactactgatctataatatataccatatatagcaaggctaggtcttccaagagtcccgcaagaatggaatgaagaaatggctttgtaattccctttcccatcactcataaattactcatatcagggaaacaaactcaaatccattagcaacagagaggagtgccatgtcatagttgggtgggagctacaaatgaagagatctgaactgcagtaaatgtcaacatctgtgtttggtactgagggttcctggaagcacccccaaaagagtggaaatattattagaagcacctttattcacaccgaatcatttcactcaattaccatttacccactgaaaaaccaaagctacagcatgtgattactaaagatctataggagcagagtgaatagagcagaatcatgtttctcttttgtcctgaggtgcagcctttacactgttaagctctcaggatcctgtatgtcaatccattcattaatataatagaatcaaactgagtttcaagcaacaaggatcatcttgagttcagcattttcatcttaaatctattccctatagtagctttaagataaagtaaacacaggtaagtcattgaaatggttcaagaacgccctgaaagagtagatgtccgtgtttggggaggaaagaatgtccccacggtaagaaaatgtgacaataaatctaagtgtactagacagcaaaattaaagagtggttatttacattataaaatcatttggtgaaggtccctaagacataataaaagagaaaaaaataagttacagaaaaatgatcatagaatgattcaatttttatattcatatgtgtctgtctctaattctggtctagaagggtctagcaagatacacagtaactgttaacaattttatctctagagaggagaggggaattgaagctgacaaggcaggagtgaggggctttcactttccctccctatcctcctgcaacattttactttcttaagacaaggtgtgtttatatattacttgaatcactcaaaacaagcactgtggtgttctttcacatttcccggagaaacaaatcatttcaactatcattcaattctgaaaaatgtaccttccatttcaggaccacgcctagtgcataaatgatgtacacctgttcaggccacacctgtcctctcccttttaacactctccttgtgatatgatgtggtttccttagccatgtgcagcatcctttaagaaggtgtttggaggagtgattagggataatagtgaaatgacaggttatacacgcagagcacctgaagcctttaaaacaacccagcttctcctttcagccggatctagcgaggcctgggcatgtcccagcaccacacagcccagccgtggcaggaagggccctttcatgacacatcttaattaacttattgattggtggggcgtggtggtaagagaggaagagaatgatggctgggatggggggcaagacggcgagtctcaaacacaacaaaaaattcaaaatgcaatagcaatcaaaagagacatacaccccagagctcagctgtgctccagaaaacaggatgtgctcccgatgcggtggtgaaattaaagattctgaacgaagtctgggttcgatggaaacccagacttcacaatacggagcttctcacaccgagaacatgtccgcccggctttcgattgatcattccccgttaggtggccgagccctgcggtgccattccaacttctgcaaccatgcacagtgatcgatatttataattacctttttccttcaccatggcaaccgggtcctccgacgagcaggactgaagaaggaacgaggaataaactctgggagtggaagcgcgcctcggcagacagatccgcgggcgctggggcagccaggagaagccccggcatccgcttgtgaggtccggggctgtggtctcgagtcccgccccgcctcggcgggccccgctcccatgcccgccccgctatcgcccccgcgctcttctccgcccgcccgccgagctgcagccgcgcccagctcggggactctgccctgcggctgaaaccactcgctacagctgctgctgtaacaaatgcaaaattctactgtcctaatctctggtcactgacaccaccttgtattcctcgcaccgaggacgggctatgaaaagctcccgaacgctggccccctcccacagtctgataaatgattgccaggaagaggaggaccgagcaccagctagagacggttccaataagtaaaactagtcaatggttagcttattggctccctgttacagtcgctttcaatttttactacggcttctttcaggcaaactggataaataaaattggccttaatgtaaaacaaaaacagaataatgatgctaatggcaatttcaagttcactttcttatgaaaaatgaataatgacatttggtttgcacggctgctccccgctataatttacctgaatggggctgggggaaggtagagactgagagacagccggggaagaggatctttcaggattctattccttatccaggatccaattcaggatcaaagttaaaatctgatttatccatgtaggggggattttgacttcccccttctccctctgtttcatcggagtttttagacaagccccttggatgtgcatataccagggaggaactccagtcacaattaagggacaaacagcctcatctagttcggtccaccaccaggatcagcctaagcctgaccccacagcagcaactcctcaggaggcttttgatttctgacccacagggtcacgggctgtcctgtgacctgtcctgctgtcctgtgagctgaggacttctggttcacaaagccaacacccacctgactccagcctctgtctcccaaatccagcttaccgggtcccgaccgcatgccatatacatccaccatgtgtgagaaatgggatgagcaagagacaaaaagacagacatcacaaggcagggagagcagcagatggctaacacatctttcagaaccagaatgcacagccagtattagacggtatttactgcaaatattgtaacatgttgagtctaagagagccaggggaaccgaaaggaatgaagtcaatcaacctgcctcctctttgactcagagggtgtgtatggctgaaataaactacatttggtgggtctggggagaagcgggaaaaatgcccatttcttcacattcatcttgggcaggtcttcattgctggttttctgatgtgtaacagtagcacagctcaggcagctgtgacattcctacatctgtgactcagggctttactattaatagcttgggtgtctcaggctgtaagtaagagctaagtcccctccagcccctgggttgtcttttctatgacaacatacttcgcccacaccactccccgcacccatggcagccccataaggtcatgtttttcctaagtcagcagccagctggagtgtaagcactgaagagcgtttaagcgacttctctaacctccattcataaatatgagccaagcacgagagcagctcgacttccagtccagagggatggcagagttcaagagcatccaggaaacaagcccttcacgttccccaattttcatggctaaaactgcacttgtctactttcccactcctaatcaccctcagagcctttaaggagatgctgacaagcaaaattaactgcagagagctgaaattaggctgtgttgtgagcctagcaggtgaatctattttattatatttttgctgcttaggtacatgggcatctcacttaagcacctgtctccaaagctctcatgttattcagcccaaagctaaggaagcagctttctttctctttccttcccccacaccagcccccattcctcctcaccccttccttgctactataatgtgacagtaaaacaccattggtttctagagcaaacccgatcatatgtaagtgttccagatatcgtaaatgccattagctcaatttttctttttttttttttttttttttgagacggagtcttgctctgtcgcccaggctggagtgcagtggcgcgatctcggctcactgcaagctccgcctcccgggttcacgccattctcctgcctcagcctcccgagtagctgggactacaggcgcccgctaccacgcccggctaattttttgtatttttagtagagacggggtttcaccttgttagccaggatggtctcgatctcctgacctcgtgatccgcccgcctcggcctcccaaagtgctgggattacaggcgtgagccaccgcgcccggcctcaatttttcttttacttgggatggcagtttaaaactctgagatttaagtttactaaccaaattggtctcttattacagttctgaacctacctgtataccttggtggataaatcacacagaaacagaatttggaaaggctctctggcagctttggagactaagttggcagagtaacagctggtgcctattcattttcagagaagccttttctaaaggaaaatactacatagtggttcagagagattttccccccgcctgtgttttccatggaaagaatttttctgtgccacagtcaaagtgaatgagtcaccagcatctagttgctaagtaatagtcacacggcaaaagtccccccgccaatcagacgctgctactttgggataaaagtatccactctgcacttttaagataaccaaagagtgtattactaaagttatttttggaatgtgggagagtaaaacaaattgtttttgcctctttgcctcagggcagaattgctaaagagctttaagaacagaagcaaagcatagacattttctactttacagctaaagctgcaagaagtgcagcaaactacatcaagaataaaaatgaaatttatagttcataagaaagaactttttattcttatatcttgagatgatttccaaagaacttatctcaatctcattccactcagatgacataagtcttcataatacggacaccaacccacggttttatttgttgttttctgccccatcagactgacccattgcctccttctcattcacttacacataaagcaagggttgtccacaagtgaccaaaggacagaaaccattttgttggagagaaaagcttattagcacacagtcactcttggcaaaaattcaagcgtacatcatttcagtagcgatgccaattaggagggaaatgttacagctagaaacaagcaacccggcagagtccacttcctcatagcttattctcctctacagagccatgggtcacttactgtacgtgcacctgtagtgcaggaatttcaggatccctccgtgggactggaacatcaggtgtccagttgctaaccctcaacaccactggactcatttttgttgttgttgttttgagacggagtctcactctgtcacccaggctggagtgcagtggcacatctcaggtcactgcaacctccgcctcctaggtttcaagcggttctcctgcttcagcctcccgagtagctgggattgcagtgcgccaccacgcctggctaattttagtatttttagtagagacagggtttcaccacgttggccaggctggtttcgaactcctgaactcaggtgatctgcctgccttggcctctcaaggtgctgggattacaggcgtgag

SEQ ID NO: 55147 - DNA, 4817 bp, Homo sapiens
ttcagttgaagtattactaaacaattaacttcacttagtattcccatcatggatagcactggaccaattggtgacctcaaagattagacagttttttaaattaattaataaattaattaatatttatttatttatttttgagacagggtctcactctgtcacccaggctggagtgcagtggcacgatcttggctcactgcaacccctgcctcctgggttcaagcaattattgtgcctcagcctcccaagtagttgggattacaggtgtgtaccaccatgcccagctcatttttttgtatttttagcagggacagggtttcaccatgttgggccagactggtcttgaactgctgacctcaggtgatccgcctgcctcggcctcccaaagtactgagattacaggcgtgagccaccgtgcccagcctaggcagttattaagtagccactgcccctataatgccactggctaccaagtgaagatagagtctgtgccctttagggaaaagagcccaaggaaaggataacagaacatatccagctacacactagaatcacatgatagcacttcagggaaaagaccaatatgaaacagaactgggaattgtcccacaaggacagcaaatattaaacaccccagaatattctagtgatgtcaaaaatgaccttacaaaatgatccaggtcatgatggacagaaagggagctggctgagcgctagctgtggccctagctatttgacttttcttccccagctcatctttatcccaggagatcctactctatggcatgagaattctccctctccacttgggctgcagacaaacctttgtgagctagatttttctgggctctgtgagtcataatgtctctgatgtcctctgattaattttggttgttatctatggccacagaacttggatgaggaaagacttctaaacagcaaacaaacaaaacttggggggccacagtaagtcacttacagaaagtgaatttacaagccagctaaatgatttctcaaagtaaaggccctacctttctttatataatgtttgcagacctttatgttgtaaagataaaagcagttttgaagattaagatataggatgtaaatagaatgtacatataggatttgtgtacatatgggaaaactggttatttcactttgagggaatagctttaatttaatttgaaattgtattaagtggtgggaatgtaaaatggtatagccactgtagaaaacggtttgacagtttctcaaaaagttaaacagagaattatcgtatgacccaggatttccactcctcggtatatacccaaggggactgaaaacacgttcacacaaaaacatgtaacaagtgttcatagcagcattattcataatagccagaaagcaggaacaacacaaatgaccatcggctgacgaaaagataaagaaaatgtgatatatccctacaatgggatactattcagccataagaaggaatacggtattgataaatgctaccgcctcgatgagccttaaaaacattatactaagtaaaagaagctagacacaaaaatcacaggttacatgattccaatcagatgaaatgtctggaataggaaaacccacaaacacctaaaggagataagtcgttgccagcagctgaggaatgtgagtcatcagggatgttttctaacgggcacaaggtttctttctgggctgataaaaatgctctggaattagatagtgggatggttgcacaacttcgtggttctactaaaatgcacaggctcgtaaatgttaaagtggtgaatgttatggtgtactacattacatctccattttaaaatgtatgaagtacctttacttaccaagcactgcgttatagtctgaagaaaccacggaaacaactgtcctgccactaaggcacttactacctggtagggagacacgcaaacaaacagatacaaatagccaagcatagaggtgcttggatgggcatttgtgtggtacacagcagagcccaaaagaggagaggtctggagagactccacaggaaagtttcacccgagctgaatctccaactgaacttaaaaaaaaaaattaataatcctttggtcttctcatgtaatatcaaacagggagagaggagagctagggtcttaatctaacactaccctctgattataccatagaccttaggaaagtcatttacttctctggacctcagtctcttacttcctacaaaagtaaggtgttggctgggcacggtggctcacacctataaccccagtgctttgggaggccgaggcgggcaggtcatttgaggtcaggagttcaagaccagctttggccaacatggtgaaaccccatctctactaaaaatacaaaaatattagccaggcatggtggtgcatgcctgtaatcctagccacccagaaggcggaggcacagagaatcgctggaacccgggaggcagaggctgcagtgagccaagatcacaccagtgtgctccagcctgggtgacagagcaagactctgtcaaaataaataaataaataaataaataaataaataaataaataaataaataaataaaggtgttgatatcaaaggtttatttctacctttgagaaatatctagaatcctcgtgcatatcatatcatagtctatctaaaatcctgacatacttaaatcctgattctgcaaagggtttctctagtgtattctgggtgtgctgctttctgagattgagaaaggaatcttcctgctggctacctctacacgccctaacaaacagcacacagactatgcttccttcctgttggcagccttcatcttccaccccagggacagaatcacccatctgctgaccacgtattcaccttatattaccttcctactggtagccttcgtcttgtagtccatagacaaatcaagcctgtgctggccacctgtccaccccaatgagtaacacacaatccatatcccccctcttttttttctttttttttttgagacaaagtctcactttgttgtccaggctggagtgcagtagtgctatctcggctcactgcaacctctgcctcccaggttcaagcaatttcccagcctcagcctcctgagtagctgggactacaggcgcccaccaccatgccaggctaatttttgtattttttagtagagacggggtttcactatgttggccaggctggtctcgacctcctgacctcgtgattcacccatctcggcctcccaaagtgctgggattacaggcgtgagccactgtgcccagcctccacacaatccatattccctttctgttagcagctttgtcttgtacccatggccgtcacaggtccatggctgatttgccaagttaacaggagtccatccataataatcagcactgggtcatgccccagaatcattaggatcaaaggatgggaaatcagggatttctttgaaagtaagccactcttagtaagattcaaatttgtttaaagcctggattaaaacaatgccaaacaataaacttaaacagactgctttaccctctgactttaaataagattagtttttaagtacatttaattaaaacgaatggggcattgcagcatatttactcactcaaggaagtaatttacatgggaacatttcatgtgaaaatagttacttgcccacattcctaggactaaaaataaaataaacaaaacaaaaagcaaccatcaataaaacaaaaaaaaagctggaccaagtagattcagccagtggaactaggtgaaaagtgtcttacttctacctttttctttccactctcagatcattgggctattttccttttactcgtattttgggtaaatcatatctattttacagctcaaatcgcaaatcctactttctctttcccttcagtgatatttctttcctttgaaaactaattgtatttgttatctagacaattattcaacttctcacacatttgggtgagaagaagagggggaagtatttatcgagctccaactaaatgccagcatttctaaaatacgtattttctcttagggctcataataccgctgcaatgtgggtagtattatccacattttatatacgagaaaactaaggctcggacatattaagtcacttgcccaggtcacagaactgcaaagagcagagctggactttgaacttggcagcgaggtctgaccccataaccctgaatttgcaaccagtttgctttgcagcttctcctggcctcagctacttgaaggcagggggacaatttaatgccgaattgtattcttcgaacatagtgatttgatttctgcgaacattcactcattcatttactcatcactcacagctttttttccatgccaggtactataatggaataaaaataagagcacagctctctccttgccctcagagaggacctcagtgtatgaaaagggagaagcttataaacaggcaacttgaacaaagatgtgcagaggatgctatgaaaacacagaggaggacgaggcaagaggtaagatcaggccggcccagaggaggaaaagcttaacctgcagcctgctgggcctcagagaaactggggagactgtgccaggcagcagaattgcacatacaaagagaggcccaacgtgaaagcatccttcaaacatctgtgacaaagaagactgatgcgggtgtttgggggttaagagtgggacgtgatagaaaggcttaaccgtcaagagcttgaaacgtatgattctgggaaatatgattaaactaatggaatgagaagcctagggaattgaaaaggggttattggtaactataaataaaa

SEQ ID NO: 55148 - DNA, 1138 bp, Homo sapiens
atatgctgtctttttgacaacaaagccatttgtggcctatggcctactatacccaagacgcttcccctagccctctgacatacaggtctggggttgcggattagtgaatggggtaagaagggcacactaaaagaaaaatattatagtgttatatgttctacttagtttgaaaacaggttggtattgctttaagaaacaataatgtacccaagaggttctctcacttacgtgataccctgagtatctgggtcttgggaaaccattccgagtgaagacaacacctggtgtgctgcatgtaacagaaaggtctcagcaggtgcctgaatcagacatgaaccacctttctctcttctgggatatgaactgcttttccagggaggggactgccaagtctactttggtccctgctctccagtccagaacattctgctttgggatttggactcagctgacaacataatcactgaatcctctccagatatccttggggcttttgataatagtgccagtctcttgtttgtttgtcaagaaggtaatcgccctaaatatgttctttcgtttgtatgagacccaaaagctccaaaggacagaaagaaacacaggttcaaaaacttcactctaatttcctacaggagagtaagggaacattccatacagacagcttgtatttacgagctagaggaaggaaatctttgctaattttcctggcaacagcaatatactttatgggagtcttcaaatttgagttgctgaagtacgtaattagcaatattatttacaaactttaggtgtgccagtgttcagcgtacctcatgaatgacccactcttatgctcctcaggctgaggcagagtgacatcatggttgagaccacgaacctgggtgtcaggcagacctaagcccaaatctagtacttatgtgacctttggcaggtctcttaactgcatatgccccagtttccttctctgtaaaatgagataaaagtaattcctgctttgttgagtcattgagaatatcaaacatggaaaaatcatgaaacacttggcacaggcgaggtatggtggcttgcgcctgtaatctcaacactttgggaagccaaagcaggaggactgttggaggtcaggagttttaaaccagcc

SEQ ID NO: 55149 - DNA, 655 bp, Homo sapiens
gggatcgctggggccagcagtgctgtctggatggggaatctgagcctcctcttcacagatctctctagtgatcctctgcatctctcccatactgtgcaaggggttggccagatgccccaaggagccccaggagtcatgccaatgggtttcttggggccctggagctggctccattctaggggacaagcctagcaagcaatcacttcctcaggctggtgtggcatttctttcccaagactgaaacagattgagctgttgacacactgctttgggtgactcaaattgtttatatagacaggagccctacaaaaaaaatctgcccagggccccatctactctagggataggcctgctcaaagcaatcctataaggtatgcattccctgcctaccttagggacagagaaacgcacttggaatcactaacttcccaaagtaacacatttagtgagtagaagagctgggagtcaaattctggaatgtccaacctcaaagccacacttaactaatctcccagatttccttatctgcctccactaagatatggatatcccaatgatgattacctttcctgtatccagaactctctcggatactgttaattctcttgttcccaagtgagggaatctgctgataagtcattatccagcatgcttt

SEQ ID NO: 55150 - DNA, 966 bp, Homo sapiens
gtatttctattgcattcccaatgatgacatgcacacacacaaggctttcagtccacaaggggtgtgtcaaatgtgctcccttgcattccctccatgctgcactctgattttttgaaagagcatgacagggaaagattaagtcaccctggcactgccaggattgtgaagatactggtgttccatctgggccttgaagacaaactaagggaataaagaggttagaggagggcagaaaagaacattccaaacagaggatgctccagaaaaaaagcttcactcagatcacacaagttgatgggaaggacgtcaaaggacatggagaagctcttagaaagaaaaacctatccttccacatataaacaactctatttagagagataacatggcatgacctttgagcaggcacaaagcaagcctttaaaagcatactcaattgtcattctttctttagagtaccagaattctgggaaaactgttggcatggatccacaaatacatttcacactgattcaatattaacagcctctctcagcgcttgttttttccaagtacttaaaaccacaaatttgttaatcatagcagaagtcctgtgagatggagcccccacatctcagactgagaaactgagacccgggagagtactgcttttctctgcattaaatccacagtcaaaattagatgtttgtaaagaacctaagcttcccaaaagggaatcccaggccttaataggaataaaagatgcctttggctattttggagttcacagttatagaaggttttagaatacagtcttttaaatgtggctacagagagacaataccttttctaacaatggagaactttctgctgtcttcccatagcgtgggcaaatcaggtgacctttttcctgaatcctttatctagaaaggacaatgtattggacacaaaattggcagtctctgatatgaaaatgcttttgggcagaat

SEQ ID NO: 55151 - DNA, 673 bp, Homo sapiens
gcagcagagaccatttggctcacaaagactcaaatatttactattgtgcccttcacagaaaaagtatgctttaggctaatcacacaaagcattcaaatcttgtatttcttagctgtttgctctataaacatcttattcattggtttcatctgtgtaccatttccttgagtttgttagaaagttccctagggttagattgtctttttattttcttttttaaaccaagaataaagtatttcaggttaactgagcataataattttatttcactgagtctcagtgcatgtctattcatgccaataccactggtactgcatagaagctatggtggattatatcattggctgaatttatcacccctccttatatccatgccctttgccatgtaactttgaatgccctctcactttgagactggaattgatgatgtgactcatctggcttatagaataaagaagtgacagtgtgccagttatgaacttagccgtcaagaggtcacgcatatttctacatgctgtcttgcccttctgtgtcagcatgatgaaaaagaaagaaagaaggaaagaaagaaagagaaagaaagcagcatgacaccaaccatatgtctcatcaaacctaaaatcttactatctggctctttacagaaaaagtgtgctgcctgctcttctgaggg

SEQ ID NO: 55152 - DNA, 5347 bp, Homo sapiens
gccattttatatattttttattttaatttttatattgagagagagagttttgctctttttgcccaggcttgagtgcagtggcacgatctcagctcaacgcaacctccgcctcttgggttcaagtgattctcctgcctcagcctcctgagtagctgggattacaggcgtgtgtcaccatgcctggctaattttgtatttttagtagaaatgaggtttcaccacgttggccagtctggtctcgaacttctgacctcaagtgatctgcccgcctcagcctcccaaagtgctgggattataggcatgagccatcacgcctggcctaaaccatttaaaaatagtcaccagggatgtgcttcccacaaaataatgccaccccatgaacatgctggcattttcccaagagcactgtgtatactacatccccttctaactctctacgccacttcaattcacatgacagcaggacatatgtttcccaggcaaaatattacaaagaagagtgatagcaggcttggggagttcctgttccaggaagatattcaaggtaccctggtgtggtcacaagcctggggagcctatgactcagacagaagctcctaagactcagtctattgctgactgttttatggaaatccagtgcccaattctccgagcatgctgcctgctcccactcctggggcacgttcctggcaatgtcatgctctgattgacccactggtcaccgactgtggcagcgctcatttgcagtggcagctgtgactgcctttggaagcaggaaaacctgtctggcatttccattctctcatatgaaacctaaaagtagtgctaatcggcacgatgcattttccctctttttggaaatgaatgacatttagtgataagtcttgtaaaatcccaatattctgaattgctatcctggctaccaccccaatatttaaactatgttaacgatggagacatacatgtcagcagtcagattttaatataaaattaacggctgactatctcaaagtcctaaattactattaattgtaaacaaacactagctctaagtatatcctttagagcagaaggttgtaagtcactgtatcaaagtcttaaatcagcagccacctaactagctaatgctttcaagctgtgccaggagagaaaggacaggatgatcttctcttactaaagagagatggatgaacagctgcaagctttgctgttgttttaaaacatccgggaaccagctactgagaataataaataaaatgtaagcagggtcagacttatttattacatatcctttcaaaatatccttttgtttaaaaaaagctaattaaaagtattgcccatattccctatagagagtacatttaaaacaatgcagagtagcaaaaccccttatgttccaaacataaggtgtgcctgtttttaagtcttggaataatttgccaacttccaatttaattatgactgagcttcaagtcaactgctgagtgttctagagatacggtttctgtagattccagctggtagcaagtggaaagactccaaataccttaaaaatatgccacggagtagaagggaggagagtagttaaaaaacaaggaagagaaagaacgttgttctttctggcttgaccactaaaaatataattagatgtatcacttactctgtttacttacagtctctctgcgtgtaagatttcttccaaaacctgccctatctttctggaaagccaaactaaaatccactctttgtacagtacaagaaaaacagaggactttaaattcatttaaataaagacatctagacatcttgagatattctaattttatcactaggaccccattcagttggaaaagacatagcatcatagttttccactctaaatgtatcaggaatacacgaatgcattctaattaatatgcatagtgtccttattaaaattcaaattctatatttgaggaaagtccagaatgtcaaagaatcttgtgtaaacctgaggtgacgttatcctttagaaagaacaggggagggctgttcttggctgaccacccacgtggggccatcgtccactttaagttttcctattctaatgtttgtcaactttcgtctttccagtaaacgtccaaggcaggtcagtgaggaataggaaaccacattactggacttttaaatcagcatagtctttcaaaatcatgctcatttacaggagaaaactgtgtggcataaaaagccaccatgaattattcatcagttacagcgtgtgccaacctcagattcctttgtacctcgtaacaagtgtatacatgtgaagtgtagcagacccggctccccagtcctaccagtcctgggtacaaaggcaaacccaagctcaccggaggtcctgcgaaacagagaagagtggcgagattggaagtgaaggagggagggggcccagcctacctgccgtatctggaattacccacgagtctactctccaggaaccaaaataagttacactctcttatcttaaggggtccagtatcaaaggaatcagcaaccgatcgccacagtccctaggtttcaatggagcagcctgtgagactgcgtggggccaccctctgcagttctgttggacgtggtgttggctgtcggcccctggggatgctgagcaggaccagccggggcactcctgaagccagccagcctcaccacggaacaaactctcccatcaaacacaactgtagggaaagcatcctagagatgacatccaaactcaaacaaaatgcccagaaataggatcacaggtgtttgcccacagtcactgaagatgccttttaatgtgcccaaaggaccaacctactgttggttgagttgagctgggctactgctacaaaagagtcatgtcgattttaacatcctgttatattaagaatatatgtaaatatgttgacaaataagatgtgcattttatacagatatgtactatcacagaaatagattgtaaaacaatcttttacttattatcataagtgtaaaacaattttatcaaatggaaaagccctgcatctttcctcatctttaaagacacggtcgaccccagacagaatatatgctgactttacaaaatggacggtctaacctttgtagtctcccatggtgtgatgagggtccgtgagctcagtcatttccaaggtcattaacatgcacaaagctccagggtttcagcttttcttcactaggcatctggcacacagaaaggctgcaacactcctcaaaggagaggctggggccctggctctcctcccaggagtctgtgggctgaactggacccgagggaggggtgtgccaccggtgggtgtgccacagccagcgcaggaagaatgaggagtttcctgagtgactctggctccttcctcatgtacagattctgcatccccttcttctctcgaccctgcccctaccacttctaaagagaccccttgcaaaagcacatcagctcaatgacgccacacccactgaaaacactcgtttctgggaagccactattagaacacgccaagaatgttcctaggattttcctgcattctgcacaatccagaatccagattttgatcactatcatttcacaataactgaaacacatgaaataaagaaagaaaaggatcgattattccccagccttctgcctcctctttttccttaatgaattactatctcaaccagatgggcttttaattattttcttcactactagaatttttaaaaaatgctataacttggagaggcttcttttactaacagcctgattattcattatggctttggaaacagttccctgacaaactcctggtatgagacgagccgtggactttgagcctttttatattaggtatacaagctgtctgaaaacaatgacctcatccggaaagactcaggaaagaggcatttttttcctttcgtcagtaatgccctgatgttgggctggattatccaccacccacaatccaacttttctcacagttatttttgaacaccgggaattttgcatattggaaaagttatgaagacagtttaaatggaaaaagacccttaggacaaatatccttggcatcagatacacacattggctaagaaataggaggaaactggcataattgctttaaatgtgagggtaaaacatttaattcctccaataaagatgtaaccagcagcacccgttgtgagatattaatttaatgtaaggcctataatcaatccactggaaaacaagactatttgaaacacattggccaaatgcaaagtttgattaattgaagagtcctggcttactctcttccccagctaagtggcttttttattttgttttgaaatgactcgggtagacagccatcctcatgggtcaccctatgtgcccttcccctggtccaggctactgcctggaacttggtgcctctgataacgtcctcctgacttggctgtagcaccaggcgccagacaaagaatcacaactggattgctcgttgataaaatgcttgccatttgcagagctgtcatgtgtcagctgctgccaaaggccagtcgcatcaactgaaatcttctgattacacctaatgccttgcattctcatgatagtgattccatattttagcctaatgtgttttttgttagtgtcttgggatttttaccataaggatggaagtctttcatcgttgcattctttattcttgttagcctgcatttaaaatgtaatggaggctagtttttcctactcctttaaatctcgaagtattattcctacttgatattaaatgagagaagaaaccaagtacagagctacagctattttcaggggctaaaatagggtgctagtttaaaaataacctgcattgcattggttccttgccttttacaaggcaggacaggggcaaagtgggggagcaggcaatccaatattgaaactttgatttttttgaatgttaagcaataaagtgattctttcctaatcatagtcctccaaatttgacttgtgttagttgaaccacaatttggttgatgatttattatagtcaagaaactggccaggtgtggtgactcatgcctgtaatcccagcagtttgggaggccgagatgggaggatagtttgagctctggaatttcagaccagcctggaaagtattgcaggaccttgtctctactaaaaattaaaaaaaaaattaggcaggcatggcggcctgcacctatagtcctagctactcaggaggctgaggcaggaggattgcttgagcccagaagattggggctgcagtgagccatgatcacaccactgcatgccatcctgggtgacagggtgagaccccgtctcaaaaaaaaa

SEQ ID NO: 55153 - DNA, 810 bp, Homo sapiens
tacagtgaaaagtagggaggataatgtgaagccaatggattaaaaacaaaaccaaacaaaaaaaacaccattgatctctctgccttaaatgataaaattaatattggctatagtttcataagagtctgaaaattaaatatctaagatttctctgtaaaatgtgaaataagcattttttgactgcctgctgtggccaagatactgtcctagtcctaggcagtttacacagatgatctcagctgaattttgaacagccctgagaaggaggatctctattcacctacgaactgaaggaccttgtccagggttacttagttgtttaaacagccacacaaaggcttgggctggatgccaaatcctatccttacacttcaccacatttccagagtgctaggtgaaagtacgctatcaaggtcactgacctcaccctcttcagaatatttgggaaagattcgtgacctttggatggctggtgtcaggcatacactatacagttctagatattgcagttataagggcatctctctctgtgcccaggtttagatgtcacacagctgaccttaggaaacagaaaggctgatgtctgtgctttgctggatgatcccagcagctttgtgctgggtgttctggctgaagtcaggctccctgctttagcattctggtggcctctgtgaaaaatcccgtcttcccagggctaattaaacattttcagaatcccctctctttaatcaaatatgcctgccttttcctccattccttcagaataattctcaataatttatcttataaaactaagccatgaagaagtgt

SEQ ID NO: 55154 - DNA, 752 bp, Homo sapiens
gcaggagagtcatgattttatttatttatgaaaacccttttaacaattgtgattgcctctactccaaaattttggttgctttattaaaaagaagcttcctcattttgtatctggaaagtgattgatgatatttacattgcacattcattattattgtgcaacagaaaaagcctgtaacaagagactcacaggggtcctcagttctgccacttactaggtgttggtccttgagtaagttgcttaattttggggggcctcagtttctccatctgtgaaatgtggccactgcgaggatcaagagagaatatagatgaaagtatgagcaagactacaaaggctctcaaatgagagctatcctcactgtcattaccacctttatggaagtaaggaattcctgaaattaggtaaactcggcctctcctgtttctgcctcaggccatgaaacaggcaaagttgtctttggcaatggacattcccttgcacaaggcctgccctgagagtcaccctgtcttgcccaacctgctctctccctcatcccatctccttcccatcattccctagaggctctactgaaaggtatttattttgtaattaattctttcaaggccttccaaggtgaagatggtcccaccctaataaaggccaggagagctctgagaagtcctgccttcctctcacgagaacagcaggcacctttcacaaagactttccaagggccaggccctcacctggactgtccggccctaaggaga

SEQ ID NO: 55155 - DNA, 1734 bp, Homo sapiens
cccaggctggattgcaatggcacaatcttggctcactgcaacctccacctcccaggttcaagtgattctcctgcctcagcctcccaagtagctgggactacaggcacatgccactagacctggctaatttttttgtatttttagtagagacggcgtttcaccgttggccaggctggtctcaaactcctgacctcaagtgatctgcctgccttggcctcccaaagtgctgggattacaggtgtgagccactgcgcccagccctctggtcaggtttaagagaacaaacctataaggaaatgaacttctaggtcatgtctaacttagtagaattcaactgaaaggacagagaaatttgtagactgtaccttctattttacccccttcaccctttgcataaatctttctactccagcaaaccgtgaatttcttagatggcaacgtttctcctcccaattctttcaataattgcttattaaatatctactccacttcaggacaaggatctggaaatacacatgtaatatttggtccctggcttcacagaatgcagtctagacgtggctggggccacctagacagatgtctccctacagttcagtgtgttggatgctaacatgaaaaagtttgggtgggaagaaatttagttatcagaggaagaacagagtccaatgaccaagttcaaagtgtgtttattagcaatgaatcagggggaaaggttgcctccaaagcaaggctctgatgtaatcaaaggaattcagagaaccagggcaggctaatctccaagaaacactaataaaaatgctcacttaaatcaaatgttctgaacacggcacataaatacccttctcttagtgtttatcactgtaggcagctttgctatgaaaagagaaaaggttgagataaacgagttaattaagctgccaggcctagtccagccccgagagattctttatcctcctttctggcaggcagtccatctcaagtttccaggagcagagcacactcactgcatcccctttttttcctgtggtaaaggtgtgacagtgtcattcctgagtggtgacagcaaatgactaagaactgctcattattcctacaactatccaaaaacctcaggccagactaccctaaggagtatgaatgttctagaacaggggtccccagcctctgggccaccgactggtgccagtccatagcctgaggaacggagccgcacagcaggacgtgagcagcaggcaagcgagcattaccacctgaacgccacctcctgtcagatcagcggcaacagattctcatgggaacgcaaaccctaccgtgaactgtgcatgcgaaggatataagttgggctccctatgaacatctaatgcctgatgatcttctgaggcgggacagtttcatcctgaaaccattcctccccaaccacagtgcatggaaaaactgtcttccacgaaaccagtccctggtgccaaaaaggttggggactgatgttctagaaggcaggagaaaaacaggagtgactatggccttccaattctgaatatttcagataccaagtggaggtccaatatggactctctgaggcggggactataccttactcattcctgtgcttcatgcatgtggtgctaaaagctctcccgtttgtggaatgaaaaataataagaaaagctctacgcgtttgtggcatgaatgagtgaacaccaccctcagtacttgtctagccggctttgtaca

SEQ ID NO: 55156 - DNA, 1924 bp, Homo sapiens
tactctattcattatatgccccaggatgaactctgaaaagcagcgcttaattatccaacacgttatcaaattcctaaactccttccaaaaagcaggattaaagcttcggagtttaaaataaaaaataaaaaaacaactccgcaactcctcttacaggttgccttcagggtatcaaaaggggtggcacttactgctttgcaaatacactttctaaaaataatcaatattttctttaaatgcttacggcaaagcaaccaattcacttcattttaattgctcgcaagctgcagaatgacttgatctctttaatatttcactcatactagcagccactgagctatgactaacccactctccccagcatcgtcgctggctccagatggcaagaaatacattccctttattcttgcctgaaaagcaattctgatttttttttcttccacccatttcacctgcagtaattgttttactccagaaagaaaatgggtggggagtggaaggggagattcatgcagaggggagtacaggtggggaatttactttttttttttttaatggggtgtaagcactgcagctttaaatcgtgctgcctcaagccctggatttcttccatagccgagctgcaaaatggtaactagaaaggaggaaaaaatacctcttcctccctcctggccagcccttccacagctcccggcagggcagccagcgcgagcccatcccccacgcctcccagcccagacgcgcggcgggcacaggtgagcggggcgccgactttggcccttaggctcgcccacatccggggatcaaggtcaagggcgagggcttccttcccctgcccccggcccccggcagccccgagcccggggatccgctgccaaagtttcaggccgggctggggccggcgcggctgtcgcagcccccccgccctcccgcacctgttcggcccgccggggtcagtggacggtgcccacctggtccccactcacctctggcggacatggtgcaggcagcgggagccggagctggaaggcgttggacagccccgcagggcgcggggaagaaggcagccccggagcgcccgcccggccccggccccctccggctcccggtgcggggacgccgcccgcaggacacctggccgcccgctccgcgcagcaaggccgacgggcggggacgcagcggccgcagggacccgccgggcgcggcagcgctgacacccgcggccgcgctgggcggggcgcgcctcccccgccccgagccgccggggcccacccgggtccagcagccgctctgccgcggcgccgggcggggctctgtccccgaggaacgagggtctgcgtcctcccctctccccgcccgtcttcttaataagaagaaaaataacgtgggtgctccgaatggctctccagctctctggtcccagagagagaaagcaagaaagggccgttcgttccttcccctaagtgatgcccttgacaggagagcgaagaccacggtcgcctgagggggctcagcccgcagtccacacgcggggaccgacccaccagcccctccgagtcggccaggctctcggaaagcctatgggcggggtgggatggggcgggacttttcctccagcgaccctcgagtcagcggggggcgtcagggtccccccacccagcacccggtcttgagccaacagacactcaagggaggtctgtgcatacacttgatttactgcatcaactctgaagagtcggggctgggccgggctggtgaccactctgaacaaatcccctttttctatatgtcaggataaaaaggagaaaatacaacaaaaacctcttagtgccctggaggtttatcaactagcgcttgatgctaataagcaacataataaaaagccaccagatctagaaattctaactaaaaaggtgggattcca

SEQ ID NO: 55157 - DNA, 2639 bp, Homo sapiens
tagggagtattttaagcagcctccacccaagtgcttaccttgtagctctatttatctgccttaggcatttactggactcctttcagattctttccctcgctaatgttttccggtatcatctgataactgaatagaaaatgctgttctgaatcactacacctcactatcaaccatatcacaaataaattatgttatatattatatataaatattataatgggctatttaaactaagccagccgtcttaccatgtgctcatgtgggatttcctgtttcaatgttgaataataatatattttaaagttagcaaagccatttcacctgcagtcgttgatttcttcaaaatctgagcatttaaatccattgccaatgtttgcttaaagaacactgttttcttaacgagtcttccaaatcggtccttacaggaagaacctctgaatgctatacgcatatatggacggctgcgtgtccctacaaagtcagcctgttacttccactggagaaacaaaactcttgagaatcgctgagctgtaaaaatgttagaaagccggtgtcccaggcgccctgagaaagccgggagagggcggtggctgcccacaggccgcctccagccccgcgcgaggccgaggcctcagcgcgccccccgcccccgcggcgcctagcggccccgccgcagggcaggcctggccgggcctccccgggctgcggcggcgccccctgcaggccgcggcgggcagagcggggggaaggaacccgagccgggctgccaccgtgtcccaaccggtgccgccgccggagcttctccgggccccgagtcctcgccgaacgccctcctcgccgcccgccgcgtcccggcgccctccggagccgccgagccgcccgcgcacacctgaagcggccgggccaggccctgcctcgatcctcagctcgtcctccccgccccgcaccggccttcactctggagcggccccggcagccgcagcaggggcggcggcggcggatcgaggagctctccaggtcgtcccgggagaggctgctgcagtcccgggacaggatgttctccaagttcacctccatcctgcagcacgccgtggaggcggtaaggccgcgggctgcgggcgcacggcaggccggggatggcggcggcctacgctccccggcggcctcggggacaagccgggcggccttggcccggccctcggcggccctgtccccggttggggtgaggccccaggcgggcgccctgggcggccgccgggtcgtgggggcgcccggggcctcgggcctggctctgcgggggtcccgtcggtccctggctgccccaggccggcagtccctgccctcctccaggagccggggcgggggtgccggggaggacctggccgcccaacgccgctcggtggtcgcctcattcctctgatggggccgggggttcggggagcacctggcggggtcgcagagagctcccccgggctcccttaacgttaaccttctccggaaaaaaagtggtcagcgttgagcaagacaaaagaaacgagcaagcaccgcttgggcttggttctgttttgttttggttttcgggggtagaggtgggagaggcatggtctcgctgtggggcgtccctggcgagggagccgccgaccagcccccgggttgctggcttttgctttcttgggcctggaggccgaactcagctgaaccttatgtattgatctgaaataggagtttggagggtccagtcgagtttgctttcgacagcttccaagctcaccgagcccagagaccatctgtttcctttcttgtctagttctcttcctggacactcttcgtttatcctgcaattgtactctcctttgagggttttagacaccagcatagagacagtattcaagtatcctagtagactaataagtgaaaagaaactaaaaagaaaatgccttgtcactgttctagtaagaatgctagttgcttcacttgtttactttattctgggagaactgcccaaattgaaaaatgcattctgtgcagaaacaattactttgctaatttttaacatgacattctcttcctatgttcatattatgtgataggacactttaaaatgtacactttaaaaatgtcagatacaacaatgattttttatgggcaggcaaaaatggagtttttgccttcagtaataaaaacaaactttagtacaattgttatttaagtgatacatgagaagcgttaaaaaatttagctctagggcaagctcttgggaaaatgtatcaaacaggaaaaacagggtttcataaatgtagagcagtattacacggagggaaatgacagtggtagacttcaagacaacttttagtttttacttgcttatacacactctacttttgttgaaagaatttaactgcagtttattaaaacatttaaattttgttttctttaaaaataccaagaatcatttaattttatttatttatttatttatttattttttgagaccgaatctcattctgtcacccaggttggagtgcaggggtgtgatctcaggtcactgcaacctccgcctcccggattcaagcgattctcctgcctcagcctccctagtagctgggattacaggcacccgccaccacacacggctaatt

SEQ ID NO: 55158 - DNA, 989 bp, Homo sapiens
aagtgccaggattatagggatggagccatcatacctggcccaaatagtttttttagtgttgactggatgtattcatttaagtgaggcttaaacatagagtttatcttactgtttaattaatggtttctcctcactccctggcaactacttataacgtgaaaaatatgactaagatattttccaaaattaatatttgaaaatgtgttgttaagctgatagactgcattttgagtatggaagataagttcacaccttcttgattaaaaacaagaactgtaatgtaactcctgcctccctttttagaaatgacagtcttctctcagtacagaaatgattggccagtaagagtcttatgaaatgaatctgttagccagttgccgcatgtcacaagtctgaattcaggcctttcttgtagttagttccggggttagattggattgttttaacacaacttcttcaaaagatagataaaacactttccatgtagtacaatttggtatttgttgagagcctagtcctcactagggaatgtgccaagggcatgttcctcttaaattccaaccagttccacccttgcgggcagatttattccagagaggataaaggacagtgtcagggaagagttttatcattttagctaattcctttaatggaagtcatctttcagaatgtaagtgcaatgttttcttttcaaattatagttaagagttcatgatgattgttgagactagcaattccttaaaaatctcctgtgccctggaaattcaaaccacaaatcaaatgtatctcatgttttctcaggcatattcttttccaacaagtgatctctaggttcagtccttcactcattcagcacatgtcttctgagtcaccacgaaagcctggctccaagtgagggaaacaaggtggacttggtgtgcttgtgtccttggtcacaatgcttacagtctcatatgggaaacaaaacaaatatacaagttagattacag

SEQ ID NO: 55159 - DNA, 1827 bp, Homo sapiens
ataaaaatcaccatcagctgataagttgctatgtacatctcatctgactgttaggagaaataaatttgggattatggaatccctccttccatctctcattggctcataagcttagtgatgagagagctttgaaatgcttgactcattagaatctaaacctgaaagaacacaactagcatagtactttcctcagtgtggaaactgagtggaccaatttggaattaattttcaactgtatgttaaagtacgtgttctttttttagcattttagttaaatatttatgtgagcatagggagttgtaaaagaaatttactaagtaggctgtcttcagtaactagaaagtcaaataaagaaattgtaatctaagaagtatttcactatgttagagtttagtcagcgttgtttctgacggtaatctctataagagaccaggtccttttttttttcttttttaacctcttaatagcattcgctgtatttctagtgttgcttggttggtcgttttaaacctgacaaccaaagtataaaaatctggctattaataggtattgtggcctcacctcatggctgtgtaaacctcctgggtagccaggatgcatcagtttattgtggtttgttttttgtttttgtttttgagccagtttgctaggcgtagtttaaatcaagcttgttgcttgattaagctaacaagcaagaggtaataacaatgagtatcaagacagtaatgtttaggaattttgaccgaaagtactaaaaaggaatctaaattttaaaaagtagtttctgaattgaaagatctaccctgaatcttcaaccttgagcactttttctctagtttgtggagtgctggcacaaaaggatacattgaaaacagaatatctgaaatacttaaaatacttttcaatttcaccagatagcacttcatagcacagcgctgattcatagactgtttcagtcattcttcctgtaaccgtgtatcataggcaagagagatttctagtattattttacaaatgaggaatctttggtttcagttatgtgacttacagctggtaagctatggagccccgtctgaaaccttttatctttaaaactcttgagccgggtgcaactgtagtcccagctactcaggagtctgaggcaggaggattgcttgaccccaggagttcaaggctgtagggcgctatgattgtgcctaaggatagccactgcacactagcctaggcaacatagtgagaccccgtctctaaaacaaaattaaaacacaaacaaaaaaaaaacccttgattttcaaagccttttgggtaagaacgtggtatagtctgatctcagagataaaacacaagtcctagaaagctaagcatttttggcctagttttactttctttcctaaacatttttgccggaagtgatacttgcttgtagtttcttttttttctttctctccctatttcttcttcttttttttttttctgagaccgagtctcgctctgtcacccaggctggaatgcagtggtgtgatcttggctcattgcaacctctccctcccggctcaagcgattctcccgtctcagcgtcctgagtagctgggatcacaggtgcacaccaccacgcctggcaaatttttgtatttttaatagagatggggtttcaccatattgctcaggctggtcttgaactcctgacctcaggtgatccacctgcctcggcctcccaaagtcctgggattacaggcatgaaccaccacgcctggccttcttctttcttcttttttctttttcttttgtttttctctttgcagggcattttcttagtatagattccta

SEQ ID NO: 55160 - DNA, 1384 bp, Homo sapiens
taagagcacaatacaatcaatgaagcagtgagcccaggaagccatggatcttcacaagcctcaggaaaagtcaacatttaaaattttctatttaaagtccaagggcacagcaagctcttggtctatatgggaaggccatggactacaattcccacaagtccgtgcgacctctccgttctgcgcagcttcgcggtatgaggaagagggtcctgtcaggcgcactcttgttgcatcatcagcgtgcacctccacgatgaaacaggtctgggctacaaaagtatggccgcttctgaggcggcggtggtgtcttcgccgtctttgaaaacagacacatcccctgtccttgaaactgcaggaacggtcgcagcaatggctgcgaccccgtcagcaagggctgcagccgcggtggttgcggccgcggccaggaccggatccgaagccagggtctccaaggccgctttggctaccaagctgctgtccttgagcggcgtgttcgccgtgcacaagcccaaagggcccacttcagccgagctgctgaatcggttgaaggagaagctgctggcaggtactgcagcccgggtggggaccaggctgaggcggtcgctgcgagaggggaagcacattaggctttttgcgacgctcgtgattcaagagacaaaaggaggggaaagggagactgaccattgaattagctctggacaggaatctcgggcatctcgggcttggacttgccctggcacgaactcttgtagcctacttggcagttgtagttctcaacgggaggaaaaaaatcccgtacttacacaataaaaccctgcccttgggcgtgcagacctgttttctgtaatctgatcgatccctcaggaggcttttgttgggttcatgtggatgaaccccaaaaggaagtactggttctgcacccctaaagttgcattcctcaaaatgtattggaaatgcagatatacttcgttaaccaagacttaatatagtcgttttcacattttaatgggcctaacaattacttagagtctcttgtacaaatacagattcctaatccctgccctgtccgagattgtgattcggagagttcggggtatttttaggaaactgcaattctaaatagttgctccaggtgattccagtgtaagtagtttatggaccacatttgaggaacactaaatataacttggccactaagctgagagtgttcattttattgattcgtttattcacgtacactgggaaaatagtagaaaagcctagagaatcaccccgttaatcagctcggatgatttcacacataaagcatccaggatccttaagttcattggacatatacaataagccaggtctgtgctagcctatagagacttgaagatgaaag

SEQ ID NO: 55161 - DNA, 1117 bp, Homo sapiens
agctgtagttttctaatcaaagtgcaagaaatatgctattcttagaagctggttttgtgttatatcatttaacatgaaacacgtatctcctgtagatgtggacaatttattattactttcagaatagttatttgcctaacagaagagctaacataaattaagcagtaaatcagttttgcttcctttagataattagtaatttacatataacctttggctattcttttatcttaggttattgatataagttgcataaaattgttttctatgtagaatgttctttgaaatgcaaaatctaattaaaatgcactattttaggacagttgagttgctaaatgatattacggagactattatgaatattttaggaatctgagtggagtatgtaagaaagctaaattataacctctatggactactttaggttactttatcagtcggctgaaacaaggaaaactgcccaggtacttagattattggatttttttacatatactatatttagaaataatgcaattatgactgtattatgatacctagacagtttcacattaagttacacattaatgtttgcaagatacactaaggttagtaaaggaggctaattgtggctgtagttattctgcccaggggctttcacatgcaccccaggaggctgctcaaaacaatgagtatcaacacatttataatcacttaatggcatacttattgatgaatcatattccaattactaacaaccgaaattcagttttgtggaaggcatggtaaatgatatacctgtttgtccagccaggacaaacaatgagtatttgtcaagagcctcctgtttgcttaacaaacattgtttagcaaggacccaatactgggtaaacaactgttgcatttagttttcaaactgaacatttcttaattttatagtgaagattgagtgtagaatcttatggtagctgtgaaatggtatgtagctaggtgattattatctagaatcttaatgtattaaatcacagtttagtgacgttaatattttacaaattaaagataatgcttttttagactgctgtccttcttttcctttaatatgtgtggtaaagtgaactactgtgttttaattactctt

SEQ ID NO: 55162 - DNA, 3955 bp, Homo sapiens
cacagtcagcacactcttagtgactcaaaattctgaattatggcagaaaggaaaaataaaacatacttcacattagaacacagaatcatttacatcctaatactgaccacagttcactaaagctcagtagcattaacagatatagtttggaattgcagtttcctcacttcagggtgacaagatatgtataacagtgacagaaatctccaaagctgctgtatatgatatagctttgttaaatatgaaggtcctttaaatacaattgatgtttagtactatatatgtacttttcacattctttggatttctggaaggttatgacactttactgtttacagctaatgcatagttacttgcatgccatggttgtacagtagcagactatgaccctattgtgatattaagtgtttatttcataatgccatttatacatagctgaatttgatgaggattgaatgtcatatataagaggaatgatcatacaatatgtagttgcatcttatataagatttctaggttgcatctaaccatgactatgtcattattttgataattaggcatttatgaattatagtatatattcctcatgttggcatgataattttgctattttccatgcattaaaaataagacaaattcttagagtaattttagtaattttatctataatctgtggggtttttttggagggggaggccactggttgtttctacttccctgtgatattttctctctcattaaaggaatgagctaagtttgtaaatatctcctaaaaacaatcaagtaattttattagcttcttttggaccctctaaatattgacttctctcatgaaaaaataaattgatgaaactaatgattacaaagatataatcattttttaaaaagtgattgcccaatgtatttctctaacaattgtcacaagagaaagcataacaataaaaatacaaaaacatacagatttagatgtaaaatctatataagctatatttttagggaggctaagcagatagtattactgtggaagaattatcaagttttattcacctcaaatcccactgggttcttaaaacttgaaaattcaaattgtagagaattatgagacacaatgtgatgtttagttaaagtcatgctatacctttctgggccacatattgctaactctgtggctaattatgcaattaattctcaacgtatcaaagcttttcactggcagtaaattctttgccctcaggtgaagtggattgaaaagacatcaaggatcaaggataatcactttgaatctgttggtttttccccctacattccagacactttaaatttggatgctttcattttttttaaatcaaaccacacaaatatgcagatactttcccagaatttcgcagttaaatggctgatcctcttgaaaactaaccttaatggaattctaaacatttcagtttagaatgactttgaaaaattccttagatttttaggatgttttattctgccaagtatgaaaaaaaaatggttaaatacaatggagttttaaaaattaacctggggattctatttgaactagaaaattcctattggaaaagaatttgcacatacttacagattcagctaataaattttaagaggattaggattctcataattctttaaatgaaaatttgttttagtgatacacagagatgccgtatactatagtgttatgttcagtaggaaaacttcaaatagttcgtatttaaaaaggtaattgatccttgctgtacttcccaacatctcatcttcttttagctgcagtaagatagaggtgactgtatggctacagttcatggtataaggtcatttagggtgcacactggcacacaggctggaaaacgggcactggacccagctttcaggtgtgtggtgctgggtaagtttcacctttgaagcctcagccttccatctgtaaagggcggtaatggtgcccacctttcgaggcattgcgaggctagatggtaacacacagaaagctcccacagtgggaccttgatgcagcgtagctggtattaacaaccgtggggacaccaggccactctttttctaccagttgttttatgaatccacctattaattttcatccatcttttggtcgtaggtaaaggtcaatcaggtttttcaaaaagactccctgaataacttaagttcctgtatttctaagatatagggatttctacaaaacgactttgacatttagtcaataaagacttaaactcttcttaaatctatagttttaggagagtttttcttaaaattactgactgatgacattgagacaagagcatcaatgatcacctttcacgtacaaactaggcaagacagggtcagtgcttacattttgtggttatacatgatacatcttttctcagtgaacataaaactatgatttgaaaggtgtcttatatttaaaaaagattgtaaaatgaaaactgaccaaatgaactaattctacccacctatggtctttttaaatgtcgagtttcaaaacccatttgccgtatactagagtgagcttggaaacttacctgattacaggaattgcttgggttcaggcagattcccactttcacctctagagatttagattcagaaacactggggtaggccctggagagcagtactcttaacaagctcctcagtgcttcttaccattaggcaaattagggaaacactgcattgggtcaaagtgctgcctttaatcgaccattagagggagttctctaaataacaaagttattactctaattcaaaatgctttaaagaattttccaaggaatacaagccatctggttggtgttagttatagcagtgatttcattagagtgtacatttaacattttagttttatcaaaattttttgaaattaagaattagaaccagagctcctatcagtatatatgtacacaggtgtgcatgccagtgttcaaaagattgtgtaaaagttcaagcccgttttagaaagccaacattttatgttataatatgctgttaatcaggactttattaaataaaaacattggctcttccaacccccactgccaaatgcagttttgttttgtttttgtttgtgttttatcctttcgtggtcacacaggaaaaagcactctgagaacttgaaaaagcccctctccatcgaagaggtgattatatagtttgttattgaattttgacattcaaaatacatttccccctctttttctcttcaccagatttgcattgacctttcctgtacgttctctgtgaggggcttgctgagcacttggaatgttcctgagaattaaaggcaaaactcacaaggcccagcagctaagaatctagctataatgagggtctacgccacaggacatgtgttatagaaattgctcttacttagaataaaagtcagctatctgagaccagggcagctctggcatagctgactcttctgggaaaagcctgcaggttctctggtaagctctgggcttggtccttatgtggccatctggggcccagccttctttcagtggcactgctctgctaggcctctgtaaggtctcaccgagaagaaaaccaaggaggatctaaacttctctcttctctccaaccccctccccccacaccacctgggcccagcacctgggataccttctgggctcagggcctcaagcaggctcttccaggaccctgacctgaggcctaaccctgaggccggccctgcctgtgctccagaggttggaatggtggtctcctccccgtcgcacctccaagaggccaggccaggaaggggctgggaagaagaggaccaccgaaccttgagaaacatgcccagcctggctgccgcctcccaggaacatcagagaagaaagagaagcttttcgagggtcctggatgaagatgcgcccaaagtaggtagagggctgttgggtggactctcgccacagac

SEQ ID NO: 55163 - DNA, 568 bp, Homo sapiens
ctaaagaactagtaaattttttttaacaaaaatggccaaaaacagaagagagtttatggtcaaagcctggtacatcttttcaggcactgtctgagttctcagattctctctttatgcattaatctgtgcttatgttttcctacctagcactcagattttacttcatcatactaagcagcttacgctcagcctctgtgtttgaacttgctcaaatttaagtacagaatgatcaactccattgcacaagaaactgggttttcctcccttccaaagtgccactgcctgcttatctcattaccccagggcacagcttctcactctgtttgctagatacacaactctaactaagtgcccttaagttgcctttgttttctttacatggcccaatgacacgattggtgggacatgttcaataaattttggggtttagactgaaagagaaatcttccactgaacaaaaacatgaagaccatgtgtgatactatacaatatttttcctcatggatatgaaagctcaggcaagtcttctcgtattatcagctcatgctcatttgaatatcacagtggc

SEQ ID NO: 55164 - DNA, 571 bp, Homo sapiens
ttaatatggaaaattttaaagaatatagaatagtataatgacccctaatgtactctggttcttaaaacatttgctctttccctttgatgtattaaagttttatatgtgtattttttatatatatcttatgggggggaaattcattggaattgattcttttaacctcttcagatgttactttttgccccattttcactatactttaataccagaactccatgtggaccacaatttttcaacctcagcactgttgacataacttgtgtttgtgcagggctgtccaaaacattgcaggatgtttcgcaacattcctggcctctattcactggatgctagtagcacacactcaccacccctgccagttgtgacaaccaaaaatgtctccagacattgccaaatgtcccctggaaggcaaagttgcccgtggttgagcaccattaatttagacatatgttaaactttttaatctgcatttcctgtttcttcatgtttcattcgtgtattccaaacctttgtcatctctgaactgcaatttggataatttcttcactacttctctcttcagcttaat

SEQ ID NO: 55165 - DNA, 660 bp, Homo sapiens
cccatggtcctgccatctggaaagaatcactgttaatgttgtgccctggagccctggagacttccaggactgacaaacccagcagaggctttgacaatgagacctgtgcagccttctcattctgagaaacgtggatctacctgggtcctgctggtgcaccttgcctcagggaagaggtacccaggaacactgagcagagttcttggtacacagttagtgctcaacaaaaattagatattcattcttgttttcaccatttaaaatgaaaccagtggctattctaggataatccctagggggtgagttgttacatacttgaaccaagctgtcctgtggccagagaggggcaattcccacatcacaggcagtcctaccctggaatctgggcaatgggccatctcagcttctctctctctctttggaaacatggttccctggagctatttacagattactgcatctttatttttgtttccacattggccctaccttgtcttcaagtcacttatcagtgtttgcctcctgcctgagtaaagacggataaaaacttaataaagtaaggctaaatgacactagtgttgctaaaaataagggtgataaccctatgtgtgaagaacacagacagtagcatttgccactgtggcttggctcttacactga

SEQ ID NO: 55166 - DNA, 434 bp, Homo sapiens
ctgcaactcagtaagccttctctgccaggtgggcacagcatccgccctaggagtgcagacctcctagggctagtgatagatgtttaccgtccctggcacggtacccagaacagaacaggcacttgggtccttctcagcctcactcagaaactggctggctgtgttccttctagaataaattccctggccacagatgactccaaaataaatatcaaatcttccatccccaaactctggacttgtctcttgacttccagatgaactgtctcaccaagccctgtgccagcaggttaaacaacccgggcccaacttccaactcagtctcatggctcccacctgtcccatcctggaagcatttctgagcctgcacttctaccttctgcccctttcttgcgtgcctcaagccaggggttttcagacattttgtcacatga

SEQ ID NO: 55167 - DNA, 2748 bp, Homo sapiens
tcttgtttctgtcacagattttattcactttcttggcatttctctcagggttttattagtcatttcttgttccagctcctaaattttctatcacctgcatcccagggatttggttgcattccgaagatgattagaatatgaacggacggtggtaggaggaccctgcaggtccccagggcgctcgctgcggctctgtctcccacttccgcttgatgattctgggaatgttctagtcctgcccctccccacgggccccgcaccatctgtgctgacagctggggttcatttctccgggaatgaacttggggatttctgcaaaggctgtcctgagaagcccagagccaggtgagctgctgaaatctaggcttttgttatacctttaaaacaccaggccaaggtccaaatgttcacacaaacttttcatccaaaccaacttggggattctgtggaatcattctaaacttggtcatttgaaagcagagccaggaagcaagacaataggaaagcccagctaaaagaaaaatcacaagagaacaaaagcgtgtcctgcagaatcgcaagtgaaacacaggcttctgtcttagagcaagcaagttcctcttgctgtttcagggactgttagttgcatactgaagcaaacaacagtggcaatattaattactatgttttatgtcttaacattttcccttaaaagttcctggcggtgacaaggatgccagagatggtaacttcctcagggaaatgggggagtcttattttgagcagccaccttcaccattctaattcatggcctcatgtgatgttaagtgattcttcttggccaggcactgagctagatgctggaaacaagaaaaaccacctcattctaagtctttatcttttatcaaaatactatttataagtctatagaaatcattcaatacaaatatgatggtaactaggagtccaccaaccctatcctctaattataacactgcattttgagaacataatataaatgtcaggtgtggggtgaagcccagtgctgtctcctccgcaggctcctacactacaccctgctgccttttactgctcataaatgagcaaaaggttgagtctgaaatactggctctcaagcaagggtgattttgcctaggctcggaggacccttggcaatgtctagagatagctttgaccacaaagtgtagatggggggctaccaaaggatgctactaaacatcaacaatgtataagatctgacaagcccatccacccaaaatataattatctggccccgagtgtcaatagtaccaaggttcggaagccatggtctgaaagtatttgtggcagccacacttagtccttatgatctgctgtcaagaaaacccaatgttttgacactggggatttctacgtgtttgcagatttcaggagggttttccggtgaatgggataaaagaaaaagacaccacaatgattttttttaaaaaagaaaacaatgtttattaggatattctggggtgagaggatggccaaagggactatgtacattctgtagtgcttgagcaataggctaacagaaaattcgaacatcacaaaaccacttccaaagtccatattgcaaaacttgtacttctacaggagatgttcttccaagggtgttggcaataaaggctgttgcaaaacagctatgtgaggcagccatgtgggagtgaccccaggagaatgctccggtgtcctctggaaagcagatacacaggacgatggacaaatgtgtcatcttctaccagtgggaagctcagtaaacacacaatataacatggagacccgcccgaagcctaactggaggcttctcaacaaagctcagtcgacccctcacccctgttccgaggagactgggtgtctgaacccctcactcaggaatgaattctaaaaataccctaaaaatcagaagccgccttctactctaccgtgctataaacctgcatgaaacagaacgaacataagctgaaacacaccctcgggttaagagtgaaaaatgcaacaccatccaaaagagtacaagaaaaaaaccccacagcctaaatctcacacagcttctcagcaggagttggattaaactgagaaaataattttaatatcaagggataatgcacgcaagatgggaaaactttaaagcaaactctgcagtgaaaagtgtttcccccactcccttgggcgagggaagggagaagaagatagataatgaggagaactataaggccctggattcaggtttctgaaactgttttttttttttcaaccctcggaggacaatcagctcttcctgaatccagaaaagcacatcagaaatgcccaatgacagaccacagccaaatatggcagggcaaactgatttggttctgcgatttccattctcctctccacatccgagaaatgccttcagctacagctaaaaaataataataataaaaaaaaattcccgatcaagcatgcttggcacaccaggaagctaatgctggatcatatagccctccaatcattgtgtgtgtgtgtgtgtgtgtgtgtgtgtgtgtgtgtgtgtgtgtgtgtgtgacagagagaaccacgctttattggcggagccttatgtgccagcgaactgagaaggtccagggtaccttcacctgcactgccacagtcacccggtctcgccccaggtaatcaacctttactgattttcaacggccctggttccctatactcaggacatccactggattttctaat

SEQ ID NO: 55168 - DNA, 1738 bp, Homo sapiens
cagggttggcacaggggggtgtgcagcccaccctcagcagagaataccaggggaagcaagtgacttctcatgaagaagcacctatctccaaactccatttcaaaacccccactctaacaagacctcatcctttgtcttatccataacaagttccactccacacactggagctccacaggccacgaagaccagaaagcctgctgggaaaaaggccccataaagcaatgcctcctgagtcccataacccagcctgatccttaagggcacttctctgacactgaaggtgggacgaagggggacagtgatatccaattgctgggccgaaagccccttgaaacttacaactaataaaaacttacatagtaccatttttgagctgggcaccattctgagcatgctttacactcacaaacacatttaatccgcaaacaccccaggaagctcttctactgtcatctgcacgttaaagatgaggaaattgaggcagaaaagataagtaatttgcccaaagtttaatggctactaagtggtggagtgcacagtttcaactccggcttccttatgagaagtttcacagtgctacaaattgggtgcagtgtatactgcctgggtgatgggtgcaccaaaaatctcacaaatcaccattaaagtacttgtgtaaccaaatatgacctgttccccagtaacctatggaaataaaacatttaaaaaataaaagaagtttcacggtgcatctctagaattaaaattatattttaaaacaaccaactctgatgaggcgttgttgtataattaagaatttgactggcctttgtccttggttcctgagagataacctctaaatccttggaatttcttgagtgcctgttattcatgaattctttggatcacacctgagtgtccgagtaatgggatgactcaggattaggtcaggttaccacaaagaccaaccatgggtcacagggttgggacttgagccacagtaggtcagcctgacttcctgatccccatggtgtggggaggagggctgaagacagccagtcacgtggtcaatgattcaatcaatagtgcctacttaataaaactctaacaaaactttggagactgagctccgggagcttcctgggcagcaaatacattaatgcagcaagggggcgacatgccctaattccatggggagaaggcagagaagctctccattggaaacccccccagaccttgccctaggcatctctttgtctagctggttctgatctgtaccctgataataaagttgtaatcttaggtcttgtagcactttcctgatttctgtgaatcattccagtgaaatgaacttgagggggtcataggaacccctggatttgtaactagttggtcagaagtgcaggtggcctgggaaccccaaagtgtgactggcatctgaagcaagggccgtcttgttggggaccacggccataacctgtggagtctgacaccctgagtggttagctcggaattgagttgtactgcggtctaccagttggtgtcagaataggcatcattacttttctttatgctcatttatgaaccaatctgacacttcagtctgccagatgttcaacaagaatttagggactgatttaatctatagcgatgaaaaatgttacccagaaacgcaatgtttaaagtgctctggtttcggtaatacagtgtagccatttataatgggggcagggaggaacactgctttgcccttgct

SEQ ID NO: 55169 - DNA, 496 bp, Homo sapiens
aagtgctgggattacaggtgtgagccaccacacccagcctcaaacccttcttattaattaagaagacacaatacaatctaaagagctccatcgttcttcctctgtggcccccctgctcctgagagcagctcttcctttctggccccagcctcctgtgtcaaaatctctaatgcatctcaccaaccatgccaatagtggaggccacttcccccagtccaagggtcagcctgttgttgtgcctggctctttgcatacttgcactgttctttatccctcacaaaaaaccaagagctcagtggtgttttacagcagagattcagggtaaaaaccaagcaatagtcatggagccacaggaggcgagccaggattctcactcaggtccaactaactccaaagctcaagcttttcccggaaaaccaactcttaaactgttaaccatgggtgaaaaggaaagtgcggaagaactgctctcagggttacttcaccctacttggag

SEQ ID NO: 55170 - DNA, 457 bp, Homo sapiens
ccaggctcctctgtaacagggcaggacagcatctctgcccacttactgatcccaacttccgtctaagctcctgaaggctgagagagtgtttggtccctctcattatccccagggaaatgcttcagtctcactatcaggacctgggacaggtctccagttccccagatgaatcactccactgcctgccttggaatttactaggtgaaggtcactgactcggccagctaccctgcacagcactgcttgggagcactccagggcactggctgctggaagtgcttcccgaggctgcatggaacattttcacaaaatgtggtacccactccctctggatgtcttctaagaaagtcatttgtttttgcatcagcccaattgttcatgaaatgcatagtaacagaccctgtgattctccctacactgtaaagactgactcagacaggcagctttcctgaccctc

SEQ ID NO: 55171 - DNA, 809 bp, Homo sapiens
ctccgtctcaataaaaaaaaataaataaataaaatttaaaaaaaaaaaaaaaaggtggctcatgataaaaccttaaatgaggagcctcaggatagctggtgagttactaatactttgcagtctcttgacctgctgaatatgcagaaagtagtttctaaatatcccctgagtttgttttactatttacaaattgagtctcttaggtaaatcaatgttgccaaagtggactgataaatgagaacacaatatctaaaaataacccatgaattcttccccaccagataggcaagcaaacaaagccatttccagtgaatcattcctgacccccaccctcaccttgctgggtcaactataaactacccctgtctgcagatgaacccagtagacactctgttttctaatttatcctgaagaaatcgaaagggagtttgaaaggttaattaaaatttctggtatagattttgtcgatatgcaactaagtacacaatagttagccagatcgagagctgggtttctgaatgattaagtattctggttgatacagaattaccctacatctgtggattaccaatgttcaataattagaaaagaaacaaacccactgagcaactttaattttttttttgatgattcaacccttggcctactgattcacacatagcaggacatcaataagtgtttgctacatgcctgaattaagaagatacatcagcatttaggagcatctttgcgccattggtcagctcatttcatcatcaatatcttcatcttaattccccacacagactgagaaccatttctgaaatttc

SEQ ID NO: 55172 - DNA, 822 bp, Homo sapiens
acattcttttaaccttaattcaccaccatgagagaagcctctgctttcacccaggttatctagtgcatagccaaaacctgcacaagggatattactgtactttattaactcaagtccacttaaaacttctccagatagagcatctacagaaagacaaacagggtcaggtattttctcatctgtaaaatgtaaaactgtaaaacagtttcctcatctgtaaaattctctcattttacagatgaggaaactgaggccagaggccaaagcacctggccaaactccccctgcaaaggtcgcaaccctgctggagaaacactgaggtttcctaatcacctgtcaccaatctgagatcagcggccattctggccatagatgagttcagtttgtttgtttaacctttaactaaaagcttaacattgtaaggtctggcacaccattccagattcctggcttctctagaaaatcctggctatgtggcaattgtgggtccaaattcctgcctggcctcactctgcagagctggggagtagccacccatggcaaatgggcatgtggtgtcgaaggagacacagtcctacaaaaaccccctttctttgttgccagtggtcctggagaccttggaatttggtgtctttcctctgcatcgtactcagctgaggcttaaaaatatatgattgatatatatatatcatatgcatgtaatacatatgatacacacatgtacgtatgtattgcagaaaagtggctttttaaaatctgaagacacatataggaatattttaataatgtcttgatgagcataatttgccagccttaaggaca

SEQ ID NO: 55173 - DNA, 1251 bp, Homo sapiens
agctgtgataaaaagccaattcccccttgacgtatatccagaaggttcgaggaggccatgatccatgagtctcctgctgcaccccagagcacaattgctctgcatcctaagtggggactaaaacatgggccaatgtggggttaggatttcacctccagctcctcagagcacatgaccttgcctggtaaaacagatgacactgcacaccctcacctgggtgacactatctcagtcagacccagctggcgaggttgaaaagcatgaagtgaccagccagccatggccttgccacacctctacaacagtggcatgtttgcttggcaaaggaatctccactggcactggtataaggagcagcagctgagccggatgcaggagccccaacggacagtggccttcccccagactcccctccagagtatcagtcctcaccaggcccacaggatccctctctccttccagggcccagccacagacccctctccaagcgtctctgcccagctgtccagtctacatcctacccccaagcatggttcagaggaagaagcagaggttggacagcagaggcccagggaggctgatggcactttaagccactgtcctcatggtgtccctgagggcctaaatgacatgtccatagagaacgggaaaccccataaccctctgtacacagaccatacccatgttccccaaagagcacagccagtgaaaaagcaggcaggaaacagtgaacttaccttgctgaaaaacatctgccaagaaagaagaaaagtaggggaggggagaggggagaaagagaggagaaaaaatattaataataatgttgaaaaggacagtatgatgatgacatatgctgactttgctaagcactctatgcatatttcctttaactcaggaggcagtgcttaagagctcaagctctggaatgaggctgcttgcatttcaatcctggcctcacacttactaactctgtgacttacagttccctaaaccacaaaatagatctaagtacgggaaaaattaaacaaatgatgtcatacattttaagagcttagaccagtgcccagtacatagtaaacatagaaaaatcagcagctattatttatattaatactactttcacaacaatcttataaagtaagttttattatagttctcattttatagatggggaaactgaggctccagaaagttaaataactcattcaaggccacagaggaacaagcatggtcaaagtgtgttagaaaggt

SEQ ID NO: 55174 - DNA, 3556 bp, Homo sapiens
caggagcaagtctgcggggcagaggggagggagcctgagtgcggcgggcggggaccccggccgcccctgctccgggcgagggcgcgcgcccgggtcagggatgcttgaccagccttcgggggcgccctgctctgggagcgggtccacctctcgaccatccgggagtccattttcccgccccctggaattccagctcctctctcctcctcccgggcccgcaaggaagagtggcgcaggctcagcccgcgggcttcaagggtttgctccagagcctgcgctgcccaccgcgcacgtcggccctccgccccggggcatcctggcctgagcaacgacccgggctcccgggccacccccggctccagccacccgctccgcccggctgaaactcaggcgctttccgaggagaagtgcggcggcggactgggcaccgggcgcgcgctgggcgcggggcaggccagccatggtcagcggtccgccgggcggagagtgcccagaagctactcgggaaaaacttttctcttccaagtttgctctcccggccccaatgctccccaactccacctgcccgccgcggctccgcgagctcccagagactctctgggggtgcagggccctgggctggagggcttcttagtcccccgccaagttgggtcattaaaaaccacaggaaatcaaaaccaagcccgaaaagcttcaggcagcgccgcgccgccaccgcctccctaacccggggattcgcgatcccattccccaaaaagacacttcttccttccacatccaccacacccgcgccccaattttggtgcggagggcggggtgggctgctgcaagcgaccctaggaaagactcagagggtaagaaagcccgcggcgggcctcgacttacccaagagcggcagcgcgaagtacagggtcgccaggaacatggtgccggcgcggggctggtccccgcccccccaaaaaaatcccgagccgccgctgggtcttgccgagggagctcagcgtgcagcgatccccggacagctgtgctgctctggccgcccaaagttcagctccatccagtgaaagaggaaactccgggtctggcagcagccaccgccgccggcgactcagctccgggatggcgagggcgggaggcggttccgcttttaggggttcaggtccgacccaacctggaagggagggcgcgctttgagatgagagcggagagcgccggagactccccccacagaaccctctcccctcccccgttcccgcctttggggaatttccaacaccggggtgaggacccacccccacccaggtcggggtgcatgtgcgtgttttccaggggccgctgacacggggatggaggtgagggctggagaggtctgaagagggttcctaaagtccaagggggtgtctgttgggttcaacccgagacgctgaacgcaagcaaataaataaataaacggtactttccgagcgtcgcgagcggagcctgcagctgcctggagtccgagccctcggtggcggcggcggcagctccctagccagccctggcgccgaaagagccccttctcccgggaagttggcctccccctcctcgcgtcagccagcgagctcgctcagccgccggccctccccactccgatcgccaatccctagccccagtcgccgccctccttctccccgggactcgtctccctccagaggccgccaagccagggggaaccgatgtcccgactggggctgaaacccggttcctgcgcccctaccccctacccgccgcgcgtcctcggctccctcctgggcgtccgctcctctcacactctcgcccggtgcccaggactcgggcgcttccgcaccccagcccagggcgagcgcgccggcccgcagtcccggcgtgccccggcaggtgcagcccggcgccacgagcgccccccgggccctaaagttgggagacgccagcaaaaagaaaggggtggccggaggaggggggaagaaggagtggggaagagggacgggaagcggcaatgggttcccaaacagaacgaaaaaaactccaaatgccaccaacctggactcaaccgaccgcgtccagctgcggcgaggagccagtttgtttatttacttatttattctttcagggcaatggtgtccccgccccctccttccctttccgggctcactttatctgcgctaggaaaagaaaaaaaagaaaaaaaaatagatgcggtaatcttcgagagctcgaagggccgagttgggccaggacgatttccgagcagagccctcggctcggatgctcgttagggatgttagtggttattggaagcggcgcggagaatggcgtgttccgaggccagatttcttctggccagaggaccctcggcctgctcctgttcccgccgctccgcagctccagctccctcctaagctcgcccgccaggcagccgcagctgcacacgcccgcttgcggtgggacccgcggccggacccgtactcgcgcacaggacacgcagtgttctgcagccggccgcgggtgctgccagacacacacactctctctctctctctctctctctgtctctctctctctctctctctctcacacacacacacagacacacacacacacatacacgggcacaagggctctttcttcttagggcaatcgagccagacccttcttcggaacacaaagttttcccccacgtcactagtggctgtgattcaagacttggtgctttcaagacacactcagacccaggacgctggagcggcgatcctgggatgcgcccatccgttcgtccacgccagcgcgtgcacactcacactcacacgcacacatgcacacgcagtctctacctctctcctggagctccgacaaggagacaaaagcggagcccccagcccactgcatttaaacccggccagacctggctttagaaaatttataagctgacctccattttggctgtttcgagagtaaattaacaacaacaaaaaaagcctaacatgtacacagcccttcgccccaacccctgggaccgctggttcccagtcgtgctgctcaccccccgccccccacgcctgacacacgctccccttcccgcacgccggggggcgcccggggcaccgaagtctacactgggtcgggagaccggtctaggagccagccggcagtgctcgggatctttgctgatgtccaagttcatctctcggggagaccgagtttgaatcaaatctgcgtgcgcccagctgtcaaatctgcaaacctatcacgccagacaatgggccgccgcggaggacagacaagaatggctcattttgatcgaggggggtaaattgaaaagggcacgggctttggttgaagtttgaggcccgggtgtcagggcggggagaagaagaggaggaaggaggagggttgggccgctctccattcaaccacacatcagccaggcgcgcccctcggctgcagcggctgcttgcaggcgggctgcatattgtgtggagtcgccaaagagggtctgcgcctcggggcgcgccccaaacccgggggacatcctacggat

SEQ ID NO: 55175 - DNA, 664 bp, Homo sapiens
ctgtgtcttcttttgtctatttcctttgtattgtggtcaaatgagacagggccccatagaggctcattggatgaagaaacagttcaacccttagtgagcttggctggggtggtttcagtggagagacagcagggggagccaggttccagtagaatgggcggagaagagaaagaaaattctttggcaatgattaactcatgaattaaaattcctctctggtaggtttctttcccctttcaattattttcaaataatcatatgaagaattgcattttttcagtttgttattaagcgtacagtaatttcagaattcagaataaaagatctgtttagctctagatgtaaaaagtcacatttggccatttgcaagggaatgatctactgacagatactatattgatctgtatctacgtgtactgggcattcttagcacatatccctgcaggagaagaagaatgactcactttgcctctaaatgattataaaagcatacatcttcttgcccaattggtttcctagatttttctggattaattgtcacattatggcaaataaaaacttggctatagaaagtatacatactatatatatgccacacaatacaaaggaaataggcaaaagaagacacaggacttccatttttaaaagtcataaaaatgcctgg

SEQ ID NO: 55176 - DNA, 1314 bp, Homo sapiens
agcgccggcctccgcagcccatcgcgcgggggctgcacacgcggggcggtcctcacccgcacgcgcgaccagccccgcaggaggcgccacccgaggcagggaccaaccaggcgcctcagcgggggctgcagtccccgccgcggagtccgcaccctggcggggcgcagaacatgtgacccgcgggccgtctccggtccaccggaccccggcccccggccccgctgctgctgaccccggccccgcccgccagaactggatgcagcgcgggcgtccccacttttccacggcgcgcgagggggtgcggagcgttgggccaagcgcgcctcctccctccctgccccgccagccgcggccgcaggacccgcagcctgcgctcacctcggggcccgtcgctgccgccggcctccttgtccgccatggtcgcgcagccccggaccgcgaggggagcctccagcgcagcgcccgtgcccgtgcgggtctctgtccgcgtccgcggcggcgctcgggccgtgtctgagccgccgggcagcgggagcgctgctctgacgcggcagccgccgcagccacggctcctccccgggccccgccccggcccgcccggcgccccgcccctccgagctcgggccggccgggaaaggtcggggaaggcgggcgcggggaactgcctggctccggagctgcgctccccgcccgcccagagcggcccgccgaggcccggcctctcctctcccggcttcgggaccgagcggtcgccccgcagtcgaccgcggcgggggtagtggcgcgcccggggctgcgctgcgggagcggatttcaggccctcggggccccgcggcgcgtcccctctttggaagtcaccgaatggccaggcctggagcccttcagcaagcccagcgcgcccggcgctctcccgaggacgcccgcgccagtccccaccagcttctgtctgtcccccagggtcccaggggagcggccctgggccggcgcaaaggcgggctgggtggaccccggcgcgggcaggacccaggccgcagaccaaggacctgcgcgggggccgagcccggggcaccgcctccaggccgcctgcgggactccatggcaactccggacccagggaggtgcttgccccggaggctgagtcgcgccttccatatatgggatccagctgggccctccttagaagtctgagaataacgatattaataatgcaaggcttcagttgtgaatgattcatactccctgtccccagctcctccacacacacgcgccgctggcacctgtttgggcctggccaggcaccccctgggtccgcgg

SEQ ID NO: 55177 - DNA, 701 bp, Homo sapiens
cctgactgggctgccccagtgacacgctctgaagaggcacattcacaggcgagataaaacaaggacactcgctgggagctggggccatcagcagccgctggctgtggaggccacacagaggggaggggaggacaggggccctgacgagatactggggccagaggccaaaactgaaaacctaggggtgagcccaccagcaaagccagtgacaggcctgggtgaagggtcaccctcctccgggagctgaaatgggaactgaggaaggaagagaagccactggaatattttaagcaacgaaagaggccagggcagagcctgggtctgaatcatttccagggcctagacagagggcccccgggaggatgtttccggaatgaatacatccaaaaggatgggacggcaattgcgaaattccatcatgggaaatccctgcctgccagcatgtttaccaggagcccagggacggggtggatgagaggcagtccctgcagtttctctctgcagtggatggaggtttctctcccaaacaaggggcgcttgcttgtcaacctacaaggggcccagatagaaaggcagaaaaggggacaatggtgagagtgcacccccaaggtgccttgggttccagaagcatggagttgggagaactgctgggggcggtggggaggtggcatcctctggggcctatattgatgccaactcca

SEQ ID NO: 55178 - DNA, 1147 bp, Homo sapiens
gtgagccaaggccattcccccatttccgttttacctccccaagtcctgcctgaatcatcccccatccttaggtctgcccaaaccacaaccatcccttagggttcaccccagatattttcaacccacactggtttttttcattccattgatttcacccccactaatatcccagagaagggcaagtggccgtttctctcctggacatcatagcaggcccagccagcacacggctcggctcagagcaggtagttaataaacatgagccgaatgaaagaattcctgagatcgccaccgctcagtaaggatgccctgagcccctacatccctcccccaacagagtgggcctgcctggcacgggcggccttagcaacccggaggagctcactaacagcagagagcaagggggcgcgtggggagggcggggtggcccaagacgctgggccactgggacccgagcgcgcgaccccagccggaattcggagctaaggctgccgcgctccggcaaaacgcgcttgatgaggtcgttaaagatttccccctctggaaaatcgccagggaaaagtggtgaaaaacgaagccgggagggccctagtctcgggagtctaggaggagcccaacccccggacctaatgccgcagggagaaaagacagagcagcgagcgcaaataccatcctagctccaataaaagggaacgacttttaccgcaggaagaacctaggcctggaagccacgcgagatctgggggtcgggatcacgttgcgttgcctagcgacagcagggacgctcgtgggaccccaggctaaaccccgctgtagccttaaatctcctaccatggaggaagaaggcggcggccgcagctgtgggaccactagggagctgcagaagctgaagcagcaggcgatggagtactaccgggagaacgacgttccgcgcaggctggaagagctgctcaactccaccttctacctccagcctgccgacgtctacgggcacctggtagggacctgggacaagcgctctcctcccgccaacccctctccccccgccccgcgctgcggcaacgccttgcgcctgcgcctgcgcctcagaatctcgcatgccagccgcccgggccctgggcctgcgtgtgcggaggagacttctgga

SEQ ID NO: 55179 - DNA, 1347 bp, Homo sapiens
agttcaagaccagcctggcaacatagcgagaccttgtctccacaaaaattagtccagtgtggtggcatgcatctgtggtcccagccacttgggaggctgaggtgggaggattgcttgagcccaggagtttgaggctgcagtgagctctgatcatgccactgcactccagcctgggtgacagagggagatcctgtcccattaaaaaaaaaaaaaaatcctgtatgggaggaacgctgaattgctgggctcctaataaaggacacctattgatagcctagtaattgaatatagaaagatgtttaatccttcccagtgattacagtgataacagatcattcccaacattaccgcgattcttctattaagtcttaatttaaatctattttgagaaaaaaatgctgaagaaatggtatgttttctcatgcaggccccaacccaaagatgtctatagataaccttagctaaagccacggtcttaaaacaggagatgataggagtggaaccagggttactgcaatcaccatgctttgttttagtaatagagtgatagttcctgatgacatcatttggctggtggcagagattagtagattacatcatgccagatttattttggcataactcactctccctaggaactcctgagttgcctaattcttattaaggaaagattatatttgtttcagtttttagccatttttaaatccacttagtctgagaacagccattctagaatacattgcattttttatgattaaaaaggctgccagcctgggcaacatagtgagaccctgtctctacaaaaatatttaccaaaaaaaaaaaaaaaaaattagccaggcatggcggtgcacgcttgttgtcccagttactctgaagcctgaggcagaaggattgtttgagctcaggcgttcgaggctgtaatgagacatgactgtgccactgtactccggcctgtgtgacagagtgagaccctgtctttaaaagaaaaggggtagaggtggggctggagattttgacttccattatgtaacagcttattcttagtaaggtagacagaaagatgtcacaggttgtttttttccctggttattttttgctgttgcaaggccctgtgctaggtgcaaaaggggagaaaaacatacttcctgtcctcaggcagtttaaaagtctcaatgagggagcataaaaaacatgagaaatccaataataatgcaaaccaagactgttctttaatgtttgccattctgaattggagccagtaatcactattgtcccccgatcacatcacatgacttccctttgcccttctgttcagggtcactgtatgtgcatatacttgagtgt

SEQ ID NO: 55180 - DNA, 633 bp, Homo sapiens
ttaccacgagggaaacagctgctgcagggcatccaaaaggactctggtgaccacaggctccacccctctgtggtgacagtgcagccgcctcagtattccacaatagattaacagatcgaggagaatttctctgacactggccttggtgaatcactattaaagggaccaaaaactggaaaaataaatctctccactcccactttagagtaggaaatcttggcaaaagctcagccattaaaatgttgtcaatacttacatgtaaggacctgactggaatggtcctcgcctgccatcatttccctgggagcagtcagctggcagtggcttgtatcatgcctaatactggcctttcccccagtttatcaccttcctcttaaccctttccgctaagcctctgcccaaagtccatgatgcgtcatcagatgttccagaatgttgaatgagagtgcaagtaaaatcgaacagaacatctgtatggcacaattaacatataaccaaagatacgcccagttgtaaatggttctggagtcctttccgatggtgatgtgacacctttggactagtactgaagatgatctccttcaacttatgtagtatataaaaactggcaccattggattagacagtaaactt

SEQ ID NO: 55181 - DNA, 2420 bp, Homo sapiens
cctctcccttgttggacttaccacaattgtttcctgtctgtctcttccaatagcatgtaaacatccacgaggcagggactgtttagctttactcacaattctatccccagcacctagcacagatgcatttgtggactaaacgaatgggcaaatactaataaactgaagggttcagaatgaagggggagaaatcaaggtttgggtgtgagtaggtctggatgtctctcttgcaacaaaaacaacagaacaaatgatcaactactgagcaaaagtaacctgcatgacccggtcacgggcacaaaacctcaaacccaaagaccacactgcttttttcactttctgaccagtactgtaagatctgtccaaatgtttaaaaaccactccctctggctactgggttatattacctatgtgtggctcggtcatcatcctaagtgacaaacactatgtcttccttggaggtggtaaaaacaaaaataatcaggagcctggggacaggctgtgctgtagtgaggacagattcctttatttttgcctgattatggcaccatgacattgtccatctaccttggccaaggaactacttctccagacatctgccgctatgctttgggaatcagaatggggtgtagtttctccagtggtacctgttttgactctctctgacccacacaatatttaaaagcctgtgatgggagaagcagaacaactatgagtaatattaaggattgatcagaggaatcagaccttagggaatgagaggcactagtcatgccgtctgtgtaaatctgctgcttctgcgtctgacactgggcctgcagtcagctgttctgacagttgggagggaaggcggctgtaaagtgacagagactggggacaaactagagctgcacctatctctctctcacaagcaccaatcttgatgatgcaagacaatctgcagaataagcaggagccttccccaaggagctgcacatgcacctgccccaggatttggaaaagctggaggaggagatgtggggagctggagaaactgtgggccagtcactgccacatgccagttaggtgagtcagcacatcaggaatgtcatgcacaagctataacagagcctgccctacacggaccttccgagggttaaaaaaaatttttttaagacaactacttcacttccaccttctaaatctcatgcagatttatctgtcggcaactctaaactgaaaacaaacaggtgaggagattctaggaaataaagctgcagcccagctaaggttccagggaaagtcccatccaagtctgcagattgagtcaccagtacgaaggtttcaccatcttgggcctgggcccactcttatgtaagccagtcaaactgctttcagcatgcaaaggaggtagtatttctctcattctaggtgagcaacttccatcaacccatactaaccttcatcacttctgtagaactaccatggatgtttccatgctcgtgtgtgtctgtaggtgaaggggtggtgcacagatcctagaaaaagctttcttcatcagctcagggctaaaaatttccaggaagtgctctctgggctccacagcagcaatacatggatgttgattgaactgaaaactcataaacctagtattgtcaggctgaaattgtcctggaattgtctcagtccaaagaacgatctccctgtcctgaagcaagcttcttgactgcagattaatctattattaagtcacttataggctacaatttgagaacccctttgttatcactgaactaggcgcagtgggcattttctgaatctaggcatggagggagagtgactggtttctcaaggataatgaccactgccttagaatcccagtggaaggtggaaagggactagggcaatcgtctagtctgacctgtccttttacagatgaggatgatggggcatgaagaggggaaggaactggcccgaaaccacacagctcatcagtggcagagtcagaacaagagtcagaagctcctgtctccctgtttctgccttttccatgacagcatgctgtttctcaaaggcatcttctcctagaaacaggaggctacaggctagtttttggcatgtttactgatttcattctttccgaatccgtttccatctccatcttccagatctgtaaataaagtctatcccttcaagctatcccttagttttaatttttcccctgtggtttgtagctcctcctggcttgacatcactaggtccactcttggctcccacgggcagctgcccaagactccttctggaatgagagtcctttctttctcctaggcctcattctaccttcattcctatcgtatgggaagagccacagagccgcatcagtgatggtgccaagaacccaagttctcactctagtagtcatggtggcaggttctagaggg

SEQ ID NO: 55182 - DNA, 3127 bp, Homo sapiens
ataatgaaagctccacaaatctagaatatgaatcaagttttaatgttttgggttgggcgaaggtgtattaaatataaaataccagtcagtagaatccagtccctcgctaaaacacttgagaaacttcagataaaggcattctgtccacccactaaattcactgatgcttgtgactttatgacctcaggctaatctaggatgccaggtaaaggtgctgggaaggccaaagagactaacatttatccagcactttctagatgctggatatcacagaagaatgtgttatgtccatttcagaggttaaataatttccccagggtcacacagtaaacagtaatgttgaaatttgtttgccagagtgtggcttcagaggaatccgggagcacttcccaacggtgtctgtggttttacgcaacaacaggtaagagtactggacaggacctcagaaagtcctccagtttcaccctcgcctttagtcaggtcggccttgattgaccagaagatccacggaaggaaagagactcctccaagttcacagagcaggtgagctgggccaagagaagtgaaagagctgcaactaaataccaggttttgccacagagcagggatccttccattacatggtcttgtcagcaagacattcagaaaagtacatgttcctacacatttttacttcctttaaatctgtatggttcctccctttatttctttattatttattattattatttttttttggagatggagtttcgttcttgttgcccaggctggagtgcaacggcgccatcttggctcaccgcaacctccgcctcctggcgattctcctgcctcagcctcccgggtagctgggattacaggcatgcaccaccacgcccggctaattttgtatttttagtagagataggggttctccatgttggttaggctggtctcgaactcctgaccttaggtgatccacctgcctcggcctcccaaattgctgagattacaggcgtgagccaccgcacccggctggttcctccctgtcttgacccacattcgcagaccaccctttggtcagggtaataatgataagtgtttaaatgtgataggttagcatttggttgttgatctggtttggttcagaagtgtggtaactgatgaaaaaaatgattgactgaagcaggtctttattaaaggataatccccagttaccaagcagtacagaaatgcgtgcgcatggcctggctctccttcgcccagcgtcaaccctgttaattctgaaagctcaacactggcaggatgttgaccttgctgactaataaactgctaaaattgagaagtgattaaaaaaaaaattatggcctgaaaatcccagctgggcaaggaaagaggaactagaccgaatccaaacgaaaagctgggaagggtgtgaaacagccctacaggccacccagcgccaacaaatgtgtaagggtggggccaagctagctgagccgcccaaagcagccaaaatatcctgccccacccgcttctccggcaaggaaggtggcactgtgcaacctcgtccgcactgaatcctcgtcccttcccccagcccccgatcgccagcaaacgcaaccagcgggcagcgggtctcgagctgcggggcctgactagccccgacactccgcgttatcctcggtccagagctttcccaggcgcgccggccacggaggacgcttctctgcgggtgacggagctactgcggtgaccacggcggccgccacgtctcccgcccggcttccaactgccctggccccagcgccctggggccgtccccgcccacgggccgcggctgcccacacctggcgcccgcgtgctgcctaccttgctccttcagactggtaatgagctgcagctgcttctcttcgtccgagctgttcattttggcgggtggggccgggaataaaagggaaagagggagcggcgcggggcacacaggaggagggggaagaaaaagcaagatgccggtggcttgcggctccactacccggaagttggatccgctcccgctcctcctcctcctggcgcggagcgcgcgagtgagatcatccccacgcacctactcggcggctgcggccgcttcacctgcaggcggggcggggcgggcccagcagtcccgttcagggggtggaggaacgagggcgggtcggcagccgctatgccagcctgtggctgccggcgcggcaggacgcgctggtgggagggggggcggccctgcgtggggtcgctccgcacccttttctccgcctccacctcccggactcagggacgcgagttcagagaaaaccggctgtgggttcgcagcgtgtgtgggaactccactttggacgcttcccgggggtcgctcccaaagaaccacagaggtagagcgggacgcaatgagccatgaacgcctgggcttcttccctagttttcccgcagtagactctgggggcgcggttgcaaaacctagctgcccacaggggcgggcccagggtggtacattttgcaccttgaagaggagacaaggatcgaatcaggccgcccagctacttaaatgaccatgccgtgagtgaaggagggccctggctagctttcccccatcgcaccaggtttgccaggtggtcagaacgtggaccctgctgcacgtggatggtggggcctggagggcccttgcagatcatctggttggtggcgggatgaccttccctttagagagggtgccactgcagtccgaatgccgaaggtcacgcagcccccgggcagcagaggctggcagttaagccaagcgtttgtcccagttcactgccctctgaactatttgaactcatgtctgtgttagaccatgcccaggagagaagtggcaggtctgcattgtttcaaaggtgcttctccccaacccctagttgcgagctaacctttggtcaagtctcctgcatctttgaacttcatctgaagaataggaagaatagtgatacctactctcaaggaagagttgtaaggatttaatagaggaagattaacaaaacaccaagtccagaatttataatgcagtttttttttgttttttttttgtttttttgtttttaataaagattacaggtctgtggccgggcacagtggc

SEQ ID NO: 55183 - DNA, 813 bp, Homo sapiens
ttgtagagtgaggttgagatatgggtaaatcctgtaactagtgtctttctgatactcactacatgctaactaaaattttgaaaaaaaaaatggtagcactgctttctctttctctaaaatggcaatatagtactttagcatgagtgatttaggggtagaatgatctaaaagggcagcatagtattttttaatacagtgtattaaaatgtttaaagtttaaaaataattttgatatgggattgtattattcagccctttccctaggtatgcgtaagataattcaagatagttgcagatagctgccatgaagatccccaggagataataataaaaaaatccgggagattttaatgaaaaataatggacatttagcttttgtccagcagttgggaaacctgttaaacctgatgagtcatcctgactcattctctctcactctaccaaatacaagcagagtgcccattaaatatttggcttagttcacaaagttccatttttttttaatggctgatttgtctactccaattatacagtagttagatagtatttctggagtttaagaatgagttaattatcaaatctataatcaaacttttggttccatactaaatctgcggcctcttgcaattaatcccatttatcctccttaaaattagaaaaggctcctgagctgagattctgccactgcactgcagcctgggtgacagagtgagactccatctcaaaaaaaaaaaaaaaaaaaaaaaaaactcctgaaatacaatatggcattcacttgaggacatggtatgaattattaggagggctattaga

SEQ ID NO: 55184 - DNA, 637 bp, Homo sapiens
tgctgccccaatctaaaaggaagccgtcgcggcccagggcacggtaactaaaaggccgtcggggagggagacgggaatgagtgggcttggacttgaggtttccgagccagctgctccctagagccgttcctgagctcgtcagccagcacgtatttaatgaatggccactgggtgctaggccttgcacgcaaccctttcgtcctcccccggggctgagccgagggtgacccaacactagtcggaacgagcctggagacatggcgccggggctgcgctctgcaggcctggcctggtcgctctccacgcacccctctctctgtagctgccgccccgcccggctctgcctgtgggcgccccctggcggcaggaagccgagcgcgcaccacgccctcggggctccatccccactcaccccggcgcctctagccgctccacccgcacccccagttcgcgctgcggcggccagcctcttccccgacggccgaccgaatgtccctcagagctttccgtgaccggccagggcgcgtggctgtccggagcccctccacgttccccagcagcaggcccggctctctctgatcagcgagcgcggatgccggtctcctccctccctctgccgggctccagcccgacgcca

SEQ ID NO: 55185 - DNA, 781 bp, Homo sapiens
ggaatggggctgggactcctctgatgttcgaggtgacagtctgggctctgttctggttgaaagggcagttccggaggctgtaaagcctggcagaggaggggaggggagcgagggtgctaggattcagtcctctggagagaacactacagactgaatgcagaggcaggagttctgatttggagatcatttgggtctgaagtatttgagtctgaaatgagggaaactcacggtggaggacagctattctgtcactctgcagatccagcattattccaccatatgcttttcacgaattagtagtgaagttacaatcttgggcgttttaaactgatctttgcacctgctggtggcagagaacagcatttcccccgcccccgacttcctttatgagctgggaggaagcaaaatccagctctattgttggagctccctctggtggcagtttccgaaaacgatccagccctgaggattttgcggaaggtaggcaacaccgaggcatcctgggcattcagtaggaagcaatgagaggaaagatccttggccctttcagagatggggcgaagggtcagctgtcccctctgcaaggtggcagattcagaagagttggaattcctccggagtcggccctgccaacatgcgcacgtgtcctgcggggtcaatgatctgtgcagacgacttggaaatccgctgcgtgccgcccaggcgcgtgcatctttgcttaccctttcctagatcggtctcagccccgcaagcagattggcagcttccggggtgctgggac

SEQ ID NO: 55186 - DNA, 396 bp, Homo sapiens
aatgtgctagcaataaaattgatgggttatggtttcagccaaggaccccactggaccagtggttctcatccttgactgctcatcaaggctaccttaggaagcttcaaaggctaccacagccaggtgcccacatggaccaaattaaatcagtgactgcaacgttagtcactgctgatgacttaatgaggcaatcatccatctggattgagaaagaaagggtggctttgaagtcagacctcagttgaaagcccggttctaatgcacaacaaaacagtaaacatgggcaaggtcccacaccatctggccttgcctatctacccaatctcaactaacactgtctcttctgtgttccagagctttctgttcactcctgcaatgcatctacatcccctttcc

SEQ ID NO: 55187 - DNA, 1308 bp, Homo sapiens
ttgttagtgccctccccgcctttagaatacgaagaaactgaagatcagggacggtaagcgattttgttcaagatgacacagccaaagagatgcagagggggcgtcgaggcggaagaggggttcctcggggaggcccaatccccggggacgataggggctgcgagagtgggcgctgtcagaagaggggcagctagtccaggccaggcgccccaggatggggtagtggctcagaggtcgcggggtgctggagctgatggaggaatccttccgcacacgcccgcggcccctccgctcccgcgaggtcttgcggccgggctgcgctttcccaagcggccaccaggtggcgcggccagaccgcgcagaccccaagctttgcgccagcaggtggcgcgtcccaagctccccgccttcgccgcgaggaagggtcctcccgggagcggacatctccagccgcggtccccggggagggctcccccttccgactccagtcttccaccgtggactcctgagaggggacgcctcggactcttgttctcacctccgtccccgggacgggcacttcgcaccgctgtccccgcaatcccaagtcctgccaaacttgtcgcagcatgcccactagcttcaccctggctgcctctttcctgaccccacagcctccctgcgggcctgcggacagacggggtgcagctcacaagcgacgcctgggagctcctcgtgtccggatgtcgcgtcccacctggagccccctgcctcggacgctcagtagccaggtccaagaatggccgggatgctggggctggggctttgcttcctgtctccaacactgcggtgattctcagctggggtcgagaacccctgccttcaccggagcgctggggccaggcgagcccagacaggaaggggattggaagggcctcgcgcttcctaagagggccagtgagagagagggtctcggacgcaggagacctggccgcacccctgccctgctgggtaacctcacgcaagtcgagctcgctcctgggtctgtcccgggatggggaggggatgggcaggggatgggccaaggcagcccctatggtcctgccttgtcaccaaaagagcagctgctactttcatgggcgggaagtaggtgtggcctgtccttctggggcactggcatgtgggctgctgaatgcactgctctgtgctgggcgctgcctctccgtaggagcgtgcctggcaaatgggaggacgggaaggaagccaatatttaatgagcaactaatatgtgcaggctgtgtagccacgtcacacatttaaccttctcag

SEQ ID NO: 55188 - DNA, 3122 bp, Homo sapiens
tagattatacaggtaggatattatagagttcatcctaggagaaacaccatttctaaaaagtagttaggttgcaagtttctgtttaactggtaacttatcaatgacccaagtatacataatagatacttaatacagaagaataaacccaatgaggatatttttactatgctattcaagcgtttttgtttttaagtacataccaacaagaactattaatgctgagaagtgaaaaattttctagcttttctatcaaagttatgcaaatcaaagcccagacattcagtaccccacccaccatatcatcagctccattctccctacaatacatgaagaattcacaggcgtaaatactcaatgtgctgattacagaataaagagaaatgtgttctaaagcattgtgatttcatgaaaattggcaattatataccagactagtaaaagcaagtttgttattctatatcaatccaagaaaagtataatctacagtttatcaatattgacctttctaaaaatgtgaaattaaaaatcaagtcttctggagtgtcagagaaggttgcaaacacatatgtgtttagtattttgtttgtgtgtgggaatgggagaaggatactgtgccagtatggtgcctggacagaccttgaattcaacatggttaactgctggagaccacaatcaacataatttatgggtgtgtgtgtgtgtgtgtgtgtgtgtgagagtgtgtgtgtgtctgtgtgtctgtctgtctaaaaagaagccactctccttcaatactgatttcacaatagtatgggttacatgtcatcagcctgtgtttataatgacaacgtttaaccataaaaaatgttaaaatatgttccataaattatgtttaagaaaccaaaatcacagcactcagatacatgtttcagttcactttgtgaaaattcatcactgtacatttaggagtgggacagtttctatacgcacacagacagacacacacgcacacacacacacgcatatttccgtaggaagtctgagcaaaaaaaaattccagcatttaaagggctaaaccactattttttttaacataatatgttgaaaggtgatatttaagagggacctaaaaaatgttggagtgagctctttggctatctgtgggaaaaacactccagaagaaggaatagcaaaggccctgtggtgggagcatacctgagaacagcaaagaggcatgaacagattaagtgagaagtggtgacgaaagataaggtcagaggcagagagaatggctgagagtagagaaaagcagtaaatgagatggatttatacatattatctgaagggacatccatgttacacttcacagaataatttggagggtcacattcatattatagtctcattttactaagggcagaaggaaggagggagtgaaagtgggggcaggagggagggagagggaagaaggtaagaagaggaagagagagaggcacctcctcaatatatataagaggcttgtatatgtatgcttgagcatacagttaggtttagacctcaaacttaacatgggtatatcaggggatgaaatcaaaatggagaggagatttttaacttctttatgctcctcaatactatacaaatatatgccaaaaaaaaaatggccaaaaataaccaacaaaatctaccatctacacagagatacaggtagaaggatgtttatggtgccattatttacattagtgagaaactgaaaaattaacaaggaattggttaacttatggtactaatggtcaatgtaattataagcatctgttagaacaaatgaagtaggtatatatagaaaactcaagatacagtaagttttttaaaaaaagatgctaacaatgaagtattgagtatgatcctgcctttataaattaatagcaaattataatacatttagaaaaatatggaagaatagttcccgaatttaacaatagttttaagaaaagatattacagaagattttcactttgatactacatattttctaacagcttgaatttttaaagtgagtttgtcgctcatttgaaagggaaaagaatataatgtgtcacctagaaaatatctgatatatatctagtaaaattagtactgctcatctaaaggtaaataattaacgtgcatatcacatttttccctagtacaaatacaggaagtgtacagttttatgccagtcttagcaatttggcaagagagattttgaaactactctgtaaaacacctgctaatgaccaggtagttggctttaaaactttccaattaagtgtgatgtgctctgatgccatgccaaaaaagtgtcagtacgtcctatgactctgaggtaagaacaaagtcatttaataatacttgtttcctggtgacactgttctgagaaaacagagaatatcatgggaagaaatgttgagtcagtatttaacttttaaacaaggtatttagtaataagaactctaacttgaaatttcatatattcttactgaactattgatctagagtccctcagcctgctatatgaaatcttaagaggaaaaaaaaaagaatcaaaaagacatacacttcataggatagagagagggattaccccctcctccagcatttttagaaacgcctgagccatatgaatcctatatacattttaagaaggtaagcaaaataatgaagtggttaatattgatttcagcatgttagttttagttatgtttacggtaacaaagttgtatacttctgtttgtgtttatttttcaacctaaagtctaaggaccctaaaaaagcttcaagggaactatgaacttaaatgaaatatttttatgcagaaaatttgttttctgcagaaattttctgcaggtttccaaaggacaggaccctcaaagacttaaaagtactttcaatgtacacatatatagcttcttttttggtaaacattgtaactgttgaggggggtgtatttttagggtttttttttaaagtttagagcagggatcagtgaatcttttctgtaaaaggccagatagtatttgtgggtacataaggtctgtcactaccaccaccactaccaccaccaccactgtcaccaccattaccaccaccaccaccaccaccag

SEQ ID NO: 55189 - DNA, 609 bp, Homo sapiens
aaatgatatgtaatctcactgtcattggctagtctacaaatttcaaaataataatctagtcaaattgtattaactgaaagctatcagaaaacatcataattgaagttgtgatagaataccaaaatttctagcaactttttctcatgacttttttggcaacacactgctataaataaacatctctcactgcttaaacactagaaccgagttataatttaatcactgatattccagaggttaaaagtaggtttcataaagtatgttctacttcacagaaccagaaatcgaacacagtgaacaaccagttcaccaccctccgcaaatctatggaaatatttccattacaaagtaaatttctcctgccacgcaagttttaaactgtcactctgcgctgttagcctaaacaaaacataattggtaaggtacatctgccacatacagaagtcaataatccattccaaacccaaaatatttctggattatcttgctcctgaaaattgacactggtagaaaattagtgatccagaaataggcaacttccactaaaaggcaagtaaaattaggtaagtaaaatacaagactgacataattttataataaagggcaaaa

SEQ ID NO: 55190 - DNA, 2605 bp, Homo sapiens
agcctgggcgacacagcaagactctgtctcaaaaacaaaaacaaaaaaaacccacaaaagtattcctttgcaagagttaccacctctgccttgaaaggtgtcaaaccatcaaagcaaaagtggcttgcaatgtcaaattagcacagacctgggctataagcacactcttcacgcgtgtactgtgtccaggaacaatttctcaaagcggccaaggggatgctgcaaagccagtgacgcggctgccctcaatgcagcaaccacatagagggagagtttctcaacagtcccagaagcgactcctggggattagggtaggcttcccttccatttccaatatgctgcttataaaaggagacgattctgcccgcgttgacagcaccctgagtccccatgaacacgcgaaaaggtttctagctcctatcaatgccgttcggaagcaaagcaagtgttcacgactcgccttgatctggggccctgtccagggtgggaaggccccagaagcaggcgccaggacagaaatgagcctttgcccttcccaatccacgcagcgtcccgcccaggcccgggttcccggcagccaggccccctccccgacctccagctcacctgatcttgtaattcggtagggtgtgcttgcgcttgatgatcttcttgagctggttgacgatgatggaggtgagctggggcatgggccgcccttcaaactgggagcgcacctcgaagtcgatcagcgggtcttccacgaaggagaagaaccagtgggtgaagggcacgcgcgtaaagaccaagcgcagccttcccaccacgcgggacagcttgacaaacaagtaggcggacttgccgaagaccaggtccacgtcgatggccaggtggaagcccccgttgtactccacctccgcctcgaaggccagctcctcggggcaggcggcgggcagcgcctccccttcagggccatcgggctccccggtggccgagggcacgactggccgcacgagccggatggtcttgatgaagggcaccgtctcgcccaggaacacgtcccgcaggctcagcccctccagcaggcgcccggccgtcttggtctgcagcagctcctcgaactccaccttgatcttcttggtgacccagcggcgggtcagcgcggtgtcccgcaactcccggaacaggaataggatggtggcgttgaggaagtagcaagtctcccgcgtcggcggggcgggggtctcgggggccgcggtgggggtcgcgccgccctcaggggccgctccggagggctcctcatcccggccgccgccataaaggtactcccttaggagcaggcccggcactggcttgatgtagcggaagccctcgcccgcgcgggcggcctcgtccgccggcggctcgggctgtctgcggtacagcaggaagaactgggcgaggagcgtgaggaaggaacccagcacggccgacgccaggatcatgagcagcagccccatcccgccaccgcctccgcccgggcccctactcccgcgcccacagcgccgctttcttcacgccgccgcccccgctgcctccattttgaggacatcgggcggctgggtcggggcgagcggctccgtgggcctcgtccaggggctcgggccggcgcgctgcggcgcccgagcccgcagcggcccgcgcctcctcagacgctcccgaagggccggtgtggcggcggcggcagcggggccgggaccggcgcctccctcaggcctccactcattggacgagcagcgcgtgacgtcagaggcgtgctcgctcccggcggcgtcgcccagcagtcggcgcccgggcacgcggacgcgggtcctcctttacttctctgcggcccttccaacctcgtccccccacgccaacattccaatccccgcggcgcgcgccgccacccacgtggccgtcacttctggagctgcggtcgggatctgggaggacggctggggacgcgggctggaggataaggcggtccggcggagcgggcctgacgcgttccggatgccggccatcccgttatcctcggctgcgcccatcccccgtctctggccgcagtccccgcggttacctctgcagcggcgtcgctcatcctgcggtgtgcttcttccactcgcacccgtgacagcccggctggcagcggcgctttccctgcgggcagcaccgcagacgatccgagcgggcctttcggacgcttcccaagcccacggcgagaggggaccgactgcctcagaggcagccatcgcggacctgccgtccccccggcagacgctctgcgtccgcggagggtgggccctgggaaggagggacgcagggaaagggcgcgccacgcggaatgactttcccaccgaggtggatcttcgaaatttcagggaggaggaagttgaaagaacagccaggaggagagatgcatagtgaaacgagtttgccaagtgattggaagattaatatgcgacccgctgtcagtctctggttaagccggtagtccatctatgaggcagttattcactgttagcccccacccacttgacagatgccaacactggtgcagagagcgtggggaggttgcgtggggccgcagagtggagcctggttt

SEQ ID NO: 55191 - DNA, 1038 bp, Homo sapiens
cctactgaagtgcttgaattccctcccaatgaggaaatccctgttgtaatcatatcattccttgccataagagtagctcatttcctgctgtatgaaattcagcatggaaacattttccctgtaaatggcaggggaagaaattcccagggcatcagattgtactgatcaatacaggcaaattctttaggaggaaaagacagtcctggctttccttcagccaaggaggtttactgggtgggttcctgtttatacaggaacaggatggagagtgagctacatagaaacctggatgagattctgagtattgctgccaacatcaagctccacttttgctgacttatcatttatatttgcaagtgagaaggtttgattggttaacttgctgccactcagaggagggccccccgctggacctttgtgtggagtcacctcagagctgatcagccaccctcgtgtctggcacatgtgtgttgtaagctcttcccgagactgatctctggtctggtcagctgttgccaggacagcggaactggcttctcctgtaaagcttgtgcataccagcctggcagataccacaggcatgggttgcttagattcttttgtctgcctaactttgcttttcttttcttttttcttctcttctcttttcttttccccttcccttcccttccttcctttcttttttgagatagagtctcactctgtcacccaggctggagtgcagtggcacgatcttggcccactgcagcctccacctcctgggttcaagcgattctcttgcttcagtctcccgagtaaccgggactacaggcggccgccaccaagttttgcaatttttggtagagatggggtttcaccttgttggccagactggtctcaaactcctgacctcaagtgatctgcccggctcggcctcccaacgtgctgggattacaggtgtgagccaccgcgctgggccaacattcctttcttttgaaaactcccctcttcccttctaggctgttctgaagttctcaattccaggcccaccccttggcc

SEQ ID NO: 55192 - DNA, 1362 bp, Homo sapiens
ctctactaaaactacaaaaaaagttagccgggcatggtggctggcgcctgtagttccagctactcggaaggctgagacaggagaatggtgtgaacccgggaggtggagcttgcagtgagccaagatcgcgccactgcactccagcctgggtgacagagcgagactccatctcaaaaaaaaaaaagcatccctaactgctcattctgctgtcaaaatcgatgcggggtcaaaacagaaaaatttcagaagagaatttagagctacagcctgtgagaaacagcaaaaagtgaaaaccaaagacctgcttaggaaaaccctcattgaagagatggggaggaagggcctgagccccctactccattccacaatcatgtaagtcattcttctttctcttgccctggggacagagagaggccagcagccttactctgatgtcatttatttcccatagaaacataaaaagactcaccaaagtactttttttttttttagatggagttttgctcttgttgcccaggctggagtgcaatggtgcaatctcagctcactgcaacctctgcctcccgagttcaagtgattctcctgcctcagcctcctgagtagctgggattataggcatgcaacaccatgcctggctaattttatatttttagtacagacggggtttctccatgttggtcaggcttgttgtgaactcccaacctcaggtgatccgcccgcttcaaactcccaaagtgctgggattacaggcgtgagccaccgtgcccggcccaaagtacttttagtcagataatgttgggaaacaagggtcaacgttcaataagcaaggtcagtctgatttcatcattgcagaccagggagactaatttccttatgtgcattgtgattctcgagggagaacatgttgtatggttttctctaaaggcatttggccatgtagcattttcttcccagatcagctcttcttaaggttagtgttccaaggtgcaagctttgagaaatgctgcctgacaacttttacaaaagtctaaaccctgggtgtgcatgttaattcgtatttctctatccacacctgggaacccgcctctcaaagcagtcacttccaagaaggaggaatgtttgtgctgtgtagggcatctgtggtttaattcagggaattgtcaccatgctatttggccaaagctaagccacatcctctaatatagctttttcagtaataaagatgatatttttatttccatttgtctaaatactttgtcctcaatttgttcaaaactcaggcagaatttcttttctggaatcaaaattccaacagggactgggcatggtggttcacgcctgtaattccagcactttgagagg

SEQ ID NO: 55193 - DNA, 941 bp, Homo sapiens
ctccgtctcaaaaacaaaatacaaacaaaaaaaaatttgaattaattagtatcatttgaaaagcaggaggttggatataaacatctagatttttcatttctcatggaaatttggagatttggccacatcatgtatctttcctcatttatctcctgtctgggctctggaaacttgccaggctttgactcttggatgactgtatggggcacagttcctgctccttccttgccctggaatctttctcaatcaatgtttgttttaaagaatcacaaagctggaacgtccctacaggttctctgggttcaaaccctcatttgtcagtggaggaaagaggattagggaggaggaggtgacttaccctatgtcatgtggatcaccagtgatgtgggtgggaaaagagcccaggtcttcttcctcctggtttagtgcccctgttcagcccttggggacaagtggccatcatcctcctcctaaaaattgagaccttcttaagagatgtgtttgattcacctcaaaggtcatcagcccttacttttctttcctgtctcagccaaggcaaatgtttaccttgcaaaagtggaattagatccagagtggttcctcttggcttacatggtatttaaatgtctctgtctttgtcctctgtgacttttcctcatggccttgctgtggttgcagctgttttaagagatgcctgcacaaagtcattcacctaagtgggagttcaaaaaggacacttattttcaatgttggctggttacttttttaaagccttttaccgcaaggtagaggaaaaacagcttggggtgcattttttgtcaagcatggtcacagataataccagtattaacagtttgacatatgtgtaatcccctgactgtcccagagaaaaggtgcggggtagcagccatgagccatttgcagagggggatgccacactg

SEQ ID NO: 55194 - DNA, 464 bp, Homo sapiens
cctctcagccaagcccagctgccagatgaataccactgagtcacccccgtggaggctgtgtggaacagaagaatcaccaagccaagtcctgctgaaattctggattcacaaaatcaggaggtgaaaagatggttacttgaagtgactaagctttgggatggtttcctgggcagcatgttatgtagcaatagtgtgttatataaccagaacattgacactgggctttcagggatgagtaagacccagtttcactccatagagaactccaagtctcctgggagagatggacagatgaacaaacaagtcacaattcagtgaaaacaaacatgtgcaagaaaaaatcgtagcccaaagagcagatggagcaggaaaggcttcctgagggaggtgacgtctgtctggccccagccccattgttcttggcatacatggcccacagaaagtcatttttttttttctgggga

SEQ ID NO: 55195 - DNA, 898 bp, Homo sapiens
gcctccttggtattctctgaatgacatgagcgcattcctaccccagggcctttgcactcccagccagcctcactcttcctccatggaaatttccctcatttccttcaagcttttgttcaaaaagcttcagccttctcaatgaggctgaccctgaaaactctttacaactcacctttccccatcgagcacttcaacccccccttacatgttctactaaaaaaaaaaaacttcccacatattggtcacttcctaacatatggtatcatgtatttgtgatattgtctattgcctgtcaccctctgaaaaatgataagctccagaaaatcaggtatacgggtctctgttttgttcactaaatcattccaagtgcctaggactctggctgacacatatttcctgctccagaaatatctcttggctgagtgaatgaacctcttcccccagcgagcgagcctgtcggccgaggagaccacgccataccaggattttccagcaggtggcagccgacgcacgccagagacagctgggcgcctacactttgaactcaaggttcttccaattaagtgcaagataaggagcttggagactcatcgcgtttggcttactcctgacgcagacttgcactggaggttgtgtggaggggatgagccggtgagctgataaagcctttatctaatacgggagactgtttacccacaattcaggggtaaaaaaatgtaaacagctgttgagaagaaaggtcagagtcctcccacggtggggaaaaggggcagaagaaagcctgtggccacggattggcgtcactcctgcagatggaaaagtgacattggacaactactcagggaaaaaggtgagcccctaacacaccgctggggtcgtggacgtttctagtcttact

SEQ ID NO: 55196 - DNA, 1778 bp, Homo sapiens
caggtagctcgaaagaggcctcctccttccaaactggctcaagggttttctcagctacagaggtggagtacttttccttgcccagctgaattatagtgtatgtgtcattggtaccacttttgccttttggcttcagatctttggcttggagcactgtgacctgcacgtgggttggaaaccacttttgggcttgctcggacagcatcatcctgtcctgtttctctgcccccgagttccctagcacaggcagtgcccctcccggagggagagcctaattccttaatcactgcatcctaaggacacttaacggaaacaggcaggctcagggctccccgacttccctatggctgatgtcaaaacgcctcgcgggggcagcccaggggcacggccgctccgggggtcccctttcgtctggagaaacacagaggcccaccatcacctggccgcgccgtgcaggcctctgcgcggacccccgcccctgtctccaccttccccaggcctgcggggcacgtgaggcctggccacacggacccgggcggagggctgcgggggtgaagggagcccccgccccaattctgcacccctggcctcccgcctgcctccttgcggccgagcagcctccgctgcctccgcgcctcccgcccgcccggcgttcgtccgcaggctcggcccggctcctcctcccgaccccggtaatacgaaccgccggcggctaacgcggcctcgctccctctcgcaaacctctccctcctcctcctccccctcgcctcagctcctcctctcgggcgggagcgggtagccaggggtggagtgggggagggcggggaacgcggccgccccggcgccggcgggacgtggggcgggcagcgggctgcagggctgcgggcgcttggttcggcctggcccggccggcggctcctaacaccgggcgggcggctgcggcggcacttccgggttggccttctccatgttggtctcgggaacgtgaaggggcggggcctcgaggtcaggggtcagcacctccctggttgccgtggcgactggaggcgcgcgacgcgggcgcaatggcggggacccggggcttgatgctgcttgggcctggcccagtggcgggtcctagggacgtgggtacctgcagaggccggcaggtgagccctggggagggctggggaccgctcgtgagaggaggtcatcaaagacccggagacgcccctaactagggcgtctttgagggcaggggatctgtgttcgctgtgtcctggatgcccagtgcctggcaggagcaggtccataaatggtgttggaacgaatcaggcctcttcactgaccgaaaggaaacttttctccaatctcctatccacccttctctttttgaaaagtccgtaaattgactgaaaatgacatcccccacccagacgaagggcgatagggaagcaaatagtttccacagggagtagagatgtagggaggcactgggctggcatcagaagacctggttccggccgcgcctctgccgctatcagtgtgtgtgaccttggccgagtcatttcacctccatgagcctcagtgttttcacgagtaaaaaagccagttctacctcatgtctaagactccatcacgactctatgggctcgacgtcaaaaggacccccgtggggactcacactgtggtggactgtgcaaatcatgtggagaccatgccccaaacacgggtttcgagtttcaggggataatacatgtgcctttcctagcacaatgcggcacataaatctccttttg

SEQ ID NO: 55197 - DNA, 697 bp, Homo sapiens
caataggacaaagtccttaaagaaagactgaaaagagctgataatcaaaatcccaaattttatgcttatttttgttttagtgctatcaattttctgacatattaacataggcaggaaaacattctcagtaaattgagcatttgagtctacaaatgtcttgaagcactctggcaagttacatgtatcccatgttgcttttggtttcccatctcttctttgcttcaaacctaaaaggaagaacatacaaatctcaatttatttcttaaaaaaaaaaatactttgctgaacatgtttacttagagaccaaagcaaaacaaacaaaaatttttcacatactccaatgattacaaaataaacattaaacaggatgaagaaatgcctctatatttataatctgataaacattcaacgaagaaaaaaatgtaaaatgagttaacagttatacacgaactagatcacaaaatatattagcagaatttctatgaagtcaggagatttactaccaaaaatcttaagtaaactcacccccatgcaagtttcttcttttttcgggcagcctgtgaattttcaacctcctttttggcttttacaaagttgtggcaggcaactgctttggcaatttttacaccaagctaagaattacaaaggagaaaaaaaaagtgaaaataaatattccagctaatacagtaattacact

SEQ ID NO: 55198 - DNA, 1144 bp, Homo sapiens
tgagaaaaacatttactattcttacaagggctgaaaatctcatgtatttctgaagcaatctcatttgtcaaaaagtgtgacaggaaatagcccttaaaaaatggaaaacatctagtcagtatcatacaattcccatttctaaaactgcagtatgacaaagcaaaaaaaaaaaaaaaaaaaagaatcctaatatcctcaaaggaaactcacatttctgaaacctctaaggcgctagttctgtatgttttgacaaacagcttcaaactgcacatagaaaggaaagcttgtagtgaatagtagcgaggtagacaaggacagagttcatatgcaaccgctggtgggcagaatgtcacatggtgaccctacaccaggccagtgcatcatttaggaaaactttatccaagtcccaattgtccagatttactgagaaatttagcaaaggcacacaaaagattctataatccaacagctcacttaagccaagttttagatttagtttgctgggtgatgattaaaagtacaatgagatcatattttaaagatcaaaagtcatttggcagtcaccataataaaaactgtcacaagcaagaaaatcagcagtggacactaaaacaaacagggaaaacatgagaaagagaacatttacacagtctcagattatctcctaactccccacaagacacttatttattccaaagaaagaaacaataacatcacagtggagaaatctggagacactacctgaagtagttaatcgaagtaacaccatcaggaaagggacaaagagacagcacgagtctctggatcgctgacactgagaaacacacaacattactcccatgattttcctgccaaaaatgcataacctaaaactaatcatgaggaaacagcagacaaatcaaaattataagggacatgctacaaagtaactggcctcttcagaaatattaaggtcctgagaaacaaagaaaaactgaggaaccattccagattaaaaaaactaaagaaacatgacgacaaaatgcaaagtcattgactaggaaaaagaagtttcttttgctataaagggaattagtgggacaactggtaaatttaaataaagtatgtcaaattagaaaacatgaaggcaaatgttgtaaaatgt

SEQ ID NO: 55199 - DNA, 1195 bp, Homo sapiens
gaattacaggcctgagagcgaatccagaaaaactacttatttagcaagattttgcatgtattcaactgttttaattaaagagagtgttcgtttacttgaggcctggaaaacattttcccagacccaagatcctgcatggaaagacaataaaccaagttaacagttcaaggctcattttaagtcgattccgctgtgagaatacttacagggtccaagattgcaagaggatgggtctagaaaggtacaccgttcctgcttggctgcacaacccggaattctgcaggctttctggcggcaatgccacactccaatcccaaaagagagagaagcccctcccgggcacagaactaagcgctgcacattccggcgaaggatgtctagcctgctggcagtcccattaactggagctgttttccggaatacagcaactgtaaacgtgagcctgttttccctatcgacagcctcctcaatcccctctcactttgacctgggtgggacggagaaccccctccacataacaggctggggaggccgctgcgacgcccctttcgaggaaggctgagggcggccccgccgtcgcttccgcggccccgggccgggggcttttctagcctgctccgggaggctcggccgaggagctatgaggccgcccatgccgcctccctcggctgcccacaagaggccctcccagactcatcatgccggagcccgaaccggcgggtaaccaaccctccataagccgtactcacctgtcaggaagtggtcgcccagcagccatcttaggaccccgtcaacatcgcgccttctcattggctcctgcgtctcaaccaatgggctggggccgttctggccctagggtcgccttagcaaccggcctcctggggcttccctttttagtccgcccgaaggaggtggttcctttctttcttttttttctctcttttatcttgccgttttctctttcttctgaacatttttaaagactttgttctttcttcattccctgctgtaggccaatgcgtctgggcaaggaaagggctgacatagaccttgaactgagagttgatgccaccaggagggagaatcttgcagagtgctttctttctaggcccctctgcaaacgtcttcattcattcatcctttcccctcactctcttccttttttttaattttttttctttcttcacctatttat

SEQ ID NO: 55200 - DNA, 624 bp, Homo sapiens
tcgcatcagcatcctttcaccctgctgcactccaacctcattttccttaatgaaaatggaatccaggtctccgccaaagtgtccttggagtcaactctgttttgattctaaatgtaacacacaagcaccacattttctcacgcacacattgtcccgagtagagacacgccaattctttctatcaagggcttctcattgtctatttttattccagtagaaacagtaccctttcttcctgtgctaacaccctggcggcaaccatcttgcacagcatcctcagccggtggctttgaagtctccagagttgcctaagagcccgggctgcacagctggaaacctggaggtttttgctacctcgtccgccctctgctggatggaccgacgtctgcttacgaagtggcccacaaacagccgaaaggtttccccttaagatggatgggtttgtcactaagccacgggaaatcattttgggattttataaaataaatttttcttttttttcagagatttttagaaatacactttcttctctccagatatacaggtgtaccagtttattctgcctatgtgtttggaaaaaaacagagaatttgtcagtgaaaaccatgaaggattctaacatct

SEQ ID NO: 55201 - DNA, 940 bp, Homo sapiens
ttcattactaaaagtaaaaagtaaaataaatattactacgtgccacatgtggagcaaacacaaatcacagccattttgcactctcaaattcctctcacttactcttctgattttacactgacactctatcacctaactatcctatttcaattaaaaacaaaaaaggcaacctggtcaaggatgttaagcagccattaatcatggatttaagagaagttagtatgaacctgtccatctttaaaaataacaaccaaacaagcaatcatcactggcttccttctgggtttcctgtaagcttctgtcattagtggagcagtctcaaacatgctctgaccctcaaatacacactgccaattatgtgacaaaatggcctatcaatgaaccacaggaaaatttggagaaatcgtgaacaccaacaatcaatctttgtagacatcctcgaggaaatgtgcctaaggacaggactatgaggattaaggtccaaatgctgcaatcacaaagaggttgctgtaaaacttgccgagatttacaacaacaccagcacctcttcatcattactacagctccaactcaggctgctactatcttaaactggataagcccaacagaaaagaagtcagtgaactgggaccctgcgctgaggcttacttcattcctacagacaggctcttactcccacactacaggtttccacaaagcatttgtacagtggatcctaacagctttgaaatccaggtaacagttgcttcacggcactgaaatgttaatattaaaaaaagagctaccagaagaacctgcctatattctgtgtcatgaatcacagttacctcaggagtaacaacaacgagaccaggtatttcactgtttattttaccagactaggaagcagagtggttaagtgacttcctcaagaactcaaggctcattactgtcagagata

SEQ ID NO: 55202 - DNA, 1027 bp, Homo sapiens
ttactacagaagaaaatccttccactaacatggtccttcactatctagccctttctatctatccatgtttaacatgagccagtctctcctcctactctgtattccaaaaataatttcaattctgggtctttggcacaggctgcccctctgcaaggaagtctcttccagtccagcttccccatccccaccccctatcctcctggccaacttctattcatttttataaagactctctttcctgaatgctaccaaatacatagctttattatagcatttaatcataatgtatcataattacctttctatcacctcccacattcaactgtgtctcttcattaccagaggctaaaatattactttggcacacaataaacacttaataaaatgccattcagatgatgaatcagcatacctgcaactacatattacacatctatccaactttatctttagaggttaataaccgaatgtccacaaaagcaggaagaaaaaatggaaagccagcttgccctgtcaagacataccataaaaggatattaacaatcaacctttatatagtgcttaacagtttacaatgtgaatacatatggtctacggtttacagagtttacagtaaataaacagtattcattttctttagagatttgggactgggccttaagtaaacattaaaatgcctttctcttacagtttcatcaacaacattttatatgatgcaggtcaaaaaatagcaagacaagatccccaataagatcctgaagttcggccgggaacagaggctcactcctgtaatcccagcagaaatggggccagtttggtggagtatgatcaatctgaaaaccctgacctcacgaaaccctgcttacacacccccctcccaacatgagactaactttacttgattaaagaccctgccatgatattacctgaaacctcacaaaaaagattctctctaagcagaactctagttagagtctctagatctctaactagaatcagatttcccaagggaacaagtaccaaacct

SEQ ID NO: 55203 - DNA, 477 bp, Homo sapiens
tggtggcgcatgcttgtagtcccagccactcaggaggctggggcaggagcatcgcttgagcccgggaggtggaggttgtggtgagctgagatcgcgccattgcactccagcctgggcaacaagagcaaaactccgtctcaaaacaaaaacaaaaacaaacaaaaaaaacaaagatctggaataggtaaacccagagagacagaaagcaaattggtggatgccaggggcagggagaagtgaggaaacggaactaattgcttaatgggtatggaatgttattttgggttgatgaaaatgttttggaactagatagaggtagttgcacaacactgggcatgtactcaatgtcactgaattattcactttaaaatagttaattgtgtgttacataaatttcattccaagtttttttggggggccggggcaggaacagattctcgtcatgtcgcccagcttggagtgcaatgatgcggtctc

SEQ ID NO: 55204 - DNA, 1404 bp, Homo sapiens
aagactgaaggcctttccctaacgagactcaggcagccttattttcccctcactttgagggtgaaacttcaagagaagacgggtgcgaaaagagcttcccaatgttgagagactgccagttgtgatagggatcgcactgaccgaacttggggctccgtgtgtaccaggctgcctctctaggccaggtaatacaagaagccagggccgctcaggcgctggccgcagacaccaaatgagggggaggggacggtgagggggaaggaggcagggaggcgaaggcggacggggagaagaggaaagaccgaggcctgaaacaaaggaagcggagctttctccaagagggggtggattcggcgtccgagtgaggtggagaaaagccaaggctgcagggaaaggctggactcacagaacttggaggtggaggtgttgatgttgatggtggagctggcggtgggggcgggggccgccttggccacggcggcggccgcgtcgcagctcttcaacatcatgatcaccccattagcctccggcggtggctgcggccccatcgggagcccctccttggggcctttcctgtccacggagaccgcgggcaccgccagcagctgcccccccggaggctctcgggcaggggccgggatcgacgaggggggcggcggaggtggcaggggctgccggaagccgtccaccgcagcctcccagttgttgtggttctggtcgtccatcatcgcctcgtagctgcccccctcctcctcttccatgctttcctccatcctgctggcccccggcacccgcccgcctcacaggcacctgccgcctgtctcaaccccgggccagcgggcaccgctgcctccccgagttacatcgccggcggcaggaatgggcgcagcggagagggctgcggtgcgcagggtctctcgctctccgcggggccgactagcttgaagacgcggctgacggcggtgggcgctccggggctctagtctgggagaggcagccgtaaagcagcggcgctcctcacgacgttttacagcggcttccaacaggcagttggaaagggcagctgggggcgcggccaggagggcacgtggtgcgagggactggccgcgagaaagcggagccaaaaggggcgggagctgtgagtcactcccacgcaacagggcagaggttcgccccgcctcggctggcagggagctaacaggggaggcgcgacgggtcgggacgggcattcgccggccccgccccctgcccggcctcacgtgacaaaggtgtgtcttgcgcacgcgcgttcgcaatctggttaccatgacgacgaggccctcgccggttcctgaggacgcgcgcggagcagtcttggcagtagctgtggactggccagagtgattggaggtgttttcctcgcgt

SEQ ID NO: 55205 - DNA, 892 bp, Homo sapiens
ctggtatacaccgggatagagcatcacattctattcaaagctaggaatttatcagatgcatgtaaggggaggaaagttcagtgagcaatggaaatgatgaatcagccatagactccaagctgaataagaaagtaaagacagatggagcagatgggtagagagaaggtagagtttttcatggatgagaggtgtccatggggttgaagagctattggaagggacatctgtccttaagcaagaaactagcaggatgggtcataacccaacagtaggctgaattcatgatttcaaaggtattgcagttgctgctggtgacaagacctacagtgggaatagcagacattgacctttgtttttgtttggctgtcaagtgcctgatttgcttcctatttgtacacattcacatttgtttgctttggtgcaggaagccaaagggtgccagacattccctctccccatacgccaccatcaagagcaagggcacacatgctgtgctcagccaaccagatctttctgccaaggtatttgagtctgaagagagtaacacaaaaccatgggaatcactggaaatgattaatgacatctgcagagttcaggtttcacagtaagggcaggactagaggcaatgggttaaccaagctgcccctctggtgtgacctcagctgtattctcaactgcccagatttccttgctttctgtctgtgttctaggccagtttcctcaaacttcttgttgattctgtgagctactcaacgtccttccaataaattcctctcctactttagttaactggcattggtttctgttgtttgcaaacagaaacatagacaggtatagtgggaccttgggagtggttggccaagatgcagtggaagcgaaagtccctgggcag

SEQ ID NO: 55206 - DNA, 595 bp, Homo sapiens
ttgggtttgggaatctgagattctaattatcagccagctttgacacctgcaactgggtcagaatcccagggttgggtttgggaatctgagattcttattaccagccagctttgacacactcagggagactctaccaggctgggtgggccacctccagtgggaaatagggagaaaatgccgacatccacctcagttgggtctttccgcaagcagtcacaggaattccccctcactcaagtccttgttcagtatcgcttcctgggaaggtggctgtctccctccaagcccttcctagtccctcattgcacttttcactccctgatcctggagtgtgtgtttatttttcatcatctgtctctcccactgttcgatgagggcagagacttgtgcccctggcagtgtctaacacatagtatgtggcaagtacatttggcaaataaaagaatgaaccagtctctgttaacccttgctttcccatcacttcacaagatcttgggcagatttcagagctttcggatccctttccttattgacgctcagccccgtctggtttagaactctaatctcttatctgactccaagatgaccccctccc

SEQ ID NO: 55207 - DNA, 599 bp, Homo sapiens
gatccacctgcctcggtctcccaaagtgctgggattacaggcatgagccaccacacccagcccaattttattttcaatgtaatattttctttctttcctcttgtgtggtagattgcatcattgactccagtttgtcacccttccctgtatttacaccctcggtcatttgactctgggactttccatgaagtgggcatcacatggctttctgccccaccgatgccatggttggccacgagacctgctttggccaatgggatgttggcagacatgatgcaagaagaggcttggaacagacctacactccgggcctgggcttttgtacctcaaccgtcttggcgagaagaacatgcccaaaccagtctgtggttgcaggagaaggataagagtcaggtggagctgagccatgtccagccaggcctagtctactttagactacctccagctgacccacagacagatgagctcaatcaatggctattattgttttatgccgctgaaattgttgtggctgttacgcagcatttctatataatagttgaatattacactccttgacttcagaagttgaagaaatgttttgttatttttaacgtgat

SEQ ID NO: 55208 - DNA, 863 bp, Homo sapiens
cccagcatcctgaaaatcccactgagctcccaggaaatagtaatatctgcctcaccagccccacattgccccatcttccccaatggctgtttgccaactttattgcatcaaatctattgaagtttttgttgttgttgttttaacttcgcagggaaggctgttctatggtgctgtgagtcatcctgggaagcagcagccctagtgctaaggcaggatgcagatcagtctgttccagtacccacctcccctctctcctcccccgcaaagggcagtttcctctggaatccatgcacatgcaatttatttctaactgctccagcaggttccaatcctgttgcttgctgcgtctagttattcacttggaatcagagctgctggaaagtcaaaattagcctcattctaccagcatgaaatagaaacacagaggcagtcccttggctttagggaggcaagaatctagaatttttcttatctctctgtgaataccagagctgagggttacatgggtctgtgattacacagtcatttggaaattgtgcaagttggaagcagcactgtcattgacttcctgttaagaggaggcagcaggagaagccttccagagagggacacagggcagccatctggttggaagtcattgtgcttacataagttgtctgttcacttaaggaggcaagggttaagcaggctgcaaggcaaggagtgtgaatgaccctaagccatgcttgacaccatgcattaatgatgttttttatcttctgtagtttataaagctttgacatcctgaggccttgctaatcctggagagactccccttccagggctagctaatttctagagatagtaaacaatttgcctgccaa

SEQ ID NO: 55209 - DNA, 485 bp, Homo sapiens
gggagagtaggcaaatattgtgtgcagaacaattccaaacaacttatgtagatacttgccctcaaggaagtggagtataattctccactccttaagcatgagctgtacatagtgacttctatccaaagagtatgtatagaaaggaggaggaaaaagtaactttacggtggagaaatctgacaaatagaacctcaaccaagtgatcaaggtcaacatcaatagtgatagtcatgctgatagcatgtacccttgatatagtgagaatagtttacctctgtggtcatcctcccaagaatgcataacctcagtctaattataaaaaaaaaatagacaattcccagttgagggacagcctacaaaatatctgagcagtgttcctcaaaactgtaaagctcatcaaaaaaaggaaaaatctgagaaattatcatatccaagaggaggctaaggatatatgacaactaatgtaacataggatcctatatggg

SEQ ID NO: 55210 - DNA, 888 bp, Homo sapiens
ctaaatttatgtaaccacagaagcctcttctcagagcctctggtgggatttgcctctgtagagtggagctgggaaaatcctgcaagagcgagtccagtggtaacagaggaaaaggcccatgttcagggagtttggagctccccatatggaagatgcatttgcctccctgtgggataacctcagggccactttaggttcatggggctgcaagctggtgctctacagatctgcagcaagagtgtgacttccagtcctgtgttgcactgaattccagggaccgcgtgtgtccccgttcccctccccagccaccccccaccaccccccatacacatagttggcatttaaccttgccaaatatctttggtatggcaatagaatgatctggctcctaaagaaagaagtcagagttcaaaatgctgagtcattcaccacgagagcagtgcctgaggagaagtaggtcagcctgggccgagcctccccacccctccttggcatcaaaagcacccagcacagtaaaggcagctcacacatggccggggctgttctacaggctctatctgtatccactctttaaagcctcatgacaatgctacaaggggtaactgtgagtctcctgaaattccagataggaaactgaggcacaaggaagggaggagggatggacccccagcaacccggccacatccctaaccagaaacaaaggatggatcatcctagacactgcagcaaaagacaagagttaaccactcattccccaaacacaggagcagaccccacccttgagaagcttgcactgatggagacagacaagcagcacccccacggcaacagcagtgggcaacaacctgctaggaggaggcccgatgccatgggagtaccagtaggggt

SEQ ID NO: 55211 - DNA, 764 bp, Homo sapiens
atctccctccagtcccttacctcttggctggagctcatcccaggagacctgcagccctgctttacaatccaggaattgaaggttccacaaaagcccgcgagacaggtccccccaagcccaggcacatcttaaagagcttgtgatcgtttgctggagactgcacctgcagatgaccaactggaccacagagcggcagatcccctggcctaacaggctaaaaatagtcccagtgtagatttccagacaagactgacgcactcaaaccaaaaagactcacagatttgcacagctgatgaaaactaaaatatcaacaggctcctccagcctgcagagcaccttactcaaccagacagagatttagcaagagattcgttttctgagctcctgccagatcccgggaggagaggccagagagtttgttatcatctcttaagtaaaccatgattcatcctcatagcagaaaaaagaatgaggtggcagtatatatactgacttggaaagactctaggacatagtaaatgataaaagcaaactgcagaatgtatggaatcacagatatactaaattaaaaagtgtgtgtgtgtgtgcgtgtgtatgcatgtgcgtgtgttcatgtataaatgcatggcaaaaagcctggaattcctcacaaccacgccatgcagtagtattgttatccatttaagcttttgtgaggttaagtaacttgaacatatggcatagtaaatatggctattatatccagaccatatggaactggatta

SEQ ID NO: 55212 - DNA, 1162 bp, Homo sapiens
aaagttaagtctgcaaggagggggagtggctgccattttactcgacaagagcccttcactgaccaaaagcagcatctggggcccagagaggttaagccccttgtccactacacgtgactttgcaccagcgccagggtgcaaaccctgtcccgaggcccagtaagctctccccacttcaccatatggcttctccacaacagcagaccctaagcccaagccccccaaagggcaggagccccatcccaggactctctgagcttgacagagccatgatgtggacaaagtcagccaggagagggctcctcgtgcccaaatgcacctcacccacctccaggcccatggctgacggagccaaagcacctcctgtccctggcaaagtcctggcagggggtcagcgggaacccagaacctgacaaacagcatcgctatagccgcctggaccccggccaagctgcctcattccccagggctgacctcatgtttctgaagagcctcaggagcctgaggtctgtgagctgcctcacagggttcagttctgctgccagcaaaggaaatggcccgggctgggggccatgtggagaggtgggagcacagaacccaggcaccctccccaccacccacccctgccctgccagagccctcagcctgtgccaggcaggccccactgccccactccagaagaaaccaagcagcaccctctaacttctgaggtgtagcccatgcccacctgtcttctcacctctgccggatacctgaagaaacgttcacagactggctgtttccatctgtttcattccagactcctggaaagtgagcaaaaggcagtgagacttcatcagaggtgctaagaacatctctgaaatcgtgccaacacctcaaagagctagagagctcacagccaggctgaggcctgttgctgggtgacaaaagtcactgtttatttaacccagagctgggccaggtgcccacactggcctttctatggtcactgagagcaaaggctcccagggtactgaggcccagcgtgtgctccacgacaaaagccttcatgcacttggcctccacttcccgacttcccttctgggtcaaatgtctactcacctcgtatagcagtcaaggggagcagcctggggaaacagcccatggcggaccccaagacaca

SEQ ID NO: 55213 - DNA, 938 bp, Homo sapiens
agacccaggcctggtcacctgctccaagcccaggcccggcgctcgaatgcgggccccagcggccctcccttcccggcccttctctcccctactttctcctcacctcccagctgcgcggagaacacgccccctccccgtgttcccaccaatcagcgtccggagcggcgcccgaggcgccggggggctctggtctgcagccaatgagcgccacggctcgaggcggcgcctcgcccgccccctcccggaatgaaggccgcccgacagctggcgaggctggcgcagcgcgcggggcgcgggagccgcgcgggctggagcggagcgcgcacacagccagcccgcctccgctccgcctccgtccggggcgcgggcgaggtggccggggcgggggaacgcagggggcagggccgcggcggcgaggccggggggcggggaggagtgggcccgataaaaggcggcgcggcggccccaccccgcggcaggccggcgggcaggctcggcgtgtcccttccgtccggcccgcgccggcggcggggaggcggcgcgcggcccgcagcccgcccatggaggctttcccctgggcgccccgctcgccccgccgcggccgcgcccccccgcccatggcgctcgtgcccagcgcccgctacgtgagcgccccgggcccggcgcacccgcagcccttcagctcctggaacgactacctggggctcgccacgctcatcaccaaagcggtggacggcgagccgcgcttcggctgcgcccgcggtgggaacggcggcggcggctccccgccctcctcctcctcgtcgtcctgctgctccccccacacgggggccgggcctggggcgctggggccggcgctggggccgcccgactacgacgaggacgacgacgacgacagcgacgagccggggtcccggggccgctacctggggagcgcg

SEQ ID NO: 55214 - DNA, 727 bp, Homo sapiens
tgccgccgccgtgctgctgggctgcgcgcccgccgccgccgccgccgccaccaccaccagcgaggcgacgccgcgcgaggagcgggccccggcgtgggcggccgagccccggctgcacgcggcctccggggcggcggccgcccggctgctgaagcccgagctgcaggtgtgcgtgttctgccggaacaacaaggaggcgatggcgctctacaccacccatatcctcaagggccccgacgggcgagtgctgtgtcccgtgctgcgccgctacacgtgtcccctgtgcggcgccagcggcgacaacgcgcacaccatcaagtactgcccgctctccaaagtgccgccgccgcccgcccgcccgccgccccgcagcgccagggacggcccgcctggcaagaagctgcgctgaaggcccgggctcccggccgcccagggtcgccgccgcccctcgcaccgctaggtctgcgcaccatctcgcccccgccgtggggaggcgtgcggctcagcggtcggctcgacatgggacgtcgtcctggtggtttttgaaaagcagccgaccgtgtggagtacttccgtgctgaacgattgggactagacgctgaaatccccatttgtcttcagtttctagtttgcacatccagaacggcgaaggctgggtgtgtattccactaactgaaatatggcaacttagaggcgctgtttatttactgtatacgtcgacctattt

SEQ ID NO: 55215 - DNA, 2567 bp, Homo sapiens
cttttactttaaaaagtatatgaccaacatatctctggttctgccaaattatcagtttatgtgctgactcaaactgccattttcataagatgaattttcaaagaagctaacaaaataagctctccaaacataaaactgtaactcacaaggtatattcatctacaacatgggtaaaacccgaaacttctatttcggtgaaggaaggatgaaaataagagctatccatgccctaacgattagaaaaattgtccggttagaggggaaaaaaaaaaccctacacaaagtttcttaagcccagagcctagccaagaacatgtgcatccccagaacgccaatgtaataaatgccttggagagatcggggcacacaagtttttccctcaagcgccaatggctgaagtacacatatagaaatagaaatcgcagacagcagcactgtggcagaaaaaaagagaaaaaaggactgatctggatgtcaagagacgttggttttaagtctcttggctcaacaactcccggagtgaccttggggaaacctctctctaggcctgtttcgttatctttaagaggcgacctgaagtccctttacattaactctattccaacttccagtgattcgaaacaggctttaggactgcttctaatcaatgccaggaaaaatgaaaaaacaaaaacaaaacaaaacaacaggaatcaggttaaatgggtcagaggcccctaagtggatataaagcagctgggtaaagggtaagtggacgccgacccagcaaagcactgagcgcggcttggagagcgggggtggctgcgggaaggccgggggtgggtccgtagggctcccggcccgggcaggaggtggagccgaggctctcgcgtgcattgtccccgggagggagccatgtttcttactccccggcactcccagatggcggccggggacgcgggccctaagcagaccaaagccccagggacctggagagccagaggacgcaggcagcaaggagggagctccagtccgggtaggggctgtctcccgggctgcggtccccgcgacgcacccggaggcggcagggggaaggaaaggcccctggggcgacggttccgggctacgcgcctcccagaccccagtcgatagagtgagaaggaaacccatgcccaaccaccggctgggacagcggcgggcaggccgcatcggtctcctctccccgcgcgggccgggcggcggagcagtgggaagcaggcccgcgctctcgacctcggaggcctcgggccgccccagcccggcgcgccccgatcagctactcaccgttggcgcgtttgagggcattttccggcctctgaaaataggccggcatcttggcggcaggctcagctcacccggcgtcagcgaactctctagtggcccgggccgggagaggagacgaaggggaaccagcgtaaggtcccacgcgcctcgccagcagtcgcccgcgcccagccggccagagacggaaaggaaggagccacgtgacctccccgcggcggccctgctgccgcccaggccccggatgtagggggcgggtctccgtgcgcgcaagcgcgctggcgtcacgcacgccgacagacgtggcggcgccggagtcctaggcgcgcaaggtccagttcccgtcttgggcctgtcctggatagcgttagggagacagttcacaggctcttcaatcttcgagcgagaattagggtgggaagggtgagtgtggggtcagagtttctgtctggagaacaagcaaacgtctgcagattggttttcaaagcgacttgtgcggagtcgtgcagttacagtaaggtcccatccagcctgggaatcgcctgtcttggctacgtgaaaatgctgagtttaacgaaaacgcagtgagcaggtgtcatcaggtcagcgccgctcaaccgtgagagacaatcatggggaagagtgacgcctaaaataaacaagcaaggttcttttatatcttggtaaagtaaaaagtttgtgtcacagggattgccttgagaaatggaggctctcagagggggcgaatggggacagcgacctggcaaagggcgaaacgccctggagcacagcagacttgcttggtgtttgaaaacacacggaaaggagtgtcgtcactttttacatacagcgcacgtcacaaacaaattaagaaaaattagtgttagtgaaaaaaatcaatctgagaggcccttttattgttgcttaacaattttaatgttcgcagacgaagtactttacctagaatttgaaaaccatttgaaccgaatctaattctcaagcccttggtacgaaataaaggtgagctcagaaggaaaaaaattttttttttttttgaaacggagtctcgctttgtcgcccaggctggagtgcagtggcacgatctcggctcactgcaagctccgccttctggattcacgccattctcctgcctcagcctcccgagtagctgggactacaggcgcccgccactgcgcccagctaatgttttgtatttttagtagagacggggtttcgccgtggtctcgatctcctgacctcgtgatccg

SEQ ID NO: 55216 - DNA, 1252 bp, Homo sapiens
atggggcggggcgggagggaggcgggtcctacagcgggaggcggggcctgtgatggtccggggagggaggcggggcttatgatgggccggggagggaggcggggcctgtgatgggggcgggccctacggcgggcggggcggggttcgggtgcgaggccggtcctgcaggcggcagccagagctgcgcgccgcggcggcggaagatggctgcggccgaggtggcggacactcagctgatgcttggagtcgggctgatcggtgaggacgtaggcgccctgcctggaagcccgcaccctggttctgcctctgctccacctcggcccggggcagcccgggctcccgcggcccccggcgccgaccgcatgaggagggcgcggccccctccctgttgggcctggactggggactgcggagcccggcctccttggtgcaggggacccggcccgccgccctcgcccgcccgcccgcggccgcctgtggggcctgcccggcccgagggagcccggggacctccaagattccggggtggagctccccctgcacgccccgggttgcccggcggagccgggacgtcgagcgctcccaggctgggcagctgcgaggggcgctgcgcgggcggggccgggccgggcgggagcagccggctggcggcgcggcgcggcgcggcggggaggaggcagggtccggttcccccgagccgggggcgggcggctgcctcggagccacgggtgactgcccgcccgggcggcccccatcgtgggaccgggcagctggagactgctgggccgggtgctgcgcgttgtacacacattgtctccttttagctctcaccaaggaccgaggggccgtgggaaacgtctgacgcccacttcacggaggagcaaatggaggcccaggccgtcattgtgcacggacacaccataggccgtacagagccgggagtgggaccctcgcagtgtatcccagagcccccaacccccaccagtggagagctcctgcatcatgtgatcgagcttgtgcataaataaagcaggagtttctacacaatcctgtgtggtggaatctcggttagctctgaggaatgtaattatcttccataattaaaaaatatcacacggggatctttgggcagcctcgtgcagtatttaggggatggaacccgttggttcccttcgaaaaagttttattttcccgagatttttgcacacccctaaactctttctattccccaagtgcgcaataacattgctta

SEQ ID NO: 55217 - DNA, 1860 bp, Homo sapiens
ttgaactcctgacctcaagtgatccgcccgccttggcctcccaaagtgctgggattataggcgtgagccaccgcaccctgccttgcagggttttagtcgtgattttttttttttttttctggttgttgtcttttttttagcgacacggtcttgctcttttgcctagcttggagtgcagtggcatgatcatagctcactgtaaccttgaactcctgggctgaagcagtcctctcacctcagcctcccaagtagttaggactacaggtgtgtgccactgctcctggctaattaaaaaatatatatatattttgtagaaaggtggtcttactatgttgcccaggctggtcttgaactcctggggtcaagtgatcctctgccttggcttttcaaagcgctgagattacaaacgtgagccactgcacctagccctttaaaaaaaaaaatgttgttactagatagaattataattctaggtgtcatgttaccgtcaggcttttccctaatacagagatttttgggggcactgagggtgaagggaattgtttttgttttataagcctaataaatggtaggcttttggctatttttgtgcgtgaatgtatatacacacaccaaaagaagcaaaaaaaaaaaaagagaaaaactctatcataagactatcttctcattacctaagggtttcagttagattatatcttggctaaatgagatttcaccatttttgcaaccagccagaataaaaaagcttcctactctcataagaaccaggtgaatgtctcactgtggataaacagttgtctgctaatgtggcacttacacaaagggagattattattgccagaaaagacgctatccagaagccataaactaaaaacactacagaggtatttttgaacaaacattggactcccatttcatttggttgagtcagggttatgttgctcaactgaattcactgggaaatattctggagtccaaaaggcaaggttgcttcagaccccacttcctgcccagaaggaggcccagagggtttctcagcttgtgcagtgcgtggcattgtagtatcctggatttcttctcccgtcacagtgcaagagaagtgaggactcggagctactgccagccgcctcctctgcttcctgccccttcatgcagcactatgctcactcttgcatgtatgcacatccaagtatttgcacacacacacacacacacacacacaggtctgtgtgtacatgcacacactcataggcaaagacttcttttcttcatgacagtttaacatggagttgcctccctccatttctggtgaggagcaggcaggcgtgccttccacacacagcttgctgctcacagtggcagcagaagcccgcaggagggaacctcattccctatgtggctgcaggttcactgctgtggtcctcttcagcctctagtcgcttgctgctagtggccctgctagagaaccggggtttcatgcacacttgcagtcagctgtacaggcctcgatgtgtggcagcctatggatgtctatctgaacaaggtgcttggggtcgcactgtgggcttttcctgtggagtggttttggggggatttccccctctgttttatctctcctggcccagggttgtcatgtaggaagtcatcttatcctaccaaccttatgtttctcttctctattactgtgtattgtttctattttataatttttttttttttgagatagagtttcactctgtcacccaggctggaatgcagtggcgccacctcggctcactaccacctccaactcatgggtttaagtgattcttgtgctgcagcctcccaagtagtgggaattacaggtgcacaccaccacac

SEQ ID NO: 55218 - DNA, 1841 bp, Homo sapiens
gggcagagcacacgtcctgggaagctgacataggatagatctactcttccaccaaataaagtgtttgtatgctttacaacatttgcctaaattctctgtattaaaaataattttgtacgtcaggtgctgtgactcacacctgtaatcccaacactttgggaggctgaggtgggtggatcacttgaggtcaggagttcgagattagcctggccaacatggtgaaaccccgtctctactaaaaatacaaatattagccaggtgtggtggtgtgtgcctgtaatcccagctactcgggaagctgaagcaggagaatcgcttgagcccaggaggcagaggttgcggtgagcaactatcttgccactgcattccagcctgggtgacagagtgagactcggtctcaaaaaaaaaagaaaaaagaaaaaaagaaaaaaaaatctttatttctttgcatgatgtgtaatgcagtaacattacaatttctcttttttgaagacattgtatctcagtttggaatggaaactgttatcttacacacagcactgatgctaaagaaaagaattgtggtgtatcaccccaagatagaagcggtccaggagttcaccaggtatcacctctaattataaaaaagtgttaactttgttggcagacagttcgcagcactagatgttactgtgtgctctgctgtgttgcacatttgctataaatagcatgtggtgaaataccacctttggtctgaagtttctgtttagctctagtagttcaaggttactgatttggactatttatgactattttagagcaggggattagcaaacttttccttgccagacagtaaatattttaggtttgtgagccatatggtcactgccccaactactcaactgcctaggtagcacaaaagcaaccatggaggacacgtacataaatgactcagcatggctgtggtcaatgaaattttattttcaaggacaggcagctaggctgtgggccatagtttgctgacccgtttcaggtaaattgttccttctgttcagttttatcaaagactcttttttttttcttgttttaattaaaaagttttagagcaggacaaagactcttactttgatagtacatatagattttttaaattttattttcatttttagtagagatggggtcttgctgtgttgcccagggtggtctcaaactcataggctccagtgatcctcatgccttggcctcccaaagtgctggaattacgggtgtgagccactgtgcccggccaaaataaatgtagattttgttgttgttaataatttttttgccaggagggtcagttcagggccaggaggtgcctgccaggccctgtcccctctaacagctcccccacctgccatacagatttttaaagattttttgtttactaaatctaacttgttattaggtccttttaaatttttttcatttttattttttttatattttttgtcgagatggggtttctggggtctcactatgttggccaggctggtctcgatgtcctaggctcaagtgattctcctgcctccgttgagatgattacagacatgaaccaccacacccagccattaggtccttttttttttttttttttttttggaggcagaatctctcgctttgtcaccaggctggagtggtacagtggcgcgatcttggctcactgcaacatccacctcccgtgttcaagtaattctcctgcctcagcctcccgagtagctgagactacaggtgcgcaccaccacgcccagctaatttttgtatttttagtagagatggggtttcaccatgttggccaagatggtctcgatctcttgacctcg

SEQ ID NO: 55219 - DNA, 363 bp, Homo sapiens
tatagcatggatgaaccttgaaaccatgctaatgaaataagccagacactaaagggtaaatgttgtatgattccacttatatgagctatctagagcagacaaattcacagagttagacggcagaatagaggttcccaggggctaagcgaggggaaatggggttattgtgtaatgggtagagtttctgtttgtgatggtgaaacgtgctggaaatagtggtgatggttgtgcaacgctgcaaatgtacttaatgccactgaattatacactcagaaaatgactaaaattgtaaaaaaaaaaaaaaaaaaaaaaaaaccaaaaccacacactatgatttttctaagttaattttgtttcattttt

SEQ ID NO: 55220 - DNA, 2107 bp, Homo sapiens
aattgcccttgagggttaaaatcccagactttgggggttcaaatggtcttacgttcatatctcacatacgacctcgaagcaatggcctagaatatctcaagagtctgtggcctcactctctgcttgctataaggcttcactccagtgacaaaggatggacgccccattaagggctcaatggtgcagctggggtcacactggggaaaaagaggtttgctccagcaaactctaaactttgtagtggttctggctttaagccttggctctgctggagcaacctgagctcaccgccccttctcaatttccccacctaaaaaaaaaacagggctggaccccactttaggagaggcctcaaagagaaccccctaaagccctgctctccaattcgccacatgcggctgaacccagatgtgctgtgaaggtaacagacgccggatttggaacactctgtaccaaaaaagcgagtaaaatatctcagcaatgttttttactgattacatgttgaaatgttaatattttgcacctgctaggctaaatgtactgtattgttaaaaatttcagctgtttttatcttgtttaatgtggctactagaaaatgtttaattacctgtaaggctcacatcatatttctattggacggtgctgccctagacgctgcagggagataagtcctgcttatgtcctgcccaagggtggcttcccaaagcctcgggggtctcaccgaaagtggctgagcttaccaaggtgcgagagcctgtttctccccaatctgctgctcagccacagctcaggcagtagggagcagccacctgcgcggactgggcccctccgagagggcaatctggagggtgacgttgtggtcgtgggcatctggcagcttcgatttcccctgcgtcccctgccgcgccctaaggggtgaaggccggtggtgcgcgttcccggcacaactccgagaggaggaaacggagacagggggcgcccacgtggcctggccaaggtcacccgggtcagcccgactccacgcggcccggcccgccccctccctgcccctagtcgcgccgggcccgggccgtacttggcgctcggtgatccagaagcgcacgttgggctcaatgaaggcggggacggcgtctctgcgtcctaggagccgcccaggttgcgtttcctcctcctgttccagggacattttgcgctggttagagtggccgccgccgccaggccgcgcgtggaggaggagccgggcggcgagccccgccccgggccgcgcgcacccgcagttcccgccccaggcccgcgcgcccgacgtcccgtgtcacagcgcctcggggcccttgcgcgcccactgttccggcgagcgcagctctcccacgggccacgtcctcccaaccctgcttgccctgctccgcacctttggggagccgggccgtctccaggccccaaggggtcactatcggaacccgtcatcacagtacctaatgcgaagacccggaaaggttgtgagtgaggccgtccgcaacctcaccctgcgcttctgccgcgccctacccctggtcattaccctcgaaaatccctccgatggcccacgaattccagtgtgcatggtgttgcgcagtcaggccggctgcatcatggtctcagcccagggaaaatgtcaaatgcggtgccccttattcatgttactgagaatttcaagagagtaacaccagagcatcaaaccaagtatagggccctgggcacagtgcactatccctcagcccaacaggttgtttttttttttcttccagtgttggggcaaatccagttccttttgttgactaccaaataggtaccatttgtaaagaaaaacctgccttcccttcctcctcccacctgcccttccccagcacagggccaggcgggggctgtgtgcacttaaattcacggaagccacaagtgtgcctaggtcgttcagggggcctccggagtccaggactgggggacccagcacatcatctagttgtgtgaccctcgccaagtcagtatctcgaagtctattttcccatccgcaaaatgaggataacaattgtacctatctcagggttttgtttctgatcaaaggagataaaac

SEQ ID NO: 55221 - DNA, 1664 bp, Homo sapiens
aaaaaaaaaaatcagaaactccatgcgcttaaagcaacacagggttcagaagccaggggacttgtgcaggcttttcccagcactatctgctgagtatgttctaccatttcaaggttttccttagaaaaacaaggcccctccagcaccagcgacaagtaaacaagaagagccaaattcagcctctgggagtctgttaaaggctcaagggacatgtttactcaactttttttttttttttttgaaacagagtctcgctcttttacccaggctagagtgcagtggcgcgatctcggctcgctgcagtctcgacctcctgggctcaagtgatcctcccaccttagcctccccaggagcactgaccaccatgcccggctatttttttttttagagacaaggtctcactattattgtccaggctggtctcaaactcctgggctcaagtgatctgcccgcctcggcctcccaaagtgctaggattacaggcgtgagccaccgcactctgccggtttgctcaactttaatgttcaaaatgactcaggagaacgaaaggggctgtgttgaaccccaccagagaaagccgtgtaccaaaagagcacgacgcattgcccacagttaagcaggaaacagcagcagaaacacgcgggagtgggattgggagggaaagcctttgtgagttttttagcactttgcgcgtttttatccagtatttaaggggctgttcacagcaacgccttgatgtaggcatcattctttccatcttaagtacacagtctgagaaaggcgaaggcgcttgcccaagatcacagggtcggtggcagaatcagggccaggaccttaagtggagatgggcctggggaccggggacgccgaaagaggagggactcggggaagagaccgcgaggatggagtggggaagggcggttctgcgcaggcgcatggaaccttcccggagggaggcctctgggtccgttacccgcggaaaccctccaagaagggcgaatggccctcatgcccagaagcgcggggtcctgtctgagaagcacgttcccggagccaccagtgtctccacgcctgtccccagccgacagccactcaccgacgctcggagcaaccgtcctacagcagccgccatcttcagtgcactcgggcgccacggggcgggcagagacgcaggggcggggcctacggggtggtgagcgggccctctgctggtgggggggcggggccggaggagccaccgcctccccgcctcctggagaccctgagggagaaattccctttaaggctgaatgcttgggcaagtgacacgtggttttcctactgtcgccccaaccttaaaagaacgaatccaggcggggcattaggtatttgtttccatatttcccactgttttgttaaccttgtgtggattactgtgtctagtatttctgtgacaggatccctttcttatttcagcctcaggtagagacttccggcttctgtatgaaatggaattaattacaaatgcagttttagtccgttaataagctaagtgggctagacacatcaaggctttgttggcctgaaatccgctggaattgtgtgtggtctaacatttggcctctcttcccaaaattgggaaaactgggacaaatttaaaatttggtttttgtctattaatgaag

SEQ ID NO: 55222 - DNA, 2865 bp, Homo sapiens
aggcattcaaaaattttctttctttttttttttatgttagccgaataaacaaacttcgggcttcatcaggccctatgctgccagcaagtgaccagcgtggttggtggagggctctaggagctgccagctttaggggtctcgctgtctgagagagatcctttcattaaaggttagggctctaggcacgtgaatatgtagcaaagaccaagcctggattgcttagaacagtaattcctggagtggtaagtgcctgaaaagttacccgctgagccctccgccttctgacaggtaaactgttgttgcccccattttgcagacaagataaatgaggccctgggagactcactgacccaagtctagacaccaggaagtggtggtggtgggtatactcccccaggaaagcaggtaatcttgggttgttacaatcagtgaccagaccagtttccaaggcctggaaggtttattgatttctttatattctccaatgcataataactgttctctgtttctctcggcacctccctgcgacttcctggcagccctggggacagagggtttcctccttctggacagagaaggcccagagtcggcttctgaacggatatccggcccgcaggatgcagaggaggcaaaggcctcattgttctttggggcctgcctgccccgcccccagctgtaggacactcgtggcagatcccgggtgaccgaagacagcccatttccaggagtggggccttcggagcggagggagcaaggaaacggggctgagcacagacctggagtctgatgttctgagcataacactggaaggagctaagagccccaaaataaataagaccggaatttaaaaacgttaatcccacgccggcttggcgctggcctggctgttactcattaacgctccccacggcggagactccggcgactccgtctgcgtttttattacttaatctggctgggtttggctgcagggaggctcgtggatttgctggccgggtgtgctggaaggcagtttattcacagaataagcagcttcccacgctggaccctgagccccaggcgccgtccgcgtagaccccgcgccgcgcaccgcggccggcggggggcgctcgggtcgcaccgagagcagcgcgggcagccagcgccgggtcgcagccgacccgcagagcccttcgcgccctccgaggaaacaaagtgcatctttgtccgcggcccgaggcgccgcgtgggagacgctgggcaggggccaggccgggccggccgccgccgcgtgcggggaccctgggcgcgcgtcactgacccgggactcagaccctcgcgggcctggcgcggaccggaggaagcgggctgtggcgcgcggccgagctggcagccctcccactccgagcacggctcgggacccgcactggctcctgccgggccgcggcgcttcacgcgccgtcaccggggcccgtgcactccgctttccgggctggcgacggggcgggaagggggcaagcgggagcctgcgggggggtgctggggacttcggcttggctgggccgcctttgagtcgcctgtcggccgggcggtgcccgccttcgctttcggtgccgtcccggggcgggtcctcgctccgacagccgcgcgccagcccagctcagccccggcgccgcgcggccgggaggactccagctcccagcaggccccgcgccgcgagcaccgaggcaggaggcgcgcctgggccggcgcttgcgcagtgcggccgcccgagcctgctagtaccacacccccgggagggactgaggggaggcagaagcatccgaggcattaaagcatccgagggagccggaggggaggagaatggagtgacagagacacgcggagggtggggggtgggggggagcgtgttgagggaggggggaggggggacacagagggaggaagaagcggcggcggcggcggcggcggcggcggctcctctttgcagagggggaaactcttgggctgagagcaggaataatgcggtaggcaaggcgggctgctggctcccccggctccggcagcagcggcggcagcccgagcagcggcagcagcagcggcagcaccccaggcgctgacagccccgccggccggctccgttgctgaccgccgactgtcaatggagctggaaaacatcgtggccaacacggtcttgctgaaagccagggaaggtaagaggcagggccggtacgtgcccggcgcgtccgccgcgggccagggtgcgggtgtcgggtggcgtgcgggctggggctgcgcccgtgcaggatgcccgctgccggcgagtgggtcgcgagcaggacacttcggagagcggctctgcagacccttcagggttcctgccttggggctcagagaatctggacttgggctgagaaggttgcagggatttggatgctaacatatctcctagtttccagcgctcgccctgcagagcgtgccatctcggcagctgttgaaaggtcagttggaaaagcattcattcggggagcgacgagcaaacatgcacataaaatagcgtttcaagtcggcccgggatggttctgtgtgaactggtgtgtgtgttcgaggggcgggggtggaatgagcagaagccaagtctttgcctgcgcaggctgagttgatatagactattgctggaaaccatccgctgggatgtttcttagggaaatcccgtcgtgtggaaggaagccttttaaaggcaaagtcagatgttgaggaattagccttttcatagaattatcaaaggatggctgtacagaccacctagaaaataattcagtatttcaggtttttcttttctgggagtgtgataactgaaattgttagattttggctcagttaaga

SEQ ID NO: 55223 - DNA, 721 bp, Homo sapiens
ctagaacatccaggaatgcagatgcccaggccaaagggctctggggtcggagcaggcaggattgtgccgggggctctcaaccctttgctgggggccacttgttctctccttaaccgtggactattgcaaagggtggagatcggagactggaaaaaaatccgtgttctagtcccttgttgcgtgcttcctggtggactgacctgtagcagatagccctcctcctccggcctcagcttcctcgtctgtgacgtgggcagggtgccgtcatctatccccggggcttctgtgagaatcaaatggagaagagcaaaggccacgtgaggggttggctctgtggtccctgtgctcatagactgcggtttcctacgggcaaaaggggaaagtgaccctagaacacctttgtgtcagggatgcatgccagatggcctttagtgcactctcttcccagccctgtcagcaactgacaggttcaataagactttgccaaaatgttcaactagcttttcctgatgcgggtctttcttcaaattctgtcccacaccgttaactgcaaacttctttcagaacacctttcacgaaaatgaagctggcatagctgtggaaagagttgatggtagtgttgtatataattgtgaaaattggcatagtggtgggcacataggggatgttcattcattcacccagtgagcctttcactgtgcccaggccctgagacagtcgg

SEQ ID NO: 55224 - DNA, 813 bp, Homo sapiens
ccacctgggtgaaagagcaagactccatctcagaaaatggactgatacagcaggattgtggcacccagggaggtgtgctctgtgtcggcatgttaggtggccaggtcgagtttgtcccatctgatgggttatgtacctattaaaataatatagaatcatgaaaaataatatataaactcataaatgcaagaagtagaacattacaaaatcccaactatagtgcttagaaaccctttgacagcaactgatagcaactcaaatataattagtgtatacaaaaaagagaatttatggattcatatgtctgggagtattcctggatttctggatccaaggattcaaacaatgttcccagtttttctttttttttttttttttctttctgtccctatctctcagcttgcttgtctttcctctgcttaattcttggctgggtcagggggtcaaagaacagcttgcttaacaaccccaaggcaaatagagcttcttttctgaaaaccagcaggaaagtcacggaaaggactctcttgggaaggatggtgggggtcatgtggaatgacttactgaagaaggggatgaaggagtgccacacagtgaaaaccacaactgtgtgagcacgaggcacccctgataggacctagtggttcatcagtcacttctctgcctgagtggtaggagcctagattttatagttgttttcaatgacaaaaatcatagtttataaaagagcataatctgacccagaggtgtcctttctgtcacgttatgattggggacaaagtagacatgctcttcagcttgatcatatagtag

SEQ ID NO: 55225 - DNA, 3372 bp, Homo sapiens
ctttagcttcatagttatgacaaccaaaaatgtctccagactttgtcaaatgtcctcttgggggtaaaattgctcctggttgagaaccactcgcctcgattttggtggtctagaatttgcaagctgcttctccgccctgtgcatatccaatcctcagcccttccactaaggattagaacttgattttcttcttttcatcccaccctccctgccttgagatattgctgcatctggacagatgtgccaagtacaattctggctcaggtgactgaagtctaagtcagacatatgtcttcactctccctgaccatccctcttgctgctggcctgcgtggcgtgctcgtgccgataggggcagctgtgtgagtagcaggaccatcctggagacagccatgcaaagggaaaccatctgggtggggtgagcttgccagccccagctacaggtcctggtggagttgacagttgatggatcactgtgctgtgacctctgggcagcccaggcctgcgacgggcagagagctgtcttgtttctccttttggaacctgaagggcagagacagggtgaagttgccaggagaggctttcagctggatcctaggggccagcgtgcagccctttcccagggctgggggtaggggagaagtgtctctctctgggccgtgtggatgggccagaaccctgagctgggtgcagagggctacgctggagaggcggggaagggcactggaccgggtgtctcgagacctgggcatggttttagttctaccccgggtagcagcacgatcttgtgcaaatagtgtcttccttctggtcctcatgtttctcgtaaagctgacttccaactagaacagtctacctttctatttttctcctgatttgtagaaaaagatggtgctgttaagagacggaaatgtggccttcctaaatttgctttgagtcctgagttcctgatttgggggcaagtgtctgtgaagggcttggggtcactctgtggcttttgcctcatttttatgggtcgtagaggatacctcaataaatagcatttttcttccctgaacaaattgagagatgaggccatggttgaaactttgaactttggaacttgcccagatgtatcaggtcagtcaccctcctcccctggggccaataaaccaagtgttccaaaggccaggtggtcttagggaaaatgatggaccctgaagggtgagggtcatggccagtgtggactacagaggatcccctagccacactggagaggggacagtgccctggttttcctgatacgcccccttagtgctcaaggctggtttcaaccctgctgtactaatctgctgatgagggagagttggtggctcagtggtgacagcacaggtttgacagagggtgtctacaccacccagtgcccccttgagctcacatctgagggtctgttgagattacagaggcccttgatagagtccgaaatttgaaggacaagcaaggaagattggagcatctgtgaactatctccagttcagcattgcattagaaaaggaattacatcaggtcactgatgtcttctcctaactcagtgatctccacagccccctggatcctgccaggcctgtggagaagagggacaagccagcctccccaccacccctgccctccgttccttttatatttaaatcagaagcttaggctcctccgtgtagctgctctatttttcatgcctcttgcctgggtctaagccctggagcttagggtgctgtgatatgcttgcgggatgctgccccaccacggctggaaccagggcttcagcccggcgcacacccagctcgtttggaggtcacggctcaccataaaaatggtgtgagtggccagctcttttttcactgtggctctgggcagcccagcccagctccggggtggatgcaaggcctgagagtgaactttgttgtgaatgatgacacaattccagaaaaatgcagtgtctcccagatacggcttctggagctttgcctggggtggggggctggaggttgtttagtgtttgggttcctggtggttctttgccccaggggtgtgtgtgtgtgtgtgtgtgtgtgtacacatgtgtgtgcgtgcatgctttttcatgaggcacacttattttcagatgttcacatggactctttttgagattccccaggggaaaaggagaaagtacagaaagccgtgacacctgatggaaaatattacgctttagtcaacagggctgatgtgtctcctctgactttgcctttaaaccaaaccacaccacagcggggaaagatgagccacacatgaggcctgctgggccggtgactgtcccctaaagtgggactcttgtaattctaagcgcctttgaaaaatgctttcagaatcatccagtacttgagttgtagggggcctgaaaggtcatcttggcccagtggcttgttttaaaggaggaggaaactgagggccagagaggacctatgaccctcccagggttgcacagctagaactcaaatcctgtctcttgatcctcagagaagggtttggtctgttctgttctgccctactttagtttttagacagtgtattgtgataagttttagatttttttttttgtactctgctcttattcattcaacaactctggggatttactggggaacaggcagacctggtccttgtgctcagggggcttacagcctaatgggaaaggcagcttggaacaagaaaccgtgcatgggatttgtagcgggtgtggctatcttatttctggccagtatggggagggagaaggggtgggagttgatggctggggcacggaggatgtcatttcagctctgtggcctgggtcaggtgcccagcccagcaatctgagtgtggatgactctggactatttctccaggaggaggtgggattcacaggcagagacatatcaaaacagggaccttgggatgtatgatgtattttgtaagaaaaaaatggaaaaacaggccgggcacggtggctcacgcctgtaatctcagcactttgggaggctgagacggatggatcacctgaggtcaggagttcgagaccagcctggccaatgtggtgaaaccccatctctactaaaaatgcaaaagttagctgggcatgttggcaggtgcctgtaatcccagctactcaggaggcttaagcaggagaattgctttaacccaggaagccgagattgcgccattgcactccagcctgggcgacagagcaagactcagtctcaaaaaaaaaaaaaaaaaaagaaggaaaaacagagtagagcaggaagctctgtgtatgtatgcgcaggtaaggtcgtcaggtgggaggaggccaggagatgagccatttggaagcccgga

SEQ ID NO: 55226 - DNA, 1698 bp, Homo sapiens
ggggggcagtctctaggagattttcagcagtttctcctgagaggtgtgaagctgagagttaagtagggttttgtaggtgtaacaataggcattttccttccagcagctcaaactgcagtgtgcttggcacgttagtgcaaaggaaaaaaactcacttcattcttaagaaagctctggaaatttcatctgtgtttgagtgagttggcatgctgggcccctggcggaacacaaatgtggaatttgaactctaccctacctcagagagcaaggctgaagcgataggatgaaatgcatttaaatgtcatgagtgttattattagtcgtaatcttatctttgttaataataataacaggacccgcctagaagtgactgaatagcagaccgggctttcgtaagtaagctcacactgtcagatagcaccaggacctggggtggcgccggcgccgttagggagggagtgttcaccggaaacctgcccgggccacacgtgtacagccacatcctccacgccctttgggcgctggtcattcagagaggccctctcagacacgcctggcctctttagaggctctctcatcccctcgagctgccaacacaatcaagggtctgcaggtttgggaactccaaggcagtttctctttaccaagttctctgcatagccttttgccttctattgtttgctgtcccagagactggctgaaacaatgtgtttcctacagattttgtttgcctgcattgacttctttgtttagctctagtaaacagacatttagcatatacagatctgcacacttgacaaagaggaatttggagccctggacggggtggctgcactgagtcaccagctccttgaacctgaagaccttggatggtccggagctcgtaaatgactcaccccatcagtgctgggctggtgtgtgcggggttttgtcgccacctttggcaatggaagaggggaacgtggggcctttgactcgtcagggaaaaacaggtgtgtgagcactaggttggtgacgaggtttagcagcaggtggactctggagcgtgactctggagttgccagtcccagctccagcactttgattagctgtgtgacgttggggaagttgcttgcctaatatgtgtgtgtttcctcatctgtgaagacagcactaacctcgtaggtactcgggaggctgaaggagttcatctgtggaaatcatttggcatgatgcctactcttattccttgtctgtggggccctgttttgtgggcttgccacagtctcatgactctgctgggaagagccttcctgcgggcccccttgagctaggaatagaacctggatttctggccctgtaggctgacgcggccctcctagatgtagtggtgatgccccgttcagcagagatggttccaaatgttctgaacttctgccttgtatgggaccctgtgccggctgaatcgcatggtagctcagggcatagatgctaaatgggacggtcctgggtttgcaccctggcctctgctctcaccagctgtgtgagcttggatgtgttacttgttactcagagcttttctcatgtgtaaagctgagtgcatgaggccgggcgtggtggctcacgcctgtaatcccagcactttaggaggctgaggtgggcggatcacctgaggtcaggagttcaagaccagactggccaacatggtgaaaccctgtc

SEQ ID NO: 55227 - DNA, 2423 bp, Homo sapiens
ggtgatattttctggaaatccagccctgctggcagcacagtgggagctgagtcctgaaagcccacctgggtagaaaagaactggatggagtctttagtcctgcagacatcacaggcagaattgtgacactgccttccactctgcagatgagtcatcggccttttgtggctgggaacgcggtagagtgatccttccacatgcagtcactgcgacacctgagaccctcccagactgattcagttgcgttgagagcagcttctccggttttcagggctttccttcctccccctccaaattcatagtcgaaagaccccgcttcatgacatagtttgggtttctaacaaatgtggtcccctgcattagcataatgctgacttttctgaaccacaagccagtttctgctgggaagtcctggggtctctgtaacctgtgcccctcgctaccccatgtccttgtgcctttaaccagcagtgcccccagactattctggaaatgggggtgatagtttctgtggccccattcctgctacgtctggttgtgcctggccccaacccaggggcttctgctctgagctgagagctgggctggccatgccatgtcaccctgccctctccatacaaggaccagacccactgaattgtttcaaactctagagtcacctgtgacatgtggcctggagagaaaagatgagttggccaatcagatttgctccttgagcctttggaatcaggattctgggagatgggtagtgagctgggctgaagggtgctgaaggttcctgaagacatagcagcctcaacagctgcaacacagttctaactacccaggattagtgcagacatcacaaatgaagagcacagtcttcacaagaccaccctcactccaggcacctgccacaagggtgggggtccccaggccactggcacttctgaccacggcaacagattcagggattcccctgaagctctcaggttggataattcgctagactccctcgcagaacccagtgcagcgctacactgacaattacagttctattgttgcaaaaagatacccaaacccttgacagggagaggtgcccagggcaaggcctgagagtcccagatgtgaagctgccatggatgtgccacctcctggcacattggtgtgtgattaccaggaagctcacccaggcctcagtgtctggagtttttactggagcatcatgattttggcatgattgatggaatcactgggcacatggtcgaacccagtgtctggccccccgtccctccctggaagtcagggtgataccacgtggcccaaagcctcaaccttctaatcccatggctggtctctctgacatgcccagcccccctcatgagtcatcttgttagcgtaaactcagatatggcttcaggggcctaccatgaatgaaaaagacactcctattactcagaaaattccaaggacttagagactacctctcaggaaccagggacaaaagccagtcagattctttattatacagtgacaagttggggcctatgcaaagacgtgagagtgtcctgatctgtggagatgccaggagtctgccccagaggagtgtggcccatgggaaaacaggcccccacttattcagggtccagaaagcacggcaggtccactgcggatcctgccttcccatccccagggatgactctcttttctctgggatctgtaaacaataaaggtccaagggtcaccagaaggcaaagaggcattcagtagatgggtgtgtgtgtgtgtgtgtgtgtgtgtgtgtgtgtgtgcccaaaataggtgtgaggcttgaggtgacttctgcccaacttcacagggagatgatcagggcctgggggagagttggggggaagcggcccctgaggctgtctcattggcccggacccctcaaggccgcagctgagcagtgctctccctgcagtctcccttaggctttccggtataggaggggcctcatacggtttgccctgcccctgtgagtggccctattaatggctttaagcctgccaggcatcctgctgtgagaagaatgcctgactcaagtcaggcaggacgcagcgaccttgtcagagtcagagcccaggatcaccagattctggagctgggaggaatatttttcagtcaacttttccaagcgtgtgtgtgtctcttcaggtcctttttagaagacgtagacagggcagaaataacaagtcagagaggaagaaattcctagaaagagtggtcccgtcattccttttctcactgatttccaggcactttctcttgacttacagcagtggttctcaaagtgagagtgcatcagaatcacctgcagagctcattaagttactgatgctggcccatccccagagtgtctgattctgtaggtccagggtggggcccaggaagctgcatttcta

SEQ ID NO: 55228 - DNA, 855 bp, Homo sapiens
cttcttgggggaactgtgaccctttctcgtaaagctgttctgtctctgatcctggtgaacatcaccagcttcctctagctgcccagagctgcccctcccctctgccctgccgtgtggcacctggcccagtgcagtgtccagtccctctccaggtcccgatgcctcggcctccacagtatctcctagtctgcccctctcgccccatctccaccatttccacttgatccttgtccctgcctgaactcctgtgtcagctccttgctccctccaggcgcacctacttccaaccaagctccatgcagcagccaggaggctctttctgaaatgtcagtctgctctcgccaccacctgcttcagtagctttccactgctgtcaggacagagtccagaggtcttgctgaagctgaccaggcccggcctctccgcccttgctgactgcttcagcttcacccctgccgctcatctcctgacttagccattccttcatgtttcttcttttctccaggcctttgcctgggctgttccctctgctggatacacttccctaaccctgcttggtaatcaactcaaccttagtcccctgcttcataggtcacctcctccaggaagccctccctggtgacctcacctagtcagggtttgctccccaccctcatgctgccactggccccactgtggttgtctgatgactcacctttgtcttctgtttggctgtgggctctgtgagagtagagcctgggtctgcctgactgtgttttgccagcacccagcatgagtgtctaccctgtaccaggcacttgtagaatcttgtttagatattttgttctcccctggagatggaaaaacactcaatct

SEQ ID NO: 55229 - DNA, 638 bp, Homo sapiens
ctatctcaaaaaaaaaaaaaaaaaaaaaaaaaaaaaagaattgaaaggcagccttgaccttaggaagtgtgctcaccagctgcaagctgtcccacctccatactcagtgattattggaggtgatgctactacaagaaggaataatattttaaagaataaagtcagttcttaggaagccggtagtaaccctgtaacaatctggtgtttaatcatttagataaagccatagcctggggtcaaagattggctggaggtgtgcctggagcattaagctcatgctcaccaccaaacttcctgtcccttgtaagtaagtcagtgtcatcccaggtgctggcatggccagtttaggatcaccctttgcctgtgcctttggggaaccccaggacacttgagtctgaatggcctgatgtggctaggacaagggcagtcttgcgcaactcttccatcttgggaaaacaaatgtgattcctaatgtgttgcctcgagttcctggaaccagggtgtttgttttatgtaatagacagcagagaccattctgttgacttcagagccttcctgcatctaaactataactcttcataaaatgtcctttcaatgtggtttatccaggatatcgcagggaaggaagactaaatagt

SEQ ID NO: 55230 - DNA, 1648 bp, Homo sapiens
gggctgagattagtcatcgcattggagctattcctctaccttccagcacactccaggtcccgtgccaggccccaagggagatcccatggcacacaaaacagttggttgtttccagtctgaagaggagcaggggtgtcagcaaaaccccttaaatagaagtagaaatacgagtcacaagagaagagaacaggcagcctccgggaagatgggagagtagcggggcctccgtgcgtgcacccaggcatggctggagaaaagcgctccaggccctggaagcagcatgtggaaggaggcggctctgagggtcagagcgaccaactgtcctgctttgcctgggactgtcctgcttttagcactgaaagtcctgtgtcctggggagacagggacagttggtcaccctgggagtgaccctggccacttcgaatcagggcattaggaggatgaggtagcagagccccgcaaagcgcacagcctgacaaggtgcacagagcagcccaccggtgccctcctgcctcagccgtgtaccctgtggcccagggcctctgttcctggcatccgaggcctcaggtcagcaaaggttgcaggccctggagtgcgaagccgctgtgagctggggactttgccttttccccactggccctccccaggctgcacgccaacccccagtcatccctgccagccccccacagtcatcccgccccccacagtcttccctgccagccccccacagtcttccctgccagcccccccagtcgtccctgccagccccccacagtcatccctgccagccccccaccatcgtccctgccagccccccaccgtcgtccctgccagccccccacagtcatccatgccagccccccacagtcatcccatccccacaccactgtcggggctgctgccacattcctaaaccacgagcactgtgagtgacatcatctttttcacttccattgactctttttttaaaataaaaatcaatgtattttaaaaggaaacctttccaaggaaataatagccatgaaagaggggtttgggtgtgccaggtaactttctgttccattacagatttttaaaatacgctcatttcttaacattcctctgcaagccacccagggccagcttcgtgagcttgacctggcaccccctagggcaccctgggtccccacacctggctcagtgccctctgttgccatcttaaaattctaaatgtggaacatggaccctgcgttttcattctgcgctgagcatgtgaatgatgtggtcttgcttccagctaaaagtccgctgagttccacggtggcgtgcaccccgggctttgggaactagagaagggtcgcagctctgcaactggacacccctgcccgcacccctgcttccgtccacgtgcacttgggcccatggtttgctttgctggggacagcatggccttgagccttgagctggagaccagagcagactggaggggagagtcccagaaagtgccgagccctgagaccattgctagaaccttcctggcatggcggagcccatgctgagccggtgcactgattcacaaccttcgtattagccaaatgtcaggagactataagcaggaggtagcctctaccctccagtgacagatgtgtcaccaggtctggggatccct

SEQ ID NO: 55231 - DNA, 2483 bp, Homo sapiens
aggcgtttcattgaagcattggatgtgcttcagtaggcctcagattctcaaaacgggacggatacttcagtgagacgttagagaacacatttattcctgtacaaggccacaccaaaaaaatctctatcaatactgaacatctatcttctttactgagcatcctttctttggtaggagtgaagagatgtgaagctagtcaaacttctcgagtgcccctccaccttcatctattccctaaaaagcaatttccccatcagagagcagagccaagtggactatgatcctatcaataccaggagaggcaagagaaacaaagcagcgatctgactccttggtactcaaggtaggagtgctagacctggagaggccgggaaattagggtgcccaatttaaacatttaattaaaaagtattcagacttaaaaaaaaaaaaaaagatgcagagaaaaggagtgccacactattcagaaaggaatgcaaatgctgagtcatcactcttcattggaaaggaaggaaaccagaattaagtggttggaagatggaattcattcattagattgagcttcaggtaaaaagcaacagcaagacaggagaaaaagcgttcagaagacacacatcaaatagcggatgaagacataattttagccaactctgaagctttcgacgcacaaacagattaggaagaggcaacacctagagagcaaaaggagtttaacaactggttgtcagtttagcgtagggagcgctcaaagtaaacttctttatccaagaagggaaagatgctcgggcagcaaaaggtatcccttatgtacttcaaaagtagcgggcgctaggcgggtgtttctgacagcgtgggcgggggcacgtggggcataaagagagaaggggcttgagtggtgaaagagtgtcctgcttcctccgagagcttagctggggagaagagctgggagcgactcgagctgaggacgtggaaggggtgagtgctaattcctcagggcccgcggggcccacccccgggcccacccccaatcctacccccgccaggcccttcccccgtgggcgccggcagctccaggcccagcccagggcgtccaacgcggagggggtgcaggagttctcctgggcctgacagcctcagccgtgcagaaacccggcctagggagggcatgcaaagaaggacgccagagaaaaaggtcgagacaagccccagaccccaggaagtgactgtttgggggaagggaggatttccttcccaaggaaaaggggacagatgaggaatgcacttcgcgtccacgccgccctggtcagggagccgcctagagtcccggcttcggcccagtctctcctgctccctcccttagcgtcccgcggtgcccgggcctcttggcgcctggcacccctcgtctcgggtactcacagagtccggggctgcccgtcgtcttccatcatggtgggtgcgacggagcgatcccgggacaagggggagggcagggttggggaggggagggggtggggaggaaggggaggggggctctgggcaccggctggggacagaggaaaaggcaccgaaccctgctctcgggctctctccccccagcccgctccggacactgcgctccaaccaggaggagcaggaggaggaggaggatgaacaaaatggccgccgccaccagccaggcaggaaacagggcagagcgcaggcgcgacccgccaggtcaccgctcaggccagccgcgacagcctgcaagggggacgaccgaggggagagaaaaaagggccgccgaggaaaccctgggacccgctcacgacggatcacgtcgtcgctgtgggcctctggccggccgaagcccagccagctccgggagagatcgggcaaaaagagaaacgtcgtgaagccgaagtctctgggaattgtggtcctggaaatgagagagggaagcacttctgcagaggacttctggaacctgtggttaagaggagccgccggcgcccacccgcgctgggacgtgaagaggagacttctgggtagtgtagtcatacgtgaggacgtgcgacgaccaggaagtcggcgggctgggaggtaaagggaagaataaaagcgacattgaaaggcggggagaccaagtggggaaaagcgctgtctgggaaagcgaactacaagtcccagagttcctcgcgccgggggctgtcctcggactgctccaggcattgtaaggctcttctgttggcccagtctgagctgctgctccgccttcgtccagcccgagagcggtttcttcaactgtggctcaggcagcactctccctccgcgtggtgtccgagccagcagggccgtccggccctcctgtgttcatcagaacggctggctcgcgttagtcaaccgccgcttcgcgcgacagtcagaagagaggctgtgctggcggggacccggaggggttggggtgttttggggactcgatttcccacaaataggtatttctagcc

SEQ ID NO: 55232 - DNA, 2294 bp, Homo sapiens
atggagatgttgcccaatttctagaatcacaaataagatctttaacaataaaagttaaaaaatgaaaatcaacaacaacaacaacaaaaaagatctttaaatgtgttgtaattttctcctttgacaggttacaagtgcaattgaataaaccaaacaaaaaatgtcatggttattcggtctttacttcccaaatcagggtcaagatataagatagcaagaaccaatctctaccataaaaaagatccagacccaagaaaatgtgatttatctttaaagctgcaacgaaactttctttttagtctaggagactaaaagccatcagttgatacaatctctttttttcttgaagtttccaaaggaaggcaggtgagtttgcactgacttccattttctccctggcttccttccggtgtcagatgagagtccccgcgctcctcccggacagccctcagggtcctcggctatcatatatgggggagggggtggaggtgggcgagatggttttgtttgtacaggaaggacgggcggcaggcacggggagcacgggctccggccccgggaacactcactcggcgcaaaggagagggagagagcgactatgaaagccgaaacccgcccggggcgcacggaggacggccccagtccagctcgtccggcttcccacccgcaggcggaccccgaagccgcgcccgcgcccgcccgcggcgactccggcccgggcacgcgcacgagtcggaagggggaggggcgggaggaggtgggggaggggcgagcgggccgaggccccgcccccgctcctctgccccgcccgccgcgattatagccgatgactcagggcggagctccgcatccaaccccgggccgcggccaacttctctggactggaccagaagtttctagccggccagttgctacctccctttatctcctccttcccctctggcagcgaggaggctatttccagacacttccacccctctctggccacgtcacccccgcctttaattcataaaggtgcccggcgccggcttcccggacacgtcggcggcggagaggggcccacggcggcggcccggccagagactcggcgcccggagccagcgccccgcacccgcgccccagcgggcagaccccaacccagcatgagcgccgccacccactcgcccatgatgcaggtggcgtccggcaacggtgaccgcgaccctttgccccccggatgggagatcaagatcgacccgcagaccggctggcccttcttcgtggaccacaacagccgcaccactacgtggaacgacccgcgcgtgccctctgagggccccaaggtgagccgggcccgcggcccgccctggtcggtggcgccacctcgacggcaggcggcggggagtgggctgggccggggggacgcgaggcggcggggcccgggggtcggcgaaggcccctcgcgggcggacaccggctccgcgccccgccacacactcccgctgcgcccggacgagtccccgctccggacccgcccttgacaggcgtcggggcgaaaggaggccccgggattcggtggcccgggaagcgaccccgcagtggctccggtgccgtccacggctcgactccagggcggaaggccgggtgtccagcgctggcctcgcgctctagggctgggagaggggcggccggcctggtcagctccggaggccccggcccaccgtggcccctgctgcccgctcggcctccgggcccgggacccgcggcgcaccctgctgaccgcggactcgagggggacactcgcaagcttggatggtggttttggggggaattttaccgctcaagttctccaacttggttgaggggtatcttggctactgtcccatgttaggcacccaatgactctggaggctggtgtcaaaacattcatatatatatgtgtgtgtgtgtattttaaattaaaattgtattattgtttgaaagtgctttcaatatgaacgtatcctagtatgatttgtaaaataaaaaacagggtgtgcttctccccagcagtttctagagatctagactagagatctgagactgtcttacagttggccattgccttaccacattgcctcacactggagagaaagagaatgatacgtgtatatttataatggcattcgcttcctgccttgttatggtattaaaatacttaggatttgttaccagtacacaaataactgactaatgatactcttgtgaatacagcagaagtatgtctcatttacatacatgcaaggatatatacttcttaatccccaagagcatga

SEQ ID NO: 55233 - DNA, 1225 bp, Homo sapiens
gaatgaataaatgaatggatggtttaaaaattcatacagtgggaggatgggaaggccccttcatgtgcagaagaaaagccagccccttcgctggcccaccctttcagggtcagttcagacccccagcatcccagcggggttagcactccttcctgggttggacggtgtcttccccggttctgacagcgctccatgccgggcgtccctgcagtcttggggctgtggtgactcagaattaagctgagtgctctcactctcgtgtaccctgcctggctggcctgatgactcagcatggagcgctggctccctgacccagagcacacttgaactgaatgttccaggtctgagcctcagccgagcgtggctgggcgaaatggaagcctttctctcctgctgcctctcctgctgcattttaccccgggagatgaaggttttggagacgttagtgacacatggatgttatcacagtgtacagctgtgacaggagtagcagaaaggttagcatctacctggccttaccatcagacaaacctgggttctagagatcttaggcaaagcacttacccttcttgagcctcagtctcccgttgtgtgaagtgggcatagcaacacttctgttagcagggttgggagaatcaaggaagatggtgtgtgggaggcgaacgtcccaaagcctgaactgatgcatgcgtggaactcccggaaacatatgcagcctgctctgtggagtagaagtgtgtttgtggataggtgtgtggcctctccacacagcagactgtcctggctgtccgtgggcctttcagctctcagagaggcctggggtcttgtttcttagaagcaaggcctcctcttatcccccttgtatggagtgtagctgactcccccgaccagtgtccaggtggcccttggagccctccctggggcttcccgtgccccttgtgagtggaggatgtaaaggaacagtaacagatgaagctgcggggccttcgggagccttgacccagctgccagaccctgcgccatgcgtccatagatgcatctccccatcctctgcccaagataggctgggtccttgtgtcctccactgtgctgtgtagagcgctggctttactcagcctcagctcctcaaggggagggtctccctcagctgtgtctgtgcagccgcaaagtaccaggcaggagctaggagcgctgcctgtgaggggggacatcagcccaccttact

SEQ ID NO: 55234 - DNA, 567 bp, Homo sapiens
tgtagaagtgtttaattgcctattttgtgaaattcatgttttttttatttaaagcaattttttgttgttgttgtttttttttaaacaaaaccccaccagagtagaaggggagcctggaacgtcttttagatgcagtgctcacaaggagacacttggttttttattaaatggcaaaaatgggtcattaattcacccaagcccaggaatacagacctcgggactgttggagaagcagccaggccgcccttgcctgtcctgaccgtctctgctttccagctgtgccggcaggcttggcctgttcagtggacctcacgcacggtggagacctttccccttccccccacatgcctctcatttttctgggtgccctttaccctccaggccctctgccctgctttgtgctcatctcctcctccctgacgtccttcttcacttcccagcatgtcctggcttctcctttccagtccctctgtcttgctgaggcatctcctgtgatggttggaacactcagaagggtggacctcagcccccacttccagcctggcccctggtctctagcctcatctc

SEQ ID NO: 55235 - DNA, 1865 bp, Homo sapiens
ccaccatctgagaccaagagacttccccaagatcacacagctagatagtcctcgaactggccccggaagtgggggcctcattctccagacccattctgttcaggatatcaactggtttttcaagacagactgagctcaaggatgtttgggggagactcctccttccccgagagggtctccattcatcttatcctcgccaaacgatattccttccgcttgcttcattaactggctccatttgtgaagtcttctccaaaccgccctgcttaattcgggacacagcagcacctgtacattcctcccttcctcctcgctctttagccgcgtgctgctaatgcttgtgtgttttctattgttacatgctttccctcgttgatgtgcatttattgaatgcctcctgttgtcaaacttctaatagggaatacgaaaacagaagacgcctccgcttggctgtgggcctggctggggatgaacccctgtagccaggccccggggtctcgcctggtttcggtacgggcaggcagcgcaggcccgcggggaacgtaccccgcaccgctccgggagagcgggtgtggggttggattcaggtctcggcctggcgaagcgtgagcgcctccctgcacggaggggaggccccagcggtgggcgcctgtccccaaggccgcgcggagggaggcggtcagtccagaccgactcggccgagctcccgagctgccaccggtgaccacgacaggaaggctggcgcgccgggggaggggcctgggcaagagcgggaggggcgggcggaaggacgagagggaggaggaaagacccgcggggaggagctgggaggagacacccgggagaaggcggaggaaagggcaggaagcgggagggagctgaaaggaggaggaggctgaggggcggagccgggcgctcggggagagtagccagcagagggggtggagccgggcctggggcggagccagggaaggggaggagcgggggggagaggcctctacggccgccgctgccgccgccgctgccggggcgcgttctcctcctaccggtcgggtgccccggggcgttccctctgccgctgcttctcggcgcggttcctacccggccgctccccgaggcgcgggctctggcggcctcgaccgactaggacgccccgtgcgccgcccgcgggccgccgcctccctgggcgcgcggggccagcatggagctcttccaagccaaggaccactacatcctgcagcagggcgagcgcgcgctgtggtgcagccgccgcgacggcggcctccagctccgacccggtgaggctggcggtgcgggcggggggcaccccgggccagggcggggagaggagggggcgcggccggacccctcagccgggcgggaggagccgcctgcgggcctggtgaggcggggcggggcgggctgcgagcgcgcgagctgtcattattccctgactggaaggagcctggcctttctccgagacagcgccgagcccctaccccagtgcggagcagaaggggctggcgaccctcgtccttcccaccgcgtcacgcggccgcccttggggcttggggcccaggccgaggggagggggtcccctccggcagaaagttccagcaaggtgcacctggccgtaaaggcctcttcctccttggagtagttcttacatggccttcgccagaagttctgggttcgaattccgatctggagcggttgcgccagttccgtctagggctctgctggacactcactccctgttgccatcccgtgtgttcttggtcccttattattaaaggtgtgactttactgtggttacctcataggcactcggtttaaagcctttgtctttgactttaataccacag

SEQ ID NO: 55236 - DNA, 766 bp, Homo sapiens
tgtgcagtgttgggcagttactttacctatgccagctttaatgtctttgtctcaaatagaccagatgagatgacttgacttttgccaccttaagtagtaaatccttccaacttgattctgtgatgactttagcttttgccactttaagtagtaaatccttccagcgtgattctgtgcaaatgatctgatttcaacttgcctcccccctttctacatcatatgtttacctatccatttgggagccttctgtgtaccatgcactgggaacagaagctcgaggagacaaggtctaagtgagcttcctcttcctcatgagttcctgttcagtcaaggagacaggcaagtcagtaatgacatgcactaaaccaaagtaagatgccgtgatgggaatatgcacagggtttaggggatccacacgagagagtctggtcagctctgctgggtgtgggtggagtggggaatgtgtccgggaagaggactgacccttgttctaagtctagaatgaagggcaggcagaagtgggtggggagtcggattccaggcccaggctgcacatagttcaggatgactgaaggctaggttgctgggggcggggggcggggggggggatggaaaggactagcctatgcagggtctcacaagcctttccaaggaatttggactttattcccaaggctgtgggaggtggacaggtagttagcaatattcatatttatccctttttaatgcctaatgtgtttctttcacaatattaatgttataccaa

SEQ ID NO: 55237 - DNA, 2573 bp, Homo sapiens
cgccactcattacgtgtaaaaagacactggggaatggaacggttgtcaaaatgcccagttaacgacaacaaatataaacttttcttcgtatacccttcgcagtaaagtagcaacagcaatcgcaaccaaaatttactaagctcgcctgcaggattctcagccctgtgtacaaactcaagtagctcaatatttcttgctggctctggcacaggagcagatccagactagatgggttctaaagtcatcccaacaggaaaactaagctatgaacattaaatcttatctctgaaagagagaatgagggtagcacaggagttagaaccaacttctgtgcaagcgagcactccccgacgcaccggaagttttgaaatatcctgtgggcttcccacaggcaaagtggttttccctccccgcggctctgcgggccctccccagggttcgaggacctccgagtttgctgcgcccggggccggggccctggccctgccacaggctgggagcgaggccgtcaatcacagcccgcgaatcacagcccgcgccccacgacttcaccttggcggctcccaagctgcgactcgggcaggtgggaggtacctgcggcccggctcctgcccctgcctgctgcgaccgggggagaggctgtcccagctggggccggtgcaggccccggggccccgtctcgggccacgcgagccctcgagatggtaccgcgtgggggccgcgcggcggggccctgccccggggcccggcaaactcggctgcccgcccggcccgccccccggcgccgccactcaccgaagaatccctgcacgattcccagcgggtggctgagccaatcctccccacacggcatctcgccaggggccggggccggcgaagaccgggcggaggcgatccgcgggccgagcgcggccgggcggccggcgcccagctcctcttcagcggctcggccgctcctcgcccgcgttcgctcgcgccctcccacgcacagcgagccgcggggcgcgggcctcccgcgcctcagggagcggcggctgcggtggggccgccgaggagctgctggcgacagtcaggcgggcgcgtacgggcccctagccttcacttcgcacaatggcgggaaatagccgccgccgaccgcgctgcctgcgacctgggtggagctcgcgtggggaggggcggcgggagcgcgcggcgcagcgcggctctgcgcggcgaggaggaggggcggcggcggcgccgccatcttggagacgggcaaaaggaagggcacgcagcgccgctggaggctgcgcagcgcggggcccggcgacgcgctccaagggcggcgcgttgtcgtttgtacccctgggccggcgtgtagcgggaactcccatagtgggcttataagagggcaaagcgagtctgcacaacagctgaaaagcattaagctcagagacctcagagtcatctctgggcaaaattagtgggcgaaaccgccttgggaatccgcccacctcctcttcgtgccttttttttctttttttgctgatggcagcacttttatttgggtccccggcccgaaaccctgagtggtgacttttccctcagctgcacaaggtctccctgaggaaggtgcacatttagagaaggggaacctcggaggaccccacgctccttctgcagtcgcgtcaggccctgtggctcagggacggttccttaccgaggggcgggcgctctaaacgctccgggcccggcctgcgccctggttgcgaacaccgggtcggcgtctgtctggaagctggcagccgccgtcggggagcggtgcgaggctcctgcactgcgcgccgctaggataccctggagaaggaagctacgaagaccgactacagcagccttttgctgaggcaatttggaaaatacccaagttcaagagtgaaactgtgggagtcgctctgaacctcttctggttcaggaggctgtccgataaaaaagaaaaaaagaatgaaactgtgtctcccctgggcctgaaatgtacctaagaaaaccccaggcccatcagatatatctactcaatgaaaaaagggcatggtgacggaaggggaatgacctgaatggaatctacaaagtgaggagctgaaggaaaaaaacggaacccgtgtctcaaaccctccttggggctgtaggaaggggggaaaatctttctacctttctaggttctccactgcggcccttatcacaaagctcggattggcaaaagaaaaatttagtaacatgtacatcttatatgggcaaaactcaaggaagagtaactcaaacaggtggcttagaatgggggaattacgtagcatttacaataaagaacaataactggggagaaatggcgaaagcagtttgaagtttccaaaaacagcagagtgggaaggcagagatacgagaaactaatggtagttacaggtagtgagtaaagtgtgttatgtaggttcttctagcgccatcgctggctgataagggtctaaagttgtctctggtgactaacttttgtccctggtagaaagaggaggtgggacacctttgaaaatgtatgtcctgctctt

SEQ ID NO: 55238 - DNA, 1739 bp, Homo sapiens
ctcacaaagtgctgggattgcaggcctgcgccatggcgtctggtttgatttctcttttaaatattttttttggccaggcgtggtggttcatgcctataatcccagcagtttgggaggccaaggcgggcagatcacgaggtcaggagattgagaccatcctggccaacccggtgaaacctcgtctttactaaaaatacaaaaaattagccaggcgtggtggcggacgcctgtagtcccagctactcggaggctgaggcaggagaatcgcttgaacccgggaggcggagattgcaatgagcccagactgcaccgctgcactccagcctgggcgacacagcagacttgtctcaaaacaaaaaacaaaaccaaccaaaaaaacaaaaaacaaatgcaaaacaaaaaacaacaaaaataaaacgaaatatttttttctccctatggattaaacacttaaaaaatgttttaccacttctatttctgggtcaaccacaatgttcggttccatccagaaagacaagtgggttttggagagggtgtttggttccgcctagcatgcgaattcccattcccgcacaacgctcttcctcccttcctccttccggtagcgtccagcaggattccgctgttcctccaaaatctttgtcaggagagccatcctgacggtacctttaggaagcccatagatacccgccacaacctgtgactttcagggtcaattgcgtctcaattcgcacgtctatccagaacctgcggggaccacgtccccatcctcccgcccggcctccgcctccgagggtgtcacgtgctagacgcgggcgtgaagacagtgtcgccatgttgatatctggcgtcgccgtgtaggggaagggagagggcggctgactagctacccgtaatttcggctcctgtgcgcaagtgcggaagtgcgctggccaggagcgtgatcggtttccggtcagtggtgtggtaccgggtacccggagacgtgtatcggacggtgggccgcagccatggccgagagaaaacctaacggtggcagcggcggcgcctccacttcctcatcgggcactaacttacttttctcctcctcggccacggagttcagcttcaatgtgcccttcatcccagtcacccaggcctccgcttctccggcctccctgctcttaccgggaggtaataaggggagggcggccccgtgtgtggtgggaggcgggcgggggacgtgcaatgacaaaggtcagacgggagtttttccttctgcctcgagctaccctctggatagcttgccaggatcattactggccaggtttgagtgggtcgggggctttgggatcttggaggtggcaggtgatgagacttgctcttcacggaaaccccctgttccgagttgtccagagtgctggacattcattcgtaccctggcattccgcaaatctttgctgaatacccgttgttggtacgccaggtgctggcaggaaatgcaaataaattaaacagtggccctctcctagggtacagtagtctgtctcccactaggagactcctaggatacggtaagatacctcctaggatggactgtgcccctctcctaggatacggtacactgtctcctactaggagattgttgtgatacagtacaatatcttctaggttacagtaagatatcttataagatggactgtgcccctcttctagaagcctgtaatatttgtgaagtagacatatacaatgcattcctt

SEQ ID NO: 55239 - DNA, 1939 bp, Homo sapiens
acacggacgcgcatgaaactaacaatgtattggggagagaaacacacatctgcaaatatcattgctgaaaagaaatcattgcattaagtgctatagttaaagcgtataaacccaacactgaacacaaaggagggaaggactgggtctgacctggagagcagcagaggagaaagtgcgaaatgaaaggtacccagcaacagacaaagggtcacacttggccccagacatagtgcttcttcctcaagtgcgaagggagtattgcaaacaccagatatgcagtgttatctgtatttggaaattgtttatattcaggccattcacttcattcagtctggcaatttcattcaattaatctcattcatttcttaattaatctcattcattattctctgtaaactccacgagagcggagactttgtgtcttcttcatcggtagatcccccatgcctactggcactagtagttgccctaaattcacttatcaaaggcagcaagaataactgggactcttctctcttgcttttcacgatttccagcagggcacaaaggcctacagtccccacctgaaaaaaacagacttgactggaggcagcgcctcttcttccaaatacagccccagctgacgcagattagcacaaccgcctaagcggcggaactctggagagtgcggaacctaggatcctaggaaactgaaggcaacggaacctgggggcgatggaatccgggagcggtggaacccggagcctgtagaacttgaatctagaggaacctgacagcggcgccgagggggccacccggactctgtttggaacggaagcacagtgtccgccgcttcctggttgcgggtcagcgcccaggtcctgggctggccgccgggatgttgccctacacagtgaacttcaaggtgtcggcgcgcaccctcacgggggccctcaacgcccacaacaaggcggcggtggactggtgaggacgccgagcttccaggtcgccaggatcggccaggaatgtgtgagggggaagggggaaggacaagaggtttcaccccctggttagtttggcctcgctaaggcagggagccgccctcacgcaatgagcttgctttcagttggtggatttttgttgttacaaaagtgataatagccccgtgtgggaaattcccccatgcaaatacatttcccctctttctcgcgtatttctctgctgttttctctgcacctcgcccttttgccgttccattcctctctcttttcctctcctccagcttccaggcttctctctctccaccattaattccctgtgcactttctctttcccatcctgtcttttctttttcgttgtcttgtattcctgttgtctttcaacaatgtgccagaccctgtgctaggcgcctgttctttcacctgtccttttcacctcttttcgggctcctcctgtgtagaacattcctgccttcaacaggtcgtctttattactctctcctttcactataaattactactgcagctctgaaaactactcattagacaaatgtaaagcaaaattctgtggctgtgggatgttgttaggaggactgaaacgtcttgtgcagtgtttgtcgttttatttagttggaaggactaggattagtcgcagtatccccaggcacattgtggatactaaggattagaaatcggataagcgaaagacgtatgcctacaagaacagtcagagggcacaagttcctttttatgtcctcgggtctctattttcatatcttttagaactttttttatccgaatgaaaagtgaatttcaacaagcattttaagcttagccagatcttttatttaagtgggataatgataaatactggcctttgggtttaaatgattttattaatggtggtacatatgaattagacttatcatttatttaggcttggcaagaaagaagtcgtcctg

SEQ ID NO: 55240 - DNA, 790 bp, Homo sapiens
ctcgtgtatccgggatgttatagaaaatgtggaagtaagtctgcaaaacatctcaggtgtcaaaagagaaatatcaaagtatactcacaatatgcaaggagagaagaggagaggccctttccctgagccctcagtaaggcttatctgtttctattttccccacagcggtacaagctgcttccctgtcctgacaagcacaataaaaggtgcaaacctgaggaacgtggggacctcacagaggcaggcgcagccggctcatcgagatgtgtggacagcagaaagcgagtgaggcaagagaaaatcagcacagggtaaacatcagagatcaaagggcagcagctggagtcactgggtggagaagcagcgcaactgtggcttacccaggcagccagggttccaggagattcttctaggccagagctctgacatattcaccaaacagctgacaactttgccttttgcatgggaaataagtggaaatgaatcttggccatccaccactggtttcgaaaagatccaggcaaggtctgtgtgcacctgccacacaaaaatgaatttcatgtgattgcaacaaacagaacaatagtgcaagcaaaattcctaggaaaacttttgtccagaggtaatgccagctggttgtagcattgcaactaaagttcagagagggactcactcattccacagggctccagtggggttttggacttacaactggatgtcatcacctctgcgggtgcctgaataatgactctcatagattttcagggttatactctggaacaacttgtag

SEQ ID NO: 55241 - DNA, 675 bp, Homo sapiens
cttccatatgcaagccagtattctaagtgctttacaaatattaacttattgagttctcataaaaaccctataagagaagtactattacatgccaggaaccatttaaggggttgtacccatattatctctattcttccaatccatccggtaaggggacaggaatcatttttcttcattgacaagacactgagattcagaggttatataacttgctcaaggtctcacagcaagtggcagagttgcaccttgaactctagtaaggaagaatgagtaatgccaagggaatctttgaaatggcatttaatcctagagttaccagttaagctcttccatgctaagaacatccaggttcaaatgggccaagccctgggggacaagttgtgtcttcttacaaacagaaacagaggcacaaaccaaaaggacttgcctaagttccagctgtgggcaggaagccagtaaacacatgaaacccccagcggctggctgaacattcctatagcttcgatgtgccctcattctgttaaaatgtagtgaccaggaaattcatcactgcttatatgaattatatgttttttcaatgaaaagaagaaagctctgttcactcatggagacttttattcaagcgtcaagctgtattttaattttctagtagcaagtattgcagtcagccacact

SEQ ID NO: 55242 - DNA, 1272 bp, Homo sapiens
gtggcctctttcctttgctaaggattagtctagaatgtagggtttggacaaatgggtctgggcagtgctcctgctctgggcattgcctcgggaacagtttcccagcttggcttccacagggctacacaaagaccacttttgtctttgtcagttacctgcctcacttgtggttctactctccctccccgcattcttggctcctgggcagcagaacctcacattcatcacacctctgtggtctgtctcaagtgggctgggtttttggttttggcctttttgtttgtttgattgggaggtttttggcgtattgagaagacaagttttgccctttggactccccatcattcctgatagcacactgctagggaggctggtgacactgctccacagagcagagaagccctggcccccaagaatccattcggcccacgaggatgggactgggctcaggcatgctgtctgccccaggcaggtagacagaggctgcccaccctgggcatcagattcagccgcctgcaggaagcctcgccagcatgcacaggcctgccttggggctgagcccaggcagttgagggaggccaggggagagatggctgttggcagaaggtaagaccagcccacggaggagatgtggtcctgtctggccttctgggggaagcagaaaggagacatctgtgggctttcactgggctctccaagacccagaaacttgtaaggatgttatcggaaatgattacgagcttgagctatgaccaggtcgtggaaagggaagcgtgcaggagcagcaggcacctgggagtgcgtgaggaggagtaggactcctggcccaggcatctatgtgctcccacgcagcggcttgggcttagggcttttcaccaaagtggcaataaaataaactcttacaatgtgttggattgacttcaggtattgtccctggactcctggccacatcccctagatcaatacatcagagtaatccagccggagtcatttaaatatatcaacagtggcttcctggagccagtttccccagtcaaaagtgattttcaagacgtttggggcaggttgtcattggaatatggttttacaagccaaattactcgctcctagagtctatggaaaagtgttcccctttaagtaaacttcctttcttcgtttaagaccctggggaaaaataacaattcaaaagatttttttctaagttctttctacattgaaggtttttattgccaaaaaccatttgctgtgtgcaaagtactgtgaaaggtgcag

SEQ ID NO: 55243 - DNA, 1038 bp, Homo sapiens
cacgtgacttgctacacacacactcttggaattggtgaaaaacacagagtgttccagaaatatcagcatccagactgccaagaggattctaaatggagcttgcaatcactgaggtttgaaataattgtcttccccctaatcagataatcactgccacccaagcagttccaacacccagggcagaagaggggctgggaggggcatcaggccagtctctgtggcctcactcaggattcccatggatgtgaggcatcagagagaaatcctcagtggtgtttcacgtttcccaaagttttggtctgagttcactgttcatctcataactgttctgggtgatccaacatgcgtgagggtttgttcaggctgtttagagttcttttgtgaaactgtcaaaacaatgacctcatttggagccatctgctggcatgcaggattggcacggagctcgctgctgatgtgtgtcgctggggcaatcaattcaagatggccactctgggcacaccgtttactaagcgatatcggagcagataactgattgctccatctcttcctcaagttactaaacatgttagtgctcacacagcctccaccaaaggctgtgtgccaggcatggcaaagggaagacatcatctgctgacccagaaacacaaacccctacatttcctggagtggagggtgcttctcctgccaggtcctggcctgaacattaacttgcaaagcaaaagaaacatgatttaatcagagaaaacgattgtctttggagcagaaagcatgtgagtactatcaacatgtggataccaacaacagaagatgacctttatctgatgctgcgtggctgggccagggctctcctaaaaacagcagaatccgtgggaaagaatcactctgggcataattcagactcagttcgtgatcctctgaagagaatgaattgggacagtctagaaaggcatgaagcccgtaggtatttctgaattgtgaccgagtttgcctagcacagcgttttcacagcctgtgcaattagagagcaggtgtgtt

SEQ ID NO: 55244 - DNA, 687 bp, Homo sapiens
gtgactttgtggttatgtttataagcagcaagttcaaaattaaatgagccaaatagtgagggagaaaaaaaagccaactcttttgcgttaaatgccttgaacagtaaaattaacaacagaacaagtctcattgtaccatgaggctgtcttattgacttgtttttgaactccacgtttgaacacaatgaaagttgtgtgttttttaaataaaacaaattttttttttctctcacaatgctacatagaaacctccagggcaaagtaaaattaaacctcattatttcaaattccattcattccagaattataataatttggctggggctgcattgaagcctacctttgtactccctttgagtggtggtttcactgaacaaatcaataatgcaaacaagattgctgggagtcacacttaagccactcaagagagacttcagcacacagcttacatgcaaacgacagtgctccttatggaggcatcttaatcgtccttaaagcagaactggcaaggcttgttagcagtagttcaaatgtctatagaccctttcatttcttttaaaactcttttgtgttgaaatcttccactcgttccaattgtttgttctctgttggtccaatcaaatgttgtctaacatgctgtttaggtgcaaaagaatgaagagtaaagaacctatctgccgagcctta

SEQ ID NO: 55245 - DNA, 1656 bp, Homo sapiens
gaaactgttccaccttagatcaacaggtattaaattctcataaggagtgtgcaacctagatccctcccatgcacagttcacagtagggctcgcgctcctatgagaatttaatgctgccactgatctgataggaggcggagctcaggtggtaatgctcacctacctgccattcacctcctgctgtgccgcccagttcctcacagaccacggaccagtactggtctgtgactcaggggtgggggacccctggtctaaagctcaaggaggtggaacataacattccactccagtgtgcaccttacccggtggcttccttctcaggagcacagtatgtaagcagggaaaggagtaacctgctttgcagcagagaggcctggcaaacactcctcagcaggcagttaatgtcaacatcaacagccatgagtcatgttgatagaatgtaccctagacacggtatgatgagaatagcaccttacctcccccaaacccataaccctaccctgagcatgaaaaaaaaaatcagaaaaaaaaaattccaattgagggacattttatgacatacttgaccagtatttcagatcaaaatgaggaaagtcattgaaaacaagggaagtctgagaaactgtcactatcaaggggaaccttaggagacatgacagctaaacatgatatgagatcctgggtgggatcctcgataggatcctgaaaccaaaaaacgagattagatgaaagctacggaaatcagaatagcacatgcacttaataataacaatatactaatactaattcatttgttatgacaaatgtaccacactaataaaacatgtcggctaggcatggtggctcatgcctgtaattccagcactttgggaggctgaggcaggcagatcacttgagttcaggagtttgagaccagcccggccaacatggtgaaaccccatctctactaaaaatacaaaaactagctgggcatggtgacacatgtgtgtaatcccagctactctggaggctgaggcagaagaattgcttgataccgggaggcagatattgcagtgagctgaggtcatgccactgcactccagcctgggtgacagagcaagactctaccaaaaaaaaaaagtcaataatggggaaactaggtgtgaggtatacaggaactctattatctttgcaatttttttgtaaatctaaaatcattctaaaatgaaacatattttaacgatgatatgagggatataggagaactataaagaatcttccagcagttacaaaggtcaaaagggaaattgctcataaagagacattacagaagtatacaatgagttggagaaatgatcaactcatcaggtttgactctcaggagtcctgaggacaaaagaataaccttgtgtttgaacaataaatttttgaacacatattacaggtaacatgctgagaaatgactcatatgtgagtcacagtaagattgtaatctactcgcaaacttacatgatatgattgaacaagactgaatagtgtctgataaaacaatgtgagcagtggtttccaaactgtgttctgttgaacctgtgacccaccgaagtctggtctaggtctgcttaaacatattttaactatttttactactgtaataaaaagtagcaccatctcacaact

SEQ ID NO: 55246 - DNA, 1162 bp, Homo sapiens
agatggggctatagtctcttccccaaaacctcccttctagatagattccaccccagatatacacattattaacaagctagcagaaaaacacaacctattctgtaaacttgacaaactcttagctgtcctttcagatgcttcaattgcacttgcatgaaaaggtcactcactcaaggtcaatgtcgaaatattcaagctttggacacaggcagcaagaaccctccaaaacattagctagactgagtcagttcagaatcaagcctggggcatcattccaaagggtagaactattgggctccctatagattcttctacctgctcatgcagcagaaagatgcctgtataatatcacaggccaacccacacatattaaacatatagtttatcaatagaaagaaatttttcccatctgttatgctattagcaaaaatctctggttttgattgtaaaaatagttaatgccttgcagtagctacctcttaagagtgccctttggaataatctttcaaatatgagctgattacccctgggtgagtcattggagcctcatatgaggtaatacacatgcaatgcttaggacagtcactggcaagcagtaagagctcagtgcacgttgactattactcaaaagccaaaagttaattcctatacattttcacatgagggcattgtcattgctggcctgtattcctgacctcagtctcatgaatgttagaagacacaagactcatgggtcagagaccaaagatttcattgctgtcagcacagcaggcagcatgagcttcctttttatagtgggctccaaataagcctgtgtgacctttgagatattacatttattttatgggacaacatgcaaacttactttctagcccatggaaaaacactgtcatccaagggtgttcactagacaaacatccttgaaaaggcaatctacaacaaaggctacctgtgcctttgctcacaagatgtgcagcaacaccagtgacccatggagaacacatcaatttcttcctgtctcctctcaagcctaagagttcaaatgggctcaccgtctggcccttataacagtttctcttaatgtttgtgcttctcttcctgaaactagtgaccccacacccatctcctcttcccttcccactatctctacctgcatggacca

SEQ ID NO: 55247 - DNA, 680 bp, Homo sapiens
ttttgattatttcaattcagcacacgctgatagaaacctcgctaagttccagcacattactgcacactcttactgccatcactaaattgacatttcatggcaagtttatttgcccaagctctgacagaagcagctttctctctgccccatcctcacctgaatctccaggtaacctcttcttacataaaactgtaagatattaacttgattttaacacttctacatcctctttgcccacaccataaatgaaatgccaagattaaatgccagaccaaatattagccctctctccagccacctcacccaggccccctgcaagaatcgaaagcaatcaataaggcttccttcctcaatggtggggcaaaggacaacgggtagcctgcagagaatgtgacaaaaaagctgacatcgcagagttctaccatgccccatccaggctggcgtgtgcctgctcccaccccagggagctggcacccgcagaataccacctgctcccaaaggcttcttgctggggtcagttctgcgggagagtctgtatttgccagtcagtacgtttggagtgatctagctgccactaaccagcctttgccccccgggatccctgttgtgaaacaggaatgaaaagctgctttgtagcaatcaaaagctcattaaacagtagctaccaaaggaagttttga

SEQ ID NO: 55248 - DNA, 594 bp, Homo sapiens
attcttattttattagtgcttcgcaaagcaattactagggttttgagcagagatgagagtatttcacacttccatctttactgaaaatgccttttactccactgacttttggcttctatttataaagaaggttcaaggcttggaaaattattggagttgagctttaatggatattcccaaccagcattgtgtcattattggcccgtgtttagctgggcgatctcccaaatttgtgacataatcaggcctctctctgcattactccatacactccacgctctctctacattacaccactgaatcatacgctcttttcaacaagactgattgccaggggattaacattagacagcacaattccattattcagcagcccaattcaaatcccaaccctaaactctaagagagatttcagggcttcacagggatgagccgccagaaagctcaaaggggaggtggggtgaggggcttttgaatgttttacataacaactcaacctaaaacttgctttaagcaagagcccagaccggagtggccgccatctgactccacgatgcctagaatggccccagcccagcctaatgaatgatgtgt

SEQ ID NO: 55249 - DNA, 906 bp, Homo sapiens
caacaaaaaagtataataaaacagatccttagataatcattcaatagtagctaccccctgcagaaccaatggatctggcaaaacaaacacaaaagccagtgagagaagaaattctgcaccaaccaacacaagcacgactctttttctttcctgctcatggccaaatctttgtggaattcatcattatttttcatctgccaagtaacagaacaggagagcatggacttcaaaactatgttcactaaagacttttttaaaataacatttcaatattgaaacaaagcagactgaagcaaaatggcctaaactcccaagtataatacaagaagcggattccatgaacattccacaccctatccacacaaagacacaaggtggcccagacaggtttttcggaattcttctgttaccttcattcccccaaaatgcctattaaatcccaggctaccctcaggtgacaactgggaatgtagatttagtttgttgacaccaaaacaccgcagtgaaaggtgaagggtgaaaggttaaagacccaggctgtcacctggatatttaccttccacattgcaaaaaaatccagacatttccaaatactcaggtgttcgataacaagcagaataaacatgcagaaggtgatacaaagttttattctgtgccaggtagaacgctgtgtccatgtgatatcagaaagatattcccaagcctttctcccgccagtatcagcacccaattttcccaggaagacagcaatctcttgtaatcctggccttcacagaggcacccaccccatgaacagatcagttcattcaacaggtgagttgccattaaaatgcaaaaaatctgccaggtgcagtggctcacgcctgtaatcccagcactttgggaggccgaggcgggcagatcatt

SEQ ID NO: 55250 - DNA, 840 bp, Homo sapiens
ataaaccaaaggggagaaaaatgatgctgccaggatcctggtaaactcggggagggagtggagaatacagagccccacacatcgtaaaaccacaaacctagtaacccttttagagtcccagagctctcgtattgtgtccccaagctggggagaaagaccatcaagtggggagcgatttctttaacagatttctaagagcagcgctgagcaaaaattaactccttcgcggaggccggatgctggcctggcgctggggcagcgcccgggaagcaggtggctccaggtgagggaggccgaggtcccggggcgccctttgttctccgggttctgcgcagggaggagcgcatcgggcgccagcgcccccgtgtggccgcgagcaccgcgcgcgcaaagcgggggcgagcgccgcccggggcgtgggtgacggggctggcatcaaggtagagggcggccgggcagggaggaggggcagccccgccagcgccgagcccagccctgaagtcgtttcggctgtgcagatgatgagcgacccaggtcgaggcgaatcaggagcccaggtgcttgcccaagcacagctggacgaaatgtctgttaccccgacggctggggcgcgggaccttgcagggacgtggtgctgcagcggcctctgcctgggcctggcgtgcggctacctcaggctaattctccattcgctgcgtggattcgcccccgggaggcggccccacgtttccagcctgtggatcaacaaggcggagaaccacctttgcaccctcgccgggaaaccagctcctacctccggccccctgttgggccttctggccctggtgttctctggcgctc

SEQ ID NO: 55251 - DNA, 1165 bp, Homo sapiens
cttttcactgagaaaaatttgattctcaaccctgtaaggccctaaagtagtaagtagaaatggaactctttgaaaatatctgtatttagggataaggctattgttacaggctttttaagcatagtagtttgtaaaaggcatgatttgtccatctaattctaggcaataataaacaaagcagggttctgttttacagactgcacgactaagtcatccttttggctgatggaaagacccagggtttaaaatgactcagcaaaaagcaaagccgtgaatatgacttggtatcaaaaatctttactacctggcttaggaactgtgtgaactttaactgaatgtgacggttcaccagagcccaacttctctcctacgaaatcttgtgactgaagtaattcctgaggttcttctttctttgaattttttccttcactctctaaactctctttgatgtcatcactgagtgttttaagatcacactgtatatccagtttatttatcaatgcaaagtcacccgcaacagcatcatccattgtggaatccatgggctcatctacaaatcagaagaaattaaaaatccatcagctgggttatttgatacagttaggtaaatacagaaatacaatgttcctattatccattgtggcagaattactatctgtccaccaaatccattctcatcctccaaaataagagagctgcacttaagactggcacagctgggcatggtggttcatgcctgtaattccagctctttgggaggccaacacaggaggactgcttgaggccaggagtttaagacctgcctgggcaacatagtgagacactatctctacagtaaattaaaaaaaaaaaaaaaaaacaaaaactgtggcgccctagcagggcaatgtactgccagtccctttacaagtggtgaccaagctcctgccaacagaacataacacaactgatacatccaattatgcctcactagttttaaaggaaacttgcgaccctgaacttctacccttccccacaatggctggattagtaaaaaccagagcaacctgggaaatcacatgttaaagaaaagcccagaatggctggtggggagaagagttgaacgccaacctagaacacccacactgaactgttatgtgaggaaagaaacagacttttttttttt

SEQ ID NO: 55252 - DNA, 554 bp, Homo sapiens
ttaggatagatgtcagatcccctctcccatccgcagatgactagacgactccctactcaacccagcagaaaactgcaaacttgcaggaaagagtaacatagagcctcttacaggatggatgcaagccacagctgaaagcagcggtactactgaaaacggcttaaataaaagtgtacacagtacatgttgagatcaccaacccaggtccagaacaacagcaggttatgaaatactttctctccagaatgtgatcagacctaaaaatactaacatcagggattccccaacagaagagcccagccagatcacccacagtaaacaaggccgagaaacacccaagacccacagtaaaccaaacccatcaggtacacggaatttccaatggaacactgaaaagtcagaatcaccagacactcgagaagagcctccactgaaaagataggtaccgaacaaactggagaaagtaacctggaggacatagaccatgacagaaagaagagaaccttttaaaaaaatccttaggaagatctcgtttattaagccactacatccat

SEQ ID NO: 55253 - DNA, 3189 bp, Homo sapiens
aggtggaggttgcagtgagcaaagattgtgccactgaactccagcctgggcaacaaaagtgaaactgtgtctcaaaataaataaataaataaatggatttttcccttttgtaaacagtaaatcacatcagagatatgacaggcttgatagagcagaatatagtgggaaaagcatggcactggagtccaacagaaatatcccgacacctggcaggcactcactcacactaaggagttacccaataagcctcaatttcatcatctgtaaataaaaaaataaaactcacctaccaagtaagtagatgccccataataaagagtattaaaattaaaatcgagatactagaaattgatgattattttctcttgatggaaaggttgcaggcaggtttcttcgacaaaacgtgaaatacaagacatttatgttagccaattttctcttatcacaattattggaaaaaaataagtaatgacctattaaaatattaattttaggcacgtttaatgtaacttattgatttgataaatattatagccaaaatacaaaaattctgaaaaagagaaggtagaaatccacaatactctaaggccatattaccactgtcacgatttggtgtacttccgggccttcttcctttcagaactgtaatcatgtcgcataagccatttgcatcctgttgattttctccgtttaagtccaaactggaagcatttttccatttagtcttcataatcctcacttctaacgattgcataactgtctactcaaaaccgctgcccacaagtagcacttaataaacacttttaatgaaggagcaaatgcacacaccgttatcgaccaaatcattccccacttacacctttttcatggaaaatgcctgtgtgttttcatgcgaatctcgttttccacaaagctagactgttctattaaaataatagagtctacattctatattggcaaatgcatggcaagagaggaaataaacacgatgttttgtttaccagcaacaaatctcccccaaagaaatctgaatcacgatggaaaaacaaaacaaacttgtgggctggctttgctgtcgtccgggtgggtggaggaaagacacggcatataagcaaatggtaaaaatttcaaacagatcaggacaaacagaatccctcgccggtagcgaccgcggtcaccagtttcttgtcctttttttttttaactttttttttttttaacccagagatgcaaagggctcatccttcctgtacattcgtccagggaagtctgattcatacatgaccggcacctgtgtgcacacccacagctccctctgcaccgcgtttcgccctcgctcccgggacgctcccaccgcagcacccaccggtcagccccggccattaactacggctctggggcgttccctggcactgcgcgccgtccttcacctcacacaatctaccccagacgggcgtccgtctcccgactctggggagaccaccacgatttcgagagtacgggcaccggttaggattttcctgcagaacaggcaccgcgaagctgccccgctaagccggcgccgcggccctcccgagagtgccccctccgtctcggccgtggcactggggccaggggctccggccccctcgcgtcctcgctgggggaccctgggatcccgagacccgggcgcccggcttcccacgcccgccggcccggctcgctcaccattggagcggctgcccgactcgttcttgcagtagccgcagcggtagaagtcctcgctagggaaatagtccacgacgctgggcgaaccccccgcccagaaagccatggcctcggccccgcgaacgctcagccgcccggccccgcgtcgctagcgcggccgccgccgccaccccacaatgcagcgcgccgcccgggagcctcccgaggctcgcgcgaagccactcgggcgcccgcaggcccggccggcccggcgcctcttggagctgacgccgcccgcgccatcttgaccgagggcagctttccactatttccgttccttctccataaggggccgccgtcgtcagtgagggtgaggcggagagacagagcgggaagggaaacaggatggggagagtcaagaggggaagggaagcgggagtcggggtgcgagcctgccctttcccccgccgagggcctgtgcggggcgcggcggccgcgccaactccggcgtcgggaacactcaccgcaggacgctttgccctccttggaatcgcagtagccgcagtggtagccggccctgaggcccttgtattccaccaccgacgccatggccgccgcgagggtccgctcgggccgaccacgcctcttggcgcccggggccgacctcggcgaagcgctggggcccgcggcgggaggggtggagagcgaagcctggcgcggggacccgtgggcggggatggtggtcgtgtccccaagccctgcgtttgggccggtgcttcccacagctgtgcgttatcagccccatttcacaggtaaggaaactgaggaccggaggttgtgattatcccaaagtcattcccggcgggtctcggattgaaagtcaggccgcccctggccaccgtgtaagtgacttgctggagctgcttccagaccagctggcacgcactccagtgccctgaatacaagaacacaagcaggtattccgtgaatggcgagggttcgcaaattaaagaactcttaacggcttttaaaggaaacaactgtcagctagagacagttgctgtcttgtaccactataagtccggtgcctcatacgatttttaatgagatgctggaaatacagggtttgtttgttttttttaactctacagtccaaacaaaacagttttacaggctgaatccagcccatgggcctccattttgcaaccactattttaaggaagatttaaggaataagagtctagggcaaaatataaaattgaggctcatgcctgtaatcccagcactttgggaggccgaggcgggcgtatcatgaggtcaggagattgagaccatcctggctaacacgtgaaaccccgtctctactaaaaatacaaaaaatcagcctggcgtggtggtgggcgcctgtagtcccagctagtcgggaggctgaggcaggagaatggtgtgaacccgggaggcggagcttgcagtgagccgagatcacgccgctgcactccagcc

SEQ ID NO: 55254 - DNA, 677 bp, Homo sapiens
aaaaaaaaaagaaaagaaaagaaaaaaaagaaggctgaaaaagagtggaacagaaaaaaagaaaagaaaaaaaccaagaacaagagcagaaaaaaaaaatagtaacatgggccaggcacggtggctcaagcctgtaatatcaacacttcgggagactaaggcatgccaggtctgtccctcagaccctggctgaccaacggatgaaatgagtactcagacacaggcatgaagtgtcagagcagctagtgcactgcccggctcaagtggccagagtgcagccccgagaagctggagctgcttgcttttattcagtgcaagtacagtgccaaaagcctggagcaaacacaatctgtggataattaacatttattgttcccctttcagggaaccttgtgcagatgttcaaaggtcagtttctggacaacttcaaacacacgagcctgatcaagataacttccccttcactcccttgcacatactcctcgccctctgcctcagggttagagaacagctgccttcagctttctcccccgaagctatgcagagccttctgaccttaaagaaggcctgctcctttccctatagtttctcccaccactctgactgatctgcaaaggcgggtggatcacttgaggccaggagttcaagactagcctggctaacgtgaaacctcgtct

SEQ ID NO: 55255 - DNA, 1539 bp, Homo sapiens
gcagcatgaattttaaaaggaaaccctagctccctctaaccttaacccaaagggctggactccggctgcagcctctgagtgctccataactgagtggttctcaaactttgcaagcaatacacaccatcacctggagggccactccacagttgcgcggacccacccagagattcgaattccgcgggtccgggtggggtccgagaacgtgcatttgacagctctcgcgtgccgctgcagctgcagctgccgctgcgaggccgggagcccacgccgaggactgccgggcgcaatcaaagcacgcggagtccgcgtcctgcctctccccactggctggctgggctcgggcgagtccgcgaacggctctggcctccagcttttccagcccgccactcggggacccgcgccaaggtcgtacggctccagccacaaagtgggagcactttgtcaacaatttaaggtgcggcgaggggctggcacccggcgcgtctctactaacgccgcgccgggcctccgcccggcacctgcctccggtgccctccccccgcgcccggcgcagggcggggacagcggcccgtccgggcccgcgccgcccggaggcgccgccttacgttggacggagttgatgagcgcccggtactgatggcggatctggcggcacaggccttggtcggcctccgcctccaagctggccgggtccatcatctcgtccccggaatccgacggctctgtgtcctccaggctcgggcgctctggggcctctctgcgctcccgcgcagagccgcggcgggacctgggcgacaaaggggaccgcgagcgggagcgggagcgggtgcgatcccgatgcgggtcgcggccccggccccggccctctggcccgcggccgctgctgtccccagacatagcgccaattcaccgtgcaacttcggaacggcggaagttcgcgccagaaactgaaacccctgctctgcgccagcgcctgctcccggcggaacgcggctcccgggcccgcgcgagcgcacagcgacgcctgtggctggaggccggcgacgggcccggccgggtctccaaggcgcctggggggaccgctgggtgcacaagaggggcctggcggggatcctttgttcccttgacaagaggtgtaatgagctcttactccacactgcagggctgtgagaatcttggttttctgcccctactttcccaccctcctggacctgcatcttccctaggtccctttgcctgcccaggacacagccgcagcctggcacccacatgggcacgcagtccatgtgtgttgaacgagcttcctgctgtggagcaggatgagcgcgggatgtggagtccagacgcggtctgctgctcacctgcgacctcagtttccctgtgccatcatggctggggtcgggggggtggggaacaggggtgggtggatgaatcaaatatttatgtgcagctggcaataccattttttgtgaggatagcagaacaaattaacaggtaaacatccttctaaatatctacaacagaatgtcaccagag

SEQ ID NO: 55256 - DNA, 721 bp, Homo sapiens
aaatatttctttaattctgttttttgagatattttattaaatttaccttcaaccttctgtggatttttttttttagacagggtcttgctctactgcccaggctggagtgcagtggcataatgatggttcattgcagcctcgacctcccgggctaacgcaatcctcccaccaggagcaatcctctcaagtagttggaactacaggtgcatgccactaaattcagctaatattttttattttttatagagatgggggtctcgccgtgttggccaggctggtctcaaacccctaggctcaagtgatcctcctgcctcagcctcccaaagtgctgggattataggtatgagccaccaaacactgccagaattttaaatatcaggatataggaaaggttttgctttcgttttcaattttgtttttgtcttatggcacggggccaggcagggcaaagggtagattccattgacacttatttttaattttctgcccaagtacgttcccaccattgttcctggtgtttcagaccctctccagggtctgcagagtcttgtttggctggagccccttctactctagtctaatgcccctctgccctaattcctcaactaccaggccgtcactgctttccattacccacaaccatggagaaagctctcatcagctaatgtgccttctccagtttgccacattattacattattgtctggacatacctgttttt

SEQ ID NO: 55257 - DNA, 739 bp, Homo sapiens
tagacctcgatctcttcatttgtgaaataaggagttgcgctggatgattactggaatttcttctggcctctgttgtgattctgcccatcacaaattttagtttcaaatgtttgtgattctgcagaatgatgacttcagagagaacccctaaggccctgagggtttgtaggactttgtgggagaaagtcatttgaaagctcgtattgtgttgaccttgacatgtttgcacaggtatttctctagactctcacaagtgcctttccaggcctgtttctgatgttgtgcctgccaacttgagccgccgtgtgatcttggcaaacgctgtgtttctgagtttgacttggtgtcagttataactgaatcatcaggttaaagccaaagttaggcagaattctaagcctcatgagagaatcctacagttcagttaaacacagaagtgtgtgtgtatgtactgtttcataccctgttccataaaacagaaacgccccgaccaaaagcctttatcccactgacaccacttataatctattgtgtaatatctgcgtatgtgtgtatacagggggcaaaactcctcccagttctagtggcatggtgagtgtattagtctgttttgcattgctgtaaaggaacacctgagactgagtagtttataaagaaaagagatagttggctcatggttctgaaggctgtacaggcttggcactagcacccacttggcgtctgctgccgtctcaggaag

SEQ ID NO: 55258 - DNA, 531 bp, Homo sapiens
taacaaatctctttcctgggctacggctgtttgtttgtattaaaacgggaacatgataacagagctattagtagctccatgctcagctgtgcaaggtagggagttagagcactgaattcagtcactggagaaagaagctgaggtctcctgatggccctaggatgagggctgggctatctgtgaatagcaatgggcttaggtcgctgggtttgtcaagcagccacgggagctgctgggtcaggtgaacctgagctccccctcgatgagcaaacacaacttggaccatgtcctccactgacacagaacccgactgcccgagccctctgtggctggggagcaatgccatggcagaaaacgcagttctgatctgagcttgctggtctggtctggagaagcaattcagagcctgtagggccctggtcgagatgagagaaggcaagcctgtgtgaagccagttctggttccagccttggaactggaagactgtgggatgttgggtaaatcatttccaacctctaggcctcagcttcc

SEQ ID NO: 55259 - DNA, 1480 bp, Homo sapiens
tgaccttttgtgcctggcttctttcacttcgggtgaggcttttggagttcctcctcgttgtagcatgtcagtacttcattccttttcatgtctgaagaatattccattgtatggagagacggcattttgtttatccattcgtctgttgaaacatacacacttctgctctgttccaaccagaagcggggcactgagctccccctcctcatctagcttcctccaccacctccaaggagctcctaagggtcctctgagcttggtaagatgcctggtctccgggaagcctttgatgaaataaatgctcatttgtttccatggagtggtcctaccttgtggcaggggtaaggcgcttccatttgcctgaaaggctctgccctacacaaaaatagaaactggttgcatgcatgcaaaggatggctgagtggtaataactggaggaactgcggacagccggaggctgcggggccggagggtctttgggtcggtactctgccccaccggaggtccacagggcctcctccatccagggtgggccggcaagtctgcctatcagcgatctgggcaagcctgctactttttatgacctcacttgccgaaactcaagccacgcctgggtaagtacattctgcacactccataaacaggtgccagactgccgcgtcatcacatttttgcaagtttttgttttttctttttgtatgtgcgtttccacattatttacggcggaatttgcccaggtgcaaacaggaagccctgggagcagttggcttatttttagaaagaaaggtttgttcccggcccgactgcataaagggcaagagagaagtgagaggttcctggcgcaaggctccttgcaaaggacagttctgagctgctaggtgcggccaatcagatggcaggggccgctttagtttggataagccttttctgaaaggagccctgctgatgtaataacggggaaaatccctgtgtgaaaggccctgaaactgacgggctgggaaacgctgattccctgtgggcaggaacgcttgtctaattgcgacggccctgcacggctcctgcccaggtatgaagtgcagctggcttgcaccagtgcgagggcggagacgcgctgcttgaggtgtgtcagggcctctgcttagaactcgcgcaattctgaacggaggaggagaaagtccagttgctgaagggcagaatttccatgcgcccgcagcttccaagtccagaccacccccgaatgtaagtaggaggcagagatgtgtgcaccttcggttctgtcttgggaaagccggagagggtggtggttgcagagttccctagaagaggattccagacgcagccaggcttccctcggcggttttacaatttacacctcaccaggagttttgccggtctctttagtctgtttgtttaaaaagctagttcagatgccttgatttttaataagattattgtatttaatttggttaatgattgtcac

SEQ ID NO: 55260 - DNA, 1302 bp, Homo sapiens
ttaaaggaagagtgaggactcaaacccagctctctcgggcttcgaagcttattcatttcttctgctctatcgtgctgtatcacatcagaaaacattccgtttgcggaaagctgaaatcccacgctggcagcctttcgcttgttggcctgacagagtgcctgctaggttaggctgaggtgtcctctgcaacctgtattcgtcaatcttttgtacccccttggaggggaagaaacatttgggatggtctagcagaactggtgtgagcatttgccttcccttgacagggaagatgggcagccggctggctctagcacagagcatgtgttcatcctccatatttggtcagcctggcagttgtttctgaaatccgattcctaatgccatggggatgacctttggtctgcttcccagcattcacctgcagtcaagctgctcccaaggagctcgttcaaagagggggcgacttaggcagacactctggtcatgatctaaccatgttaattaagcatggtttaattaactctattggcatgaccagtaagcagtggtctagagtgatggagcgtttaagaggtaagtggaattttttttttttttttatggtgaaatgctttagctctttacaaagtatattttttaggactggaaaattgctgtaactgtttaaagattgctttaaaatagactccaggctctggagtgttccagagccaacgaaagactgtttgtttactcaagcaatggcagcgagggaaagatttgaagaagcaactgggcgagtccacgtgtcctgtaaggcttgccaattgtttttccagcctgcgatttggaagtgtaaagggtaactttagaaatgcatgctgttttgcagtgacgcctgctgacacacaggtcctttggaatccagtaagcaatagagcttaagactatctctaagacggggaacaggaagggggattcaaaagcacagggaaatgtggcaaaagcgagagttcccagggctgagggtacgtctttcgatttgcagacatggccaccagactaaataagaataatctacttttcatacattcaacaaatatttatggactgcctcttctgtgccaggtgctattctgggcatcaaatctaggctcctataccacattattctcaaatgtccaattgctataattccttggagcatagcagcaaaatggcagaggccatagagcaacgaattccactgtatggcgaagcagcgtaaggcagggacaagagcacagactctggagccaaaccatcctggtccaaatcctggct

SEQ ID NO: 55261 - DNA, 1229 bp, Homo sapiens
cgaactcccgaccttaggtgatccacctgcctcggcctcccaaagtgctgggattacaagcatgagctactgtgccaggcccagagcttctttacatctgggagataggaggtgtagcataatattaagctcaacctcttggctttttcagaagacaaactcctagttagaacaaaaacatctttggtgtggatagcagcaactatggggaagggtttagaaagatggtttgaaaaaatgaactaaatgggctttaaatggaaggccaggatgtttcttactcctccgtttcactgtcatttgtggaatcggtctgctgcaggctgggcattgggcctagggctacacacatcacctcacccggcagctctgtgtggatggctgtagatgacccaagggggccttatgaggaaatcagggctcagagaggttaaggaacttgttctaggtcacacagacagaatgtggcagggcggggactagaaccgaggctggtttgatccacctgaaacccagactcgtaactgactctcacaggtgtctgaagtgtttgtgttctggtctccatattagaaagtgaaccttggtcaatccttaacatttagttttcctataaacagggtcagttcttagcagaaaaaagaaaaatcagaaagatctaagctgtgttttgcacatcggcccgggccagctcttacagacagagccctgtatttcccaggcggcctgctctgttccttccaaacttgggaggactctaagatcaattcccaggctcctgcccagccagggtgtgtcgggcagagcgcagagcagcctccgcccctccttgtcctgcttctgactcattatttatctttggcaggaagtaaacacagaaaggagagtgggagggagaggaggagtgagctcctgacttttgacgctggctgaaaaggaagatcatgtgctgaattaggtgtgtgtctgttttctgctcctctggtttcaacagagcatttgaggctttaaacaacaggggaagaggagtatttttccattaggagataatacccatttattgtagcaacttggaacatagcgaagagtgcagagtggagaggaaaaaatcaccaatgctcctaccatatgcagacaatggctttcaaaatattagtgttttcctcacactcttcttttttctagttcttttctttattgattgtgagatagctatattttgttaggtg

SEQ ID NO: 55262 - DNA, 2782 bp, Homo sapiens
tttcaccatgttggccaggatggtctcaatctcctgacctcgtgatctgtccacctcggcctcccaaagtgctgggattatagggcacaagaaccttgaagactgggcatttccattctctcttcaccgacagcagatggtatacatttaaactagcctatttgggtctcagttatcatacttgtaaaatggacacattaatacgatacgaggaaacctgtgataagcatgtgaacaaggaatctatttaagtttccataaaaaatgtgactcttagaagcactgcgttatttaaaaaacaatattttcgcagaaggcagtaacagtctatttctttattctacagagaatcctcattaggggctcgtaagatctgtttctttaagaggaggaaaggaagtgctgagtaatttctgagtctcatgccctttggtccctgagtatataatctatagcagtgctttctgtgacactaaaaatgggaagcctgctgtctatatatagtcacgggctcttcatgattggggcctagctgcagaaatttctagagaaaaggtgatatgccatggtgttggcaggtaagcaccacttctgggtgtgaggtccatgtcagtgaaggagttagttaggcccttaaaggaaaacagacctcacatgccaatagatacataactcctagaaatatggcagctggaattggtttggatttagcctctgccgacttcagagtgtgcaacagccaaatagaacgcacgtcaagttttgcaaactgtccagcacagcccgcgctgtttctgtggttaagcgccattaataccacacaggtgaagaaaaaagggccggaatttggctccaggaacaagcgaggcaccatttcacccccagcttctttctgaggctcctgggtagcctcaggcgggcaacggccccgcagaggaagcgcgggccgcctggccggtacttgaccttcccagtccgttctcacgccacagccttcccggcgttgccatgcgtagtgggaaggccgtggacaaactaagaacagtaacaagttgtcatgactcagagactcctggaagtctgcagcgcctccaggagcagcggccgggctgtgcgtccatcggtccgtgcgtctctcgcctgccgctctgcggccgcgggcccctcggtgcgtctgggcgcgcccggccccgcgcattcctggccggggaggagagcgcggcgggcgccctgcgcgagcagctggccgagcgctgccccgggtcggagagcccagagctgggggaggagcctggcccggcagccgccgctcgcccagtcattggccttttgtgctgcaacttttcccgagcctttcggggagccacgccggccctgcgccgttgtcccgggaaactttgcgtcccagggccgcaccggaccgtggtgaccccacgcgccgcgccgccaccgggctcggaaaacccagcgcccccgggctctttggcagttgcgactccgaacgaaggcggctccgtgcgggccatcccctatctccccgggcgggtaagtgccggggccacgggcgggcggccggggtcagaagatgggcgcccgaaggaccttggcccccagacaaaggcgtactggaagtggccaaagctcatttcggctttccccggcagggactggccgagggtggaaaagtggctaactgcacattcggtcccctgctggcagaggagtgtggctgcggggaaaccgcgggccccagagtgtctgcccaggagcctggttcccttgagtgggagcgcgggggtcaaagcccgtggttcggggcgcgcgccagtggctgggattcccgctcgcggttggggtccccgcgcgtggttgtggttggcgcccgtgaccaggctccctgccagggttggggtcccgcccttgggggcctccgcgccttcccaccgggctctttcccagctcgtgtggtcctactgggtcgcgtgggggcatccccggcgggccacgacggcgcgtggactagccataaaactctgcgctggatttcctccgagtttgggacttttaaattctcgaatagttacgtcagcagggccgagcgcacttcggggatccggcgcaacacgtgacccgcccgagcgtcccctccgcgtccttggctcccgccgcagagtgcgcctctgcctcggggtgtcctcgaaatccagtgtcggggcgctgggatttgctgcccaggctccgagcgccgaatacaccacgctgtggccaggtgtcctcttcaatcctggtcttttcttaaaatggcttcatcatcatcactgttactgttgttgctatcttcaggctctgtcaaatgctgggacaggagaatgtgatagcgggttgaaatacagctgaaatagacattgtggaggggaaatggaagcggggcctaaggaggggcggctggagaggatggggggccctcgtgtcacaggacgtgggacattgaggatcctagggcagtttcctgtgctatgccagaggaaggtgcggctctgttaccggagagaactctccccattcttacttctctgattccttattgaggccacattttaaaagccgtttccatgatatctggaaatgactttttttccgggactgtgacgtgaggcagtgtttggtctgtgagatgcacgtgcagattaacagttgaatcttaagcagtgtttttagggttgacagttgatggaacttagaggaagggttttgttgaaaattgcacagtgagttccctccc

SEQ ID NO: 55263 - DNA, 459 bp, Homo sapiens
tctcctttctttggactttcagctcctcgggcttgatgagcctgtcacccctggagtgtgtgatccccatggaatccatcccagtgcccgccttggggctcttcctgtggcatggatcctatgtacagaactgaagatgtgggcttttaaggctggaacctgaacgtcttcctttttggacagagtccattccaccagtctctgaaaggggtgactcatggccctttgcagaagcacttgttgatagtacaggcttccctccctgacattccagtggcaaatcaaccctttgctggcctgactaaatttatagtgggctggccccagcagctggtggcagcagctggtggttgaaatctgacagattttttttttcctctgaaaaatatttcagtcactctagtcccagaaccaccaccagcagaacttagaagccatttatagcctcttacagttgtt

SEQ ID NO: 55264 - DNA, 2625 bp, Homo sapiens
tggtaatggttctctagggatctgtgttgcgatggattctgaggtcttgtctagctgggcttagcaggaaagaacgccttgatcaataagtcatggctgtctgctgaaagcgtggtggtttatatgctgtcagctctgtcctaaacaaaaagaaatagcaggttgaacttaaatcaacatatccttcctcttccaaaaatataaacactctacatgaatttgaattcagcttcttcgttattccaataaggtttggaaaacactgattaactccttaaatggaaaaaggcatcccagatgtttagccccaggctagctttccgccagaggaagacagcaagataactctagcaggtggaatgagactacagaatgtgcggaccccatatcagtgccctgctctctctgggctgggtttggcagctgtctggaaggttctgcaaaggcctgggattggtcctgggcatttgttcagggcccgacttcctgagaacaatgtctttaagaggagtcactgctggtcacgggaggcttgaacgcagatgggagctgactggggttgttggtgaggagctggctgccggctgcccctacctgcttactcgctttgcttgagcaacattgccctctggcagctcagggggagttcaagggaccttgactaggctcctggaggaccagcttccgaatgccgtggaaagtcagggagggctttactcagtggaaggacctgatcagaacttgagttgggtcattctggtggctgtggggccttggatctgaggggacaaaacggaaagcaggcacagcaggatagcccaggagtcctgctcagagagggcagattccagaaggagaaggaggtgactcagcaggaaggggtgatgaggggcatgggaatgagagaactggaagtcagtgccagggcctggcgggctgatggtgccactaccttgctgggaaaattgggggaggaggaggagggtcaggagggaagaggagaagttctgttgggcccaggaggtgtctgtgggggcccatgtgttagcgcttgggcttggatggtgagtcactgagtgtttcctcgtgggagcctgacctcctcggcccctgggtatgagccaacaggcggtggaaggaggggggcgcctttcttaaatgagctgttgagtcacacttgtttgatgcctttggctaacgggacccagccagcgcaggaagggtgtggccatggcagttgggaccaacagaaggaagggaggagggagcagccaggtggcccctcaggaacaggagcagctgtgggtgttaagggcaggcgggggagcttggtgagtgagccttggttgtgctgccccagggtgttctcagagatggggcaggtgtagccttgggcatctgcatcagatcccagggctgtcagctgtcacagagctggctttgttgtgattagcagcgggccacagatctaaggtagcatctcccccccacccgccactgttttctaagacagagatccttccttgcagtttgataaacagtacccttaaatcacagaaccacaaacaataccacctttccacaatttgcattaaactaagtaaaatcttggtgggatgtgtgtggtggaggggggagcacagcagtgtaatttcttgagaaagcgaagttagactagtagtttgcgtttgtaagtggtccatttgccgattatgagtacatgtcagcctccaaagtgcaaaatagctctcttaaggagcttaaatgcctctggtagtttgcattattcattttgagtcattcttttacaaaatgattaattttagccactgcccaaattgttgcaaataatagtttgacaaaggaggccagtcactccatctgtgaatccactttgctgttttgctgggtttcctccaagcacttgtaatttttgttcccccgtggattggtctgctctgggctttcctaggtcgttatttcttgggctctgttttcctctgtggagccccgagggagcaggcagcatgggttccagccctggctctgctcccacacttggttgcagccagttggacacttggcggtatcccctctgcctgctgtgggcggcctggcccagggttgcgatcctgcggtggatgtggcagatgtggcccctgtcctcgtggagctctgaggccaggacggtgaggggctgggaagtgcctgctggacctgcagaatctgctaagctgtgaccagacttatgggcaagactgagtcctctgtccagtgtacagtgtgggtgcctatggcagctgcccttcagaccagggtgctagcctgtcaggtggacctcgaagagatggagtgagcagacatagcagcccagaggcccacgcaccctggactcctgcaatctgggagctccctggaggtgtttacccgcagagggaagcagtgatccctcactgcaagggctgtgacgccacaaaccccagctaccacctcaggctgggtttcaggccgtctgtgctgagtcttgtattccagcctggctaccccaagacaccttcagcctggccagtcccactgtggaccagagcagggatggctggagaggctgggagggtaccaccctga

SEQ ID NO: 55265 - DNA, 1184 bp, Homo sapiens
gagagtagggaagagttgttgtagcagagccccaaggccatctgctggcagaattcccttttccttggggaaggtcaatccttttcctttaaggccttcaactgatgggatgaggtccacccacattataggaggtaatcagctttactcaaaatctactgatttcaatattaatctcatgtaaaaaatatctccacagtgaaattgagacaggttggatcaaatatctgggttcaatgggccagccaagttgacacataaagttaatgattagagcaagtatttggaactcctgtttccatgcaagcagttggttttgattataaatcattaaagcctcctaaagagcattcttggacagtattttgtagagagccaaatgcatctgggtgtgctgagaacggcaggcctcggtcctcagggagctcctgctggctgggaagcacacagtgctgaaagctaagccatggtagagggcaagaatataaggggtgcccaaagcgtagacaaccagctgccaaaccagagtgtcgggaagtagtagagaaatcagaggaagggaacatcaccacatgcagatgatattctagaataccgggtaacagtagggtgggcccagagctggaccagagtctgccttatctggatgatgccacctagaccattaaactcttctctgtcctgtatctcctggcatctacctgcagctctgttggtcctgagtcccagagggactttccatccttcagattgttgttggcagagcaggaacatttgttccacccctcttggatccaccgcagtgcctggtctgccataattcttggcccaaggacaaggaaatgtatgggaggtctgcttttctgctggtgagatagcacaagcagaggttggggagcaggaacatccccagctgtttggggaaacacccttggtttgccttggacatagtaggtgcacaaccaaaatgtgttggagaaagaaatacaattactcttctcaaatattctgcccttcagtttcttataaaggtaaacataaatccacaatatgacccagcaatcccatttttagatatttacctatgaacgatgaaaatatatgtctacctaaaaacttgtatgcatgtattcttcataattgccccaaatttgaaacaacccagatatctatccactggtgaa

SEQ ID NO: 55266 - DNA, 1957 bp, Homo sapiens
atacagaagagaatagatattgttggggagaaacagcatgtgcatggaccctgaggtccatctcaaaaaaaaaaagttatcaatatattgatacatctttattataataactaaagtctatagttgctgtggtttgagtatttgttgcctccaaaattcatgctgaaacttaacccccaatctggcagtattgagaggtgaggcctttaagaggtgattgggttatgtggctctgcactcatgaatgggttaatccattcatgaattaatggattgctgggatatcatgggagtgggactggtggctttataagaagaggaagaaagacccgagctagcttactcagccccctcgttataggataccctgaaccacctctgtactctgcagagtccccaccagcaagaaggccctcaccagatgctgccccttgacctttgacttctcagactccataactgtaagaaaacaactacttttctttataagttatctagtttcaggtattctgctataagcaacagaaaatgaactaatacaatagttgattcacgttttcttagtttttccctaatgtcctttttctgttccaggatcccatccaggaaaccacatttccattttgtttctgtaggtgcctcttggctgtggctgtttcttcttagacttgtcttgtttctgatgaccttgacagttctaaggagttctggttgggtatttagtaggatgccccactattggaatttgtctgatgcttttctcatgattggactgggcctgtgggttctgggaggaagaacagagatcaagtgtcattttcatcacatcctatcaagggtacataccatcgacatgacatatcactgctgacattgacctcagttgcttggctgaggtcatgtttgttgactgtctccactgtaaagttactttttttttttgagacagagtctcactctgtcacccaggctggagtgcagtggtgccatctccactcactgcaacctccaccccagaagctcaagcgattctcctgcctcaacctcctgagtagctgggattacaggctcccgccactacgcctggctaatttttgtatttttagtggagtcaaggtttcaccatgttggccaggctggtctcaaactcctgacctcaagtgacccgtccgccttgacctctcacagtgctgggattacaggcatgagccactgcgccccgccaagttcctttttttcccccatttcagtactgtcgtctgtggaaggaagtcactgtgtgcacatttaaggggtggagagttgtgctcctcctctgttagggtggaacatctacagaaattatttagagtttttctgcacaggagatttttctgttctccttcatttattaattgattcaatcatgtatttatatctgcatggactcctggatattcattttattctttgggttataacccaatactacgttatttcattgctccaattgtagcagctttggtcatgggctccttgggctttcttttaagagtgtccagaagcccccaggcagtacagtgatacgatcggatctgcattgttaaagacctggccagctgcctgccaagacaggagtggttttaggattgaggcccccatttcctggggctccctgacagctgtggttccatcaccttcagtgcactctccacctcgactctctccacagctgctttcaaccatgcggccatggcctggatccagggatccaatcaaccgtgttttttccctttggatgagttcctggaggttttcaaagcaagtttcgaaaatgtaaggttgaacatttgatttcactgaaatggaagtcgttattcacccaggctgagccagaattttttttttttttttttttttttaggcagagtttcgctctcatagcccaggctggagtgcaatggcgtgatctcttctc

SEQ ID NO: 55267 - DNA, 959 bp, Homo sapiens
gccagaatttgaggtcctggatggactcttgattttggaaatacgtcttccatgggttcctgccaccagccaggcatcgcctgttggagccagcgtgccttctgggtgttatgcgcaggcagctgcagtgcccgccatatctgtggctttgtcttctctctttgggtttggaggggagcagcgaggcagtgagacctggtgtattgacaaagaaagcccagggcacatcttattacagaattgacagatgctctgttcttgcaaacatgctgggtgacttcctgctgcctcttcctgcttcttgcggctgctgtggaaacgatgacacaatcccacgtttccagtgcaaatggcttttctccaggagttttcacactcccctccccccactctcattggtaatcattaggccgtaggccttggggagaacagatgtgactttgagagggagaaaagtgaggttctgggaaggagagagagcttcaagtctctgcctcctatccctgcctgggagggagaccattgctgcagtcaccacgcttctgatgggccttcctttcccctccatcgtagccctcctgaggctttgtggggtcagcaggtcaccctgacttttccagagctgtcagctctttggagagctgtacgaggctgaagccaggcgaggggtctgataataagaatttccaggaatacaagctgaaagccctcacctcaccaaggcagccacagctgacctctgagagcttgtggcaaagagcctggtgtgttggacatgagctgagtgggtgtgggtgtgagcccacgcaagcatcatctctgttcagagttggcctctcactccctgctgcggacagctgtcccctaggaattggtgacttggaaacctggccaagggctgtctggatagacgcgggagaaacgggatgggagaagcagctgagcttcttgcagggagg

SEQ ID NO: 55268 - DNA, 610 bp, Homo sapiens
tgggagcttggtgatggggtgtcacggacattcctacaggcccagcccgtgtttagaatcacagagctgagccgatgcatgtcacggagaactgcctttgccctgtacacgcatgctgcattaggggcctgccttgggcggctcagctggccgcgcctctgcttgtttagggtgagcctttgcacagggcttggctttgtggagctcatttggtggccaaagatggtgttgcagccccagcccgctcgcaggcccagtaccttttgctccctagcttgccccaggccctcagactgtgcggtgcaaaggtccttggaggctagccccgggctggctgtgaggggagagccaggtgccgcagctctccctggtacagacttcagctgcctccaggacccggggcctgaaggaggcagaagccggcggtggaaaagggcgcacgtctctcccagcgtcgctcccgctgcccgctgcccactgcagcctatttacctgttcctccagccatccccttagtcctgggccgggagagaccatttcctccttcctggagggatgagccaacagggctgagccccctactctctcggtggtcagcccgcccgaccac

SEQ ID NO: 55269 - DNA, 559 bp, Homo sapiens
attggagtagtcaagttgtaagatagaaaaggccaaagtagaatggtggctgcagatgaagattgggtaccactcaagatggctttcattctgagttttcacatttgtaaactcagaggtctggctcttttaatatatgggtccttattcttagaagtaggaggctggctttgtcatttaggattgtttggaaattggcattcctgaaattctcccttcaggtcctccctggtcaataaagaactttgactcttgcgccctcggttggacagtggttttgtgcatcagaggctcccacaggggagttgttgggaataggctggctcttgttctgtgagggactaggggactcatgctggtgctcatagctcatcaagagtcgtagcattttacttagtatcccattgtatgtgtagacaaatatagatttttttttctctgtagaatgtgtggccttgtagataaccatgcagattcaagctgctgaaaggcctgatgtggccctagaaagccagaatttgaatgagattagtcacagcaagtcagcaaatgtgggaga

SEQ ID NO: 55270 - DNA, 2231 bp, Homo sapiens
ttccagctgcttggctcccaccaggagctcaccacgatttctgagttgcttgggatttagccaactggtttgcaaactgcatgtaaggtgtgtctgtgtttgttaaaaacaatgacttctcagcaggactcagtaatgggtttccacggagagaaacattaccaagagatgaatgcaggggcgtgattgtcctgtgcactaagagccttcaaatcctttccccatatttgcaaggtgttgaagtaccgcttttaaggcaaaactaaatgacgagttataaagtcaaaacacgtgagctttaattattgctggaataagcgggattctcatcagcagggcagcttccagatgtgcttttcttcattttgactagatagggagaagagtgagggggcatggcgtggagaaagaaaggtagatatacaagaggcggagactcaggcgcaggtagagtcagaggcaggttcaaagacacacagagacacataggtgaagatacattcgatgtaaacagcttaggagccaggtcgggcctggtggcttctaagctcatatctgtaatcctggctctttcggaggccaaggtgggtggatcgcttgaggccaggagttcgagaccagcctggccaagatggcgaaaccccatctctaccaaaaatacaaaaagttagatgggcgtggtggcacgtgcctgtaatcccagctagtcgggtggctgagggatgagaatcacttgaacctgggaggcagaggttgcagtgagccaagattgcgccactgcactccagcctgggtaacagagtgagactctgtctcaaaaaaaacaaaaaaacaaacaaaaaaaacaacagggggtgggggcttaggagccaggattctaaggccatacctgctcctgctctgaatcctgtggcctcctgtttgcaagagtccaccctgagattagtcatcctctcagtctcccgttggctctatgatggtgttgccctttgcccaggatgtgagtaatgagagtaacagaattcagggttgacctgactttcctgcagaggtctgggaagacctccatgtgacagccttcccatgtcactccctgcgggttccaagaatctcaggcctttgcagctgggatggcatggcatagacatgtgagacaccccctccttgtttgtatgagcgaaagggccaaaagaatagggtggaggtcctggctggctgcccccgtgggctgctatggatctagatgcagaaactctgctgattcgttcccctggaggagaggttgctctgggaaactgcagctgccaaacctactggagactgatttgcaaataaggactccagcctgttcacatacaggagcctccgtgagtggggagggcagttgggtcaggctgaggctcagaagacacgtatgcctgtcttggctctgcccttgcccctgagtggttctgagctctcaggcaagatgctgaaccgcttggctccaagttctcatcctcagaacccaggaggacttgagcatcttgagagtgggagcttatctgtctggttcaccagcccaggtgcccgcaggtgatggggaataaataggtccttctgaaaccgtgaatagtcagggaatgatacccatgtgcctctcctgttgtaaggatcagtcatgaggaagctctgagggacggtaacatgtcagctgaggtgagcggccgtggggttattcccattcctgacacttcgcagcccctggctgaggcacccccatcctggtccttgggtacctgcctgagaaaccacacttggaatcggaaggacacttggtgagtgtggaacatcagcctccgatgcagaatggatgtgtcttgctggctgggggagcacttggagggggtccccgaggcacccctgataatacagcctgggggtgggggggtgccctggtgggtgtgtcttccctggccagtgcagagggggacagctacatttttgtcactcctctgtttcttccaaactccttgttggctccttcccttaatccatgttgccctggacaaaatccagctaaccggatcccagctgggttccgtgtattgtatccaggacctggatgagatttggaagaacttgctgagcacatctggggagacccctgcgtccccagcagtgtggctgagctctgccttgttggggcctgcatcctcccttgtacgaaggcaaccttgttgctggtaccc

SEQ ID NO: 55271 - DNA, 1656 bp, Homo sapiens
taatactttaatgtcatttgcccaatactgccttttatagcattttttctttcttcagtgctgtttaggaccacttagttgtcatatctctttaggactctatttaaaaggatcttggtacccatttccaagttaccaaaattttattacctctgagtaaatttcaaaagtgaaaactaaattatgctgaaaatcctagtagaatattagaaaatgagggtttactcatgtgtatgtgtggaaagtgttctgatttcagaaattagatttggaaagatttattctactgttgatgtgaattggctatgtagcatgcaatgccctcacgtttacagagatgggaggcaggtagaacagagttctgggacagagggaaggagaccatattctctaggaagcctccaggagtcccagcctcatgccagcccagggcactggctcactcctaaagtcattccgtggtgttctctgcttttccccactcaggtgctcccccactccccagcggagcaaaggttgcgcaattgttgaggaaaagataaacatggcatcccttagacttttcataacattgtccctcccttggaaaggctgagctgtcacaccctggcagcattaaccaagaaaggagaaaaaaatgtctgaccacaaccggaaggttagcggtgggataagcctgacaaacgtatgctgggcagaaaaagaggtcaagagcattacgtgtcaagtgtctagactcatcagcttggcagacatgactgatgtggaaaatgggtcctgctcctccggcccctccccaggagctgtctgcacagacagtccagggctatcactgaagggaaaagagccctgtgtggcttcaggcatgtcatcagccatgtgcccacgctgaccactccccaggctctgcccacatcttctgaggttgatctccagtggctgcctttgttaaagcttgagggaggtgggaaacggttcaggaagaggggggcttgttagaagtttcactggctagggcttctcatattagggtgcttgtgagtttcaggctgctggccggtggatttggcaccatgacccacagctgtttcagaatgcacctttctccaactaacattttggtgtgtgctgtgtgctatgtgcactctccctttctatccccaccaccccacgtggtggtcacagttattatccctgatataagagggctaacgatgggcagggcagggcctccactggctccaaagtccacgtcttgccctgtgtgctgcacccctcgtcgttggtcatggaggccaaggctaccagcaactaaaaggacatagtgagaaccgagtggtcccaaggagtcacgtggccccggagtgggatgtgtggaaatgcagactccaaggtcaggggtggagtggcccttggcttgacttatcagcccctccagctgtggggccaattccctgtttgtggtcacatgtgtttggaacaacgtccatttctcagcagatgctgcagcttctgggccattcagccgtctccatctgaagtccctcgagctcatcttccttcagcttttgctttccattttgtaaaccacctggggtaaaatatgcaacagttttcctgacctcctgggcctccagtctaaatttatttgcctgg

SEQ ID NO: 55272 - DNA, 2692 bp, Homo sapiens
tgtaatatattagaattaaaattgatgccaaaaaatgccatgatgaacaaaacactaaaattttaaataaatgtagggttaatctcaatttctacatctataaaagtaaggactatatcctaactttgcaggatggttgtgtggaattaaatgaaaaaatctacagaaaacatcttgggaacacctggcacatagtaagagctcattaaatgacgatcattgttttgcggggcacagagggtgggtgaaaacacaggccctagtgtcaggctgctgagattcaaatcctagctctgccatttcccagttgagtggccttgagtaagctgtttacctgcttgatgtctgaggctaccttcagactcaaatgtggtgtcacctcattcccaaactcattctaaccagcttcttacaagcagcgtgattttgtgctatttctgaaatttcttctcaatctttttattttggccaggttatttacctttagtgaattccatcttctgaaaacaatgcttttgtgggtcttcttgcaactgaactacaagattcaggcaattccgacttatgaaaccgtgatgacattttttaagaggtaatataacttagtgttgattgatgaaatacacaaatactgaaatgtacaaacactgctcataatatcacgggggaaaaccatcagtgatataatttttcatagcatcattcagagggcactgtttttttaatagggcctaagattataggatgctttcaaaccaccaaattacctggaaaagtaaacaacatgtaggtgttgtactatgagataatcaggtgcttctgggaacttgctgtgtccagtaacaggcatgaggcaaaaggtactcctctcttcaggaaaatgaccacactaccctggcctttaaaacttcattaaaaaaaaaaatcagctttcttaggttgaataaaactcactttttctgtggaagtaactggtggtattaccttgttaggtttgtgtttctggtccccacagcctcaggaatgagggcttccaagcatgacgaggcgagtttaaggaagtggaagtaaagatgcttcatttcttttgcatgtgtgagtttagcagataaacacgtcttcacgtagtgacctgtttaagccaagtttcatttgcattgttttgaagcacgtaattcatttctggaacagaacatctgtgcgctgcgttaagtaaagagcccacttctttctctgtcttgttatttgaggaaagcagcattcagtgtcggaattatatgtactgtgtttagtttccatataatttgctttgaacccaaatgttttacccgccctcccccactcttttaatagcctatgagacactttttccaatgagtcatgcacaccaggaggaattgctgtttggctccaggtcagctctcctactggaaacgtcttagcactgggagataggaaaaagagctagaatgtggtgattcattagagctgtgtttttaatatggaagaagcaagtgaggagaagggagttaaggtgtgggccccctgccaaagttgctgtttccaaggcctttgcttgcactcctgagccagagacgccacagctcttccctggagtggcaggcacaggggtgtttctcaccaccacagcttttccattttcttttcgaatctacgttgatttgtcccagacctcacatcgccatgcatttccccaagccccctgatcctgtataattttcttcgttggaaaccatttgcttctttccaagtcatgtcattgccccgacctaagcagtgatgacaaatctttcaacaggggccagagtcctctcaatgtagagtgggggtggctccagacagccagagcctgctgtgtcccttccccaacctccctccttccctgcttggccctctcctttctccagcgagctttgggtcagactgggagaaaagatgggaaagtgtagggcttggatgctctcccctgcacactgtccaggcccactctgtcatcatggaggaccttgtggcccacttttagcactgtggatggttcttctcctgcccagctcagctgctccagggtggtagcacctcgcagttgtgtctttgtcattggcctccatctcccaaatgcatctcctgagccccgggctccttcacctgggggtctgctctgggtgctcctgcttcccccagtccctgcctgctctgcctcctctctgtccatccgtgatgggggccacccaccagagctgctctgcccagcccctgctgaacccctcagttcatgtatatgtcctgcccctcccagggacatcataagcagcttcaacaaagggcttatgatcctttctcttgccccaacttgcctggcaccttgctggactgtgagtctctgtcagacttttttttctctttttttgagacagggtcttgctctgtcatccaggttggagtacagtggcgtgatcatagctcactgcagcctcaaactcctaggttcaagtgatcctctcgcctcagcctcctgagtaggtgggactacaagagcatgtagccacatctggctaatttttaaaattattactattattattttttgtttgtttgttttttggtttttgtttttgtttttttttttgagaaagagtctcgctctgtcgccaggctggagtgcagtagcgcc

SEQ ID NO: 55273 - DNA, 2188 bp, Homo sapiens
acaagcatgagccactgtgctgagtacattttttttttttttttgaggcagtgtctcacttgttgcccaggctggagtgcaatggcacgatctcggcttgctgcaacctctgcctcctgggttcaagcaattctagtgcctcagcctcccaagtagctgggactacaggcacgtgccaccacgcccagctaatttttgtatttttagtaggggtggggtttcatcatgctggccaggctggtctcaaactcctgccctcaagtgatcctcccacctcggcctcccaaagcactgggattgcaggcgtgagccaccgtgctgggtccatttttatgtagctcagttcttctcacagaagtgggtcttaaatgctgatggaaaattcagagaatgtcatgcatgtggcaacttgacaacattgagatagcagacacatttccgtttctattgatgggtggtgcccgttgagtgcaccagcccaagaaggattctcagcttttctgtaggctctgagaagaagaatgtcgcagtagattagcggtgtctatcctggctgcaggagccaggcttggtggcgccctgggtccatgtttgccatcccctgccgaggatccccagggctgaccagcaacagtgcggaggctttgtagctgctggcctagcagggctggtggccggagggctccagctgccccgaggtacctctgctccctgtggaggtggagggagactgcagggagtcacggacagcctgggccagcattgcgtcaccaggggagttgagctacaaagttcaaaggggcaaagggagcagctaatcaaggaagctccagtggtcgctgacagggatgtgccaggagcatttcaaagtgagacagaggagcagaccccaggggagacagtaaacaggctcggaaatgagaagagagggagcaatttggcccaattttaaaaattgcaaatattgataaaataacttcaatgacagagcaatctacttcccggggagggggacatgttgaggccgtcacattatgggaactgacaagttggaactgcacttccctaacatgtcagtagtgggacaagctgaacaaatattagctcacccggaccttgaccctaccaggaaagaagctgagcagcaactgcgggcatggccttggctggcccagaatccggaaaggagggtcgagagccattaactgagtaaaatgagtcagacgcccctttcctcatctgtctcagcagtgtccggaagacaggctaggagggaacgtagttgaataactgacttctccagcaacgactatacccaaaaataaagacatacgtccaagccatttctactctcccattttcttttgttcattaatttttttttcaatctttcattcaacaaatattttttgaacatgtgctttgtgcctcagacactgacataatgttgaaggggcagtttctttgcctagccagatgtttagaaacaacttcaagtttatttttgttgctatccaagaacatcaatgtaagaaggaaacaaacacgcacggtcgtgtgtggcttgcaaacacatacaaacacacacctgtgtgcacataaatgcatacacaactacacacatctaaagcataaacacacatacacacaccactctacactctacagcctgtttttctggcaatagctagttgagaaaaacaaataggctgtcccgaattaaatttaacatctccttgtaggaaaaacaaaaaatgtaagcaaagctgttgccttcatctatgaaggaaaagtcatcatttcattccacttggtagtctgagaagttcaggaaagctgtaaaaacttgtaatcggagaaagggcagaagcaggcaaattttcaactttttaaaagaacattttaaaatcaaggcataaaatacagaaaggtgcatgaaccttaaatgaagagctcaatgaatttccacaaagtgagcacacctgtgtaaccagcacccagaccagaacaggggacatggccagtctctaaagccccttatctcagtacctacttcttccaccaaaagtaaacagtatcctgacctcttttactaccaatacatcttcccttttcttgagctttgtataaatagaattctgtagcatacacctttaaatgtctggcttctttcacacaataatgtatc

SEQ ID NO: 55274 - DNA, 986 bp, Homo sapiens
gagcctctcagtctcttcccaggcccccgatgagtggagcctcagtggcaggctgtgcccatgcctgtggctcagcctgaggccacctcagacttctttctggagaaagtcgtgctgtggaacaggaaggttcccatgctggggaagcggagttcagctctgtattgatattattcttatcttgctccttctacttgcgctaaccacttaaatttaaataaatgaaaatgaaataaaatttaaaatttcactctttgtcactctagccatgtttctttcttcctttttttttttttaactcctccttgcagaggagcactaactcacaggcggtgtgcccagagtcggccaagccgcgtttcaagtgctccgtggactcaatggctagtggctgccctgtgggcttggcagatgtgggacaaagggctcctatggctgctcctcatgactttgagctctgtgactttgaatgagtcatgtgacctttgtgctttcattccttgactttactcacaccacagatttacagtgagctgctgcaggccaggcttcgggtgaggttgtgaaggtgaacaaaacacacagtctccgccatctcagagcctacagtgtgtggggaaagacagttattagtggaatatgcactaaagaatgcctgtgtgccctgaagagcacagttgcctggagcactgtttccagagagcataaagcaaagaaagctgacctagatcctggtgtggggatcaaggcccaaggagagccctcccaggggaagcaacgcttacacagagagctgaagtcggagtgggaattgaaacaggtttaggtgaggatgtagagaaacgactactcatatgctgctagtgggagggtgaaatggtgcagctgctttggaaaactggtggctcctcaaacaattaacgtacagtaccatgtgacccagcaattctcacctctagttacataccccagagaaaatgaaaata

SEQ ID NO: 55275 - DNA, 3456 bp, Homo sapiens
caatctgctctggctactttataaactatagtgaggccaaaccctttcaaccattatacagatgaggaccccaaaagggacagatgtcagcaaggctgcatagctaaggtttctcaaaagataaccaaaatatcacgttggatgaaaggcaattgaaaatgctaagtctcaaagaggcagtcagagagccgttctatgcagtttgcaagatgttttcacctccatcaatttatcagactctgagaacattctgcaaggcaggcagggtggatgacactcatttacagtcgaggtcactgagggtcagaagggcaaagtgtcactctctgcataaagtcacataggtaagtctacacaggaaaatctagggctgttcttcactacacctctgattcagataacaggtaggcttcctctaagattttaataaagacaaactcaaaatcctgtatgatgccccatgaagagaaacaagtcaggaggccaggctgagcccccagacttctaacccagttcgcaaataaagaaagtggcaaagtagatagattccagcctgtcaccagggttgtgtcttctgtcctagcagctgtacagcttgtcttaccactggacatttgtttcatgtacattttcacataggaaggatattctaaaagatgttgataaagattttttaaagggtttgaaggggataggatgtgatctaaggttgtgcaaggagaggaaaggaagaagcacacaaaaagaacaaatatttattaagagcctagagtggcatgcgctgtgaaaggcgtggcatgtaattctttcccagttctttgcctgtctgaatatttctcattcttcaggtttcagctcagatatcacatcctcagagaacttgccttgccactctctctgaagagcctccccccgtccccgccaccgctactgtctcttgaactttctcagtctggccattctattaaaatctggaacgattttgctagtttgcggacgagtttcccccaagctgcaggctccataagggcagtgacagtgtctctttctcagatgaatgccgggttgcctatcgcgtacttggcacacagttaagtgctcgagaaattgctaaacactcaacgaatatttaccagaatacatatttatgctccaccgttgctgaaagaatttcgactaacccttctttaagtctctcttaccctcctgtactattaacaccattgtaagtaggcagtggagctacatttgcagggagagagaagagcgaaaaattggcgcgcagagctgtaaagcgtttttctccaggtcacaccgcagcctgtaaatttgtgacacttggaccgattatgggacagcttgcaaacaaattatctgcaaactaacgaagcctatttttaaagatccctgttcctcgcagctctaggcgatgacatcagagaacccggagttctacctccgagccaagcccagtggtggtcaaaaactacgaataccaggaagcaccgcggcgcggcggcccagagctccgcgcgcaggcctccccggcgcgccgaggccgccgccgctggaaccaggaagacgccagaaactcggcccgccacgccgcagggacccgcgcggggcctgccgggactcgtagtctctgcgggctgggagcgcccgctccggaatctcagccgccgtctgagggctgaggcagcgtggggacgcgtgcgcagtgcgcgggctggccgtcgcggacgccgctccgggcagccgagcctctgtgggagccggggccgcggcggcgcgggtgctccgggccgaggccgcggtaaagtttagcttgaagaacgcggccgcgctggagcaggggtggtggacggggccaggcgcgaggtggcggcggctgcggggctgccgggctgctggagcgcggttcccgctgtggcgagcggggaggcgtccgcagaggggcggtgggtgctggtgagtgcggagccggcgccccctctgcgcacgtccgcgccacgcgccacagcacctggaggccgccgggccggctcacctgccctggcttggggcagcgggagggggcggcgtcttcttcccgtgggtccccgattgttttcccgacgtcagccctcagcggcgcccggcgggggagggcgggaggcccgcggcggtcgcggggccgacgagctcctcggcgtctccgccccccgagaaatcccgctcggggcgcggtgcgcgcagctgcccggggattcccggtggcgccggtcggagcgcctccctccagggctgtgcccgcggggcgcgcgtccccgggcatcctttcctggtgtttaatgcattttggcttcaggacttgccgaggccgaagccggctccgccctgggccctgaagtcgggcggtgtccgcgatttacctccgcaccttcggggcaggtggccagaggcagcgttgaaagcgacttgcccaaggtcacgcaggtggcaccggggaggcgaccagacccaggtctttcgacgccgaggccagctgccaaccgcagagctttggggccgtcttgagtggtttgtggtttgtttcagatgctttctattgacctcctggaaagaggggaaagtgtgtcataatgaaagcggtcctgttgcttatagtgtttaccgcctttggtagaattctggtgaggctgtgcccccgcgcagagcatctaccgtggtctgggcgtataaataatgaaactcctttgctctctgggggcagtacaagaagaggttcaaggaacaaataaatatccaggcagtttctgcgttttcctcgtctgtttgtttcaccttccaattctgcagtactggttttcttattttacaattgatcgttgttttaataagattttctttgttttaatgaagtcattgccccttgtgagttagttttctaaatagaaaatcttatttcctgtgtgtttaatgactggaacaaatagtgcactatgaggtttacaccattgtctttcatcttagaactcctgatcaatctgctttattttcccaagtactcagcttgcatactttctatgttaatttgatgccactgaaaccatttacagcaaagtttgggtaagagttatgtgattgttttgtgaaactgtgtttttcttcacaatctgaagaacttgaagacccgttatattaaaataataagatttattctgatcaaaatacctgtttacttttcatgctcttaatttttcctgttgacacacttgtggcaaaagaaatatttcccctagtggagttaaagtattttttatcttggccaattttcccaaggaaaattgcattttagagtactgatacatttaaaaaagagtatttaagtttgacagaatttgaattaataaagtagttaatttattttatactgccgtaaaccttacactgtatctactgacagttttctct

SEQ ID NO: 55276 - DNA, 2540 bp, Homo sapiens
cacctccagggtcgccctcagccctcctgatgactctcggactcgcatctgtcccaacggatgcaccaaagattctccagtgggaaatcaaatttttgataacaagtgttttgaaataatcacgcacttggtgaaaaatcaaaagaggggaaaacccctttcccatctgagaccgctccaccctcgccagttacgagctgccgagccgcttcctaggctctctgcgaatacggacacgcatgccacccacaacaactttttaaaagaatcagacgtgtgaaggattctattcgaattacttctgctctctgcttttatcacttcactgtgggtctgggcgcgggctttctgccagctccgcggacgctgccttcgtccggccgcagaggccccgcggtcagggtcccgcgtgcggggtaccgggggcagaaccagcgcgtgaccggggtccgcggtgccgcaacgccccgggtctgcgcagaggcccctgcagtccctgcccggcccagtccgagcttcccgggcgggcccccagtccggcgatttgcaggaactttccccggcgctcccacgcgaagccgccgcagggcccccttgcaaagttccattagtttgaaggacgcgaatctcagcgagagaacctgcggaaagcgaatatgtggggcgcgcagacggggaaactgagtcccgcgagagggccggcctgtgcgctgccccgcccgcgccccgccagcaccgccgtgcccgggcgcgcccgccctgccccctccgcgggcggtcccggtccagccgcccgccctccctcccgccatccggccagcccccatcccgggcgccgtgcccgtccccaaggcggctcgtcaccgctgcgaggccaatgggctgggccgcgcggccgcgcgcactcgcacccgctgcccccgaggccctcctgcactctccccggcgccgctctccggccctcgccctgtccgccgccaccgccgccgccgccagagtcgccatgcagatcccgcgcgccgctcttctcccgctgctgctgctgctgctggcggcgcccgcctcggcgcagctgtcccgggccggccgctcggcgcctttggccgccgggtgcccagaccgctgcgagccggcgcgctgcccgccgcagccggagcactgcgagggcggccgggcccgggacgcgtgcggctgctgcgaggtgtgcggcgcgcccgagggcgccgcgtgcggcctgcaggagggcccgtgcggcgaggggctgcagtgcgtggtgcccttcggggtgccagcctcggccacggtgcggcggcgcgcgcaggccggcctctgtgtgtgcgccagcagcgagccggtgtgcggcagcgacgccaacacctacgccaacctgtgccagctgcgcgccgccagccgccgctccgagaggctgcaccggccgccggtcatcgtcctgcagcgcggagcctgcggccaaggtactccgccgcgctcctgggcagctccccactctctccatcccagctcggacctgcttctgcgggactggtgggcaggttgaggggcagcgaagcgttgtggggtggccagggcaactctcggggacaggcaggtgggccccggggtggcggatttccgcgggctgcctcggaaccgagcttcgcgcccagcccggggccggttctgcgcccagacgatgccagtacgcccggcctgcactctggggctcgagacgccgggcgaccggccatggagtgccctgagggcaaccacacagcgcggggaccccaggacaaataagaggaatgggggcataaaggaaggagagaagttcaggactgggaattggcgcctcgcagagcggcttcaggaccacaagaagtcatttcggttgctttttcttctatttacgtcctccgtcccctttaaaattcactgctttgatcacgggaccgctcagtgaaaactgtatgtaactcttttggaaaggaacagtgtttgccggcccgccccggagtttctccaaaaagtctaccccgagcagggaacggtttggcaccgctctcgtttcggcggcgttgctgcctgtcttgctttcctcgttttgagccagccctacaaaaatgaaagtggctccttttgaataagctgaatcgggctttggatcacgaaatctgcagaggcggagaagggaccgggttagtgatgaggaagaagtctacccctctgttcctacagccgcacacaggacctgttctggcaggggagacggtggtgatgggggaaggagtggaatggagcaatgtctaactctctcgcgggaccttccggagagatgctcctcatcttcaggcagaggccatgtggaaaaataatatcgagttcagcagcggccagccccgcgttgtaggaaccagacagcggggcttggcagtgcgcttgggcgcagccgtgccgctgctgccggaccccagtgctgcctcctcaacacgggcagtgccaggagaggggcataggggagcacagtgcagagggactggtct

SEQ ID NO: 55277 - DNA, 1965 bp, Homo sapiens
ctctaagtctcagtttccccatcagtaagataagagaagtaatagcagatacatacgtagctcttagggcattgcagaatggaaggacctccttatatgaaacgcaaagcactgtgcctgatgcattgctagaactcaggcaatattagcgtgttgtcattgtcatcatcatcatcatcatcatcatcatcatcatcatcatcttcaaggcactgacaaaggagtcagctgtgtgggaggagtgctgggacactcttgtctccctggggatgaggtgggtgggtgggttaggaaatcttcacagagaaggagggtgatgtgagacttctgtccgggagctgactcggaatttgccatctaatatgttggaaaaggttctctgggcagaggtatccaaagtcactttgcctgtcaccctttgaggtcccagttgttgcctatatcatgtgaccagtgtgtggcttctcttgaattaagagctgcatgtctggactgcctgggattttacagatgtcatctcgttaactctccctggagcttgtgacacccaggagatggcagtttatagaagccctggcaccttcttgaatgatgcttggtttggtttctatgcactgggaattcctcacaaggaaagatttgtcacatcttaaggaaggaaaaaaaggcaaatttgggagtccatggataccctattattttagattccaggacaaattgtcgaataagcacgtttcataaaaacaatcctccgcagcatcccgtgacagcagctggtccctcgccacaggataattatgtctccttgtgcacacaaaagtctccgagggcatattgttgtggctggagtttctgataatttccaaattgaacaacctcagtcctaatgagtcagaggcttgtgcaatattttcaaacctcaggaacatctttttcattagttgtgcaataaagatggtaggcctatctctgtgatgagctgtttttttttctcaaagtttgatgagattcgccgtagaattccttctcacatagtcttgggcaagattttacccgatcttccaacacatgagtcatctcatatcctgtgactaagaagagctgtctctttggtgccagttttctaagtgcagtcaccacttgatggagacggatggacacagttgggattgcccaggcagatgggcaatcttgccagctagacataggggagggaagcctcaatgttcagcggtcacatctgcttttctgtggcacagagtgagctatacaggaatattgtattctccaggacagttagggcagtgggaaatgtcatcaaacagaacagtgacccaaagagccactgccactgggtgctctgtgggagctgggcactgtgctcattgtgttatgggccttgctttgttcttaccttgtagccacccagagaggcagggcattatccttgcttcctagctgaggccacagaagaggctcctagaggttagctgtaacttgtccaaggccagccagtgcaaggaggcagagccaggatttgagcccatgtctgtttcactcccaaactattcttcagatttctttaagtcaagtgttatttagaaatgttttgtttattcatcaaatatttggtgggtgtttccagctatctttctgttattaatttctagtttaattctattgtgggctgagaatatattttgtatgatttctattctattacgtttgttagggtgtattttctggtctagaatgtggtctgtcttggtgagtgttccctgtgtgcttgagaggaatgtgtgttctgtcattgttgaatggagtgttctataaatgtcacttaggtctagtggattgatagtgcggttcaggtcaactgtatccttcctgattttctgcctactgatctatcaattcctgaaagagaagtgttgacgtctcctgagtctattctgaaacactgaa

SEQ ID NO: 55278 - DNA, 597 bp, Homo sapiens
ggttttcaatgtgtggtgaagcagacgcctgctgggcccccttcctgagttgagtttgacctcctgcctcctgtctatctccttgggcagccaggccaccccgctccattaacctgtgccaccccatccctttacctgtcgcaagcccagccctgaaggcctcaaaggcctggtcttccagccagtccagggcctgaagggatggcagtgtccctggtggacctcccctggtgtggcctagtgcacatcccagccctgcctcctgccccgcctgcacgccatgagtgctgaagtcatgcctggcaggggctgctggcccaggcccagagtaaacacactgcgctgagctcgctggtgtgctgctggatgctgatgagcttgaggagtgtgggaagtgagcatggggctgagtagagatgcggcaggcctgcacctccccgcagctgccctgcatgctccagcctcaggcagccacacagggaaagggtcacccactgtcagggcagacctttaccatggctgggtgacacgggctggctgtggaaaggtgtttggtggttcccgctgttggatttgcacaggcccagatgctcacag

SEQ ID NO: 55279 - DNA, 1682 bp, Homo sapiens
ccttgataaagtatctttttagctcttttgcttatttcctgaaattaggtatttactttattattcagtttttagagttccttctttatatgctctggatctaagccctttatgaaatatgtgatttgcaaatattttctcctagtctatggcttttcttttcattcttttaagtgtgtcttcaataaagcaaatttttaattagataaattccaatttatccttttattcattgattacatttttgttgtcatatctaaaatgtcattgccaaacccactgtcatacagattttctcctattttcttctgtatgttttatagttttatattttacatttaggtctacaattcatattgctttagtttttgtaaatgaggtatatgttgaggttcattttttggtgcacgaacatccaactggtttacaaaaactttgcctttgaaaatttttcaaaaatcatcttatttttgtggatctatttctgggctctccattctgttccactgatctatgtcaaactgcattgatcactgtagcttcaaaataagtcttaaaattaatagtgtgagtccttaaactttgttatttttcagtttgttttggctattctaattcctttgcctctttgtatacattttagaataaacttgtagctatctacaaaaactttctacattgaatctgtagatcaaattggggagaattgacatcttcatagtggattttcctatccataaacatggactatcgccatttatttagatattctttgattaatttccatcaatgttttataatactcagaatacagatcctacctaaagtttattagatttatacctaaatgcttctttaacttttagtgctattgtaaacagtattattttcaaatttcaaattccaattgttcattgctggtacacatgagcagtgaatttttatatattgacatcattgctgagctcacatcctgagccactgggacattctttaaaaactagtcagccatatcatttttcctgctctaacagtacccactgaccttagggtaaaatccaaactccttatctgacctacacagaccttcataatctgacctacacggaccttcataatctgaccatttacctgcctctcttttctgtcaccacctcccatcttgctttctttcactgacattcaagccacaatggccctccttcccttactgtgcagacatgcccagttgcttcctgcctcaaggccttagcccttgtctgtttctttgcctaacatgcaccagcccctccccaagacatgtcacacctgagtgcattcctctttatgtctttgctaaaatttccccttctcaaaatggcattccttggccatattattgaacccccacctacaagacaccctctatcttatcaccttgtttaattagattctaaacagcaattataatttaattttggtttatttactgtgtgtctctcctatttagaatataaatgccatgacaacatggaccgtctctcatgttcatttcaatgttcacattccctagaataagactcagtaagtatacacattttagaaatctggaggagaaagaagagaaaaaagaaaagtaaatacatgaagttattaacagtgattgtctatacgtggttgggattgtggaattttattatttt

SEQ ID NO: 55280 - DNA, 1336 bp, Homo sapiens
gccaccgtgcccggccggggcttctttcttctaactcacttccacttgcccttgaggtccaagcaccttcccaagcatccaagaagcgctcaacacagaattcatacggaaatgaaggtgtcacacatcagggctttcccaaactctattttttcctcaatcaacattctactcaatcccctgcaattgactctcggataattacataaatcactgggcacctactgggtgcagggcacaatgaaagacaaaagtgtatctttttcgaaattaagtcgacagcgatcatctatagctggactttttacacagcctgttttggtggacaggaggtgtcttgtttgagggtagaggggcggactgactttgacagcagccctgaggggctatcacgcctgatggggacgttatatgaaattccgagtccgggtcaccttccccctctcacgcccaggagcctcggccccttcccggccggacccacccccctccgcccaccccggacgacctcgcagctcccctccccaactagagacctggtaccaactgctctcccggatcccgggctcagaccctctcgcctcccctcacagctcccctagaagcgcggcagttgccgagcatagcgaccccgtccccgtcggcccggcgcaccctggagcaggcggtgccagcagctcctcccagtcgaagtcaccggggccgagaccggcccgggtgaggaggaggctgtgggtcagggccccgcctgcaacatcccaagaagaggccagcgtggggcggcgggtgaggcccccgtcctcggtccgcgtctccattccgccgccttcagtcaggccagcccagccccggaacctctcttccagtgcttgaatttccgccggtacagcgtggaaatgggcaggcaaagcgacttccggctcactccgcttcaagtacccgccgcttcttgctttggtggggagagcaggcaccagagacacgcatgcgcatgtgccagctggcctcaggcgcggcgttcaaagtgtgcggggaggaggtcgagagcggagcatgcgcactggcagacccttgctctttcgctggagactatgcgcaggcgcggtgcactgcgcgccggcacgagggtgttttcgacgttggctgtggggaaacagcaagcggcgtggacgaccgttgctgagctggtgtggaacgtctgtgatcaggtaggtgtagtctcgtcgctctacgctgcgtgcaagaccgactcctgacctcgttctttcccaaggggacgccagggccttttctgcttccattccgtcggatctgcagcatttgtggcagctagcgc

SEQ ID NO: 55281 - DNA, 845 bp, Homo sapiens
ttagtaatgccacagtttagatgttttgactatcttaagtagattgagttcttactatatatgccctgccttttacacaggagtatacttcccagcaaggtggttataggaacttaacttccttctcaggaccacttgagttgtaccttctctcctcctttccctctcttctggtccttgcaggtcccacagttgccaggaattccttctcaccctgcctcaatacagggcctgcaattttaacagagtggaaaagaacaaccttcctatctttttctcccaacttcatttatagctgctttctacctcattttaactagaacctctgttctagttagaaacattgttagactgtatatcattttcaatacaacctttctgaggaaatgtagaaatgctgcagaagctctcgaactagagctgaatctgtgcccgcatccatgattatcacctgtatgacgctttcttatcctaaaactcttatgcaatagtcgatggccataccaccctgaacatgcccaatcttgtctaaaactgttatgcaataaagggttaactcaggaagtctgggaggttcaaaccctgcagcttccaaagaagttggctcttgaccagctctgggaagatgaccgctaacctattggaatgtcctgcctgataagagtgtctttgtatacctagctagcttatatcaacagtgtgatttatatagtaaggccacacttgagacacactctgtcagtttgatctctggagctcaattttaaataattatttaaaattaaataaataatactctatacctatctagatacaaagaaaggtttttcagggtgaggtaggtg

SEQ ID NO: 55282 - DNA, 1300 bp, Homo sapiens
gagaatggcgtgaacccaggaggcggaggttgcagaggttgcagtgagccgagattgcgccactgcactccagcctgggcgacagagcgagactccgtcttaaaaacaaacaaaaaacaaaaacttgttttgtacctctccatagcttagtattactttttaacacaaacacctattgttctctgtctgcatgcactggaattgaggtctgtggatgtgcctttcctgacaatatttcttcacgcttgctgcccactggtgctgtgagggcacaataacgaatgtttactttgcccttgcactcttcacatctgggaaccgcaaaggagcgcggtggtcggactgtcagcctcgccttctattctttgatttccagtaacttattttcgaaagattgctggagggaaaggctcaacgtctcttttgggattttcctaagcagaaagacctcatcctaacaaaactgaggcgccaatcctactggctggcaactttcggcagggagggtgattctatttgaagatcaatcctaactctgggaccccttgggaatgtccaggagctaggaacgcagcgccgcggtctctccagcctctggtccctgggagcaagcagggcaccggtggagcaggtgcctctggggccgcacggaaacccagctaggccagttcctccactgcgccggtaggcggcggagacgctgcgcgtgcgcgcagggcagacggtagagcggagacgacgctcccagactcctccggtctccccgggcagcatgaagaccgccgagaacatcagaggaaccggcagcgacgggccgcggaaacgaggcctctgcgtcctctgtggcctccccgcggcaggaaaatcgactttcgcgcgcgccctcgcccaccggctgcagcaggagcagggttgggccatcggtgttgtcgcgtatgatgacgtcatgcccgacgcgtttctcgccggggcaagagcgcgaccggcggtcagcacggaggggcggggcctgggccgcggggcggggcggggcggggcggggcggggcggggacactcgcgtccacgcggtcctgggtgatttgccatgagcgcccattgcttggtgtgggaggtgaagttcgagaaaagtggagctgggttaacatagttactgcagagggtgaatgcgttggctgtagaaagtggttacaaagccaactgttagaacgatgcattttagatgcttatctgtatatttgatgcatgtatatgttgtatattctatacagttgagtcttcagacagggtcaggttctcaa

SEQ ID NO: 55283 - DNA, 534 bp, Homo sapiens
gttttcttatagaaagagatctgtgaaagagtgcaacaggtactgggtcctatttgccttagagctcaccatagttacactgcttttgcatatgtgaggcttgtaggctatgctgtctaatgcatttcattcattacgtatgtcttgagagttctagagcagcatatttctagcagaaacttcgctggcgatggaaatgttctatatttgcactaatatggtagctgctagccacatttgactattgagcccttaaaagtagctagtgtaactgatgacctgaatttttttgtttaacttattgatttaaacttaagtagcctcatgtggccagtggctatttattggacagcgcagttccagaggtatattgcccacacttccttagttcctgcatattgtccacgagggatcggtatcagctcactgcaggcttgacctcctgggctcaagcagttctcctgtctcagtcccctaagtaactggaactacaggcccacactgccaagcccagctaattttttaatttgttgt

SEQ ID NO: 55284 - DNA, 2587 bp, Homo sapiens
atttttaaaattgttagttcctacgtttaaaaaaaagttgttttaaatacattctgttctttcaaaactgaatttcctcagatcacacaatttaagacgcctttatgtcttcttccgcttgtcacacgtctttcgggttctgaccagcacatcaaggggactctaagcaggccacgtggttagtgtttgctagaacttgtttagcttcagatccagtcatcgagcatgctaggcttggctactcgcgctccacacagtttatccaaagatctaaaccccgaatgaacctgaatagttatttgctacaatgtctttctcaaatctcacatgttcctaaaataagggtgcccatgcagtagagacggatccgggcaggatcattagataaaatacgaaggctttaaacgtccttctcccaacaatcagcctgggaccggcgtcggggcagcagcctcaccaagattcggagcgacatcctcgccaggattcgaaacacctaggagacccgcgcccggctgactcccagcccctgggaccccgtgaagacgcaaacctcgggacgcctcccgcagaaccacctgtcagagccaagcaacagtccccgccccggagcctccgagctcctgctcgaaggcaatgacagcaggagaccccgctccctcggggttctcgcggccataggcgccgcagtccactgccctccggctaaagaggtcccgggccatcacctgcccgcctaccgaccacgcccgaccctccactgaactgagtctccgtccggatcagccggcccgccacgaacccagctccagtctccggccgctccttcttatccgccctgtcctgccgcgtcgccgccgtccgagccggcagcctgctacttacctcctgacaactgcatggagtaaaccacaccgccttgttaaatgccgtcgccgccgccgccgtcttcgtcaccgtcacagtcgccgccgccatctttgttgtgtctccgactcccttcccgcccccctgccttgctcaagtctcgcgtgagcaggatggagggcgaaagcgaggaggggcctgtttgtctctcttggggttccgtaggcagcagggggcagggattaagggggggtgtgtgcggggcgggtactgagtgggcggggccttgctcgggtaactcccaggggctggctagagacccagaggcgcagagcggagaggcctgcggcgaggatggagggcctggcagtgcggttgctgcgcggcagcaggctggtgagtgcgttcgaggctggcgtcctgggggcccagggcgaccttggcccctggaatcgcagctggcagagccttctaacgggcctcggggcgccggcctgagccccgctccacgtcctgggtccccagactctttacccgcgggcagtctatgaccccgacccccttcaggcctctggtggaggcagctggtggcaagggggtcggggctgtctagaagctgctttggcggagcaagtaccttgagtggagtcggagggtcgcgtccgcaagatgtcctttgcaggccgttgcgtcctgagagccaccgagtctggatctctggatctctggatgcattttgcacagatgtcacctccctgatgccctaacgcacctttcccgagtgattacatttcacaccccctcccccaaaaaagatagttaaaatataggcccagtctcattctgagcaggtgtctccctgtccttccttccgcggccccgctcaaaggtagtaagggacttcggagttgttcgggcttcccggccagggacagagttccctctgccccttatctcatgtctggagcctgggtatcttccgtggatagactcaccgccgcccaggggagccggagccggtgccggtccctcttccatgaacttaagctgaaaccagcctcttgttgtgcttaattcttatctgtgcacccacacaaactgttaacagcccctgtgttaacatcctatgctcttcaccccttggacctattatatagcatgcttttcagaacatacacatttggatacacttgtatttgtcagtacacttcactgggaattttcccactgcttacgtgtgcttttaatgtttcctttgcatttgctttaatgagttaggctttccaactgctgcttcagtcttatgcccagaggcagaactctgaccctttttcttattagagataattaatgttatttgactgttttacaggcctgaagtgcaataaaaaacagtaagtgattattgtttaatactgtttataattgttggttaataacttagcaaagaaaatttctttggttttacaatttgactctgttttagagccaaaatttattgaccgcatactctgtggtaggcacgttctcgttctacctgagtcatctcaattctcacaaccatcttaacaagtagtttaatcttgcagatgctgaaaaagaataatagcttgcccacagatagaaagggatagagctggtggtattcgaactctggtctgattctaaacttaaccttcatatactactgtctccccgtccttagagatatcaaaaacct

SEQ ID NO: 55285 - DNA, 980 bp, Homo sapiens
tgtttttttgctgaatagaatttattgtgagggaaggaaaaaaattttcatccaccctcttaggttcagtgactggggcttggaaattaaataacaaaagacagattaacagtagtaaaaggtttatttcctatgcataatgagcaagtacctggctcattaaatagttaaagggttttgtttatatacctaccttaggtatataaaggaagggggagaaagggcctctataggaaaaacaaataggtctctttgggaaagacaaacaggtagtaagaaattgtgtaatgatatttgcctattcatcttcagggccaaaaactccccaggagggggaatttctaatagcctcatttcccagaggttgctgctttagtcagttaagggaagctcctagaaggcttttcctccacttgttgaatctcagatgtcttcagcttaaaagaagcattatgccaactctgggattccaaatgggtcgctgcaccatgatagggatgtaccacagatgtttaaccattcacccactgaaggacatctggattgtttccagttttttactactgtggctaaagctgctgtggacatttgtgtgcagatctttgaacttctgttgttacttctcttgaataaatataaaagagtacaactgctgggtcatatgataattgcataagaaacagctaaactgttttccagagtgactgtaccattttacattctcaaaaacaatgtatgagagatccatttgctcatctcccttgccagtgcagcaaatcaaaatattttaccccaaaatgtactttgacatattttgaaatggttgccatagtgccagcagaccaggctgaccaacatggtgaaaccccgtctctactaaaaatacaaaaattagctgggtgtgatggcacgcggctgtaatcctagctactcaggaggctgaggcaggagactcgcttgaacccgggaggcagaggttg

SEQ ID NO: 55286 - DNA, 490 bp, Homo sapiens
cctgttgtagcccaaaatgtaacagccacagccctgactgcagcatagtgtgactccaggaatgtctagagagagactaagagaattatccttctgttagcagctgtgggttttgaattacacatgcacacattctctttgtgaaattgagagtactatgtgagtttcagtaacgatggaactgggtcgttggaaaggcttggctggcactggtcgtgtttaccaggccctcgtgctttggctagtgtggctctagcaaacaccaccacatgttctctgctaaccatcctgaacttatgaagtggcgtaaaaggaatggtcattcaattattaacttggctgaaaaagtcaaggtgaaagagcctgactagaagaaactttgccaaatgaaactatagacatcccattgaggagtaggttattttcttctgtttccttattacattgaaatcagcataaggtgggtagggcatgttgaaaaatcaaaacc

SEQ ID NO: 55287 - DNA, 1757 bp, Homo sapiens
tggggatcactgtgggcaggtgttgaattgtgtcctccaaaaagatatgctgaagtcctaactcccagtatctgtaaactgaccttatttggaccttgtcctaccagaagctaggagagaggtatccttccctagaacaaattcttctttggaaactcagagagagcatggccttactgactccttgagtttggacatttggcctccagaattgtgaaacaatagatttccattgttttaagccctccagattgtggcacttagttaaggcaaccgtaggaaagtgatacagggatggtgctagaaatcagcttactacatctagcaaaattgcagattcctgagcccatgctctccttactgctgccacaatatgatatgatggtctttgtggaaagacctattgattttgatgcaggaattcaagggcccacaatcgctgatgcaggaattcaagggaagcagtctctttggcccagctctgttccccatctccagcaatctgtgcaccctccccagcacaaactctatggctacattctgacatttcctcagcctctttgttcttctcccttccctacctgataacacactcatcaagaccctggttgatcacctcctccaggaagcctccactgattacactaaaccaccagactgaattagttgtttccttctctgtgatcccaaatcactttgtgcctaaatgtgctagaggtactttgcctctcacattgcattgccattattcactcccttttcagttttcatttctaggctatgagcaccccaagaacagaagttgtgactgatttagtcttatacccccagagcctggcacaatgtctgcccaggcatgttgctaactaagtgaataaatgagatgactcttcagggctgctcaggcattgttgggaggaagcttcagccactcctctcccagttgtccttaggagtcatcttggcttatatgacatgacctttgattgttctgattgtgccacattcgtgtggcagaagtgatgactcagggagaatgggtcattcctcagtcactgagggaagaagcacagaatcaaattgcatcagagctagaagagagacatcctggataacagcccaatgtgggccatggggacaggcttcgctatcgaggtactcagctctgatgtggcttgcatgacctcactgaaggctacatgggctaggcttccccctattctgtggggagagagtttctcatacacaggaggctgagccaatgatccttgcatccctcaccccctgcccagccaccagcagaaagaggaactatgcagggaaggttgggggagccccagctgggtcactggaccagctccatcgggctctcaagacaagaggcattggaaagcttgtacctatgcatggtggctgggaggtgaatattttcataaccacttgactgagacagcactaatgtattatacaacctactcactgaaagttttagtacagtcatggagttggacaaccatcatcacaaccaattttaaaacattttcatcacccccaaaaagaaaccccatacacatttgcagtcactcttcattcccctcatccccctagcatctgctaatcgcttatttcctttctgtctctatgaagtagcctcctctggacatttcatttaaatggagtcaaacaatatgtggtcttttactttggcatctttcaaaggctcatccacattgcagcatgtatcagtgctggattcc

SEQ ID NO: 55288 - DNA, 544 bp, Homo sapiens
aaaaacccacaaaatattgttacactaatgttgtcgtgacattgaattaattaaaaagaaaagaaaagctttacgtgttgccagagtgtgtaagtttggacgattttccctagagcaaatgtctccaaaactcttttctgtcttgctcgctgactgcctctgcgctctctaagtacaacctggacgcacaaccctgtattccgggaggcggtggagacagaggcggctttgttcgcgaccagaggcactctctcccctgtactttccgcggcctgaaacgcccagcgagcagggaagaatgctgggcggaaggggagtggacttaggcttatctagtttgcgaaattgagcaaagcgacagcgcgcgaggcgagataccagagacagctggtatttccgaacactggtctgcagcctcccgttctgttcttaaacctgggttccttcgggagccgagagcttttgggcagggcatccctgggcattcgtcagctggttaacttcggtgggctctggttggagggaagaagggagtgagttcaga

SEQ ID NO: 55289 - DNA, 1572 bp, Homo sapiens
tagagcaaatatttcctcctctacatcaacttttggttagcttcacgggcgtgtgcacgcccagggatagggagacaactttaggactatataagtattgcccaaaatgggattcttgtgtttcagagactaacttcaaggggagggcgccatggacagagctgtaaagatctttcccgctttctatgaagagggcgggcagagcgtcagcccctagaaaactacatttcccagaatgccatacgcaggcgggagagggcatgaacagagccttggcgcgatgctccttgggaggtgtagtttccacgcgtccagctcgaacgctgatgccccagcgcggtggtaaaatgagcccacgtgatcggaaaagcagcggtttccctttgagccggaacaggatgactgggttgaccgatgctgggcagctgagcggaccaatcggccccctagactgagacgttggcgtttgaaatcagccaatggcaggtctacactggagcttcctctccgcctccttcgcctagcctgcgagtgttctgagggaagcaaggaggcggcggcggccgcagcgagtggcgagtagtggaaacgttgcttctgaggggagcccaaggtagggaggcgaggcgacggtgtgcgggagcgggctctccagggacttcccgggtccgcaactggcagggccgttcgattcgcaggggatcccgtttcgtttctgttgttttccctttatttttaggagtgcccggggcgacgggaccccgggagaggggaaagggaacagtctggggtccgggcatcgctgtgggccgggctgggtttagggggacggcggtgcgggctgggccggtttgggcgcggcgggggccggatgatggggcgagtccggaccttggcgggcgagtgctcggcgcaggcgcaagcgcagagtctcctcgcggtcgtcctctcggcccctccctctggggggacccccagtgccaggctgtcagtgcgcagccccagcccgcgggacccctggggactctgggcgcctgttctgcagatgaccggttctaacgagttcaagctgaaccagccacccgaggatggcatctcctccgtgaagttcagccccaacacctcccagttcctgcttgtctcctcctgggacacgtccgtgcgtctctacgatgtgccggccaactccatgcggctcaagtaccagcacaccggcgccgtcctggactgcgccttctacgtaggtgccctcccgccctgctcctgccctcttactgtgttaacgattctccacgtgaggagcgtttcttttccagtgttgggtagaggcgtctgtcggtggggttatttggacagttctttagcttttcaggagcatctgccttgaacctgtaccgttttgggttggagacatgcagacattggaaactccgtctccccttttctgttacacgcttgtggagtaactctaaactttctgaaaatacgatcattatatttgcaacaatactgttttggctgccgtattgaaaggaaccgtttaggggaaatgtatgtttaccctcagctagc

SEQ ID NO: 55290 - DNA, 648 bp, Homo sapiens
ccgggaaacaacttagcagcagcaaggttgggcaggggagtggcggagctgagcgccccctcctttgaggtcagccaccatttttgtaatggaatggcaattgtctctgacttggtgaaaactgcataatcaaacagaaattgttcttttcctcaggaaactatgtgagcatgttagtattcaatagataaggtggattaaaaacaacatctgtgttgacatctgaggagcaaacacagcgccagtttcatggttcttctctcctttgacttccccacttcagtctttgaaatgtctctgggtagcccatctttcacttgggaaagtactgatttatgctattaagactagttatagcagtttcctttcagaatggcacctggctatgttgcctttggaactagcactgagagaaatgaaagaaagctgctgtacctgtggccgcaaataccaattgcgccattgagtacaaaggcactttccccttgatcagtggtgtgttgtaacggtgctttcattttcgaaggatgcccacagaacttgtcctggggtggttgtaaggcacttagttgggaatcattttgtgtcctgatgaaaaaaaaatcagaagataaaaactagactgtactgtgatttatagagggctgt

SEQ ID NO: 55291 - DNA, 2755 bp, Homo sapiens
tgtctctccaggggccttctgacccctcccctttgctaagaatcagctccaagctccacacccccatgtctgttcccaaagagaccagaggcaaaaggaagatgcattttctgttatcaagccacgaaatccttatgcttaattaaaatgtgccatggcaaccagtgaggtgtgtgtagcctggcgtagagtggccatcaccgccaaaggcgatgcccacgtgccatccctttgttcttggctctgggagaggtgaccacactgttccctttgtgagcgtggcctttgtctgcagcacagagcagaaccgcagagcctcggtggggctgatgcctggggccttctttgggccagtgcccttgccaggctgggaagctgggcagtcccagggcaggcatagcccagtgtgtgtcagctgagggctgtgctgaggacacaggtgtggtaagacatggtccctgcactctggatgctgctgagggagacagacacacagccagattgctatgtgacagggctgtaagactttggtagggcatgagaagcaaggtaccatggagcctaggcaggggcctgagggtggaatcagaggggcttcctggaggaggggtcattcgagtagttgaggactagtcaggagaagggaggtgaatgtgagtgagatcagaagtgaggagggaagggatgctcctggcagaaggaggagcacaagccaaggtgtggggtcatggtgtgcaggggctggtgcgcaggtccaagctcctggaccataaggatcaggaggaagttgcagggactgcggaggctggagcaggatcttggagagcctgcgtgccagactgagagacctagatgtgatgtgatctgggcaacatgagcaacagaaggtggctaagtggatcagagtcagatgagaggctgctgaaccagtggccaccagtgtgccctggagaaactcagatggctcctctgtccccctgtgaggctgacatgtgcaggggccacagggggtcctgagggacagagggggcgacctgggagaacactcactcccattacggaaggacagcacaaactgcaagcccagtgagtggcagatcagcagggccctaggaaggaggtagcccagcatccagggaccagagtcggtcttggaatcaggtatcattactgctgtgtgacctcagacaagtcgcttaacccctctgggctttgggtttctctccctctctctctctctctctctttttttttcttttgaggcaggttcttgctctgtaacctaggctggagtatagtggcaggatcatagctcactgcagcctccacctctcaggctcaatcgatccccctgcctcagcctcccgagcagctgagactacacacatgcaccaccatgcctggctagttattctatttttcctagagacaggttttcattatgttgtctaggctgtgtttctcatttttaacatgaagaggaaatgaaatcacttgcatgaatgatctgtttcatccactgaccatgagtagagatcatcaaatattgacagaatgagtaagggaaggtagtgttgacccacagcactgggcactcaccaggcccagcagtttaaattgtcaggagatgccaggagagttgtgacagcattggctgcagcaaaagagtcattagacttgagtttaaaagctaggagtgtgaggtcactgcagctgtcttaatatcctaaattaaaatcatattaaggcttcatgaatgttccagctgcttcttagttgcctttgagctgctgcatgaagaatgggaggcccttgggttgtttttcgcaggctcctggcttagactgggcaggagaaggcacagctgggtgtggcatgcacagggccaaggtagggagaccagaaacctcacttgggaaacttcatggtccagagacagaatgtatctcagtacaagggctgttgcttgtgtggggtagatttccaagatcttttaaaagccatcaatatagaggctccagagtccctggaccatgattatttaagtcatttattcgacatgaggctccctctcccgcctcatccaatttaccctctgtcttctctaggtcagcctagaaaggaggaactgattttctttaaataaatatgggttgcagcttatgatgcagagggtctaaggacgcttgtgatttctcagtccccttgtaaggtttaggtttggaaccgaattaaaacaccaaaggcaagaagtctaaaagggagagatgattcctgctgattccttctggcacctgcagtgcctgtgacaatctgccccacggggagcccatgccactgagagggaaatggttcaattcaggactggtaagaaattgggctcatataccagccattagggaactttacttgatgagaaaatgagaaccttttgtagttgctaaagagagcaccattcttaatttgacctcttcttggtcatgggagatgggcactttatcggaaactcaagtgctcagagtaagaagaaaaaggaagccgctggtgtgaggaagggaggccagccgcatcttattcccttgtgtccatgctgtgttcttggtgtgcggtccctggagcaagtgcaaggaataagacaaagacatcagtgactgtgtctccgatggacagtgacgctagtcttttgtaagagctacgatgggacaacatggggatgcatgagagctctctcatgagcagcagacaaaaactgttt

SEQ ID NO: 55292 - DNA, 752 bp, Homo sapiens
caggtataattatgatttttagcgtcttcactcctcttggtgcaaatgcagtgtatttagaattgattctgtgcttttgaaaatatcagcctgctgaaatcccttattagcaggaactcactgtggattaaatgaaattctatagcctaaggaaatgtatctgtggctcaatagtctggacacatgagaagtgttacacaagggaatgtgatttatgaaaaagttttctgacttggctgcagttttccttgagtccataaatgccaaaacgtttaggcaatagtctaaatatttacctgctgggcgtgaactgtcatagtaagggctgggtgttggaaagccacaagcggtgggggtgaaggggcgtccttgacccatgctgccccacggctctctctcgggcctcccttcccgacccctctccctcccaccccttcatcgggctgctttctggagatctcaggcctgtgccagccccacctctgctgggcaaagcaagtgaggagatgctgcctctcaaaagagagacccagcagagccctgaatcttgcagctagcttggcatgtttttagttccagggtccaatcaacactaggtctcccagctgtaagagaactccctgagacacttttttgtggctttgttgcaaggctaaaaggacagttgtgtgatcccaatagaaatgtctgcaggcttgagttcagttgagtcctcagcagaaactggcagttgtatcaaggagctgtttgct

SEQ ID NO: 55293 - DNA, 540 bp, Homo sapiens
gcccatcaattaatttttttacatgccatcctgctgggatggcacagggtgaactctgacctgcctgtcttgcagctaactagatggtttatgtgtcttctcctccctctaatgggcctaacggatcgatgcttttttcttcaccttttctgtaccatgagactttcagtgtcctcccactgtgggcgtggcattctgccccttgaccccacgtgacttgctttggccaatgggctgttagcaaacatgactcagcgaggggttgggtgggggacacttgcacttttccctcactcttgctccttctcctttgccaagacagtccaagtggtgagtcatgtggagcagagccaagtttcccagttgtccctggtgtgctcatcctagaacagccaagctgcagctgaccagcagacacgtgggtgagcccagccaagaccagaagaactgcctagcagagccctgcctaagtcactgatccacagagttgtgtgtcagtatttatagtgtgacatgaataatagggtgttattgaggttg

SEQ ID NO: 55294 - DNA, 1282 bp, Homo sapiens
tcccagcaacctcacccctctggtgggatgccccaggcttctgcttcccgagaccccccgggggagaggggtcagctgcccctaatagtgagccttcccgggctcacctctccacgacaggtgcttccaggatcacctcccaaatacatccccctccctccaatgccggtctcagggtctgctttaggagtgaggaaaccaaaccaagatagaggacaaagactgagagtttggcaaaggaaggactcaaagaagtggtccatgatagaggagacaggatggaggcacttctgtgtcgtttgagtctcactatggtcctttagcgtaggtgatattattcccatgtctcagctgcagccattgaggctcagacacgccccagattccccactgaggacaggtgaagctgggattcaaacccaggccactgaccggagcccaggtcccagatgcttccaggcagagctgggggaaatggcatgttctctggaactgggacattttcaaccattccatgaagttaatacgatgacagaaaactggctcattgagtccctgggactgaggagaaggcagtcagagggaggaccacgttttatgctcccgatcgccccatcccctccccccgcaggcctcgtgcttcccaccacccgctcattcattccgcacgttgaacagcctcatctccctcttttcccttatctcaaaaagcccagagctcagctttctcttcaaaagctccgctaatgagaagcacatttgatttcctcgggggaggcagctgtgggatgagagccggaagtgtaaactctgctggtggctgaatcatcgcggtgcttcttaactttttatggcgatgttttctaattttctaaaaacacatagaagaatgaggctcatcgctctcgttatcggcattgactggagtggagttcaaaaggctacagatggtgttgaaatattctccacaggctggggaggccggcgttcagaacccagggccccgccctcctcgggccaggcacggggaaggcaggacccaggggagcagccagcactgcgcatgctgggagtgttcaataaatacaggctgaatgaatgaatgaactgatgcaaccaaaactttctttttctccaaggaaattaaaatgattggcctatgacgacccattaataagatggaatatgatacagtcaaaaacttaatgactgggagaatatgtaatgacagtgataaagtattccccttttatttttaaagtgaaaagcaaattgaaaaaaa

SEQ ID NO: 55295 - DNA, 1528 bp, Homo sapiens
gcggacagcacctggcactgaggaggtgaacgtgactcccacacacgcgggactgaaccagcgccccagagtccccagaacacgcatgggcccgcggggccgcagcccacgcccgggacagccgcccgcagtctacgcagggaggggccgcggggctctggtttctgcaagttctgaattgtctccaaggagcatattccaacgtcagaataataaacttttacagaactgtattgctctgcagcgcgcggggggactcggcccagcgaagagcgagcgccctacaggcctcggcggaggagggcacggtccccagcgcggctcctggccccgcccacggccccgccccagctcccgagccccggcctcgcgcacgcgcatctcgcgggctcgcaggacggccgggaagcaacgctttgcgggcagcgccccctgccgtcccaacgcgcgtggggccctatggctgcgagcagttccggccaaaagccccaggacccggacttggggttattgacttgcgcgtgggcgctgagtcttggaggggaggggacaactcgccacacccccgtcctctccctggagctcgaagcccctttctgctgaaatggggcctccttttctcgggaaactgactttgggggaaactaagtctcaaggggatcttaaaacccaagacgggggaatgggaacctcacaggacgtgggggcgcttttctggccatctctatataaaacctgccgggggcctcagaccctggctcctctgtcagttcccaagacccgtcgcgcgcccacctgagcccggtgcccactggatgggggctcaggctcacctggtcagtcctcacccccacctccagagaccaggcagtcatgcccttctaatatggcggaggtcccaaaagattataccatatttttactgtgccttttctgtgtttagctatgcaaatacttagcattgtgtcgtagcaggctgtgccatctaggttgtgtaagtacacgccatgatgttcacataacgagaaaatcgccaaaggacgcatttctcagaacatacacctgttgtgaaaccacccgtgactgttctgtcctaattcaaccccctcattcgataaaggacagagaggcattgagttgccagaggtcatcctggttgtcagaggcaaaagcaaaaccgaagctctgagcctcgcagcaaccacccacgccaccgcctcccgtcatcatcaggaggcctccccaggtttctgtcccagggagcgcagccggtggacaagtcccttccgctctctgagcctccagtaacatgaaaacactggcaggagaccctccatgattccaggattcctagaacactggcaggacaccctcacccggtgatcactcccaggtcaccccactgaaagccggcagctttctgtatggtctgcatccatgtttttctatttctcccaggagtaattactccatttgttcacaggtacacggcttggcactcaggggccataaattaaagagatgttgt

SEQ ID NO: 55296 - DNA, 1293 bp, Homo sapiens
ctggccaggcccatttactgatgctcagcagggtttgcaaaaagcccccaacgggaggttttcatgctgaaagtcctgttgcccccccatcccccaccatctaattaacctgcacgttactgtaaggaaggttctgcttccgtaattttctttatttcgacagaggctggagaaaaaaaatcataggctggaagaggggagcgatgggcaggccgatctgcagggcgcaggagcaggccgggaggacccagccctccaaggctgcatcagcgcccccgccgcgtgaccagggccaccggtttactgcacagctcccccgtccccagaacgcagcctccccgccaaccccaggaaccaagggtgcccaaaggcctcctacccggaaccccggggcgcctcggggtctctgggccgggtgggccgagtcctggcctccacaggccgcgagcgcagggggcggcggctccgcccggtctggcaggcggggctgccacatcctcagcctctccctgccgcccgcccgtcggccgctctgggctggaaccaggactccggcctgcaagccgtgggtcgccacgcccctgccccctgaagctgcgcgccggccggagactccagggcgcccgggtccgagccgcccgcagagtaaacgggccgctgaagcggggctcgttccccggccgaggcccagcgcgccccctcagccagcatcccccgaacccgggccgcggccaccccgcgcccgcccgcctcccccgccgctgtcagggaaccccggccagggcccgaaccagagccccaggacagcggcgcccagacggtacctgacagcgcctgaggacaaccgggtacacgcggcgtctatgaagcgcaacagtgacgccggagagtcactgcaacttaaaggctgattctgccccgcccccaagacaccctcgccgctcattggctggggcggagggcaggataccaatcgcgtgggtcccgtcctccgccccgccctccggccgcgcatcaaggatctttgctcctcccgcggattcgatccgcgctcgcgcctcctgagcccgccggcctgtacctgagctcaggcccctcggtcgcctcctctggcgggacgagaagagtccttgtccgcccttgctgacgagaagactgaggcccgaaaaggaaaagtctgttgggccccccactgcgcgggccgggtgtggctggaggccgagagacgtgaggctggaccgcccgccctgtgctcctggagggagggaccagccccagctctgccccagccac

SEQ ID NO: 55297 - DNA, 662 bp, Homo sapiens
ggcagagattgccaagagccaagatcgcaccattgcacttcaacctgggtgacagagtgagactctgtaaaaaaaaaaaaaaaaaaaaaaactaatctaactcttttaaaggcagagaaatccaatccaagattccaaggtaaagggcccccacctgtcttacgaaatgggtcacagggacagccaagaaactgtgtgttctaccaatcatgttccacatttgagacatttaatcagaagtaagaattttgactaagaacaaaaaaggctgaaataaaagtttttaataaaaatttaaggaatgagcagcagtatttatttaaagaatattacattgctcgttaattttaaaaaataagataaacctcaattactagttaaacatttactttatatccttatctatttaggtactaagaagatcagtgtgttttgcaatgattttttttattgattccatgatggcaaacttagataactttgattacttttcttttgaggactttaattctgactctttgaagttggactataataaaaacaaaccagaaaagaagaaatttccacagtttattcctgaaattgttgacctaagtaaatgtatggaataaatatatgaaatgctatgaaataaatatattaatacaatgggtattgtaaat

SEQ ID NO: 55298 - DNA, 836 bp, Homo sapiens
aaagagaaattcaaaatcagctgtggatccttttacatgggtttgttctccataagcacatggaatcttgccacttggaagacagagatatagagactgccaaaacacagttaaggtggttataattcagcttattttagaaaaccatgatggaagctcatggctttataagtgaaaagaaccagttatggttcaactaaaaaaaaaaaaaacaagtaactctggtactttgaacttgccttggtaatattattgacttatttatgagtaatgttttaccactgtttatactctgggaggtataagtgtctgggaggacttttctttttaaaaaattacattttttattctttatagagatggggtttcaccatgttgcccaggctggtctcaaactcctggcctcaagcgatgccccaccccccaactcccagtctcggcctcctaaaatgcaggacttacaggcgtgagccaccaagctgggcccctggaaaaacttttctaaaatacacaccagatctgtatagaacaagcatggcaaaggaggaattagtaacacagggttctttctttccagcctgaatcccaaatgacgtcagtgcaaagggcagggtttctttgtacagaaacagctgacaagaaagccatggaattttctgcacttcactgtaccaaccaccacctgtctgtgacctccatctacctgagctcccctcgccaataccaagccagggtcttctgctgtactcccagagcccagggtagcacctggcacacagttggtgcccaataaatgtgcaaaagaagagaggatggaaactttagatcatatattt

SEQ ID NO: 55299 - DNA, 1176 bp, Homo sapiens
ctcggctcactgcaacctccgcctcccaggttcaagcggttcttccgcctcagcctaccgagtagctgggactacaggcatgcgccaccacacctaggtgatttttgtatttttagtagagacaggggtttcaccatgttgaccaggctggtctcgaactcctgatctcaagcgatccacccgcctcagcctcccaaagtgctgggattacaggcataagccactacgcccggcctcaattttgtattgtactttttctttctttctttaatagagacagggtctcactatgttgactaggttggtctagaactcctgggcacaagctgtccgcccgcttctgcctcccaaagtgctgggattgcaggcgtgaaccaccgcccctggctacaggtgccttcttgtctcaatttgcctttgacctttcttagggacttgttttctgcttttcctgctctttgtccgctgatctcctgggaagaaagcttccgaaaaggacaccgtttcaggggcgagtgacgccggggtgcccaggccgcgccccagttccgggtttgcacccggtcttcttgccctgccccgcccgcgggactacagttcccaggcgcccctgcgcggccgcggcgccggcgccggcgtcggttgggacgcggagctgaggagcagggccgggcgccatggcaccgtggggcaagcggctggctggcgtgcgcggggtgctgcttgacatctcgggcgtgctgtacgacagcggcgcgggcggcggcacggccatcgccggctcggtggaggcggtggccaggtgagtgggccccgggacgccgctggggccgccgagctctaagctcagcccgctccctggctgccggcagggggcggggcggcagggggcggggccgcggcgcaggccccgcctcggtctcccccttcccaccccggtgcgcgcacagtgctgaccacggacgaccccactgttgcccccggcgagcaccaggactctgctggttagggctgcgcggtcagacagggcggccacctggtacgtgcgctgctgagcgcttgacctgcggccagtctgaattgagatgtgctgtaagcgtaaaatgcataccgattaacaagacttagccgggcgcggtggctcgcatctgtgattctagcacttgcagaggcaga

SEQ ID NO: 55300 - DNA, 1178 bp, Homo sapiens
gggcagcctcataaagcaattcccacccaggaccgccccgatcgatcggcctggtgctgtggagccaggcccacagcccttccgtccagtagcacctctcaatcccctgtgtgtctgggtgccttcgggatcctgataaaacgtaggtgcctcctagtaggtctggaacagcgaaggccagggccaggggatctttgaagtccagctggtcctggcaccccagtatcccctccttcatgcccggcttccctggtaccatccagccctagggacacaggtccctgggagtagcagcaatagtaacaacaacaacaacaacaacaacaacaacaacaataataataatgtaggctgtgggcctgggctggaacttcatctctattgcctcatccaacccccacacgcggtgtggcacctgccggaggggtctggcaggacattgtagggagagggccatttgtttgcatttgtttaagccaacaggagttttcctgatgcaacctggaccttggacaaggggtgtttgtcgagaacgtgctgtcgtcacctgtggtcccatttgctgtcaggaggtgaagcactttgtcttcagagatgggagccggtgctctttcaccctgggttctgtgatttcagctgtcatttcaacattttaagtttcataagaaataggtggcctccttatgtaaacattctcaccagcctgtgaatatacagagtgaaaagtccaagtcctccatcctcgaccaagtcccagtgacttccccagggtgacacaatacatccttttccttcgtattcctcaaaagcacagaggattttgagatgcagccttccctgactcttgtccagttctgcgggcacctgccccatcactcttgaatgccaccgccccaccattgcccaaggcatgtgtttggttagtcacaggtcactggaggctggagaccccttgcaggtccccgggccaggagttttgaattctttgtagcctcagagcacttatccaaccaaatgaaattttgagtagaactccaaaattatatatatataatatatatatttatatattatatatatatttatatattatatatatttatatatttatatatatttatatattatatatatttatatatttatatatatttatatattatatatatttatatatt

SEQ ID NO: 55301 - DNA, 1384 bp, Homo sapiens
agctgggcatagtggcgggtgcctgtaatcccagctacttgggaggctgaggcaggaggatcacttgaacctgggaggcagaggttgcagtgagccaagatcatgccactgcactccagcctgggtgactgagtgagactccgtctcaaaaataaaataaaataaaaaataaataatatgatcttcatgacagccctgtccagtagctactgttggtgcctcattttacaggtgaggaaactgaggttgcagagggttaggtgacaagccacagtcatacagggaggaggtgtgtctgcttcccgagctgagctcccaccttacttacaggggcctggcctttgtcccctgcagccaccatggccctcagggacgtcgggctgctgctgaggctcctaggctgaggagtggaagaaaggagccaggatccccacccctcacccccacatgccacgaggcatttcctgtccctctgggccttagtatccccctctgtgaaatgagacactcgggctgtgtggtctccaaagtctctggctgccgattcccatgtacttcattctaaattgcgtttattgattcctgggacatcgatgcttgtgggatcaacatgtccctgtgatctgggctccgtggcacaggcacttcagagaacactctagatgggagttctgccggcaggtgaggaggcgcaggtacgggagggtgtgctgcgtgttttataagtgccctagctgggggccggccccagcttgacctcattgccgtcccgctaaggtgactgcccagctgacccagaccaggaggcccagctaggtcccagctcctgcgtcactgtgtctcttctctccattcaaactttggactctgatgactcaaggctctgtgcaggtgctcaacagcgtctagtggacctgttgccctggccggtcagctggaaggaggagcaagtgcaggaggctcagctggagccagtgtgaggccgtgccctgtgccaggggcccgtggcatctctgctgtgcccagcctttacctcgtctccttcatggcagccctggagagctggaaggctgggcaccaccatcacccatcactgtttatggctcgggttccaagactccaccagcctggtgcgcgcgccagggtgggaagccagaccccacgcccaggggacagatgccgatctgttgctgctcctacctgcaggtggtcccccagcccaagctggtgtgcttcatggtgcagggcacggggtgggctcatgcgcacatcagtgtgggcgtccccggggcatatgtgaataactgtatttttctattgaaaaaacaactctgctctgcttacggggctcctgcttgaccttctgttttggaaaattggattt

SEQ ID NO: 55302 - DNA, 1059 bp, Homo sapiens
gttggggccactcttttcttggaacaagagccctaaacgtgggaccctaaacaacacccagggaggagcagcctggcctatgagcagggggacaccatgaagctgggtggacgggtggggaggcccgactttaagggacctgcttcctaagcaaacaggccaggacagaggctgcaggtataagccctgccctgccaccatgatggtgaatatgaggtgtcaacctgattggattgaaggatgcctagatggctggtaaagttttgtttctggctggttaagtgtgtctgtgagggtgttgccagaggagactgacttttgagtcggtggaccgggtgacggagacccaccctccgtgtgggtgggcaccatctcatcggctgtccttgtggctggaacaaagcagatggaggaaggtgggaagactttgtttgctgggtcttctggctttcatccgtctcccgtgctggatgcttcctgctctgggacatcagactccaggttctttgacctttggactctggtttagctggagctctcgggaggtgtcggcttccctacttttgaggattttggactcggacttggccattaccagcttctctcttccccagcttgcgtacggtctgtcgtgggacccgcctagtgatcgtgtgagccagttctccctaataaactccctttcatgtatagacatggatcctatgagtcttttccctctggggagccctgcctaacacagtggcatagagctccaggcaggcccctcacctggccttcagcttcagtttctttgcctactgggctgaatattggtgtcaccacccaggatagcaagtccccatcagtgtcactgccacctgtcgaagagatcccccagcccagcactcgggtctgtgagtggcagtggagatgacactaggctctaagtagtggggctgcgtgactccagcgcccctaggaccagcaagggcacccagagcactgtgggaggactggtgccgcctccctgcccccctgctttctcctgggccactgggctagacatggggcctccct

SEQ ID NO: 55303 - DNA, 747 bp, Homo sapiens
gcccaagctcctgtgtgtaccccatttcctgccaagcgtgcagggaaccctgaccccacatgccacggcctggttcacagtgggtgcatcgtgcagcctgggggcagagggtaggtaggaaggaagggcccacccggtcggccctcccaactgggcctctgtttgcacagccctggggtcctgaggcctacaccccaggatgccgtgggtaagaacagaccttggaggcccagagccacgcgtgtcctctgaatggtggccaacccaggggcccctctccgagggcaccccacaggccacacggtggcgacgtttctgcaccaggccccagatggcagatggcctgcccgaacacagaaggtgtgggagctgacgccaaagggcctcccggtgctctcacaattggaaaacaaacattttgtttctgtggtgtacattccagccagcacacactcaggacaggactcgtgaaaccacctcgctcgcagcttggcgtgaagagaattctttgcctaacaaaagtcaagggacctttccaaagcacacagggttctggcggggggccgaggctaatgtactgcctgcgcccacagaccttgaatagagtcgaccagcagggctcacagttttgggggtggcttctgagcaggactagcgatgcagaaggtatgtccaaggctctcagaggggctggtgggcactcgttcgcattcagctgcctggggccacatcggggtgctgaagaca

SEQ ID NO: 55304 - DNA, 816 bp, Homo sapiens
aaaaatccctccttataaactcatgtctctgattctatttccccatgtggctaaaccttcaaagaaagtcacacagatacaaggaacctgaagatcaccatcaaaaagtaaaaaataatcatgataacagtattaaatagaaaagcagcttccaatctgtaatcagaaacaaactgctcaacacaggaaaatgttttagaatctgctgctctgtgtaaaaattaattgcaccctggtatttacttgctgtccagattgtaaatcatgttttcctgtttacttcaattagactttacagtgggtgttactgaaattgctcaattacaggccagctggcaagcacaggaaaattaccttctactgttcttcgaaaacaaggttcatccaaagtgcaaaagcagggaaggggaggagggaaatcaatacatgttcaggaagggagccccggggagcctgaagattcccaggtcgcattgagagacctgatgcacaggttcaataccacatcgatctagaagtgacatgttctgaccaagtgtgatctgttcaaggaaagaatttcagaccactcctgcaagttctggccaggcagctgagccagaaatgcctgtcagcccccactgcaggcttagctcaggagcaggccagagaggtgctcctggactcgcctttcaaaggggccttttgtgcctcctcagtggtggaagcctaatggcagccgtcatgtttctgtgtgtgagccccaattcagctctacggcagccagccgtcggcacaaggcctgagaggtgagctgcctgttccctcctcccccat

SEQ ID NO: 55305 - DNA, 1278 bp, Homo sapiens
acaagctctaaactgatcttcctaaaaacgctgggtggcaggaccagcaaggtgagaaatcagaggcccagtgagggttacagggcaaattaggtccagcaagtaggcagtctgtgcccactaccttccagccaggaaactgaatcgtttgactgccaaagggattacaggggagagcggttcctacggcccggtccccaggatcatgccacagaggggcttccccgcatcctgcactccttctggagactcaaaaccacagacctcttttcccccgggctcaggagccaggctccttctcctcacccagatcatggagacacccagctgcagagaacttagtctttccacttccaaacatgcagagaagctgctcccagccagcggacagaacctccctctgctcccaggcccatggccaaggccaatgccagagcaaggggaattccaggcagggccgaggcctctcccagctgggctttgtctgtcagggtgcttcaggcttcagccagagggcagcctgggagggagggtggcctccacggggtgggggcaggcagcagcaactggaacctgcataagccgcctctcctgcacaaggcacagtccagctgccaggacacacagcggccccagacaggacctgtacaaacccagctatccaggagctcgagggcccacccacgccccctcctagaagctgcagcatggcacccaggcaggagttgccagggaacgcccactgggcaatgcacgtgtcttacagcaggaactctcctcccctggtgagcactggatggaaaagcagcagggtgtggtagaaagaatacagggctgaggtcagctgggccaagttcaaatcccaacctggggtgagtgatttctgcaggcagcatgtcttcagcaatgaaatcgggctagtccctgagccacaggttgtgctgaggattaaatgaactaatgaagcaaagtgcccggctccacactggacacccagcagatgtccaatcaatgtctgctaaatgaatgtggaaattgcagccctgagaaaaatagcaattctcctcttctcccttcactcggcccaaacccaactccccacagggggaagagcccttattcactactcaccaccaccacaacacagccgggcagactgacacacttttggcaaagaggccaaaacctttttcagcaagctcacctttacaaggtttcagcaccttccattgggactggggggtggggacgggggatgggtagcatgtttcacttggc

SEQ ID NO: 55306 - DNA, 1487 bp, Homo sapiens
aatcttgccccaaaacgctgtgcacaggaggtttggattaagcatcaaagaagttaccttaaaacaaagttgtttggcaaagaaaaatacttcactgtaagaagaaccctagggaacggtaaattgcttttgaatatggacttttcagtggcgcagtcattaatcatgttaatgtaaactgcgctacaacaaaaattttctaagcaagtctcagggtacatcagcatatctaagcctctgggtttgtttccaaagttcacatccaggcaggcaatgaaactgctgttaatggggtcagctattacagtgccgtccccaaccttgagccataataaaggtgactcagccatccagaaaaaaccctcaaacttaggcaggaaacaaacaaattaatcagagaaagagagtcaatgatttttggaaagtgtatccgttggacaagtttaaacagaaactctccctggatgatcagactgacatttcagaaaggagttgagggagaacaatcaacactcctcccagcacccaagtcccctggccagaccctgttttgtggcgtggaggggagggtagcagccggacgaggcaaggaggaggagagtccagcagagctaagcttcgctgagccccgccagctccggccatgtgctttgtgttggcaacgaaccggttctttcaaaagaggaagagtctgacaaaaaggacagctgcagcaaagcagaagctgagggtaaaaacctctccaaagccctgagctcgggattctcccctaaagttaaatcaaaacaccactggggtttgcaaggactagttcatctattagtcttccccttgctggatcaattaaagagagtccctccacatctggtttccatcgaaaaccgaaacttgtattatcagcatattacataacaaattatgcctgcaggtttcttttattacacatcagagaggtgtgcgtggtggtggtaatgatgggggttgtgccgatctgagtatttgcttatttcagtctttttatttaaggacaagaacagaagagttttccatacaatgcgcaatttaactgcagaaagtcacgctgcccaaataaaacatcaactgaacaatctgaaggtgggcccagaactcagtcttcagggcccaaggcatcgagcggtgggtgagaagagtgtgctttttaaaagagctccgcagcgtcccctgctgccagctcctaatatttaaacacagctctctcctctctggcctccaaaaggggaggagagcaggctggcccttcctgagcttcaatcaagggtcaggcgcctgctcactggacccgcttaaaggaacccaagcccactaggcttctgtagagaggatggagaggctagcggggcagtgagagaatatataaggggaaagagaaagactaaaagatggaaacagaaagagcccaggaaataataccaggacttcccataaaatgtcaattaagcgtaacc

SEQ ID NO: 55307 - DNA, 2108 bp, Homo sapiens
gcgccccggcccgtactacaagcattgttccccaagtccgaaaatgggggtggagagctgggggctgggggacaaggtgggggggcggggggagcgagaacacacttgggacaacacaaaccgcaaaccctccccggattctgggtgtcctcgtttctttcgtctctgccccaagagaaaccctgagcggggaacctgactcccacgggcttgcaaaatccaagactagcaaaaatgtgactcgaccagtgtgcctgtgccggacggcccttctcgccatgtgcaaaagccacgccggcgcggacgcccccactccgcaagccccagcggtggcctccccgcgggcttcccccgcccgggacagaatgccccctcacccccatcctgaccgccccggacagtccagcagcagcggagcccgccgcctcgctcccgcaccccgggggtggcgggtgcaaacttccgcgaacaaaagagttgtctgcaaacgatgcgggaacttcggggcgaatggggccgcccggctcccgagactccgcgcctcctccgcagcggctagtcagggctcaagttgagacgcggagaggacacccccgggcgcagcagtccccgcgcccgcccgccctggcctggggagcgcagacttttccgccgcagccaggcttgttcttccccatgcctgtgctctgacaagtctcacgcctgcatcaggggcgagaccgagcgcccggagaaaccgcccgacccaacccaaaggcgaaacaaggcagaaaaaaaggaaaccagcaacattaggaaaaaagaaaaaaaaaaggcaagcccattgcgcacgcgagccgggctccctccagccagcggccgggacgcacacggcccggacctcgctcggggccagccccccggccaccgccgccgccgcccggccccgggtcgcttactgtgcgcggcggggcgctccgggcgcggaccccgcgccgtcaccgccagcgctcgccaagtcgtccggggtgcccgccgcgcgtccgccgcgcgcacgctcgcctgccggcgccgagcgctttgtacgagcgactcccggggaggaggaaatcgacttgtcacttcctgaagtgtttgcaactcgtccctttaaccggcaccggccaggccgcccgcacccgccgccgccgcggagccgccagaccgcggctgcgtgaactcggcccggcgcttagcgggcggtgtcgcgggcccgggcgctaggcgcggcggcggcgtgcaggaggcaggcggcgtgcggcggcggcggcaggcgagtgtgcagtgcgcgcagccgccgatgggcggggagtgagggactcgcggcgcgccgccggcggggctagagggcgtcctgcgggctcagccgcgcgccgctcgccgcgctcgcgcctgcgaggccccgggacgcgggaagtggccccgggcctgggccgcgccaccgcggctgcccgggccccgcgccagaggccctacgggcttctctccccgcccccagcacgagccgggatgaaaacgctgggccgcataggcttcaggcgtccagcttccgggttgttagatgccgaggttcaaaagaaacgatcacttcagtggcgtgcaggacagcgggcgggtggggtcggggaggggggaccttaaagtgttgtcacactttgggaaaataaagcgcaaatttcctaactcggggcgctgtgactgtgtacttcagaagccacatccaaaatacatgcaactggcgaaggaaggatttgtggttgctaagcagaggcagagcatgtttagttctgtaacttaggatgttgacttaagttcaggaatgtaaccctgatagaataagcagagtattttcattgtgctgctcacctgggggagggggattgttttccttgtgaagccctagatttcccattactccttcctactggtgtatgttattttattgaccttgtatccaaaaagcgatttttaaagagaagtttttttaaaactccctatgcctgttttgtgttctcctttgccaaaaaaacaaaacacctcattactttacatggattgtgtctgcgccatttgaatggttctattcataa

SEQ ID NO: 55308 - DNA, 1775 bp, Homo sapiens
gtagagacggggtttcaccatgttggtcaggctggtctcgatctcctgaccttgtgctccgcccgcctcggcctcccaaagtgctgggattacaggcgtaagccaccacgcacccggccctctgaatccttttcatttgccgtctcttttcctacaatgattctctagaatccctgctccctctcatcccgccaatttacctctccccaactgttccctgcagccattcatccacccacattaattcatttaataattcctgagcgtctgtttgaggtcagatcgctttctttcaccccaagatcccccactatctccccgctcccgcctcgggtcatccgctattcccaccccacttccagctcccacatccctcccctcctactcagccttttcggctcccaggcccagcacttctccctcggtctctcactctcgccgaccagccctattcgccagcctcgccctctccccctttcccccaagcctggccctcaggttcgagactcccaaaaggcctcccaggagccaaagcctgtcccgcacccacaagccccttgggctccaatcccttgaaacgtcggttaaccgcgtagggcgacccctagggattccactctttgaaatccccgtaagccccccgccaggtggccctgctcccgtcacgcccccgagggtctccctgtccctgagccccgggtctccaccccgccgtccccttctcggggcccaggcagggcggcacggctcatcctcccctgcccagcgtcacactcactgctcgcgggtccccagcgccgacgggacgaaaccgtcctccccgggactgcccttgtccgaccgcgccgccaccgcagcgccaccgccgccgtcagcgcccgagctcatttcgctccacgtcctggacggccgttggggccgccatagagacggggcacaggcagagcggacgagcggaccggcgcctctaggcggcgggaggccgccctctcgactgctccagcccccgcgctggggctgggatggggacgcgacgccctctgctctacccccggctccctgcgccggcggggaccgtgcgctctccccacagcgttagtggcatccccttcgtcgaggtccaagagcggctgtatttggggactgctgttcgtgagggaccattagaggtattgcattttggaaaacggctggcttccgcaccgtggacacctaaagccgacgccgctctacccaaacgcagaaatcacttcacctctccactgcgtgcgcctgtctgcgaagcgggtgcgagcgtccatccagttatttggctccttggcaagaggccaacttcgtttctggctaagattctgacttgaaaaccgcgttctggcctcttgtgacttgatgtcaccggtagacgtggaaatttatgtccagggaaaggaatgccctgcaactctccacaatacgccaaacacggggatcagtgtgttgtggaagaaagactgctaagtgagaggatgcccggataagcctcagctctgcctcgacccaggcacctggccttgcttaagtttgttttgttttgttttgttttgttttgttttttgagacgaagtttcgctcttgtcgcccaggctggagtgcaatgcaatggcgcgatctcggctcaccgcaacctccgcctcccgggttcaagcgattctcctgcctcaacttcccgagtaactggattacaggcgggcgccaccacgccaggctaattttgttttgttttgttttttagacgt

SEQ ID NO: 55309 - DNA, 1400 bp, Homo sapiens
gtttttgtattttcaatatagacagggtttctccatgttggtcaggctggtctcgaactcctgacctcaggtgatccgcccgcctcggcctcccaaagtgctgggattacaggcgtgagccactgcgcccggctagaatgttgtcttttaatactaaggtttcacttgcaaagggaaagaactgtttgcggaactatcaaccgctgtctgaggcgtgtcgggagcgacacccctgcggaggatacggtgccggggtccttccgatcgcaaaaaccggcgttcctcagccttcaagactgtgagcgctcagggccctcggccgctgcccgccgcagactccacttcccatgatgccaaggggtcgggccgtccggaaggccgtgtgccctccgcggggcatgatggggtagctggagatttccatcatggcggcgtccatttcgggctacaccttcagtgctgtgtgtttccacagcgccaacagcaacgcggaccacgtaggtgccgggccccctgccgcgcccgctgggggctttcagcctctgtctcaggccggcgctcgcggccaagccgggacctcatgcggctcgccccctgggcaccagggccggccggaggagctggtgacccgggcggctcccgcccccggtgagctcttgcctctgggggctccttcgcccctgggacaggccccctggcttcgcgctctcagccgctcggccgtcccggcacagccgtctcccgtgcagcaaaactgtcccacctggcctcctgcagtgtcaggagtcgctcggtggaaaccgagcgcctgcccctccctgaaagtcaggcttctagacttaagaggggcgcacggggtcgggaaggaatctaaaggccgggcgtttagtccagtaggcgaggtactcagccccgcccgccggtctcgcaggttgtcgtgggggtgctgcgagtgaaaccgtggctgtcactactgatacttgttagacacggttgtgtgttttcttcgccctgatgcaaaatggagaatgtatacaggagcgttcggtgcagggtctattttgtatttccttgaagttgcgtgtttagttctttgtgactagttctttcactagtcacagtgaaatagggaagtgacaggcccactactgagtgatgggaaatgcataggctgtgagcccacaggaggagcagatcctgtctgtttcagtgtctttattttacaaattgtcttttaacgtcattggcctctgattggaaatgctttgtgaaactagatcacttctctcttaaaggaggtatataatttggccaccaaattgggggattattttaagtgatgttaatagtgaatgattcaaactcattaaacctatgtgtggggtttttggttgtcatta

SEQ ID NO: 55310 - DNA, 2687 bp, Homo sapiens
agacctggaaggggtcagaggctgccgcctggctggccctgctgttggaaagaagcctggggaaaggtaggaagaactgtggattccctcctggagcgagctgcccttcccagcccagggtgggtatgcttgggagtaggaccctctggccacgtgcaaggaagccctaccaggcccacagcccaggttatgcttgacctcttcccctaacagactccaggcaagtctcctgcctcctccaacctgttttcttcccaaccagggcagcagagcaggtcctgctggctggcctttaaagtcttgcttttaacttagccccatagctgggatagggtcaagtgaggagacctcgtgaggctaaactaatcaatgccctgaaatgatatttctcttatcagtggatcttccccctggctgcacttcagaatcccgggggagcttcagcaaataccacggccggggcccagccctagggcttctggagtagggctggggcccatccccggggcttctggagcaggcctggggccactggtagggttcaagagctcagcaggtaattttatttattttttgagacgaagtctcactgtcacccaggctggagtacagtggcacgatctcagctcactacagcctccacctcctgggttcaggcgattctcctgccttagcctcccaagtgcctgggattaccagcgcccaccaccacgcctgaataatttttgtattattagtagagacgggatttcgccattttgaccaggctggtctcaaactcctgacctcaggtgatccgccctcctcggcctcccaaagtgctgggattacaggcgtgagccactgctcccggcctcagcaggtgattttaacgagcagccagagttgagatggctagtctaagcctctagtcattcaaatgtttagcctgttgaggctggaagagctccagagaccctccgtctggccctcatcttacacggggagactgaggtctgcgaggagcccgtgggctgggaatgacagtctctgtttcctgccccgcctaggacctgagaccacattccttttttagagcacagcgtggcagtgagccagcatctcagccccaaaacaggtcaggccagggaggagtccaggcctggtgaccatagctgctgtcactcagggcacacccactgcctgccaggctctgggcggacaccttccttccaccacataggtggcattatccacgctttctggtgatgacagtgaggcccacttggccaaaagccacttgggaggaagtgacccagccaggaatcatcccgaagctgactgaccctgaggcctgtgtgtgtcccatgaacccttcctctacccctccctcccaggggaggagaccaccagtgcaggagtcagcggacaggggccccttcctggcactgccagctgggccaacaggaggagagagaggcaggagcaaagacctgcttgtctgagcctcggtgtctcttgcagtccaaatgccatctggtcctcagtacaaatatatttctaggaaatcaatgatgtccgggctgtcgcagcctcacctctggacacttatataatcattaacaaatgtctgccattaaagagaaatgactgtcatttgacacccaagctccatttccaaacagcagactggtatttaccctcctcctgaaaagagtggattctaaaacagacggctgagctcacctcttcctgatttgcaggaaacaatcctccaaatgtaaaggtctcaacccagcctcccagccagggagttctctgtccataaggttaaggcttctattcagattcagctaaaatagcacttcatgaagttgactttcttttcttttatttatttaatttttgagacagaatcttgctccgtcatccagaagtgcagtggccctatctcggctcactgcaacctctgcctcccgggttcaagtgattctcctgcctcagcctcccaagtagctgggattgcaggcacataccaccatgcctggctaatttttgcatttttagtagagatggggtttccccatgtcagccaggctggcctcgaactcctgacctcaagtagtctgccggcctcagcctcctaaaatgttggaattacaggcatgagccactgcacccagccagccattgtgcccggccccagcctttcttctaaaggaaagtgtttaactatgtaggcaggaaatgcactcttctacattttagattacaaaaatgcttccaaggacacaaggcgttctcttgtatcctcacggctgtaggaagcccttgagtgaagggtagacggtggggctttgagggtcacagggcaagtgctgggcccagcatggccacggactgacttcaggaactcggacagatcacttctccctgcgcctccacctccccaccaccgccgtttggtaagggagctggagcagctcagctgtccacaaacctggccacccatcaggatgacccggagagctttttggtctgctgccttttaagctcctcgtctctcttttaagcacagccaggttcgggaactcctggccagcaggctgccaagcccccagctctgacggtctgagtgtctggtggaaagctgcaaagcccttggcccgccagcatgtctgacctgatgttttttgcccacttcaatt

SEQ ID NO: 55311 - DNA, 728 bp, Homo sapiens
tgctgtagtagaagaaaaaatcatgatgttcttaaaatacattgtctttggatagaatattctttgcttaggagaagggattcaaaatgtcagtagctgtgtcctccaagtaaagctctggaaacatctattcctttaaatttgctctgctatagtttttattggctggagagcctccatttgtccttccagatccattctccccctgccatgtgccccttgagacagatagaccagccaggactgcatcaaaggcttctgagccctaaggtcatcagtttagtttggccaatgagaggccctggcagagactggagagaggagaaaggcgtcagaatattgaccctggcttgctccctgctgtgcttctctaggaaggccactgctcctgccaggtggccctccccagcaccaacgtctctctctgcaggatttggtaatggcaccctgtcattgccagtcagggctatttcaccatccttgctggttttcttcaaccttgcccaataccttgtaaaataatcttaattttcccactggagtatgctatttatttctgcctggaaccctgactgacatgcaagtgtaacaactacctcaaaaaatgggggacagtggttattttgcctatgacttgtttttagaaaatatgttcatcatgaataggattaaaggcaatgcctgtaaacttcatctgctgttcgtgttttactgccagagttgtaaat

SEQ ID NO: 55312 - DNA, 1291 bp, Homo sapiens
agacagggtctccctatgtttgagacagctggtcgcgaactcctgggctcaagcgatcctcccaccttggcctctcaaagtgctgaggttccaggtgtgagccactgtgcccagcctgttctaaattcttgagcaaagtttaaatgtgttaggtcattggacaaaagtagtcagggtgaaaatatcctgacgtataaaatcaagaaagtaaagttaatcaattcattcaacaaatacttcttcagtaactgtgtgtgccacgcaccattctgggtactcaggatatatcagtcaaaatatctcacatataggaaaggtactttctgtttactaggaagctgttaaagttccaagtaatgaatgaataccagcagccaatgagttaaggaattgtagaattcatgcattacctcttatgtggaatcactgaataattttgtatgtcataaaaactacatttctttctgattagcccctttaaaaattttagcttgtgtattttaaacttacgtctactataaatctgccatattgaaggtaatattgaatattgtgatcttggttacactgaaactgttgtgcagatttttctccttggtccactatttgaatttgtagatagtttttgaagcaaataagtcatttgcatgaatcactttggtgaatttaagaactactcaaatgacgtcatggatactttcgaatattttgaaatatttttaaactttgtggtctccgaaatgactggaaagaaaggaatgaaaaatattgtggcattcctaacttcactactttggaattacttttcgttaacatcactttagtgtttggcaaaaaggcagcatatttttaattccacgagtattgtataattaaacatgtaatgaagatttaggttctagattagtacattttgtcttgtataagactgtgccagccgggcacggtggcttacgcctgtaatcccagcactttgggaggcagaggtggccggatcccaaggtcaatagtttgaggccagcctggccaatatggtgaaaccctgtctctgctaaaaatacaaaaattagccaggcgtggtggcgtgtgcctgtaatcccagctactcaggaggctgaggcaggagaatcgcttgaacctgggaggcggaggttgcagtgagccaagattgcaccattgcactccagcctgggtaacagagtgagactccgtctcaaaaaaaaaaaaaaaaaaaaaaggctgtgtgtatggtatgtgtgtgtataagtgtgggtgtgtaatgtatatgtat

SEQ ID NO: 55313 - DNA, 616 bp, Homo sapiens
actcctggcctcaagtaaacattctgcctcggcctcccaaagtgctgggattacaggtgtgagccactgcacacggctgtcagcattgaaatgggaagatatttgcttatacaaactataaactgggtcaatatccactctgaggtggttcacatgggttagacttagagcatatttgaggttgaccagatgtcaaccctgcttctcagctttccaggtgttctcattgagacatgtcttgcccctcagtgagtcactcatttttcccactgtctccagtctgcctttctccttcctccttgctcggcaaatcatattcacctgcaaaacacagtcactgcccatctctgttttccaagggaactgcatggcttgtctcctctgtgtcctatgctgggacattactcatttgattatttgatatggaatttgcctctctgtcctgaaacattcataaaattcaattttccactaacttgactagggtttcttcaccttttctctgtcacagccagttcagaataatttttaaatgcatgacagaaatgagattacaaggaagccaattaaattgaaatatagttattaaaatgtttttaaaaatctgtaatattaa

SEQ ID NO: 55314 - DNA, 978 bp, Homo sapiens
acctcaagtgatcctcctgtctcagcctcccaaagtactgggattacaggcgtgaaccaccatgcctggcctgaagtacttctttagtaacctactcaataatgtaatatgatctaaaaaaatctatgatttctactggtgtcagggccatagatgtattaatactaccatagtatgttgactacactgacaattgttataaatactgcatttcagttaaaagttagaagaaataaagatgtattttctttccatccaagttcatgggcccctccagggcatggagaccctaagttagggattgtcctccactggactgttggcccctgttgtagatacagccttacctgtctctgaattgctgttctcagcacagtacctgatatggggtcattcctcagtaaatgttacctggattaaatgaaatgcagagcgaggaaaccaacatttatcaaacacttaagagtattgccaggcctttcagctcttgtctctttggaccctcagtaactgccagggaaatatcacccagaatttttcagatgaggacactgaggacactggcactcagagaggacagcaggatttcaactcagggctgtttgactccaaagttcatgctctctctgctcacagctttgcctcttacaaaacttccccagataagatcacaagcgaagttgtttcagatacttgatgtttccaaacttcttaaaaagatacaacagccaggcgcggtggctcacacctgtaataccagcctgtgatcccagctactcgggaggctgagggaggagaatcgcttgaacccgggaggcggaggttgcagtgagccgagattgtgccattgcactccagcctgggcaacaagagcgaaactccgtctcaaaaaaaaaaaaaaaaaaaaaaagacatagtactggctgggtttagtggctcacgcctataatcccaacactttgggagactggaggatca

SEQ ID NO: 55315 - DNA, 3558 bp, Homo sapiens
acagcatcattgtttgctggccatagtgaagctaaacacacattcttgaccacatttatgcaaagagaaagccagaacaccatgaatagttttactaaatgaagtcccattcaaattttaaaaatctgattaaactctgaataatggtcctcctgttgaacctgaggtatccaactgctaaacgccctttggcagtagtgataggttttctctaatagataacttttaaatttacagcttttaaagagttgctgtcttttatgatctttcaaattctttcttctcctcacaaaattttaagcatgaaaactacaaggtaaagtcccactgggaaaaaacaaagctctctagctagaaaaatttcccatactcatggggttttaacaaatggctggcttattctggctatttggttacttttatagtacaaaaagaaagaaatacacatattctgtttagaacttggttccaggtgattctcctaagcagtatttttttccatagctgtaatttatcctgggcctgaagataggtaaggcttatttacagaaataagtcttattaggaaaggcttatttctaatttacagataaggcagccataagaaggtcggattttcccaagactagagccagggagtcctggaggagagcaagaggcaagctctccatgacttttcatcgcgtgtccatctacgtacgcacacatgtaccatgcagaaagcaaagagaaatatacacatacatccatatacatggatagccccagcaaaggcaggggtaaaaatcggacactgcaaaacataaatttaaaaaatcaaaccatcacaaagcacctagagctttatcttccctggtgttttacgaagagcttcaaagtcccttagaaaaagtaaagcagcatctaggttataggtagatcacttaggatacgtgagacctgggggttaacttaaaactctggcgcatctgtcgcagagaagaggcaaagcgcgcgtccagacaccgccgaggacgccctccaggccgccgtcagccggcgcccccgagcgccacgcaccccgcggcagtccagcaccctcaagaccgcagtcggccgcggaaaggaacgggaactgggccgacgcgcgccgccgactcacaatcagggccgcgcgccggctgacgtcaccctgtgtcgaccagccccctgagcccggaaagaggcggtcgctcattggctgcgccggcggcggcctcggggccaatgacagggcggcgagcggcggggtctggccttgacgttgtgccgctcgccgcggggtttatttggctccgggtccctcggccgccgccattagggtccgcagcgcccgcggccgcctcccacacctcagtgcccccgccccccggggctccccagtctccgcgcctcctctctgctcctctcccccggcctccggcagccgggagccgcgcgcggaccctcggagaccatgtcctgactgaggggagagggcggaggcggcagcagcggggcgggcggcggcgcgaagggaggcggagaggggccgggctcgactcgtagccgcgggctgcgcggggagtcgccgctgccgccgccgccgccgccgccgccgccgccgccaagcgcccgtcggacggggaggaggagcaggagctggaggaggagccgccgccgccaggtaaccgggccccggggggcgccccaccgcggcctgccgggcccctcgctcccaggcggcgcccaggttgccgggcctcacgggctgtccgcccgcccggcgccccaggggcgaccgcgtcgcaggcgcggggagggcaggggcccgggccgccgctgtcggcgcttccatcttgggcgctccggttgcggggacggcccgggggctgtgggagggcgggtccgcccagcttgtttaccgaccgccggccgcccgtggctggacgcggtgccggtcccaccgccgctcttccgccagatttccccacaacttcttttcctgccggagacggatcggcgagtggggtttcgctcccactccgcaataggccgtaaacacttgggtccatcgccacaagttggttctggtgtctccaaacttgtatttcagtccctcggccgcttgctttccacctcctgcggtggcctccagttgccatttgtaggaaaataaaggtgggggacgacgaggcgggtggggaggaggagctggagctagtggaaagattcgtctacccctcctgctcgcagtaacgagtgttcagtgcaaggatctgttttttctctgctatggtttggtgcgggtcatttcacagacaaaagaactgtagtgaatgctggcattaagcgcaagggacaggcagtttaggttaagcctggaagtttgaaccggcccattatctttgagatacactggtgttttgaaactctcttgctgaggatattgtatttcagtcagttgattacccttttctgtaactccgtagactatcgatttaagcgccgccccatcttaccagtattttggtttcaccgtgtttatgatgatgttaataaatctaatgtgcaaaaataccgttttaggaacacaattggagataatttttttttgtatttgagacggagtttcccccttgttacccaggctggagtgcagtggcgctatctcggctcaccgcaacctccgcctcccaggttcaagcgattctcctgcttctgcctcccgagtagttgggactacaggcatgcgccaccacgcccggctaattttgtatttttagtagagatggggtttctccatgttggtcaggctggtctcgcacctctgacctcaggtgatctgcccgcctcggccttccaaagtcctggattataggcatgtgccaccgcgcttggcctgagagaaatctttaactctgggacctattatataatgagttatttctttacctgtgtgttttagttaacttcttttatcacttgtgcagcatccagcagtacccctgttttggtcaaacatggatgactcagtgtacaaaccataagccaggggaaaccataaggaattttgatcttggcttgtgccaaggctcttgggaaagtcatctgaactatgggagaaataaagctggatcttgtctccttgttattattttgaattaaatgagggaattctaaaaaaatttagaatcctattgacttttggctctaaagataggcagtctctttatactaaaatttcataacattgtttttattgggctgttgggggtttacgagatagtaggacagtaatgacattttgctcttttgaggaggatgttatctgagtgtcatgagggattttatttctgttgctgtttcgataccttttattaatgcctcagagcattgggacacccatttatttactcttgaaatgtgcttgggtgtgatgaactcattcatggtaatatattttaagctcatggccttgatccatgtctgtacactgataggggttatggatgtcacatttaaagtctgaggattaacatagttttggaactcatgatc

SEQ ID NO: 55316 - DNA, 572 bp, Homo sapiens
ggtaacatttagcatcatgggaaggagaaaataatctgtagcctcagtttgtattcttaacctcagatgttggcagcctgtgtcactgatgataaggcagatgagacaggagaatatgtgattcactactgctacctgtcaaccgtcttgaatgaaaaataagctggtccacagaatttttgtataccaaggataacacatgtaattatgtagtacataggtgaatgctgatgcatttggaaaataggtgtgtgtgtttctcttgtattggatgagtaggaggtatggtattttatgggtacacagtctcttggcactaaaccatcttgacttacctactacatctatgtggaaacctgtcctctttctccagttcaataaaatatttttccccttgaaattcatttttagaaagtatataaaaagtattttttttcaagtgtcagaaaccttttagcatcattgaagttaaaatgactgtccataaacttttcagaaatagtaggcattttaggctactagatttgtaaaaggtattttcatagaattataccagtgatttcaccacctga

SEQ ID NO: 55317 - DNA, 969 bp, Homo sapiens
tggaatcagttgcaaatctttccagttttttctaaaaaaaaaaaaaagcagcttcattgaggtgtatttcatataccataaaattcacccctttaaagtatacaattcagtagtttttagtatacttaacagagttgtacagccattaccaaccactatataatcctggaacattttcatgaccccaaaaagaaactctgtactcattaaggagtcatttccgccttgcctcagctcctggcaaccactaatctactttgtctctctagatttgcctattctggatatgtcgtaaatggaattgtacaatatatgaccgtttatgtggcttttttctcttataatacttccaaggtttatgttgtggcatgtgtcagtacttcattcctttttgtggctggctgatactccattgtataaacagcattttgtttatccattcattgattgatgggcatttggattttttccactttttggctattatactgctgtgaacatttgtgtacaagtttttgttcagatgtaagtttttacttctcttgggtatatacctacagatggaattgctgggtcatgtgctaattatgtttaacctttgaggaactttctgcctgttttccaaagtggttgcatcattttgctgttttttttttttttgagacagcgtctcagtttgtctgcccaggctggagtgcagtggcgtgatctcggctcactgcaacctccgcctcccgggttcaggcgattctcatgtctcagcttcctgagtagctgggactacaggcacgcaccaccatgcctggctaatttttgtatttttttagtagagatgaggtttcattatgttgaccaggctggtctcgaactcctgacctcaagtgatccacccgcctcggcctcccaaaatgctgggattacaggcgtgagccactgctccctgcccattttacatttctgccagcaata

SEQ ID NO: 55318 - DNA, 633 bp, Homo sapiens
ttttcaccagttcctagaggaggtcagagccattgttaataatgaaagaagttgaggtacagagggactgactagtatgggaagtagctgtcctttccaagacacaaatggtaacgggtttctttctgctggatatgtttgggggttattactggagcttttgaattatgtttgatgcctgggaatattaatgttttcagccctgccttttttcaggtcagcgaaataaatatgcctgtatgaagctgattgctgtggcccagggtaatctgctacttgctaatattttacagcattccatggttaggttacattatttggacttgacgttttgtgtgcggtgtttctgtagtgtgtgttctgtttgctctgctcatgttggcctgtttttggcttggtataccaaaggtgtttggacagtccttcagtgtttagaacttttcctgttctgtggattgctttgcagtcatcattacttctgtgttgatagctcagttgcagatctgtgttctaatatgtcattttttgagatcaacatctgtgagtttagagaggaaactcgtgaagttgttcacagttatggctactttttaagtgctgggttatgaactctgattgtatgctgatgccaaa

SEQ ID NO: 55319 - DNA, 323 bp, Homo sapiens
gacttaattgacacttgcaaatacttttagtataaaggtttaattctatttaaaaagaagatccattaaatcaagctcttaactcatgggactatttgcaacacttctttgtaaatatcattttgtttgttaggttattggcaaaacagtttcaaggttcacttccctcccttgaaccaggtccaggtcattttgctttggggtagattaaagtcagaactctaaaagttgagcaactttgtttttttttgaattgatttagcactaacccaccattgcatcttaaggatggcatgacgtgataatgatggacttgtgtgagg

SEQ ID NO: 55320 - DNA, 1109 bp, Homo sapiens
aagtcgtgggattacaggtgtgagccactgtgagcccagccggctgctgtttagaagtgcatcacaaaggatgccttgaggggcttggggaacatctcagggaagaagctgcacggagaacggtccagtcatccttctatttcgagccaacagcagccccgtggaaggaaaggtgactaaatgagaaggaatgtgactcagagggaggcgctctggaggcctctgtgcctaccccaggaggggctggcctctaggtggagtccctaccagtccggaggctcccgcccaaaccttccccatcctctctgggaagggagggcgtgaggaggtggtcccctggaagccacctccccagccctgaggttcacaccacctcagtctcaggggtccgggggtggccccagttaaaacatgggtttccagaccagtgaagcactcagaagcacagcccttctccttgcccgttctgtgtcccctggcagagggtgggtctggtatctgtgtagcaggtcctgaccccacccaagcagcagcagtgtcccagcacccccgccttcctgacccaccggcactctttcccaccaagacgccttgagatccccaaaacacgtctccactgctgccccaagtctgcccccaaaggtttggccttcgccacctgttactgcccaggcttgacacacagccatgagttccgccgtcgccacgtcagcagatctctgccaatgtgtgcctgcccttgaacatttcccccagctctaggcaaacaaagccctctccttagcaacagctcactgggcaaaacccaaagatgacccgacctggcgcacctccagcactccaggtcttggctcatgaccatgggactgcgacagaaattaccttcaaccctcacgtcaccacccatcacccaagctgcgacaccaatacatcagcaggagaaatgaggcggattgcaaacagctgccgagttccaagataaagagttttattttggtggctaaggggaaaagtagagaaaagccgccaacatttttaccaacagcataattatatgagagaaaactccctcctttaagattcctacgctgccctgacagcaatttaag

SEQ ID NO: 55321 - DNA, 1906 bp, Homo sapiens
attcctgaaaacggacaggacagtgagttgtaagagccaaacgtgaattacaaattgagacagccaaattgcaagagccaagttaatttttaaaaacactttctgtatcttacggcacaacaaaacacttttactacaaaacatgtattgtataacggatgtggctgcgtttgacagtttgagatgacactgaggagtgtgaaagagagcctggaccttcaaagcttgcaaacggcccgggctatttctccacctcttcgctactcaaagcgctggcatcgtttcctgggaacctgtgagaaatgccgagtctcggacccatccagagcgcccgaatggaaacctaggcgttacgaggccccaggttcagcgtctcacgggtcctgcaccacctgggacgccccgcaagcagcgggcatgccgggcccccagaagactccgaaagccacccattccctaaacggggagggcctcgtccgcgcgtcccagcgccctccccggaagccccgccgctcccacacccaggatggggccacatgggcactaaaaggcgggcaggagcgcccagtctcgagatggctggctcgcctttccagtccgggccctcggggtgcccgtgtgaaaagatgtgacactgaagcctggggaagaagtttgaacctctcactaattcacgtaacgggagccgccggcagcgctgacggctgcacctcccctcccacgcggacactacctgcaggatcggacgacccccagaactgtttgccaacaaagacatgcagggggcggagcctgagcgtcagataccgtgagcggcgtgcagagggcggagcctaggagtcagataccgcgagaagtagtctcccgaagaggttcggacaagcgcaggcgcactacaattcccgccctggccgcgaaggtggcacccgcagcgggaggcggggccgggccttcgggacaaagatcgcgagatttaatggcgagtcacagctacttcttcctggcagagaccggaagtgcggtccgcggagcgtctctggcgcttaccctgctttgggcctgcgttgctgctgctgctcctccgctcccccgtcgtatcgcctgccctggatcgaagtgatgggggatgccaaggaggccggagccgagggtccgccggccggggccgccgctcgaggagggctcagcctcctgtcccagggagaatccgaggaatcttctgcacaggtgagtcctccgcggagggggacctgccagggatgtgggagcggaggacccgctccaccggggagggatgccacggttcccggcagattctggaggcttctccatgtttccctgacacccccaaaacagggagttgaagtccatgctccagtcggcaggtattcgtattaaaagcagttctggtagccgacaggtgaattagatacgatctttcctctcaaggagggtacatgtaaatatgtcgttccaaaacgtggcacagtcgtgcaaagcaggagggaagaaacggtgccaggtagtgactcgccgagaatgagaccgaactaattcacaaagggtgtaaaatgtttgccatgcagaagaggtactgcgtgaaaggttagaatattgaacccagacgccgaacttgctttgggagtgtgcaagtgcaggctgtgaggaacgaacccccaatgcctttctatgaagttagagactcaagagtatttgaaccatgcatgcatgcatgaaccgatgcatcgattactaaatatttgcattaaaacaaaaagcccaaatgttctaccagactattttatgaatgatgtgttattaaaattaaaatacatctttggccgggcgcggtggctcacgcctgtaatcctagcactttgggaggccgaggtgggtggatcacctg

SEQ ID NO: 55322 - DNA, 2149 bp, Homo sapiens
ttgtatttttagtagagatgggatttcgccatgttgggcaggctggtctcgaactcctgacctcaagtgatccacccatctcggcctcccaaagtgctgggattacaggtgtccgccaccacgcccggctaatttttgtacttttagcagagatgaggttttgccatgttggccaggctggtctcgaactcctgacctctggtgatccacccgctttgacctccctaagtgctgggattacaggcgcgagacaccgggcccggccccccgccgaagcatttttaactgcggtgccggctttaaaaaaacttttaggtcaagaaatgcgctccagaagctcggcgagggtaggctgggcaggcgccttccgtcaccggcgcagcggtagcggcagcggacatccccgcctgggcaggcccaggtccgcggaagcctcggggccctggccccactgtgtcacacaccgcccggggccgggcccctgcacgcccgcgggcttcggcgtccgtaccggtacagcgggcggcgacacctacctcgcgggaccgtgcccagcacccggcctggcacacagcgggcacccggtcggggggcggtgtcgcgcagtcccagcgaaaaggctgcaggagcaatgacaacaggggcggaagccccctccccacgcagcccgaggggccgcggcggccacccgcgccgggccccaggaccccgcacctcagactggggtcgcgtgggtggctgcgcgcagctaggcgctcgcgcatgcgcaccgccatccaggccacggaatgaggccagaggttagatgggttgaaccactacgggaaggggaggggaagctttgggaggagtgatggagggtggaaagcggaagaaaaaagcaagatgggaccgcaagctggacgtgactgtaaggggtcatggctgcggaatccagcaggggcattggggttgacgtgcactcagcgccgagcttcttcgtagttcctcacccccttggctactatgggctggtccggaaggtcaggcaaggggaagctgcgcaggcgcagtgtgagcggcaacatggcgtccaggtctaagcggcgtgccgtggaaagtggggttccgcagccgccggatcccccagtccagcgcgacgaggaagaggaaaaagaagtcgaaaatgaggatgaagacgatgatgacagtgacaaggaaaaggatgaagaggacgaggtcattgacgaggtgagaaggacacgctcccctagttggtttatacctgagaaaaactttttggcaagcccaggctgtgtaaaaatagtgtagggtcttccctgaccctgagggtctgtgaggagaaactggagataagttctttctcaggtttctcctcggtctttaacacactgcagccatagtagttattttttaaaggtctagtccggtccagttaatctcccaacccgcgtcctccccgaaaaagcccgccacaacaggtgtgttcttctcgtcctctttagttctcaggctgaagcctcagatcctgaatcggccaccccgggctcgcagagggggccctctcccctcggggcagcagctgtcctcctcttcactctgcgggcggcactcacttgggccctcagtttcttgaaggctcttgccgcgttctaccgtagaagccttttcaaatgctcttctttatcctgcagttttcccttccttcttcagatctcagctaggctgtattttctggctcctggggcagctgaccaagtcgtgggtaaatctttggtttcatagtctcatagaactgtgttcctttcttcagactaggtcctaccgtagtgcctggcaatataggtacttattatttgtttagtaaacaattaggactgaatgatccttcagcctactgaatgtttaaatagatacctcagccttaacttgtccaaagcagaatttgtataataattcatgcccctctcttaatcgtcaccatttctataaatggcccctaaagtcaccagctgctctaacccaaaacctggggcttaactttaattcctccctttcctcatcctatatccagcccatcagtaaatcctgttatccagacatttctcagcactaattctgagaccatcgtagtccacacctctatcat

SEQ ID NO: 55323 - DNA, 1391 bp, Homo sapiens
ggttggaattaatagaggggccataatctccagacctgaataccaaatcaatcctgcagccccccacacccttaatgcccctgcactttcttgcttatcctttttctctcgtctccatttttctttcctccttctggtgttccggaacctatgatactctcctggttgtttgaatttttacaacctaccagataataatctcttgtgatcctcaaagcttccttaaagcaaaccctgaatcactgtgttttaaaaccagtatgaaagactattgtgtgggataatgttacattgtttcacagccctacaaagtttggccacaaaacgtgtgggcagattccgtaactcaaccggaaacgcgaaggactgaaacaaatcaacacacaaaaaacgaagccagcgagaaagatccaacccgggccccctgcctgaaatgggacacggggatgacggggcaaagccgggcaaaaccgtgctcctggctctcgcgattcaggagacgcgccaggctcactggggacgacagcgacgacggcggcggctcgcattgctccacgcttcccgtcaggggggctcgagggaccgccccaggcccggcccatgcccgggctcggagggagcccctggtgcgagggctgcccgcagggctccgtcctcccgctgaggcgcggctcccggagcaggaggcgcggaggccgccctcggcgtttcggagtcggggcggggaacgtccacggccaactgcgggcaggggacccccaggcggctacaacaggtgcgccggggccgcccacccggctcggggcgcgcccgcccctgcgccgacccccgaccccttccgccgccggggccccgctgttacctgcagcggcggctcccgattcccgggagggcggcccagggccggcgccttacccgcgggcaggcccactcgcccgacggacgccgcgggtcggcgacagcggggaccgcgggtcggcgacgtcggggcacaggtcctgcggggccgcgggggccgccagggagggcgcgaccgcctgaccgggcttcaggagcagtgtcctcagccggtgacctggccgctaccctcgctcagtgtccccggcgacgcgcgggtcctcacgcgctccctcacttcctgcggcttttggtccctcccgctcgccgtccctttagttctgcccacttcgcctccgggttgtcagggcaaccgtagcgacgccggccctggctgagaggcgttaggagtccgggggttcgcccgcggaggccggggagcagccgaccatggagccccagagtaagggaggcccgggctggagctgggaccggggcgggcgaccgggctggggctccccgggaacgagtgtgggcgccccgcgcgcgactcc

SEQ ID NO: 55324 - DNA, 503 bp, Homo sapiens
atgatatactcaacagcatctgtgcatgatagttagaggggaaaaaatgcgatgtagaatccattctatccatctatcaagttccatttaggaaaacaaaatgttagaactaaaatatcctaatcacaataattgactagtgaagactgaagaagtggttgcctagcaatgccctgatcgtctttgatgttgactggttgacataaggcgggatcaacaaacacacagcacgtgtgtggccctggcacctgattcagatccttcccactaaggtcaacaatacccaggctcttggaggcagccactcctcatcgattatttgcacatgagataaacctgtttgttttaccatattgaaggactaacagaagcacaaactgtaactcaagtgcttttccagtgaagagtgaaataggaaagaatgaaaataacatatatctacccccctcctcctcttcctttagcttggggatcatcattacctccatttctccattttattt

SEQ ID NO: 55325 - DNA, 672 bp, Homo sapiens
tggcagtgggccacctgtggctggtgccaagctcactgatggagatctctcattatgtacctacatcaatgatcagtaaagaacaagccataagaaacttttgggtctctgggaatgttatctttttactcctcatataacttcatggtgaactgttttgaaatttgacattaatttagaatttcttgcctgttctgatctctagtaggattctaggctggatgtctttggaattgaaatacttgttggcttctggttattttgggggtaatccataacagtctaccattcctggtgtttggttttagtgggctgtgaaaaaaatcatttgttcaacactgatgtcgtgatacaaggacgtgaagatgtgagtcattgtgacatcaccagccagaattgctgggattcagtgagatgactcacagtaagaggtcagtgtctggttcagtagttccttcttccacatgtatccctcagtatctagaaccctgaaattggtttctctaagaaaaccaagaggcccataagggtaatgtatactgttgatttttatggttatttttcaaaaactaatattttaaacatatcaaaattatttcaaatggtaatgtactcaatgtaccatttggtttaagatgttaacattttgccatatatgtcataaagtctttt

SEQ ID NO: 55326 - DNA, 684 bp, Homo sapiens
atcactgctaactattgctgtgtacctttttattaaacatttacaaacatagatcactacatctacaaatgcgtagggttctttattatgtaaatactatgtctatttatttgcaacgtgcctttttatcatcttgacgatatgccagaagaccttccccggtcattacatatagggtaaatactaagaatcgcaattgcatggtcaaaaaggttgcacctattttcactttcaaagataacatcaaattgacctccaaaaagttccaaagccctgaagtaaccacttggcaaaatagcacacagctctggtaagccgcttaacctttctgtgcctcagtttcctgacttgtgaaaagatgattagtaatccatccactgcctatatcccagggtggttgtgagaaccaagtcagaccaaatatgtgtctgtactgtgaaatgtacaacacaaagtacaaatgttagggattactcaacgagagacttcaaaggcagctggcagcttcacagatgggctgggcaggccagagcacagccgcctgctcgtagtttgggcatttggaaatcacagcactatgttgtcactggcattgtttaaggagcaccaatcctcctcaactgcagaaagaacaagcacaggctcagccaggcatacaaattgcagggctcccttcatatattc

SEQ ID NO: 55327 - DNA, 1826 bp, Homo sapiens
agcacccaagcaagaggtcacctgtctggaacgcactccctcggcagcgctgtgccacctctttccaccccatttgagtggccggcacttacctgtgctgtttgttacctgacgtgtcccttctcccacctaccaggcagttggtgcggcgctcccagcacactcgggcaatgagtgggcaggcgctcaggtaacgtttgtcgaatgaatgaatgagccacgtgctcaggaggaccctttccagagcctctgctggtttgttctgctccgggactctccaccagggagaaatccgagctggggacctcgcaccaccaggctccggcctaagcccgcgccttgcaagccgcccgtttcctacctcccgtagaaaccccccgtccgtcccgcccccctaagggcgcacccctctcacggcgtgagcgccagccccgggagctccaggaactcaggagaaccccgcgggggtgcccgggtgcggagcgcggggctgggcgcactgggacagaggaaggggagccccggcgaccgcggggtcggggcccagggtccgcgccgagggcgggcgcagagcccgcggccgtcccgcctcccgccggcgctcccggcctttcccatccggcccgcgacgctccgcccgccccgtcccacatgacgccgcctccgccgcaaactttttcctccccatcctgtcgcggctcgaaaggaatggaaaatggcggcctagacgcggagtttcctgcccgacccgcggcggctccggcggcgccatgacgcgctgggtgcccaccaagcgcgaggagaagtacggcgtgggtgagcagcgccgccgccgccgcgcctctcgccccaagcccaggctccggcggggcgggtgtgccgggcgcctgttgccgccgccccgagcggccgccgggccggggagaggcgcttccgcccgcgcccgcgccgccgccccgctcgcaatgcccggcgaccccggccgccccgcgcccccggcggcgtcagctccagccccggggatgcgggtcgggaacacgagggggtggggtgggaatgggggcgggcgcgtccctccctagggtgtcccctccgacgcccgctcctctggacctctgccgtggagccccccgggctacccccaactccccggccccggccgctgctatctgcgcggctgggcccgtcagggaagcccaggggtcactgtctcgcggcggcttctgcttcttggatgaacttgcgtcccgcgtccgggctctgggtgggcgggctcaggtcggcgcggtcccagcggataattccgccctttcccggcggggaggagggggcgcgacctgggtggccagcgccccttgcccctcggcggtctcgctggggaccgtgtgggaccttggagagaaggcgagcggccgagcgccccagtggccccaggcctggagacccttccgggagagcgggggcctgtttttgctccgcggctctttgtcgcttccgaggggggatggaaggagtcgggttgcaagtttacatttcggacccgagtgcgcattcctgagagggaggctttcccttgcggctgaatagacgggcccgtccgcgtgggacccgcatccttgcgccccggggacccgcagccggtcgccgaggcctgcggacgcccacctcttcgtgatctgcgcgcctggtgtcgggactgggccgtggctactctcctgctctcccgggtccgggatcttcccagttggttttcgggcttgctattccccgtcccaccatccacagacatccttgaccgcctgcctcatccaggccactcgacccga

SEQ ID NO: 55328 - DNA, 600 bp, Homo sapiens
gtgcagcggggactccactgatgcctgggattgattgccagcatgcagcggggactccactgatgcctgggattgattgccagcatgcagcgggggctccgctgatgcccggtatccaccagcgtgcagcgggggctctgctgatgcctgggcttgcatgccgctgccgctgcctactggtgcgtggcggtagccgcctgtgcccagctggtgtgcttgtccaaggtgatgacggtactttttattgcacagagttgctggagagttgaatgacctgggtcatgtcagcacagtttctcagtccctgcactgttgacattctgggcaggataatttttcaccctggggagctgtcctgtaccttgctggatacttagcagggcctgcccagtagatcccggtagcaggatccccctccagctctgtatgttcttcagatgatttggggatatcactggtattttaataagttctagaatttcccccattgacattgccaggatgtcaagccaggatgtctcagccattgccaactgtcccgggggtaagtggggcgggatggcctaactcatggtaaacactcaacagctgcttactgtt

SEQ ID NO: 55329 - DNA, 1082 bp, Homo sapiens
aatgatgggcttgattttttaaagactgttcagatctggaggttttggtgagattgtgttttcttattgttgtcggcttaatttcctgcttgaaagggtggttcccatatagcatatgaataaaaaggataatttcagtagaaaaactgctttttcacagaggttttttagcaaaacccttccacatgggaggttgggggtgagaggggaaattgaagacatcccgtagtaatcagcaaattgaacttccaacttgaaatccactttacaaggaatgaagtatgcccagcttcctgctcgaggcaaactgtgaccagctcctggtagactcctctgagaaacacagacctactaacagatccatgttcatggcccttatttccccatctgatgcatgctgtaccttccctaaaaaagtcctgtctgaaaaaaaaaatcgactttagtggcctctgcgtggaagccagtgcagctctgcaaaaaccagccccagtccttaagcggatgagtagttgtgatggggtcttctgcttgttttccgtgtttacagctgacagctgtgttcccttatctcctctcagtatatactgcatgtgtctgagaggagacagagagaaattaagtagaggttaaggatcaaaccgctcatctcagacacttttctgatttgaagggaaatgctcttgtatcttgttttacttttgctgccggtcagttgaagttgaaatcctggttaataaacactgggcaatgatgtcattcctgaatagttaatgatttcctgtggcccctgggcctgtggagactgcatttttgttctttgcttcataagaggaatgcgtgtgtggtggtggtttttttttttttgagatggaggctcgctctgtcgcccgggctggagtatggtggtgcaatttcagctcactgcaacctctgcctcctgggttcaagggattctcctgcctcagcatcctgagtacctgggattgcaggtgcccaccaccatgcccagctgaggaatgtgttttttaaacagtggactcctcgggcatgtcagtggtccttgtaatacgtgtaacttc

SEQ ID NO: 55330 - DNA, 1254 bp, Homo sapiens
ctattcagtttctgaagatgccacccaaatcacccgtctgtaaaatcacatctgcagtaaaagttctcgatgagtagtcatgcattttccctgctcgtatgagataaccagagcgatcacagtgcctcgccctctacctagtgagtcttcctaagtcttggcaaattcctgtggtgcttggtcactcgcagttcttctagcaagtggaccagtggctgatgtattcggattcatgtagagtgatgtttgagccagttcaaaacagtgaccactcgagtcattcctgaaaggacagatttctgtccttcagagacttattcagtcacttttaatgtcactttttataggagtgaattctggatttagagctaagttcatttaaattatttcagttaggttaaacagtgttcacatatatatatatattttttttcgatcacccacagaatattacgtaggtttaggctgaacagctcattctctgaacctaccctggatgtcttgactcactgttgcttggttgcgttaaagacggtatgagctttagcttccaaactaacagaagctgaactctgagtacgtgccaggtcatctacactctgcacttcctaacgtactgatgttcacggagggtcattttatgtcagtgttacagccctttgttgttgattcaaaattctcttttgcaagatgagtggagtgaaaagtttcccattaagcaaacttctctgatctgttgctatcattgagtttctaatttggaggaattgttgaagaaaagacctgcatggatgcctcattttaacctcctcactggcaattgccaagaacagtcagcagcttggcgtgccatgccaggctgctgcaggggcccctcctcccttcctgctgccaggaggccttaccagcttgtgtgtgcctcttacaacactctaaggtgggggtggtttcagtaaggtaggctttctcaacctcagcactattgacatttgggactggatagctcttggttgtgggggttgccctgtgcaggcagcataggatgtcagcagcattcctggcctctacctgctgcataaccggcagcagctcctcagttgtggcaactgaaaacgtctccttccagactttgcaaatggcccattggttcagaacctctgaggttaaggaatgtgctgatgtggccttcggtgcctatctctacctgtggtttcttctgcctcctcccagacaaggtctccaggtgacccagct

SEQ ID NO: 55331 - DNA, 1377 bp, Homo sapiens
catcccagtgtgtcctgagcacccatctggcctggcaagaagcaggcacgaaaggcatatgggccgtagcctctagcctcctgccacctgcattccaagccacgttccagtagcactttaactgaaacatctagctacacaagatgggctgagcactctacacagatgctggtccatgcagaaacaaccctaccccttctgcacctgaaagggttccctctgattagaaaaggtttgcttcaagttcggttataaaggaaggcttgtgcatagttagtggggaagccacagggatgtgcaacttttccctacagccctgaggttccaggcactaagaacttggcacgtctttccatgctggctgaaatcaaaatgaaaccttctttgacttttgccccttctgctggggcattgacattggggtttgacactggctcagacagtcaaatctggaagccaaaccttagaagccaaatcttagggtggcattaggactaagctgagaataaattctcagtgatcccattcatctgcctcccagtgtactaaagtaggactttgaaccttccagaaacctgatatgttggcaatttctcaagctttgactctttcttccccattgcctctaaaccctagcttgaattttactggctgccttataattgctatttgttaaaaatcaaaacgattttccatcctggtaaaatggtaaaaatatcagtagtttgcagacagtaaatatctgtctttaatacttcaaaaacaagccatatttgcctcctgcctgttttccttatgagggaattatgctgtggggtggtagagtgagaagggttaaatcactggggacccaccttccctcgttcctcatggaatttagatgaatgtgctcttgctaaattctccagaacgtgtatgtgcgtcacccccacgctgcccggcccggaggtggctggaagtctcactttgtttttcatctgctgggtggtgaccagcagagagcactgagcggactgttctttccaatgctataaaaagcctgtttgcaaaatgaggatttctgcttccaggggctgaattccacgtctgcattatgcttgctgggtgggtaccaggcacagtctgtggcttggtcgtagcctttgccatgtcttttgatgatgtgacatgcctgagacacatggtggagctctgcaggtggtgagcagccacgaggctgtgcttgcatgctggagcagaaccttgttactgctgattgaatagtctcgcagaccccttttctgtcaaacgcaaagccatgtgtttttgttccatgtggaaaatcacacacattctctagcatattacattgtcattatgtcaacatttttaaatttt

SEQ ID NO: 55332 - DNA, 641 bp, Homo sapiens
aattcagccttcccatgtgagttctgtcctgagatgtgattggggattggaagccaagcagacccagcaaagggaaggtgaccagtggactccacctgctcagcaaacactgacctggcttttcctttctgggaagttccgcaggccagctggcatcctccccgatggcatttcctggagtcctcacctgaactcttgggaattgccgcctagagaccaccatgcaaagcaggatgttgaagacagattagaaggcttctttcgcgctgcctctcctgtgcggcttctctccgttgtctgtctcctctcttgtgctttctggatctcttctaaagcttcttgggaaaagccaaacaggaaatgagccaccaagagactgggcttagacaatgatggccaagtagaaaagattctatgttctagcattggggactgcagaggagacagctgcccctttccaggacctgtcgaaggacaaagtctaaggtccgtggggatcacccttcaggaagatggcatcaggccacaaaaatagaaaagagatatcgccctcccttttatagcacaaatgttaccagtcatgctagtatcaaaaattatattccagtttactttctgcttccctttcaggcctgagatgc

SEQ ID NO: 55333 - DNA, 1030 bp, Homo sapiens
atttatttagcctttggaatcagccgattcagaaccaagactgtgactgagttgtggaatgttacttggggacaaggctctcaaggaagggggctgttttcctgtgtggcctggaaactggttcaaacagcagttctcaaagagaattccccaggacaggggccagaatatcctccgcctcccacttccaggacaatcgcctagtcgtccttcaagcctcagtaaaaggatctcttcctctaggacgactttactactgactcatccagataattcctccctccactgggcgcttgtggtacactgtccttattccgctactgtcttcatgtatttccacatttccagcagtcagcatagcagctcacccaagaaggatgcccatgcattgttgaaagaagggatggggccaggaagctcagctaggtgctgttacgttcacgtaaaactagaatcagcaaattagaagtgggtcatggccttctacaaatgagtgtctaaacagcagagaagcaaactgaaagaaaaaacaagcagcaagaaaagagagcatttatctagaaaggaaaaatccagaaactaaacaaatacagagatctgagaccattgtgtgtagagtccaatagtccaatgggcacactagtcatctggaagccactgtcctggcagagggtagacctgagtgttgctggtgacaaagataaatggtcaccttggatcaagatgaagatgcaatttaaacacaacctagtttttttttaagtcttctgtagtttgaggagtcaatacaattattcctccctctttcctagcctgttctccagcatttaaagatagaaacaaagaaaattatggaatacatcagtctaaaactaaacctacaggcaggagccagatcctttggagagcatgcaacaagcagatttccttcaagataaaatgaagtatttcatgctacagggtttttgggtggccctcccactgggagcttctgctacaacagaacctggcttgtgcatttaaaacctaa

SEQ ID NO: 55334 - DNA, 1060 bp, Homo sapiens
atgttctatgaggaagaaaagtttcctcccattgaacagagtgggcatgaaggagatgtggccagcagcttgcaatcaggtgcctgagaaacagcctcaggggctgctggcaaaagggttctgtggtgaagaccctcatcccaagcggtgcaggcctcggggtgcagcctcctagaccgggagggggagaagccccagaagcagcaatgactggtaacccaagggttctggctgcaagggagagtgagaaagtgcaggaaagaaaaggggaggagagagaaaagggcaggaggagggcaatgtggatacgcctcacagcggttggcatggccgcatgtgccttgaaaacccatgggagaagggagcaaaccaggagaagactgggcaagcctcagctcagtggcatgaggacgatgaattcaccaccctgctcctcaagtggaactggggactgtgagcaaagtccagctcgcacaggtacagcctacttgtgctcaatggtgactggactattttgcaatttctgctaataacccatagagcgtggtgaaattctcagcatagtctctggctatgcatcccagggaagggctctagcgggacctgggtcacgccagccactgcctgttgcctgggcagggacgggtggggcctgctgggcctgccttctgggtgggtgggatgtggccacctgggctgggacctttttttccatccctgacctcaggtgaaatttcttgcctctgcctattgctcgctgtggaggtgcagccgttgggggattaatattgctacaatttagcacacacttgttttgaaagtaatagagggggacaccggaggagagaaggaaaaaatctacagcacgtaggacacacctgttcagggggacagatcagaggctgcagatgagttaccataagagggaatcgcttcccattccacactcgccagttcctcctggacgctaaaggggaaactccaggatatatcccaaagtttgctggggactaaataaactcactccttagcaaaaaaggagctgtgtccaaggcccctg

SEQ ID NO: 55335 - DNA, 1085 bp, Homo sapiens
cagcctggccaacatggtgaaaccctgtctctactaaaaatacaaaaattagccgggtgttgtagtgtattcctgtaatcccagctactagggaggctgaggcacgagaattgcttgaactcaggaggtggaaattgcagtgagccgagatggcgccactgcactccagtctgggtgtgaagcagcctgggtgatgaaaaaacaaaacaacaacaacaacaacaaaactatcataaacacttttcctgtcaaaatgattctgtaaaaaataagttctggtcagtgcgtaggctgagtaatatttgaaacgacattcacaggaattccatgtcctaaatgtgaatgactcattttgtcatgtttgccagtgtgaggaaacagagcacattgtgcttccggggccctgaccacattttcaaaacacagagttaaaggaatgacttctttttacatggcacccaagatccagaaccgagaaggaggtgggtgtccacagtgtgagcttacacctcctagcagctcatttttcaggattctgtcctccaactgggctttgcagacatgcatttcccccaacccccttgcttgcatgcagacctgcacataccatgctccagcagtgagtgcagggcactgattttagctgaggaagggtcttaatctcacactgaatggtgagccctccaaggccaggaaccatgtgcaattcctttcagtatcctgagccccttatacatgcagcagctgctcagggaagtttttttgaacagaaattagatctccagaactttgggagtagcaaagacaacctgctcacagatggacatacaggacctgtcacttttcatctggatgttggacaaactaggatgcagcaagtcagcctgagctgcccgcaccctccagttacacactggaggatttccttaccaggtctgaaggacgattttccccacagattgaccaatgttggctgaattattttggcactttgaaatcagctgtcattgcttccttctgctatttcgtttcaaatctacagtcaaaattggctcaatatgataaataccatgcagaaatatagc

SEQ ID NO: 55336 - DNA, 1242 bp, Homo sapiens
atataatttccaacgattagattttttggaggtaaattaaaatcagttaaagaaatgaacttgagaaatagagataataaattttccattttactctttcctgcatagatgccacttgtgaagttctagacagaggttgtggctccagctaaaaacccagtcaatacagttaaaacatgtgttcctactggctattcaatgccgtattgctgccacatatttttacttatttacttgtcagtcaacttggtaggtattatttaaatacagccactgctagaatgatatagactattgtattaatagacacaaggagaaccgaggaagctcaaataatgacatggcaaatttccaaaattatgagttaagcttgtaccttcagcctaacccaaaacttacaaagaaattatttttgaatggttatttggcccaaatatagaatgacataaaccttaattcaatctcactatattcattcaaattagtttatcatttacctgcaaactttttctttggttctgcaagtccgtgactcaattcttcactactctccccacgaaaaagtccgtaagtgatgaaaatgctcccatttgaagcagagtctctaacagcaattgtactggtgatccatgcttgtgtcccaagaatagagcaaattacaatgaaggacccaaggctggtgaaaaagcttgataagaacatcaatgtcttctttgtggtaggcattttcacaggaaaataagttctctaggacaaaaaaaggaatatcttcttataacacttttgaaccttatcttttgaagtctggtatttagaaatggagtctaacactttattgtcaaatataaaatctcactcttcctgaggaagggttatgctaatggacattgaactctgaacatggccataaaattaacagtagctgaactttggtctggagtaagaggctgctatggttacagccaaccagcatgaacaaggggtgggcatggtcttcccagggacttcctcaatcatgcaattaatttataatccttggccaagtgtcatggaagcaagtttagcctaccatatcatgacaggagtagaattcctaaataatagggcgtggaggatctgtattcccaaagcgttgctgagtctagcagacaacaacatgaaaccccaactcctccaagaattattggaaatatgtaaacatatacttcactattgtggatatttatgttgcttcaatttcac

SEQ ID NO: 55337 - DNA, 838 bp, Homo sapiens
ccagaggaggccaccaggcccagcgacctcacagctctcccagcttcctcgcaccagaagcgcacggggtgccctgcgtgtcccacacctgctgcaagaccagggcgagtccctagtcaggccacttcctggtgcacagggatagggcagggagaggcagggccttgcctttgctctccaccaggtgtgagtgcctgccataccctgaccctctgtctacgcacctgggtcccggcggagtggctggaccaggcctccccggaaggggcaccagccttgagtaaacggatgcccacagtgtctgggtgctcccagggcagggccgcagggcctcagggccatacccgcctcgcaggtggggcgggcgccctggatgcgctccccgcgccgggcaccaggcgtcgcccccgctcctcgcagcgcccaggcccccgcccccgccgcggagccacagccggagctggagccgaggcggcggcgggacgcggccggccggacaaatttcctgctaggctgcggacagcgggcggcaggagccggcgcgagcggcttcaggaacccacggcctctgcgcgtccccgcgacccttcttcgcgcccggcgaagacagccgggcgccccggagggcggcgggcaggcgcccgggagatgcggagcctccgctgcagcgcgatctgcgcgaccagaccggcccccccgaggtgagcgcgcgtgcggacagggaccctgcgcccctgtggggaactgtgcaccccgggaggcccaagcaggccggggcgctgcctcggccgctgccgcgggagggaggggccgctccggggctcagagtccggacccc

SEQ ID NO: 55338 - DNA, 500 bp, Homo sapiens
aaatctagcatagcattgaggacctacccaattcctcttcagacttttcctcctcactcatcttctctcacatgccagagaactgtgaactgcctggacagtgggttctgtctgggctcccttcactcctctgtcccctggcctgcgtctccctcgccttccgtcctgaatgactcactcactgcactgcatttctggggaaggtttcattaactgccaagaggaatcattgctccctcacctttgctccttggcacatggccttgtctccagagcatgggagtggggtatcagggtggctgttcttctgcctgcccttcctcctcaatgagctactttagggctgaaacaagactatattctttgcatctctggggcttacctggctgcctgacctaagaacttgcccagtgaagaatattaaaaagacatcagatggaataaaaagacagatttataatgaagtagatagcaggttgactgttgaggggagtaaatat

SEQ ID NO: 55339 - DNA, 1624 bp, Homo sapiens
tgccacaaggagccaagagacaagtgtatggcttccttccttcattctctgtgtccccagtggccagggatgcccactgtggaggcacccgggggcgcacagtgtcttcagacgcctgcctgcagccagtgacatatgaagatcatctacatctttctttaccgcaacattagcaaatcgatttttttaattggcttgatttttaaaaccacttaaacatacaaactagcatcaaatttatacttacaaaacaaaaaaacacaactatgtcaacttagtaacgaatgggagaagcaccaaggaaaagtgacggcaggacccaatcctagagcgcgtttctggactttattctgtgactaaggtattttcctctttctcagctaaaacgtccgcgcgcgcccgcggggctcaccttccaaacaagcaggtgctgaggctcaggggaaagtggggaccgtcgaccccgctccttttgatagtaaccaggcgtctcgtgggccacattttctaaacagtaagttgagtataatccgtaggggaaggccaggtataatccgtaggggaaggccagaagcaaatttacaactcttccactgcaaaagaggtgcgagttactctgatagcaaaggagctaagaagggccccgtgcccaattcacctatccccggccacagaagcgcacaccgcagctagctagcggggaccccaggacgatccgaccgcagcccccggcgccccaaagtccggcagctggggtgttgtcgccagcgcctgcgcctcctgggagcttccaccgagacgccctcgccagagcccaggaggagtcgggcccaggccgcgcgtctgtcccctgcccgtccccgcagagctcggggggtccccgcggctcagccctcgaccccggacagctcccaggagtcccggccgcagctcacctgggacgatccggcccgcaaggccacttgtcgaaccaccgctcgtcaagtcgcacccaaagtccgccgcaggaggagccggcgccgcgctcacctccgcccggtaagctgcgcccgccacgctccgcacacaccgggccgcagcccgcggggtcgcgttcgctgcaccccggcctgcagtccccgctgctcccgccgccgcctctgacggggacccggtggccctacaggctacgtccccgggcgcccggctctagcggctcccaccgagtcgagtcctcccgcccgcccgcccgcccgcagcgtcagccctccacttccttcttccagcccggcgcgcccgcccaattcaaacgaaaacgaagattcaaattctggcgctaagcgctgcgattgaacgggaaagcgcggcatgggaccaataggaagggagcgcagggcgtgggcggggagggggcggggaaaccgggctcgcggggcggggctggcgtgtccgcgggcgagccactcacgcatccggaggaaaatacctgggtgcatccccggcgagggcggctggcggagggcagaggtggaacacgctcccaccgagataacccgtcctgctatccttttcttaaaggaccaaacatctgggacactataacattactcattgccagaagatttaaaactgctaaaaattaaaa

SEQ ID NO: 55340 - DNA, 776 bp, Homo sapiens
gacggagcccacagaggaggctcgggcgcccgcgccccctgcgcagcggcccctccgcagcggccccagcccgcgtccccgcagcgccccttccgaagcgccccctccgaagcgcccacagcccgcgttcccgcccgcaccccagcccgcgccccctgcccgggttcccgcagtgccccctccgcagcgccccctccgcagtgcccccagcccgcctcctcgcagcgccccccgcagcgccccccgcagcgcccccagcccgccccacctgcagcgcccccagcctgtgtccccggcccgcgacaccagccggcgccccgcagcgcccccgcacgtcggtcacaggagcggagcccacgcggccctggagcgcggtggctgggcccgtagcgccacctggcggcggatcagggcccccgcgcccttgcgtcctcggaagggggaggggaagggactccaccctgcaccccccacagcgcgctcccgaggccgtttcccaaggatgcgcgggcccgaggggatggggacgcggcccgcgcggcgcgttcctggctacctggagtctgggaatggcgaatcccactcgcagcggacacaggcgaggcgcagcgggacgggattggtgggaacggaaacagcggtcacctgggagcccagaaccagcgagtgcgcggtgcagcgttcgcttaccaaacgttgtgggacaaacgcctttcaactgtttctggacgccagtgggccggcgttaccctgttgagccattcctttctattagc

SEQ ID NO: 55341 - DNA, 1662 bp, Homo sapiens
tcaccagcatttggtgttgttggtgtttggattttagccatctaataagtgtgtgtgctgtctcatgattgtgttaaggctcagttctctaatgatagatgatgttaagcagcttttcatatacttatttctcacttgtaaatcttctttagagagatgtttattcaggccttttgcccattttttaaattgggtcgttcattctcttattgttgagtttcaagagttcttcgtatattttggataccagttccttatcagatatgcgttttgcaagtatttcctccatgtctgtggcttgtcttctcattcacttgatagtgtcttttgcagagcagaagttctttaatattaacaaagtccagcttgttaactttttctttcatgtgtctcattttcacacccagccttttgttgtgttttatgttgttttgcttttagcctgaaaatgtgcatccttcacagttgcacccgttcagaaatgctcctgccccatccttaggccaatggttgctaatacctgctcttagatttataagctgcatgacttttttgcaaatcctcagttcttgggccttgtgtcttcaagaaaagctgctgccctttccatttatttcatcctgagtctgtaatttatgcttttaatttatgtatgacccttttcttcccaattcgactataatgctcttctcctggaacattactccctccccatgctcagcctgttttccgatatcctggtgtgcttatatttaacctttggtgatttcatcacaaagcctgcctcttgtggacaccacccctgggactttgaaccatgagctgtgctgctccagcaactcttgcaggcaaggctagtagcgggtgaggggcaggggctgtgcaggagaacagtgagagggaggccaattgtgtacacctagctgctgggaggcaggacaagagagagacactagggtcaatgccaaggaggcacaagggtgacaagaagccagacatctggaggacagagcatcgagctaggcagaaccaagagtaaacggattaggaagtctcagtggtaaggtcagaaatgtagaattcagctctttgtggatgatgaatagaaatagtccagtgaacccgaactcaaactgcaggagtgactctgcttggctggagttcagtgggggcaggggatcagcatcagggagggcagcctagtcgtgatgggagagatgcgaggctagtcatcagcagctgctccactaagccaacctttaactggcaggtattcaaagaagcatgaaccacagcaagcagaaagagctcttctgctgttgagctccacgttgatattaaggtccacaggggcagttgctcatctgcaggctttcagtgacacaggtgagctgagacattggttcttctggcccttgtgatggtccatgaggcctaaaggagcagggctcccagcagagctttctttgggggccagctgtgcctatttgctgcactgtggcacaccagcttcatggccatctatgtttgctgtggcatggaaacagttgagaagcatcagagttaaggtttgaatagtctgtccttaatatggtttaggaacgacatggagaagttttttaaaggcatataaagtatttccagtgggagatggaagaataa

SEQ ID NO: 55342 - DNA, 2244 bp, Homo sapiens
tcagcctccaaaaggaataatttctggaatgtgtcttgatctttttattttcatattatcttctgattttctcatcttgccctaacaactacactgtggggttgggagggggaatagtctacatagagtgtgtggcagagaggttgaaggttcaggaagctactggccccttggctccctggtgtttcttcctctgtgatattgctgatggttcccaagaagagaaaacctgtcatccaccaaaccagggaaacctgttgtctgtgcaaaacattcgaagcactcagaactatgcaagagtcaagatcacctggaatcctaccacctagcaacactcattactaaggcttggtgtgcatccttctttacttgttatacatagacacagacttgcacacatacagtactatggtttggatatttgacccaggtaaatctcatgttgaagtttgatccccattgttgaaggtagggcttaataggaggtgtttggattcctcatgaatagattgatgccctggagggaggaaagtgagttacttctctattagttcctttgagagcttccttggagctgattaataaaaagagtttggcaccttcactttctctctcttcccacctctctctctcgcctcttctcttcccatgggatcatctcctgacctttggcaatccacccacctctgcctcccaaagtgctgggattacaggcatgagccagccactacgtctggcctcttttttaaaaaaaaaattaaatagagatgagatctcactatgttgcccagcctggtctcaaactcctgagctcaagtgattttcctgccttggcctcccaaagtgctaggattacaggcatgagctgccacacccagccaaattccacacattctttgatcatgaataacttataatattagccaatgctttctgagtgctgttgtttgccaagctctgagtttggtgcttcttattttggtgcattaactcatttagttccctgtggtaggtagaaaaatgccctccaaaatgtgtccacatcctaatgcccccaaactatgaatatgctaccttacataggaaaaggtactttgcatttgtgattaggaatcttgagaaaggaagattctcctggatcatttgttcaggcccaatgttatcacaaggattcctgaaagatggacaaaggagggagagagattgaaagatgcctgtgatgctggctttaagacagaggaaagtctggagaaagcagacactgatggatggtggaagagacaaggagacagaatctccctttgagcttccaggaagaacacagcctctggcaccatgatttcaacccagtaagactgactttggactttttcttcttcttcttcttcttttttttcttttgagacagtattttattctatcacacaggctgcagtgcagtgttgtgatctcagcttcctgcaaactccacctcctgggctcaagtgatcctccagcctcagcctcctaagtagcttggactacaggtacataccaccatgcctgtctaatttttgtattttttgtagagacagggtttgccatgtggcccaggctggtctcaaactcctgagctcaagcgatctgcctgccctggcctcccaaagagctgagattacaggcgtgagcccccaagcctagcctaaaatccttgtgttattaaaagaaaacataagtaagtatttctctaatcttggagtggagactgtctttttaatcataatgccaagacagaaatcataaaggaagagatggatacatttttttctgtgaaatattaagacctttaaaaaaaactttgtgtagacaaacatatttgtatagacagagtgagacgctatctccaaaaaaaaaaaacacacacacatacacaaaaaacaaaaaaaccagtaatgatttaaaaaatatctttagctcctgtggaatttacttgagtgtagagtaatagctaggggtatatgttggggtgatcaaacccaacaccaggttgtgggggtgacaaagtccggcagagtcaaaggaatgagaaaagacaatttgagagagaaagtgggtccagggggccattgcgagtgtggaggctgggaaggccctgagctctggaagcccagattatttattggtgatcaaacaaagaaacaggtggtgagaatgtgggggtcaaaagggcacattgcattaggcacatgttttacagctgtgaca

SEQ ID NO: 55343 - DNA, 1059 bp, Homo sapiens
ctgggcttggaagccccgccagcgagggcatgccctgcacagaggagggagtgtggaaaagcgagaatgaagctgttttccttcccaaattaatatggaacaaggagcagcttaatcacactttgggttcagtgatgtctccagttgccacagtaatcagaggcggcctttacaaatagattgcatttgaccttgttggtttgatggacgggagtggagtccggccgcggacggcgtcccttccagggccggccgccagagggcgagcgcgccttcccgggcggggcggggacgggacggggacggggaggggacgggacggggacggggaggggacggggacacggacacgggaggcttccgctcgcccgcgggtggcgtctctgctcccactagagcgggccaggcctctgggttccgtttctcaagcacacagggagggtggccgcgggccaggggcggccgcgagactccacgtccacgtcccgggcagtccctccggaggttgggccgcgcggcccggggagcggagcgctgcgcttctctgcgagcaccccggggcctttaggcgcccccgtttcctcgtcagtggggggcgcggtgccgcttctccgcgggctaaactgctgaggaaggggcgagttcctgcggcccctgcctgtcccggccacgccccacctccgccccgccgcgttgcgcgttcccgcggggccccgggcacccctggggccccggggatctctgacgcccccttccctccaacccccgctgcgatcccacaggtggggtgaacagcgcccctgctgtcccacggggcgtcttcgcgggtgatgcccacactctcagcctgaagagcaggacctgtccgcgggtggggcccacccccaggcttccggtgcccgcgcggcctccagggcgcctcccccgggcgcatcctccgggcctggcagggagcgcagcctgggagtcaggggcgactggagcccacctgctcagcgcccaccgcggcggccctgccctttcccccgggagcagcagggacagccttggagcagcagc

SEQ ID NO: 55344 - DNA, 523 bp, Homo sapiens
aaagcccatcattataccatgtaggaaggtgagattttttttttttccagagaagaacgtgtaagtggtctgcccttgtctgaaaacctggacaagtgacacagactttccacccatggtgtttttaattcctctgtccatgtcacattataggaaaatcacctgggtcttagagaggcagtatctattaattcaattgcactcattgcgaaatacacatgaggtatttcaatctggcaaggtatacaccatccaccttgaacaaaggccaatttttcggtaaccagagccaccagaggccagacttcgtcagagcttgaggtttaaacccctgtttatttgggtatggcaccaaacgaagcattttctttatgttccagcagtttctggaaaaccagctgttctaaatttggtttaaaacatttgttaaagtcaccaataaatgaaaaggagagggaatcgagctggctttgcaataggaaaaagctctcacgtttccttaaacaagacgggttttccttct

SEQ ID NO: 55345 - DNA, 2130 bp, Homo sapiens
caaaatgaattgcttaaggcacattagcaggacgttagataacacacacgcagtaagtaaattatgattaaaataaccatagagtaaagactgtacatgctccaccgccataactctttttaaaaatcttttaaagatacctcccccagtgaatctgtttatcacctcctacaattttaatcaaattcaataagcatatttcttactctataaaatgtttttgattggtctttttatttttttttccaattggtaaatgaaagaatgatgtcatatgacagcattaaatactattaaacagaccataactaacatcagccgtataaattatacataagctgacatttttatgcacttcgtgaagaattgcttcatgggttgtacaatcttttccaaaacaagctcctcagaataacgtgactgcttatgtttcatggctacaaatgggtaactgaattagcattcatttatgaagttttcacagggaacccttctcattcaaatacttgtagattataatttatttttatctgaggcataatttttcatgtggaagttttgccaaaatcaatagaaccagagccaagccctgttccctattcccaacttagaccctcctcttggctgctgcctccacgtgtcttctctagctgggaaggtaaacaaatgagtctgcctcataattgtcatctctgccaaagtgctgagctgaatattattttttaccagttcagcccaccgcacttagaactctattcacacacgttttaaaatggctttttgcattcttacgcaaggagtgcaggctcttgttatatggcaggaaaacagcatatttcatttctgattcacaaggaaagtccatgccaaaagtgtcaatgacaaccccaggtttcgaaatagcctagattaacacagagaatgtgcaggggcttgggaaaccctcttctggaggaaggggtcgtatcaggtcctctttgtgcctgcagacagttggactctgtcccaaaccagacagtgttttcttatagacacgggcaatgtgcgaagagagcaggatctggcagaaaaaacgctgaggtattaatcaaataagaaagtctaagggccaccagttttccacagtgtatcatcacagtaaacatatgaggatgaataccctgtttgctgtgagtttaaatgtgtctgaataatcctggtgacgttgcagggacttttgattccagtaatttatcttatatggtgaaaattcttttgttgctttaatttgcaaaggttttctttcaattttctgaagtccagacagtaccatgtacccaagcaaaaaatgcaccaggagatgtgaattgagctaatgcatgtataaagtgctgggcgcctaaaagcttgacaaatacgggactgctattgtcattattgggattttcactgattcaaatgctgggtaatgttgactctggttcaacacatttgggtgtatctcttgattggcgagaatgcactccgactatgcctgtgccatttttgtccatttctctatacatttcatacctagccatactgctgtagcaaatgttgacacccactaggattttactttagctgagatattttgcatttgcttataatagaagaaaaccctctttgcacacctaggagttagtgcagcttgttagcccacacccaacacggatctcaaaactttgtgaatcccaaattatcaccctctccaggttttgagtctaaagcagtttggacaaaggggcacattccctggctgtggcttattgcgggcatgcaactgggtgcctggcagatgccctgcagaatactggagatggctgagttatgaccaatgagaatttcaaaataggagagctgatatgcagagacagctactatgtcagggaaattacgtgggcacatgaatgcatgtatacatatgtatgtatgtgtattgtatgtgcatgtgcacgtatgtatatgtgtatatgtattgcaagtgtgtgcccacacgcatatacatcagactcaaagatggcattttattcctactgcaactattaaggcttttttgtagcttgtggacacagctcttttcaccctggccttccccggtgaggtgcagct

SEQ ID NO: 55346 - DNA, 2425 bp, Homo sapiens
tctagatgcttttgattaaaaagaaaccaaaactaacaaaaaagaatatggtgtgaggcttagcattgtgaaatgagaatcaagagatgtgagtttgattctcaattctgctgcaaagctgggagattctggccctcaggattagtatcttgaatgtaccatttcttcacctgtacttaaaaggtgaaatattggacccaaaggctatacaaactccaaattctaatttcaggctttttggaaattataggaaagatgtgtgtatgatgatgatggctcccagagcttaggctggcttggagacgcaggggaatcaccccagtggaaaacaagaatccacacgctattgggcttatccttgcccaggagttcatttctctgtccctctctgacccaagcttctccctccagcctgctgtcagaagttgggatgagctggaaggaccatgaggcagagcagtccttgagcaaagtgacccttttgccactttgaaactatctattgagctcccattctgtttcatgatgattctaggtgcttgtccattagggaacaaacaaagatgcttccttccgtggagagacataaaattaacaagaaatgtcaaatcatacctcacatagtgaagtagctggtaactgctatgggaaaatgtagaaaaatgaaatggagtaaggcaaattggcattcagggtgtcagggcaggctgcccatcaacagatcctcagggtagccaccatgagaatgggacttctggtcaaggatttgatagacacgttggctgagccatgagattatctgcaggaagtgtgttctagcagagctcatggccactgccaaggtcctgaggccgagcctgcctgggatgttcaaggagcagcaaagaggccagaatgcctgagtcaggagtgtggggacttagaagcataggggatgattaattgcatgtggtgacttggctgggcctcagtgccctgataggtgacaaacattattctggatgtttctgtgtgggtgctattggccaaagttcacatggaaatgagtggacttgagtaaagcagttatcctctatgatgtgaggggcgtcagccaatcagtggaaggcctgaatacaaccaaagactgacctccctaagcaagggggattctgcaacagacttgaacttgccctcagacctgaatggcagcaccggctccttcctgggatgccagcctgtgccagcccaccctgcagatttgggattttctaccctccataaacacatgagtcagttacttaaaatagatctctttctaaatatgtaccatcccattgtgctttggtggagaaccctgactcacccaacacagacacagaactgtgggcatctttcaggctgcgggaagaccttgctcactctgaggcaaagccctggcagcatctccacgagggctgagggactgctttgaacaccttcctccttcccaggacagccagctcctcagcacgagaagctcagcaactcctttgaggatagggagtgggaaataaagggtcacaaattgtatgatgtttgacctagatgtaaaattgcctccccaatgtgtgaataacatagaataacctttccaccaaaaaaaaaaaccaaaccatgctgtatacaaacagcatctgattatatcaaagaagactcactcatagagtatggagcccaggaggcaggcagctcaggatgtgtctccaccacaggcccctgctcctggatggctcggggaagcacactggtgagggcatccccctgcccagccccaccagccctatctgggctacagctaaatcctctacttcccaggtccagcttagggccttttccatgaaaccatgggaaacctcaggaggaattttctcttccctgctctgttcttccacagtgacctatggacatcagggtgcatccctctgccatttgggatcctgctcgctaggactttcaggaacccagcaaatgctggcaggaggaaggaggaaaatgcctggtggattctgatggtgttggagagcaataacataaccactcccaggccctgctcacgacagctctgcccctggcccttccaggtcattctgacttctgatggctagctagagggaagagcttgggatcagagagggaattttctggaagcctcctgacatccatgtcctccagggcatagacctgggtaccttctcccatactccacaggaggcccctcccctgcaggcacctggctgccagccactgtcagcttccactccacatgcagcaggtgatgcaaactgactcaagttttcacatgactcaagtcctaagttgctggttcagcattggctttgtatttttttttgcatttatttcagcttcaaggaatgagtctgttggaaatcctatgcactaaaca

SEQ ID NO: 55347 - DNA, 903 bp, Homo sapiens
aaaaaagaaagaaaaggaaggcagagagggagggaggcaaggaaggaaggaaagagggaaggaaggaaggagggagggaaggaagggagagggagggagggaggaaggaaagagaaggggaggggagagaaggggagtgggagagaagggaaggagagagaagctgctggagagtcatcaggtcaaccaagactcttgtttgcaccatatcatgttggcaaaggttgaaaaggttgataaaaccccatgttggtgaaggtttatgggatcaggaaatccccatcaccctggctggactccagtgggaaaccaggttggagaacatttcacaacatccgataaaatgctgggcatgatctcccactgatggtgcaatcccaccgtaaccaatggaaccactcacagatacaagtacatgttcatctgtggatattagttgtagtattgtttgtgatagtgggagatcctatctataccatcgaaatgcctgcccattcaatggactactgcacagctgtggacaagaatggaggcatctgtgtgtgctgcagagggcaaagaaaacaagaagctagctgaaaatggggtctcattggtgcagaaggcagcacacacatgtgcacagctgaatagatgtgtgcctgctggttaggctagaaaatgtctgaaaggaaatacaagttcagggtggtttcctctagggaagttggcacaggagtgctgggcattcgcttttacttcactgttgaatgtttcacaattagtacatttgactgttttttaaatgaaaaacaatcacttgaacaggagaggactgaggagctcccatgtcaggccaaacattcccaggaaacatcggggaccctgagcggtttcatcacccactagttggcagcagaccag

SEQ ID NO: 55348 - DNA, 2572 bp, Homo sapiens
atcctgctccctctgaaggctccagggaagagtgtcctctgctccctccgaaggctccagggaagggtctgtcctcttaggcttctggtggcttgcaggtgcagccctccaatcctcctccccaagcggccttctgcctataaggacacgagtcatactggatgaggggcccactaattgatggcttctgtaaagtccccatctccaaataaggtcacattgtgaggtactgggagttaggactccaacatagcttctctggtggacacaattcaactcctaataacgtccacacaaccccaagcagggcctggcaccctgtgtgctctctggagagcggctgagtcaggctctggcagtgtctaggccatcggtgactgcagcccctggacggcatcgcccaccacaggccctggaggctgcccccacggccccctgacagggtctctgctggtctgggggtccctgactaggggagcggcaccaggaggggagagactcgcgctccgggctcagcgtagccgccccgagcaggaccgggattctcactaagcgggcgccgtcctacgacccccgcgcgctttcaggaccactcgggcacgtggcaggtcgcttgcacgcccgcggactatccctgtgacaggaaaaggtacgggccatttggcaaactaaggcacagagcctcaggcggaagctgggaaggcgccgcccggcttgtaccggccgaagggccatccgggtcaggcgcacagggcagcggcgctgccggaggaccagggccggcgtgccggcgtccagcgaggatgcgcagactgcctcaggcccggcgccgccgcacagggcatgcgccgacccggtcgggcgggaacaccccgcccctcccgggctccgccccagctccgcccccgcgcgccccggccccgcccccgcgcgctctcttgcttttctcaggtcctcggctccgccccgctctagaccccgccccacgccgccatccccgtgcccctcggccccgcccccgcgccccggatatgctgggacagcccgcgcccctagaacgctttgcgtcccgacgcccgcaggtcctcgcggtgcgcaccgtttgcgacttggtgagtgtctgggtcgcctcgctcccggaagagtgcggagctctccctcgggacggtggcagcctcgagtggtcctgcaggcgccctcacttcgccgtcgggtgtggggccgccctgacccccacccatcccgggcgagctccaggtgcgccccaagtgcctcccaggtgttgcccagcctttccccgggcctggggttcctggactaggctgcgctgcagtgactgtggactggcgtgtggcgggggtcgtggcagcccctgccttacctctaggtgccagccccaggcccgggccccgggttcttcctacccttccatgctgccagctttccctccgccagctgctccaggaagcttccagaagcccctgcgcgggccttggcttgcagcaaccctttagcatacttaggcagagtcccatatttccttcctgctggaggccaagttctaggggccttctggttactatggctggtgtttgtgtacatcataccctaactgtattcatcaacacttagagtaagcaaggctcgctggagagccacacacactgggcaccgtaatgtcggttataacaccgcagaggagttctgaactatgtatttcgcactcctgggttcatcatctcctgaaatctcagggtggtgtttgctctcagttgcttcagctgagtagctggctttctgtcctggaaagcagactttgtacatgtgtgtgcaacctatgcctgctgagatcatcatcagacagggaagcggcttggtccagagagctgttctcagtagaatgttaagcacagagagctgagaattagactggttatttacatagacatccaaatagaaacctatagagtatctgttaagtcaggctctcccgtcatctcccccatccctgggcaggtgtctaggagatggttttgttattttcagggccctctcaatggctaaaacactctgggagatgaacaagattttaaaaacccaaagcttagcgcacctggtgggtgggggtgtgaaaactttgaaggaaaccgcgtcaagagcctggctgattgttaatatcacgttaactcagagggccaggatacttgcccagacccggagtctgcctgcaagtagcagaggagagctggccttgctctgccgcgtgtctttcttcctgggccctctgtctcgggttggaatttgaatagtggagtagtgtctgccacagtcaggggcctggatgaagtagaccaccagtacggagctatactcaggtacttttcaatgtatatatcttcattaaaaaaaaaaaatctgggccaggcacagtgggtcacgcctgtaatctcagcactttgggaggccgaggtgggtggatcacctgaagtcaggagtttgagaccagcctggccaacatggtgaaacccagtttctactaaaaacacaaaaattatccaggcgtggtggtgca

SEQ ID NO: 55349 - DNA, 833 bp, Homo sapiens
ggtgagagtggtctttatatagacactcatgatgcacaagccagcccttcgccccactcttgttttgaagtgaaaggatttatatgggagggaggaggtttgagctgtgcaggagggtccttggttggcatgaggattttgtgaacctacgctgttagctctgcaggcctgtcttggacataggtaagtagaagttggagaccttgtgttgtggaccaaatgttgcaagatgtgtgttctgtggcttttcattaactgctgcatatctgctggttggtggacatagtctagttttcttttgacttaaaaaaattaacagtacagcttatatcggagggctgcatagtttgggggaaactaatgaatatagtatggaatgtaatgaatgactgacttcttcatagagctattgaagtgatttatgaagaggaagaaatcatttttgtgactttgttgatctttgaagtattagagtggctttggcaggtgtggatcacccggaaaggaatcaaacactgagtcctgccaaggtgctcggtcccggcagcaaagccagtcctcagcagcctgcgctcccgaagctcctccagctaagtaactgaataggccgccctgggagctgcccatgcggatgctctgaatggtgaaacttggttttgacaccacaagttgttttcagttaaatcagtggctcagcagcagagcagggttctccaaggaggcctcgtgtccccttcaccccacctggaggtagctgttctaaaaccagtaaaaaattctacaaaaacattttcttagggttgttaaattagtcatagtgtgtgtaaccatga

SEQ ID NO: 55350 - DNA, 1037 bp, Homo sapiens
gattttattaatatttcgaatgttaacgttattatttatttattttgagatagagtctggctctgttgcccaggtgcagtggtgcgatctcagctcactgtaacctccacctcctgagcaatcctcgcacctcagcctcctgagtatctgggattacaggtacccaccaccacaccttcctgatttttgtatgtttttgtagagacagtgcttcaccatgttgcccagactggtcttaaacttctgagctcaaactatccgcccgccttagcctcccacagtgctgggattacagacatgagccaccgcacgcagcccaaatgttaagtgtatgacataaaattcagggttactttgcctaaacagttcagtgtctctgattaatgtgatttctgtttcactgacagctttcatgtaaatttaaaactagatagaattacagagcttcagagttgtacagacttgtagaggtaaagtaaagccaaaacattgagctcagtgacggggtcagtcacttcctggtgtcagagtccactgacaggctctggcaactcttgcatcaaaatcctttgcacacaggtcctttcttgctcttagccagtagcagctgtcctgggcagagttccctcagtgaacctggaaacggcagtggctggaggtgagaggtgtccatgtactcacttgttcaaagttgccccctcttccctctctgggcttgggccctgatacctctcagagctaccctgcctcctgcgggggtgggggaggatgcctttattatctctaggccaaaggttggacctccacatatgtccatgatgagggacagcagtcatccctttcaagaccgagaaagtatttaactccttggaaaattgagggtttattttgcagtggtttggaaaatgtgctgagggtggctgtagagttaactaaatagaatgtttcagagtcacagagatttgtaattggtgggcttggtttgtttttatagtgcttactcctttttatctgccttgtggatttatgcatttatt

SEQ ID NO: 55351 - DNA, 2191 bp, Homo sapiens
cctctccaggcacaccaggcctcatcccccagctctcgtggcgggtgccttcaccctggcctgcgtggctcctcgcccgggggcccctccccatagttcagttctctgtgtaggtgtcagtttctccataagctctcagctgcccacactctccccccgaagtgtggccccagccctgcggagtggttccctaaccgccactctgcccacctcgtgctagcctgggtgtgggcttgcctgctggctctgggctcaggctggggtgctgtcagggttgcaggggtcacagtgaatcttcatcttccgtgggccagtccccttcccagcgtccctcctggggctgtgggtctggcctcccccgttgaatggccctctcttgaggttgttgggcattggtgaagatcctgatggggtctcatcactggagtcagacgtctttcttcctgggtctggggcatggcggtattactgtgcgggctgttgggagagggtctgttaccctcatggctgcttgtgacctgtccaggccaccactgtgccagcctttgtgtggctggtattgtggcttctaagttgagcctccgcctggctgggttgcgatggtttcactcctgtcaggttttcatgctattgaaactcacttttctcactgcctgatttctgccttttgtgggtccctcctggtgtccgtgatgccctcatttagtctgcaggcatccccccacctctctgctcgcccggtgtgcacacctgctaggtcagccctgggcatcgcatcagagacgctgccgtgctcggtggcctggggcttctgtcctgtagaggcctcagccattgcattttaggaatcggcactaaactaacttctactgctgcccacagaagaactgtgccaaatgctctggttgtctaccggaaaaaaaggtagtatgcaggtttcagtggcatatcaaattccatttctgtgggcctttgtgggaggcttgctcttagcgggggctggtgggggtgggggggggtgggggtttgtgggggtgggttccagctcattgttgtgttcaggtgaaatgaggcagggctttattttgatcctatttaggttgtaagcaggtctgaggaattcacttcctcatgcttcacatacctaaataattagccagttggatatggacaggagctggaatctgttgctcatttgtaagccagattctgaactcattcattgttgcagttataaactggttgccttttttcggttcttggaatgatttggatggagctcacctggtccccccagctccctgctttgtgattgattcagtgtgttcccatggcttcaggccacctttgctggtcaggggagctggttcagagggcttgaggccagcctgccctttggatgagaggcccatgccatgatgctggtcatggggatagcaccacagggctcagtcggggatatgccagagctttagggtcccttgggccagcagctggggtccttgggcatttcctgggtggcggtgctctctggggtgcagagttggtcattccagggcaggcagttcacttggccacaccaggtttggctggaagccttctccaccgcattcccaaccgctggcctcccaagtttggcttcttgtggtcagggcccagaccatgataaccttgaggactcctctctccgggagactgtcggggctaagctgcctgtggccctccaccgccctgctccttcctccgggtgggggacaccccatcccccatgcccctacttcagcttgctgggattcacccccagtggccttccaaggctcctacctttctccctggccctgtctctgcacactccaatgtcttcccctttggctgacgcttggattgggggtgaactcgaggtgtggtctgtgcagaatggcgtgacagcccttccagcccgtcacggtgtgtagtgcccaaagccctggccgtggccatctcaggttagaccctcagagtggcactgtcaggtagaggagtcaggggtcttattgatgaggaaatagaggcttgagagaggagtgcgcagctagtgtctgaccagcccccacatggggcactccccagtccgaatgtctgcagtgcagcttcaggcgctgatgtgggcaaacccttcctctcccaggccgtcccttcctgcagctgctcg

SEQ ID NO: 55352 - DNA, 633 bp, Homo sapiens
attgctttacctttgctgtttaaaagtgtgtatatgatatagaacacgttattaaatgtgcattactgttttgaaaaaggaaaaacacctgttaattttatagataaattatggaaatctgtggtagacacagctccaggcagtaatgcatttccaagcgaatgaatggacatttcctatatggatcatctacagatattggtaaggtttctttaagtctcttttgtactctgcattcgtggctaaacctatgcactttgaccctgttctgcaaaacaaaccatggcctactttcagactctccttcgttcttttgctgttggttacggtggcagagtgcctactgtgtacacagaatctagacatttcacattgaattatctgagtatttatgtgccctgacaattcagcgttaaagttcaatacaaatatataaattattaagcagttaaccagtgacacattcatcagctgaacgtcttttattgtggcctgtagacagattattttcattcagccattaaagcacaatattgtcgggtgaaattctgtttctggattttctttgtctctgttgctgctatggaatttcattgaaagcatcgaaatatgagactaacacagaatactgag

SEQ ID NO: 55353 - DNA, 1790 bp, Homo sapiens
tctgtgttatgacagttatagcctgtgtcatacgtactcagaattaactaacatagtcttcctcctaacttccctgcatattggaacattagaattcttttggttggttgaagaaacatcctagaattttaaaatattttgtatctaatgtaatgctgaaaacatgaaatccacataatgtatgcggcatagctaatattagaagcatgttcaaggagcagcctctggggttaatagagtttaatttgcaagacaaatgaaagcttattttctcctaggctctctgctcataattctagtagggccacttttgaagaatagtaccttcaacagacacagagaacccttgttggacagcaacagaacttgctcacagtgagacccgacatcccctccgctcagtgggcatttcctacagtgcagagttgtgcgttgaaaagtgcctcttcactccctacatgaggttcctcacacaaccccgcacctgggcgggcgggcgggcgtagggggcataaatggcttatccctatgaacttcatcattatgaaatgtaaaaatggacagtcccattgccccagaaacagtgggggagcttctaagtaaatccaggtttatctgcatttgggaatattctgcattttttgaaaatgatgttcccaggaatctttataaccaaggagaatccttactgtaaacattccacctgaatttttccaaaaaaaaaatagatcattaagaacaatagacaaaggaatatgcttttaaaaatagtgattatctctgaaggtgggattgtggctaatttttaactaccctggtgtgaccttatgtgaccctgtgtgagtcaacatgtctggcctcaggggtgtgtgtggagggggcaccctttgccattgcattacacaagtctttgaactgactgtccttcttactaaatgctattagcatctcttagtcactgtggcagccaaaaatgcttccacgttttctaagcattccacaggtgtatgttcctggcctgattcaggatagaccagtaactcctgaaagtaatcaaaggggccgggtattgtggctcacgtctgtagtcacagctacttgggaggctgaggcgggaagaccacctgagccccgaagttcaagactgcagtgagccgcgatcccaccaaggcattccagcctgggctgcagaataagaacctgtctcttaagaaaaaaaaaagaaaaaaaggtaataaaagagcaccaggaagcataggtgatgcacctcccatgtagagaaggctgggcgagcgaatgtgtagtggtttctgcggctccattgttagtgatgacttacggatggaaaagggagttttgtagctgagtgaaaactgttagaaaaccaaatgccgctgtcatgtttttgtctcgtgcgcttccccttcaccttcatccttgggcccatgctgtggccaactgaggagtaccctgaggttaagcgtcccccatggcaggtgaggctgtggggtgggaggagggctgggagatagcagattagagatctacaagagaatagaaagtttgattcaaggagaaaaactggagtaagcagtttggagaagtcagatgtttaaaacatgaaaagaaatgtaactttgagttgcagtggttttgagtttcctgatcttgatgtgccagtaactccctgggggctgacaaatccagggggaaggttcaaaggcagagagcctgtttgagctgggccagggcacagaggcttgctcagaagacgtggacggcagcagagc

SEQ ID NO: 55354 - DNA, 1313 bp, Homo sapiens
ccctgaagtttacctaaggtttgttgggcaacttcatgaaaaacataggggcaaaagttccatgaaaatcgttagttttctccaagtcatatggtggccctggccatggagctagaccctgctggcctggtctcaccagggtccagagagtggtgtgctctcaggcaggccaggaagaaccggaggaggaggcctccgcagctgctgacaggagctccagggcaggagtggccagcaaggaaggtggcaccggaaataatcagacactctccaaaccacccctgcaagcactgaacccccgctgagccttttccccctcacttctgcccatggcagtgtttgctgctcctagagccgaggacaggcgggcccctggggcttctcagtcaagtccctagtgcttaagcagagttgggattggccacacctacccctgcctccctggctttcagcccacgccaggccaggctgcttcctgggctggcaggtcatgataggtcttggtgaccaggaagacctcagagtagccgccaggatactggtaaaggctgtctggctcccccgtggccctgcccctcttggaaagccctacagtgcgggtggatacctctagctgggacgaggtccactccagccaagttttgggatggtagtgcgacagccgctcacatccttctctcttggtgttctagaactctgaggctggctgcagacccagggtgctgagctcagggccttctctcgagggtaggggctggagtcccctgggccaggcctgcctgcggatggttagtggttgctgtgggggctgggattccccaccacagcatgtgtaagccaggtttttaacatttagctcaatcgtttactcctgggcaggggccaggtgtatggattttactgtttgaagaaggggaggtggatggtggatggttgctaacagggagttaattggttctcccagatgtggatacgcccctctctgtctggcatgagtttggtttgctctctgtccaggttgttatcttgtaacatcagtgaaatcaacagtgagggggcaggtcttctagaggaaaagtcttttgacatctcagagccgcctggaagctgtggagtaacagaaatcaacctgctttgcagactgagaggagcgggtccattgtaacatggaatgaacatttccttgaccaattcctttttctgcacattttaatttctgtatatgtttaacatacttttgcatatcatttttcaccatagtctcacttctgagattgagaccaggtttatctatttcaacctggtttgtctat

SEQ ID NO: 55355 - DNA, 779 bp, Homo sapiens
aaagtggattagagccgagcccctagggggctccccagctgtgccaggctttgcctccagggctcaggctgtagtaagttcgggctgaggacaacagagggataacccaggaagcccattcatcttttccatggtacttgaaattcttatcttctttccaaggctgccaactactactgactcttctcagccctcacgtagctgctctgtgccttctgcccaggttttataaagacattcagtagaagaaacaagtatagagtgcttgcttcattttacctggaaccagaatccccctttccctccatttgtgtttcaggttagtttattctggctgcttttgatggccagggagcattaggtcaaatagctgtgacttgtgccagggacaccagctcctggggattccccttccaggccagtggctgctgcacagggatgtcctgcaggagctgaggacctgctctttcttgctctctgttgctctttgttggccatggccacagcacagctactgagatgctctgcaagcatgacccggcaggtagcacctgtgtgtatgggcctgagtatgcccctgctagctgcagcctggctaaggaaaagtcccaaagcctgggctgctgaaggatgccccttccccccaggaagccacacggaccttgacaggtcaccacccatggagctgtgatggttgagggaaaggagactcctcctcaagaacttggaagcacaatggcctgcctcccaggaaagagagcctcagtgcttgtcggagc

SEQ ID NO: 55356 - DNA, 817 bp, Homo sapiens
agttttcagatacatttgtaaaatcaggtgcctgattgctaaatactacattgtttgagctatacttcctcatatgttgcctggtacggaccagttaagaaatggtttcccatgagaaactgacaatgaagctgaacatgtttgataaactctgtgctcatctatggacatataattgttttattatacgatacttttacacttggaaagaaaggtgctccgtaatttggcagcaatttgtcagagcagcactcaaggctggcgctcagatgaggcccttggaaccatgccattgtttctcggaactgctctgtgctccggttaggtttgcacacacctccctcgtttcattcctacaagtttagtaaagttccaggccgttctcccagaacacctaacggaaagcacagaaaacaaaaccaccaactctgtgttcgccgaggaaggcaggaaattggcctctgcttcttgcggtattgacgtgctgctttcattgtttcttttccaagacagctgtccccgaaatctctttacctccaagtcaacagcaggctaccttgctttgctttgcttttttttaaagttaggcataacaacaacagcaaccatgataatgattaacagtttgatttcaaaacgttttctgaagaaatgacagtaaacagtgcatttgcccagggaaatccaccaccccgccagccatcagccggtaatacaactgcatgtgctaatgaacccaaagctgttaatgtggtttcttcagttaaattgattcatgaattttgaagagaacattatctaatgaattttctttgaa

SEQ ID NO: 55357 - DNA, 476 bp, Homo sapiens
acattagcaacataactacataataagaacatctgcagttccttttccgagggacaagaatgcgcctcaattaaggcaatggggattgttaaataagatatagtatattttactaacagggagacccagaccctaccccaacagactgcaagccgtcagtgtgcctgaatgaacacaggttgtaatgtgtaaaaattaaataaagtaaaattaaattgctcaatacaaagacattcctctagagggtgttagtgatttcagtgacaaagtgctatttgctgacaagtagtttacacattaaccagctgaatccaagggggaaaaatgccaatagcaattatatcaccttgaggttattaaatgtcccactgataagtaactaggtgaacttgaccaggtgataaagactgctgtgagcaaatgattgtgcggtgaagaatgtttttctgtcctgctgtttctccagatagcttttc

SEQ ID NO: 55358 - DNA, 1787 bp, Homo sapiens
ctacgcagtaaagacatctaaaaaaatgctgcctgtattaactgggaagacggatcctgcacttaccaagcctgtgtagctctagaagaaaaaaaaaagcaaatatgcggtatgttggctgctcactgctgcccctagcgaggaactttgaaataaacgaggttaagtaagaactggccaatttgcaagcagaggtggaagataaaatacaggaatgccaagcagctctgtcttccagctccaatcctgcagtacttctttcagtgcccctaagacgctaagctccttcctccaacactgttttttgtcacctcccatcctgcctacccccggtcatccttcaagtctcacacatacctgacttacccacgcaccctgggatcttgtgcaagtctccccattaccatctcatcttaccctctgctcatcagttaatggactcagcccaagaagcactaacacgctcaatgccgggtaattttctgcgcgtgttcgctccccacgtactcgtcccccaacacccagccctgggcctggcacgtggcaggcgctcagtgaacgagactcaggaacagtcaggtgtagacggcaggagaagacatgacacggataccaagcacccgaggtcctgcaatgagtctcggcccatgttttagggagcctgggtctggagccccagtgagcgtgtgggtcaggaaggtgcccgagctccgcgcccgaccgcgcaggcgcgaaaccgggagagcggcgtcacaaccccgccctaacaggccacgcccatcactggccacgccctcccagggacgtacgcgagcgtgcgagtgtcttgggccaggcctcctcacaggcagggccgcgccggcaaaaacgaggcgcggtgggaacccgcccaggggccatccgccctcccgtccctaacgcccaggccccgggggctcaccacgtcccccggaacctgcagatcctccgccctccgctgtcgccagcggccgagcgctaagctgtccatgcagccccagggtcaaaccctcccggcatctcaggcctggccgaggcccgcgcaccacgcccccttccgcacaaggccctggggagccaataaggagagggaggggcgggacgccgcgggaagcgcgagagcaccaaggcgaggaccgcaggcaggagtagcagagaccagagtcttctgagactattgggatgctgtgggcgttgtccgtctgccccaagtcattacttcgcagagaggtccctgcatatctctgcttgtcgcttctcccttcacaggagcagccgtggggctctaaagaaagcattctttcaggatcccgccaaacttttgacaacaccccgtggatcggctggaggagcgcccgcctcctctgtcttatgattggttgttaggcctcgtggggagccgtctccctgtggctggttggctaatagatggcgcagcgggtcaattagcttgagcgagacagcgggtgtttctgggagttgtggtccgcagggctgcctcgcttccgggtgggagctgctgttgccgcggtgggaagacgcagagctttcaggccagccccgcgcggctcacggcttttgtggctggtggctggtggctgctggttgggaggccccggaaggacttctactcctccgtaggctggagggcactaggaggtcgcaggtgctgagctgccggggcctttgggctgtgctgaaggggaaaagcgcagccactgtcgggagtgtgtgctgtggaggcagttgccgcggtgatgttcgctccg

SEQ ID NO: 55359 - DNA, 3478 bp, Homo sapiens
tgaagttcaagatctaccacttctgttcccagacctcccagttcttcctcacctttatgcaatttcatttttgataatttcagcttcctaaatgtacacatctgacttcactttcactcacatgtctcacccccacccctccaccggccccttctattacagacccaggagacacaggaagtgcaaggaaggtctggagccccaaaagccaggagcctcaggagtcaggtgtcctgacagccaggaaccctgacacccaggagccctggcacccaggaaccccaacagccagaagcctctaccaccaggagccctgacagcaaggaaccccgacacccaggagcccctactacagccaggaagccaggaaccctaacaccaggagccctgacacccagtcaccccgacagccaggaagccaacagcaagaagcctctaccaccaggagccctgacagcaaggaaccccgacacccaggagcccctgctatagccaggaaccctaacacccaggagcccctacagtcaggaaccccgacacccaggggtcccgacagccaggaaccccgacacccaggggtcccgacagccaggggccattacggccaggagccccgacagccagggacctcgacggccagaatccactacatccagaagcccttataaccgggaacctccatagccaggagcccctacagccaggagccccttcagccagggagccccgaaagccaggagccccgacagccaggaaccataacagccatgaaccccgggagccaggaggcccgcagcggagtgcccagacttggcagggtcagagccccccagcgggatccagagcccgccgccgaggccccttttgggatttctcaggctcggcagcctcagcgcaggcaggggcggggctttccctcgcgcagccgctcagctccccgtggccccgcccacatccggccgccggcactggattgcttctgtctggcggcggcagcatggcggcgggggcggctgaggcagctgtagcggccgtggaggaggtcggctcagccgggcagtttgaggagctgctgcgcctcaaagccaagtaagcggggcggcgagcggtaggagtgaggagccggagcgggagcggccgcgagaccgggccggtgtggggcggcgggtggcccagcctggcttcttggtgcccggctcccttcggcctcgggggaccgggcccggcgccacccgtagactcccccgagcctccgcgtgagtggcccgagccgcaggttccccgccccggaacagcgagcagggcgcgaggctcgcctggaagccccggccccagccctggctccgaccccgacggctgtccaagcccgggggacgcgaccttcccggcctctggcctgggcggccccgccgcgggacggaggcggtggtgactcagccgtgccgcagtggcggggcgggggacggggcggcgccgagaccccggccctccgcgccacggagcgggacccacggctgcgggctccacctttcctgtgcccgccgggagggagcggcaggctcggcgtcggcccattgctcttcagcctcccttcaggaacgcccctgtcgcaggaagagcggcgagggaaggccccgttgcattagctaggcctggctgccttttgaagtcagcctttaaagtttgttggacagcaggtagcctcagtcttcagacttaacctgttgccggagacagagatttcctgttccatgaactggtgtagtgagagtctgttcagatttggcgccggtgtccaggtcttcaatccctgggaagactacaaaaggagatccagaggaatgcatagaaagcgttttctgggtggactagaagctctgaactgcaagcatgcttacgagtaaatgcttactagcgtgcgtgcctgcagggaaaggtctgcacgtggactctccgtgataataccacctcacattgtagactactccaaggactgagttgttctcttagttgtattattagcggttgttatgggaactcttatgtcggattgcctgggatccagtcccaccgcagccactcagtagccatgtaacccctgggcacgtttcatgcccaagcctcagtttcccgacggtgacatagattagcacctgttagtacctcagggttgttgtgagggttaaatgagatgacgtatgtaaaatacaaataatacaatgcctagtatgcaggaagcactcagtagatgttggcacttagtatttcagtaggaagtagaatggttcatggaattcacaggcaaaaagctttgttttgttttgtttttgagacagggtctggctctgtcacccaggctgcagtgtagtggagcgatcacggctccctgcagcctccgcctcccaggctcaagtgatcgacccacctcatcctcccgagtagctgggaccacaggtgctcaccaccacgcccgtctaatttttatttttttttatagagacgaggtctcgccatgttgcccagcctcgtctcgaccttctggactcgagcgatctgccctcctcagcctcccaaagggttgggattacaggtgtgagctaccacgtccggccagaaatgcttattgatctaaattttgttttgtttgttttcgagacaggctgttgctctgttgcccaggctgagtgcagtggcgtgatctcggctcactgcagcctctacctcctgggttcaagcgatcctcccacctcagcctcctgagtatctgggactacacgtgcggtccaccacgctgggctaatttgtgtatttttcgtagaggcagggtttcctcatgttgcccaggctggtctctggaactcctgagctcaagtgattcgcctgcctcggccttgtaaagtatcgggattacaggcttgagcccccgtgacctgccctgttgatctaaattgagtgaaattttgccgactgaatttgaattagaggcaagtagtactctgattttgcaatggagagtgcaggtgagatggggtgttgcctttggaaatggggaggggtgcgagttactgactaatggttagaaatgctttatgggggtgatgaaattaaagtgttatttaaacagctctttaggcatttcaggtttacctgggaaattgttacggaaaaaagcaggggttggggagggacatgtgacatttactcactgatggaagctgggctctgactcatccagtacagatcagcacaatcacaggagtcaccagaagtggcctcttgaaatgagcaggtcttgtgtggacctgccctaagtaaacgttttgaatttaccatcacctgaaaggctgttttgtctgttttacatgtttgttttaaatgcttcatgttttaaaaagtccttaaactatcaaaatgaataaaagtgtttttttttttttttttttttgggggggagacagagtctctctctgttgcccag

SEQ ID NO: 55360 - DNA, 1236 bp, Homo sapiens
tctacggtaggacaggtcattcctacaccccagatgacaccttcaagctccctcctataagcaacatttcctaggcccctgcctagtcttctcaaactcacctctcctttctgaaagttggcctaaaccttccaaaagcaccagttgttaatagctattgaatgagctattatcaatcaaataccgtgcattctagggagtaggatcaataactgcttgggtcatgcaaaactaggatctatgcctttctgtgattctgctctgaagctccagtgagaaggttcaggccagaagggtgctctttcagaggggagtcctattttctgcttccaagtgtggaacgcctaatttattgcaaagacaactgggccatcacccagcaccccatcttcctcgtggaactcgtccctggaaaacaggccggggttgccctctatgctgcctagagggcctgcctgccggggctgcccgctgtacgtccttcaggcctggctgggaggctcagctggccccggggcccgcatgccgggcctgtccactgtcctgccttcagggctcgccagcctgggctgcccgcggtcctgtctgcaggggccgcctgccgggattgcccgctctcctgcctgcaggcgctgctgggaggctcagctggccccggggcctgcctgctgtcctgcctgcatggaccaccaggctgagctgcccgctgtcctgcctgcagggcccgcctgccggggctgcccgctgtgcagcctgcaaggcccaccttccggggttgccctctaagctgcctacagtgcccgcctgccggggctgccttccgggattgcccgctctcctgcctgcaggccctgctgggaggctcagctggctcagcctgcagggccggcctgccggggctgcccgctgtacgtcctcgagttccgactggaaggctcagctggccccagggccccatgcggggcctctccgctgtcccgccttcagggctcgccagcctccgctgcccgctgtcctgtctgcaggggctgccttccgggattgcccgctctcctgcgtgcaggccctgctgggaggctcagctggccccggggaccgcctgccgggtctgcccgctgtgctgcctgcatggaccaccagcctgagctgcccgctctcctgcctgcaggcccggctgggaggctcagctggccccggggaccgcctgccgtgtcggcccgctaacctgcctgcagg

SEQ ID NO: 55361 - DNA, 3185 bp, Homo sapiens
acagcctcttcaggcacgagggtgacgtgtgacctcagggcacaagggtgacgcacggcctctccaagcatgagggtgacgtgtgatctccaggcatgagagtgacgcgtggcctctccaggcacaagggtgacgtgtggcctctctgggctcagattcctcctgaaaatgtccctcatggatcctagccagcgaaggtgccgggacgtgcatttccagcgtgccatgcacaagggtaggaggcagaggtagtgtttctcctcctccccctgtcagtcccaaggccacacagaggtgatggctgaagggggctcttttccatccatcagtcattgcctcaaatgccgtcccctgagggcctgggtgggcctgatggcaggcttgctggccatttctccttgaccacctgcaatgaggggctgagtctaccacctccttgggcagccatggacacctgcacattccagagctggatgactgctgagtcctgatggaagccaagaactgcagaaaagtccaccccacactcgagacactcacccctgcggccccctggcagccaggactcacgagtgccttctgagagcaacaggccccgggcaccaaaaatacacatacgtgacgttgacttagtacttaatgcagcttcataaaagttttcactaataacagaaaattcacaacaaacagcgtaaattgcaggatagatggaatttccgtgacctctgactgtggctgtgagcggtggtgaagagacacctgcgtccactcagtgacccagcgttgacatgggctcctggggtggacatccccaacttctctgcactcagcccatcctaatgcccggctcaggagctttgatgaatgatcgatgcagcgcaagtatcgattttctcattggtgatcattttcaggcatctgcgtctttttgtgtgtcctgcgttcttagtactccaaaagtggcatgagtctcagtgctatttagaacaaggaatgaggtcacagaagctcctgcaagccactcagccctcagccctctgtgcctcagtttcctcttctgtaaaaagaggaagataatagctgccatggactggatgtctgtgtccccagcaaaacaattcaggttgaagccccagcctgcagtgtgatggtttgtggaggtagagcctttggaggtgattgggcttagaggagaccatgaacacggggccctcactagggggttagcgcccttttaaagagaacgagactcgaaatctctctctctccagtgcattcaatggaggaaggccacgtgaggccatgatgagaaggtaccagtaccggctggaaaccaggaagaggccctctccagacaccaactctgccctttgctgcatacgccatgccatctatggtattttatcatggcagcccagacagaccgaaataacagcactgaccctgagtgtcgtgaggctgacatgagtcaaccttgaaccaaaaaccaaatcaatcaacggaggtgggtggtggcttgtgtgtgtgttgcttgttttaacaggtgagggtaagtggcttgctcggggtcccacagatactcacgggcagggctgggacctgaatctgggtctgtttgacctccagtcctgggcctttccactgggtggcattacctccttttaatgatgcaatttcctaaacataccagaaagagacaaacccttcccccaaagaactgacagtggctgaatttcccagtgaaggtaacacggccatagctgcgtgtgctgcagtgccgggtggtgagttccttcttgtgtgtgcgtgtggggttttgtttttaatgtagttttcctcttcctcgctgccttttacaacctaacatgattagtgccctggaaggtagagctcattagagatgccgaatctggaagactgtctggaatatcaagcgtctgaaacaaagtgagtgagtccttcagaacttctcttcaaatcagcagagcctggcctcattaattattaactgcactgtgacctaaataagtcacaggatcatacttcatttaaacgctgcttgtcacccacagtgctcatctggtcctctaaacggttcgagcgcaaaggaaagaagacgttgtcttttaagtgcaattataactacaggaattaacacagcccacccttaactggctgaaatgcctccattctccatcaaacgctgatgccatggtgagccccactgtcagcaggaagagaatagttggagcatgtgtaacaaggtagctaaaaatgacatttctctaataaatatcattgtattatgcagtgtccatctgcgactgctaaaaatttgtcaggaagtttattgttggatatttgccaaagagatctgtttggccaacaattaatgacagttaaatgatgttgattagaatacattgcacatcttgtagaataaatgctgtccttgctgatgcattcagtaaccccttctggctctggatctgtgtcaggtcagcaacctctagcctcctctcccaggctcccccgtgatcacagaccctgtgatgggaacagagcccggagcagcacagatgccacagatggcaactgcaatgtctgtgtctctaaccttcgctctgctgtccagggatcagccacaaaaggccaggagcatggcccttcccgtgtgctagccccttcttgtgaactttctggctattttctgtctctctttgccccagcttggcctctgcagctagcagctcacaggagcccaaagtgtcctttaaagtgactagctgaagggacattcatgcccagcatgctgggtgtcctcagccaaccacctcggccagaggggcctccccaactcagtgagggatggaggagagtccactgtgaaatggtggaagcacctcgtgtgcctctgcaaagtgggagagctgagggagcattgggcatctctgcaggggcaatcttaatgccacccagtgatcctggggaggaggaagaacatcaccatggcctgaatgatccaaatccaggctcccccaagctctggcattgggagtgtgagagcagcagccacagccagccccttcttttctttaaaccctcggcctcctgaacagggcacgctaagtttcaaaaaggggagacgaggagacggagagaaggggagaggagaggagaggagg

SEQ ID NO: 55362 - DNA, 752 bp, Homo sapiens
ccttccagtaacctcccagggacgtggtggggaggtcactgtgaatgcagaaggccactgagtggagcatcacaggagtgctgtggatcaggcactggtgggtcatacaacccttcagacactggcacctgcaggctctgcagcccacagggtggccagtgcctggtactcaccattctgagctaactggcactgtcactgccccctcctcctgctgccactggccagcaggtccagagggcagatgttcaaagagcaagcctgtgccttggagttaccctccctgctaccactcactcacactcctatgggcctacagcaaacacgtgggcactcttaacctcagctcacagcaaagccttggcatccctgaggcccagagcgccgacctctgccaaggtcacctgtggccaagggcatggtgagagactttctctggggctttttcctccttctggacgccatgtccctgagctgattcacacgggagattcatacattgctaaataagactttgacctagcgccgttccctgaagtttcccaggtctgaggagcaaaacaaacaaatgcaaaggaaaatacaaagcagataaagccatgaggtagagaccaaggacacaccctccacacccagcaacgtggaggggctgcccaagcccactgaggggcgtcggttgccatcaataataacttcacacgctgtccatgctctcaccttggtctcatcccagaaagtaacttcattgatat

SEQ ID NO: 55363 - DNA, 635 bp, Homo sapiens
agaatggcgtgaacccgggaggcagagcttgctgtgagccgagattgcaccactgcactccagcctgggcgacagagccagactcggtctcaaaaaaaaaaaaaaaaaaaaaaaaaaagctgcctggccttttatgtaatcaggagacagaacattaaaaacaaaatgagagatcgttccacagcatcaggctggcaaagtttaaaggtcagcaaatcctaggcacaggcgagggctcaaggtcaccgccagtgccctatttgcaaggcgcacgcacctccccctccgcggagcacgcacaagtgctgggccctgcgtttctctgctaagtcacgtcagcaggagctgggtcagcaacttcttccatacagggccgggtcatcgtttatgcttttgggtccatgtggtctctgccatgcctagtggttgacaatgtgaagtgggtaggtgcgacctctctccaattaaacttgttgcccagaggcaggtggagtgttgtcatttgccggcccatggtacagagacacttgtgcacgtggacatcaggcaaatggccacagtagcaacaggctggaagcagccccctcaccactacccaagtgaaatggcacagtcctgcatggggccaggggaac

SEQ ID NO: 55364 - DNA, 3613 bp, Homo sapiens
aagacagtgggtccttcaaggaagtgatgcccccgccaccgtgacacggtctcgtcacagaatcctacctctcctgcatgttagcagtgacatgtctaggagaaaagggccaagttcatggctacagtgagctataatgattgtgctactgcactccagcctgggggagtaagactgggcttgtaaaaaaaaggaaaaggacaaatacgagcatcctgcgagtcaacaactttagctagaatgatcaagagatagaaaggaacagaatcagcccattttgccattaactctttaggaaaagcagttggccccagagggtacactcagaggagagagtgcttgctgcttccatccgtgggtctggctgcaaggctcccattgttctctgttccgaggtcaacaaggggcagtgaaatcggacaggcagaggtgagcgctgcctgagccaccgctccgtcccggatttgcaggcagctggagcccgcgggaccggccaaccccgcccacgccgagcccacagtggccccgtcctgccgcgcggacactcagggcggcccaaggaatcgcctacatgggatccaccccgcgggtaactatctttttatagaataaacaaaacagaaaaacaaaaatctcgtaactccggcgctggccgccttgcactgccaatgactcagcagcctgtgtaagttacatattggagagaggaccgagccccccggagccccctccacctcccagcgcccagatcccagccggacagtgaaacgcacaatgtcaggagtaacgcggcttcacaaccggaaaatgggtgattttatggcaaagagtttataaaaacatcccttggactttattttatgacaaaagataggaaaacacctcttaatctatttcaaaatagtaattagccaatgtttaaatttcaagaggaaaaatccgaattacaggattttaaagaatatggttttaggccaggcgcgcctggtggctcaggcctataatcccagcactttgggaggccgaggcgggaggatcgcttgagcccagttcagaccagcctgggcaacacagtgagaccccgtctcttaaaaaaaaaaaaaggtaaaaaaaaaaagcttgtagtgttcatatgtatatatatatattattcaatatattacggtaactaagtcctgcctagtaaaatctttttttttgtaataaaattagcaactcactaaatttatgtgaatatatggttttaaaaactctcaatgaagattaaaagttcactgtcagaggtttcagcagtcctttcccaagcttatttacatgctaattttgcttagtaaactctggcttcaaagaacacaaaggtcagctgccaccaggtccctcctccgaggctttggccctagggaccctgggaaggcggcttcagtgcccgcttccctgagcaaaggctcgtctggactctgacgcggacccaccgggtggggtgggtctccacgccacccggctgtgcgtggggcaagtcctgcaccccgggcctgcgtttcccgctgcgtgaacggatggtcttgcgaatctagccaagggcacacagcgagcctctactcgggcattaggcaggctgtaacgactgagtgctgcacgggcagcgtccttttgcttgtgttttcttaacccgtaagtcatttaaagctttgttttggaacgaccctctagtgaaattggaacatgcccatttaatgccatattttaaaaacgctgtaaccccctcccatctccgcgttcacccttgaggaaatcctaacagtcaccatggatataaacattaataacaaaattaaagctcataacaggccacttgccacgccttggtgtttggtcattaaaaccaatactggtctgaactacagaccgcggagggcaacgtggactttgaggctgttcggtccaactgcgagacgcagattcacctccaggtggaattctagctcgcgcggagctggagaatcggggctttcccgtgcggtccgacccgggtccaagccaacccccgcccgagtggcgaggccgcgaaccccgggcagtacgcggggtccccacgccccgggctccgcatgcccgcaggaggggtgggtacggaaggggaggatggcgcagcctcgcccggcccgcgatgccccctaggcctccccggcaacctccccttggcgccctcttggccttccccaggcttcccccccgcgccccctcggctcccgcgccgcctcctccgcctcaccctgcaggctctcctcctgcatcccgggcgctccgttctgcgacatggcgccagagggcaactgcggcgatcggagtccgcgccgggctgcgggatgtgcttcagctgcgggcggtgggaaagcggaggtcggagcgccgcggcccagctgcgctcccggactgagcggagccccgcagcccggccggaggaactcacagggcagggcggggccgggcggatctgcggccgcgtcgcccattggccgcgacttggggcctgcgcgtgcgcaggggcgtggggtgcgtgtggcacgtgcggcgcgtgcgcggggcgggtcctgcggtgggcgaggggcagaggcctgcggtgcgcgggacgcgggcggggagaggggcggggcgaggggcgcgcaggcgcgagggcggcagcgaccgcctgaggtgagccggcccgggctggacgccgcgggccgcgtgacgagtgggctgcgcggtcgccgccgcggcgggcggtgggccgggttctcctttgaaggggcggtgggaccggcggactctctgggcactggctaccacggagacgccgctacgcttcggggcggggcccgtctttccatcctgctagtggggaaactgaggcgcggggctggcggcgtccgtgcggggggcgtgaggacgtgcagggaagcggccgctgcggctccgagacggcccgtggggtcgggacctgcgcccggggcgggagctgcgagcggtgggccggagctgagcgtctcgggacgggaccgcgtccccgggtctttgcccgccccgccggggcgcccctgcgtgaacagcggggcccgttgtgtccggggcgtccgcccgcaggaagaagcggaggctcgagcagagtcgaaagagtctgcccgagggaggcgcggaccccaggggcccgggagaggcgcgccgtccgcctctgcggcaaggggcctccggggtgcaaacgcggtgtggggcgggcgtccccggggtgggacgccccgtccacggggcggagtggcgcttggtcgggccgggtgggtgcccggcttccgtgggagccagcctggcgtgggggcctcgcagcctcgggactgggaggcacttttcagaggaaagtcgctttctcatttcccgcttttgatcaaaagtctttcttcttgaaagcattgttgatccaaatccaagtgtcaaggtgcgccccagaaacgctgcttcccagacagtcgtgtctggtcttgcgggaaaggaggaggcgtcccgccaaggaaccaggcgctcagaagctgaaccggggtcacagagccgcgaagccagacctcagtcgctgcgtgcattt

SEQ ID NO: 55365 - DNA, 837 bp, Homo sapiens
agccttagcagccgcagggacgtcatgctgaagcaatgaagcccttcctcctctccggctgtgctcactgctgggaactggcagctcaggggtctcggtcctgcctgcttcccctccacggcccctcgctgcctgtagctcctcacgccttagtccagctccatctgctcattccctggagtgcaccctcagctgccttgtccctctcacccagttggccaagcccagctgggcaccgggcctgcacccaagctgccaggagtggaaagagaggagacacagccatgtggattggtttcattttaaattcatggccaccagctcaagtggacacttgttgactgctacatttccccagcctggtaccacccaaacatgtcctcgtgtcctggcacacagagagggcagagctgggatcacactgcctgcccctctaaatgaaaggttgctgagcagagcgggaagctgcacctttgcaggcaggtcaaggacctggcttctgggacccagggggaccccatgtgaaggggagtggggctgggcttgtctagaatctgcctgaagtggggacctggaagagtgaaactgaaggaggctggaagtattcacccgaaggcagagagactccagaccccgaaaaagtggcccaagagggacagtcagctttggtcacctgggagcccaagcagtgtgtaggcagcaaagacccccggcccttgccgctggcctttgggctgtccccagagggtcaggagctacaactggagaggaagtgggcagagcccaggctggagcaggaggcatttcaactcagagtaaagttgggagttttgatgg

SEQ ID NO: 55366 - DNA, 1008 bp, Homo sapiens
tctcttctattaataactcgcaaagctgcaaaagtgggtgggggcttattcaaatgaatgtaattcttctgttaccttcaaacatcagtgacactatatgcacaggggaccatcagggggcgggcgctggaggggtaattcttccacctctgtggcacccagctgtgcgcctgcagactgatctgtctccctccctcttgcaggaaaacacttttctatgaattcacaatgatatttgtactatgctggggctattgttaggagttggtatgatgaaatattccgcattgtaaacagtgtgcacacaaacatgtctcgagtgtgtacttgtactttgctggtgagtggaaagcagagggtgatctttgaaaagaggctggactgcttgctggaaaaccttcaaaacaggaagcagccactagattcaagtcacattcctgccggaggctagacgtgatcccccaggccggaatcccagcagtgctgggcgggcgtgtttatttgtccttgggtacatgaagcaatagctccgttgctcctccgtgagagattgcagaatgttctggctggaataaccagtcaaggtagtgtcagaagacagagttacagcagatctagtttagaggccttcattggcttgcgtttgctcttctagaatgggcaacacctcgttcgataaaatagagaaaagggccgaggaaagcagaaaccagaacagaaagctgattggtcttttcacagttaaaggtttaagcagagggcttccctactgtgctagctgaaactggcctgtttggggatttggctacgatctccttctctcctgatttcttagaagctcaaacaattttctcttggtggtgtggaaactcagcgcaaacaaccctgtttgggtttggtctgttgggcttagtgcgggagccctgcccaaagccagtgcctcctgtcaatttcactgcacactgacatgggaccaacatgcctaacactcgtctgtcccgtggaccc

SEQ ID NO: 55367 - DNA, 1132 bp, Homo sapiens
cctcaaaaaaatgaactgtctgccagtcatggtggtgcatacctgtgatcccagcactttgggaggccgtggctggaggaccggagcttaggggttcaagaccagcctgggcaacatatggagaccctgtctctaaaaagaaattgtcgtatcgaacaaagttccttaatatctggaatatgctgacgcctttcttcctggatctattcctgagaaggtggtcactgagcttcctcttccgagacagcctggcgctctggacgcttggcttccgctcgctggctcgccgacgccctctgctgtccacggttgggagacctgaaagtcgcaagagcgtgcccgtgacaggaggctgtgcgcaagaagacgtttacagccgttttatttgtaatagccccaaactggaaagcagacgggtgtccttcaacaggagaatagatacatacaccgtggcaaatttgtacaagagaacaatctccagcaataaataagagcacgccactgatgcgcgtggcaatttggaaaccttccacagaacagcacacggattgcatggatgcgaagctcccctcaactaatctatggggaaaatcatcagaaaaaatgggtgcctctgggagagtaagggcagggactagccagaaggggcagcagggccaggtggagactcactcgcctctgtggatactctggtcatgcggcttggggagtgcgtgtcccttgaagagcctgatccagaaacagtgccgtgttttctgaaactgaatgcaacgaagtgcggcttcatccactgagtcactgcccatcccctcaaggatccccaaggaggcgacgctgagtccggaacgcaggagggagaccgttcttcttcccgtgaggaacatgctccagggtccggagtctacggaaaaataggagggtttgagaaagtgaaacccgttcattttctgtggagcagaatcagcaaatgctgtctcggggggccctgtgggccttgggaagcattttggactaaaccagaggataatgagacaccactggaggtttaccagcagaggcggtgccatggggtttgcgtctctagaagattctatgggggatcaccagcacgcccagctaatttttgtatttt

SEQ ID NO: 55368 - DNA, 941 bp, Homo sapiens
cttttccggacggtgattatggactgcgtgtgggattggcgggccaggtgagctctcgtgcttgcccttcacacaggaatgctgctggtctcctgtgtctggttcccgtctgcattttcagtcctcagtgttgagtgtgtgcaaatcccttctatcacctgacatttaaaatagataccctcagagtggaagttcgttcctattattgacccgctcactctgcaatcttgaagggggttctccaagcaggagggaaagccggccagaacgcggtcctggagcagccaggaagccgagggggcggtgagggcagggatggcccagccgtggcctctgccgctcgctggttttcacgtgagactgccgccgggccaacccggagcccaggccgcctctgcatctgaatagagccaagctgccttcaggatctcacctgcgtggctgtgccttcggccgcccggccgtgcagagctgcgggccccttccccaccgagaagcgtctgttcgcgccctgcagggagctgggctgggggctcagaggatgcctctgtgcttggccttaaggtgcacagggagagcttgggcgatcctggctcaagggctctgcttggaaacagctcggggaaatggttcctccccctggatgtagtcacagcgtggtaaattccatctgaaaaataaaagccgagctctttgctgagtcatagaagctcggagctgatttgcgcaaaagccggactgagtcttggacgagccgggaaagattctcacagtcgagcagagcgatgggagagaggagcagacagcgagctttggaatgtgagtgtttattttctgactgctgcagaggctttgttggtttcggtttggctgtctctgcacaggctctttccacctggtgctcttctgtatttagtgcgcacacgtatgtggctggaaag

SEQ ID NO: 55369 - DNA, 725 bp, Homo sapiens
ctttttctttggtggctgcaggatttttgctggaaaatgcactattaatcagcacttgtccaagaaagacccatccatttctgttgtcattcaagccacagttcctgatttactcggcaagatactgggccagttcagtgtctctagctgagcctgacctcggggtttgcgtctcgagtctgaaatcctgtttagtcctctgtgcatagttttgtctcattttaacgactgcatcttcttggcacatttattatactcacaactgaatggcacacaatagccttgtgttaataaaagctaccgtggcgctgtgggtgaaccgctgggttgaagtccgatggactctacgatgcaggcatccagaaatatgttgtaactctacctggctccctgccagcctggcctcctcctctgggagagctcctggcatggtcccaatgtgtacctgcatgggaacaacagctgcatgggccagctgtttcggatctaaagatgtgcagtgaaactcacattcccagattcacatccctcatgtttatttgggtcatcatggtttagcatgttgtatatatgtctggagcacttcatacacctctatccaccacagacactcttaatcacagttctgtaataataataaggcaaactatacggcaaagagaagcatgtaaatatgtaccaaatccttatgaagttgtaattgtttatatgtaaaaagtatgtat

SEQ ID NO: 55370 - DNA, 1064 bp, Homo sapiens
gctgtttccagaaaaaaaaaaaagttacaggagacctcatacagtatggcacatttttatgaggtttataaagccaagaaaaactagatggcacattgcgcgtgtgaatgataaaattctaaaacaagagaaaaattcaggaacatcccacaatccaggctggggagggggcaggtaggggatggtggggggtgtgcaggatgggtgctatggctgaatgtgtcctccactttcatgctggttaaagataaacacagcccattgccagagtggtgagggcagactgtgattagtcataactgttgcaatggggaagagtctagcgtgacctgactcagcttgaatctgcacggcggtgactgtgggttttaaagggacagtgaggggtgggggtccgctggggctcaggagagctggggaagtgaaaacttaagagtgggaagagggtgggtccacaggagacccgtctataataggtttgttggccacggttatggaagtgaggtcccacccccgcagaggctggggcacggggccctgttctcgggttgctggagccaagaagagatcctttgggcagcttaagttttctcaggcaggcatttggggggctaggtcacccttgggatgcggcctggagttcttacaaatgatgctggcgtccgttcaatcctttgtgcgccacgttgaggcctggtggagcagagggcctggaggagcctggcttgtgtgaggtcaagggcagacttgatgttataacccccggctcctcagaatgtgactatatttggaaatagggctccctgtccccaggaaggccaaggcgttgccatcattgtgatttcctacagtcctggcgcatctgggtgtcctcaccctctgctggaatctgtaaattattggtccagcttatctgtccatcttataataaatgacatctccataccctgccatggccttggggtgggtgcagtgcacctcaccatcctgggactggcttgccgtgtggtttgtttggccaatggggtgtcaggtgggagggagcagagaggcccaactggaga

SEQ ID NO: 55371 - DNA, 1878 bp, Homo sapiens
gtggcgcgcgcctgtagtcccagctactggggaggctgaggcaggagaattgcttgaacctgggaggcggaggtcgcagtgggccgagatcgcgctactgcactccagcctgggagacaaagcaagactccacctcaaaaaaaaaaaaaaaaaaaaaaaagtgaaatcatggcagactccagctaaactgtccgggtttccagagtgtttctgggtgggacagagggtgctacttttcattatcagttggatcctggaatgaaggtgcacgggactccagggttccacaggaccacgcgagcacctcccctcccgcccggtgtcatttcatcttcttccaaattctcaaaacccttcctcaggacactcactgcgtttcctcgcccccctcactcctccgtccagaggcagccttacttctccaaagaggacgctctgagtctgcgttcccctggcagcaagtcctgaggcaagatttggggacaagcagctcctgtgggaagtggctccaggaagccccaggagagacgcggggagtgagcccagcgggaaggacaggcagcgaggaccgctccaaaggtggtgcctcagcagcaattcttttctgctcggctgtcctcgagcagccccgcccgccccgggccctccggctccccagacggcacttagcatcccgctctcttccttcccctctgtgccaggccggtcgcccctccagaccctcgcggtctctacttgcccgtcgaccaccaccccttcaaggccgcgggcgcggaaaaacggatgctaccgttggccgcgtgcgtgcgcaggcgcaccaccccctgccacccccgcgcaggcgcaccacaacccccccaccgcaagcgcaaccccccgccccagcgcaggcgcaccacaccccgccccctcccgggcaggcgcaccacacccgaccccctgccgcgcaggggcacccacaccccgcccccgcacgcaggcacaaacccccacaacacgcacacccccgcgcgcaggcgcaccacacccctcgcgcaggcgcatcacagacacactcgcgctcagcgtggcgcctgcgggattccgtaccggcgtctccatggcgaccgcgttggctgggtggcctccattgtcgggctgctgctctcagcggcggggctcgccagcgcttcagtgggcggggacgcggcaggtgagacggggcgggtacggccagctcgctgagccctcgaggcgggcggcggcaggaaggtggtgcctcggcccgtcgtgccctgtcgcctagctccagccgcgatgctgaccgcaaaggctgcccttctgaggcctggaatgtgaggcccagagcgtcggacccaactcagcctcgcccggatggggaaatcgaggcagggagcgggggtgggcgtgcgtggggatcccttgaaggcagcctcggaaaccccacggagcctgcgctgcctgggccctgtgtgagtccaggctgttgtttcacttctggttttaagatactttccctgttctgaggtttgaagcctcccctcctctgttttaagttccgtgattcggagaaaacaagtgaactgaccgtgaaaaagcccgcgggcttccatggaatgcaggctgcctggggttgaaccctgctgggtcccggtgtcgcctctaccccccaattaactgcgcccctggaacagttccctaactgatctgcgcctcatatgccaatcattgggctgttgagtgacttgaattaggtgaactgatgcattccaacgttgattcttattgccgaataaattgtttggaaattgcaagtggaagtgtgcctcgctgaatgagattttggtgaacaatacttctgagtaaaagtgttgctgg

SEQ ID NO: 55372 - DNA, 3091 bp, Homo sapiens
ctggcagtccccaatgctcagaaagggcagtgcccagcaggcctctccagcaggcaggaagaagagccaagcaagtgggcagcctcaggatggccgctcagcccaacctggagcagggtggcgagggggtccctgctgcctggcatttttcctccaaagtcagccccacccctggagggggcagctgcagaggcctgtgggcaggacagcaggcaggctccactgcaagcctggcaaccagtgggcaggggctggctgaccctggagaacggggcgccttgaggtgcctgaggccccaggaagggcttagtgttggcgggagccccaggccacacagaggaggacagacactcactgggcttccaggcctcctctgggactgtccccggccagaactctggctcattcggcctcggtccctacccctgttctagccggacggtcaggtgtcccaggccccgcgggctccctcactccgccctggctcctctctgaggctcccactgccgcgcggccgccggagggcgaggtcgacaggcgccagcgacccgacggtccccagtggcaccaggggcggtggtcctcaattcccaggctgggaggagccctgcccggcggcgctgggtcgccaggacaactacgcggtcccccgccccgcctccaggcctcgtcaggcgctgcaagtccggctcagaagcccggcccggggccaaggtcaccgcagcaggccgggcccctgcgttctgagccgggtgcggacgtgctggtgctcggggaagtcgggggctttgacgcctgaaggcgcgggagccgggcgcctgggggaagggggtccggcgccgtcacctcccactcctcgcccgcgggtcggggagcccctgccgcgggggaaggaggctgtttcctttgtaaactggcggaggcgcgcctggcccctgggcccggcaacccgaagagacacgcccgagacctccggagggagttaaccccccgggccccggtgccggccacccccaggcgcgcagggtggccctgagccgggcgcgcgcccgcttgtcgccccgagaggcgccgagcccagtggggcgacccagtgtcccgccccccacgcggcgagggcgacactaggccgctgcccccgggcgccccgcgtcccctccgcctgccccggcttcctgcgcgcgccgcccgggacttcctcgccgcagtgcccggggccaccagagcccagcgcggggcgctgccgggacacgcgggcggccgaccccaggcgggaggatccgggccaccggggagggagggagggcgcagggctgggcccggagggggaggggggcccgggaccggccccaggcaggggagcggggggatggggtcccggggctccggccgcggcgggtgtcccccccgccgcccccgggctcgtggctctcgggtcctcccgagccaggggacactcccggccagcgtgggccgcgagcccgggcgcagccccctctccagcccgggggtccgcaccgcgcgtccggccgacctctgcgggcgggcgcggcttctcccgggacgcggcggcggcgggcggggtccccgggagcggagcccgcggccgcgcgcccccggcccggctcggctcggctgtggcggccgccccagcggagctttgtgacgtcaggcggccgcggggcggcgtcacgcgcggggctgacccggcggcggcggcggcggcggcggcggcggcggggcgggggcggcctgggacgcggcgggagcatggagccgcgcgccggctgccggctgccggtgcgggtggagcaggtcgtcaacggcgcgctggtggtcacggtgagctgcggcgagcggagcttcgcggggatcctgctggactgcacgaaaaagtgagcgggggcgcgggccgggacacccccggggtccccacgcgacacccgcctccgccgcccggagacccgggacccgcctccgggttgggggtggcgtggccccggcgcccgctttcggtttctgccgagcctgagtttcggggcgcgcgagcgcggccgccactcgggggggcaaaagtggttctcaaagtcgtcgcgacttttcggggcgggcgccgggccggggcgggccggggcggggggcgcggggccggggtcccggaactccacacatctgccataattaatgcacttttctttgttcagagccactgttgaattcgactgttggcagaattgtcgttaaagcaggggagggtcagatgcgccgtggccttgccctggcagttcctcacaggtgggggtgccctgtcgaaggccacgggcccctggctgctgggagtgactccgcggctgaggtttggattcggggagagcagttgcgcccagctgtgcgatttaagaacagtttcaggccagggagccctgagtcatgggggcgtgaagaggtacaagctgtgggagccgtgggcacatcccccgggagccctggcttcctgggtggggggcgcagggcagggcggggcggttcctcctgagaggcacctgtgcacgggctgcagggacccatgcggtgcagatgagcctcctggacaccgcgtcacatggcagggagctgtcgctgccagatcaatgattaggcatgaatcaggctgtggcctcgctgcgctcctgcagggctttcttttgaaactgggagcagggaaaggctcctcttgtaaaggcccaactttttccatccgtggagcccagatttttgcctggtgacatgaattagcagagaggaccgtgttccttccacaattatttcgcagacgttatctcttcattagatgtgccagaagccatttatccacaagtcacgtgatttaacatatggctcccgtgtggttcctgcccgctccgtgtgggctaccgctgggagtgcacgggcaggatggagggacactcggggggtgagaatcgccacctgggagctgccatcccctccaccatcggcctcagcttcctctggcgggcagggttgggcttggtcctggtcagcagggccgcacccctgccagacctgcaccaccttgcctggcctttcctcc

SEQ ID NO: 55373 - DNA, 1614 bp, Homo sapiens
gttcacaatgcacacatgtgtgctgtgcacaagcaaacatacgcatataagatacagtgcacacacatgtgcacatccacacaatatgtgctcatacatgcatgtacacacatgcacaccatgtacgtcagcatgcatctgcaagtacacagtgcacaacgcgtgcacacacacacacacacacacacacacagctctctcctgatcctgctaccctcccctcacctcaaaggcaggatcaggggcctccctacccatgtgattcagtgacacatggctggggcagggacccgcccccttggctcccaggtacacaggcacccaagtcacctgctccagaaaccgtcccagagacaagttcccccggaccgctgcacccgacaaatggctgctggggcgagaccagcccggggacttgccgcgtggcaccttggggcgctcagtagcagggcaagacgcaggcactagtctggccagggccacagtggggcggggggcgcaggtggccccaagctggttggaaagagggctctcaggtgccagggcacgcctaggggtgagatccaagccagcccctcaggcctcaacaaggcggctcctccgggaggtgaaggtcgggccacattcctgcggaagctggaattctgacatcagattttccaagctagctttgggggaggagccggcagggagccaggagggagccgaggccagcggggggtggggcggggtggctgaggctgttccaggttccacaggcctgaggtcctgctggcctccccctgggcctgggctgcccactggccgcctggagcatcccacgcagagggtgactttctcatcccagcactggcctggctgagtcacatgggggctgggccaggggactctaaaaatagcctgcgctggcgctcgctggaccagccgggaagttattattaggctgcggcagggcctcctcctggggtggcctctcctctcagagcccggaagagggaggggctcggtcaaggctgtggggctgccaggtcaccaggccctggacactcaagccgggtccctccggtgggggcagggcaggggctgcgccctcagcctgactcccacccacacgccccttcttcctgcgcttcccagggatgaccaggcactgtacgggggcagctcctggtttttctgccccgcgaggacctgctgttccatcaggagggtgactttcttcccctgcccaccctggggagtctcccacgtctgtggggccttttctggattcactctctgtacccactgctcacgcagggcccagtgcaaaacaaaactgcgaggccacccttcaacaatgactaagtattcggggcaagtatggggccttgggggcagccactctgggccctagctgcacccccataaagccagccttgcaccctgtccccagaaaccactgacgtggggcctgcaggggtgtgagatacatcagggtgcagccgtccccaggacacctgagccgagaccctgtctccatggaaacaatagctaccaggccagcagctcccagctcaccgctgccgctcatgtccaggccgtggtccttggagtggtcactgctgcgaggga

SEQ ID NO: 55374 - DNA, 1446 bp, Homo sapiens
tgtgctctaaacccctctcctgagtcttcagtgaacccttgtgcccctggacaggcactgttctggggacgtgctggccccgccctcccctgggccggccctgctcagccaggaggaccaccctagtgaaggccactccccatccccatctgaggagggtgcacttttgcaacagagaaagccccaggctcaacccagtcagcgctgcctccagcccgtgggacccagaacacagctccagtccttccactgcagagaccctgggggcagggcccggccccaaacgcagagactcagagttcgtgtggatggttgaccctgaaagtagcttcatgtattgtctgattataaaaatgataccccttgtaaaaaatacaaactacaaaaaagtaaaagcaggttgtgtccccccaagacctttccctagcggttcctacagccgctatggaggccagcgcaggaaaaggcgggggtgcgggcgtgaggccaagtgcacctgtgatttggtccgggcacagcttggcgtgtctctgtgctcctccctctggagaagccccgcctacattgaagggcacgtgggccggtgccgtaacttgctccacccagacctgccgatggacatttatatcacgtctgcttttttggccgctgaaacaagcagccgaggtgcctttgggcctgtatctttgcccaccttctgattgttttctggacaaatccccgaggaagacaccaggtcacagagcacacttgtttaacattgtgaaacctacaaggatcggtggagattttatccctaagggactcagggcctctgcggggtgaaggtcggaggcacgagccacacttcccagaccgctggccagctcactccccagcagccgctaaccctgtctaacccctgctgggctcctctttcctttcctgtaatcccagctactcctccaggtggtgagagcacctgagctgtggggccggcaccaggaggctgtgttgctgttgtcaggcacggggctgtttccccatggaggagacgcagcctctctggacagccgcctccccctctggtgtccggacacagtgttgtcatgcccagactttgcctcctggtctgtctgctccggggagggtgctgggaagagcactgccatgttcattaccaaatgttcagcggggaccccagatgctgcctggtccccgtgtccatgagcaaagctcccccggggaagccccagagacaacactgtggcctcgtgctaactcccaggagggaggtcaggtcagagggcaggaggccccgtggatgcttctatgttttgacctcaaaccccctcccacggcctcaaaggtgagcctgccccgagggctggactctgggatcgctccaaacagcaggatcagctctccgtgctgaggaggtgttcacgcctcgtgcaagagaacacg

SEQ ID NO: 55375 - DNA, 2809 bp, Homo sapiens
ctcagcacaggcctggggcccgagcctgcagcaccattcctgccgccccgccctggcagcaggtgtcttcctagaacagaacaagccccttttgatgtcattgggcattgccttggcggtttactcagaagctggaggctagcctcgctagagcccattgccaggccctgaccgcccctaaatctgtgtccacaaaatcctccggagtgcctgctccgcatggtggccactggccacacagggctgctgagcactggaagcggccttgtgagctgctgccaagaggcaggtgcccgtgcaaagccttcctgtgaaggaatctcactgaggttgttaaattctggttacatgttgaatgatgtatctatctattgggttaagtaaaacgtattgttaactttggctattacttgttacctttaaaaaatgtagctactggaagctttaagatgacaaatgtggttctcctcctccatctacaggcatgtcccggttcacggcggctgtgtccccgcggcctcagacccagggtccagcccatgctctggcccctccggcggccaggatcagcatcgctgccccggggcccgcgccgagccggctgctcctccgtgctctgcgctcctgggcccgcaccagccccctcccctggagcccccttcgtccctgcgagggttccctgcacgccccgcgctgagacccagcctggcccgggccggagccctccgcgacgtcaggatgcgcctggcctcacgccgcctcccctccgtcttctctgggccgcagccgctcctcgtgagtgaggtcgcggccagggagccgggtggacgcgccgggaagctgcacggtccacgctccgtctgcgcggagagccgggcgcgcgtggcccggcccctgcaggcgcgactgccgccgccccggtgggctcccctcccccgcacgcccggcacgcggctggacgactgcggccgcgcgggggctggaacatcccctcagagccgcaagagagcgcacccgccgccggcgcccggaacccagggcccctttaagaggcgccgccggagcagggccgtgacgtcatagaagtgcgaagggcggagtctgtgcgcagccgcggcgcggggggcggggcgggggcgcggcgttcttgcgggcctgactgacaggagcgccctccgggagcgaccagtactaggccgccggtcgcaagagcgccccgcgtaggccccgccccgaaaggaggccccgccccggggcaggccccgcctccacaaggacaccaagtcccgcacaagccacgccccccgcaggccccgccccactctgttcagatctaggcccaactcaggctccgcacctcaaggctccgcccccagcaaggctccgccccaggcccggctccaccccgcacaggccccaccccgagtcaggctccgccccgcccaggccccgccccgggctcggctccgcggggcgggacttgccctcagcctgagtcggcggcggctgcgggaactttcccagcggatctaatggctgcgcgcgggccgctgtgaggcgcggcggcgagcgacgggcgcggggccgcggagcagcgagcgagcgagcgagcgcgaggccggagccccggccaggcccggccgacccgccgagcccgcgatgcgccccggggccgccccccggcgcagctgacgccccgcggccccgcgaagaccccggccggccggtcccggaggaagcggccgccgccgccgccgcccagcccagcgcccgcgccgcccgggcaccatggcggggaaggcggccgccccgggcaccgcggtgctgctggtcacggccaacgtgggctcgctcttcgacgacgtaagtcccccgtgccggcggcaggccccaagcccggaacccccgaccctgaccccggggtcccgaactgcaagccttggaccctggaccgtgaacctccagacccagaggccccagactctgatccctgtacccgggaccccagactcctgtcctgattcccaagtctgggagcccagacccctgtcttgatccccaagcccgagacctgaagacctgggccctgaatccccgaaccccatcctccagactccagcagctgaccgttgaccctgggaccctgcctctgaactcctgtctgcaaatcctgacctcgaaactccaatattaaaaccctgtcagaacccctgttaacagttcctggaacccaaaccccagaaaccgggtctgtgcgcaccaaacccagccccagccctgatttccgaatcctcagaaccctggccctggaatgcccatccccaaccctggccctgaaccccaggtccatggtcactggaaccacaaatcctgactgcagaactctggttacagaacctgctctcaaacgtctgtctctggtccctgagccctggaccccaaaccctgaaacataaccacaaaccctaacccaggaacttctgacacagggctgtggccccaacctcctgtccctgttccccaatcactgaattctagccctagaatcccagccttcatactgtggccctttgcctctaaagccaatctagcctgactctgaaccctgaatttcaacctcaggccccagcttatggccctgaacacttgtccttgacccctgaacctggaaccctggttccagaatcaggccccaaacccaattctggaccctgcccctaactctggttcctagatcccatccttggccccttcctccaacaagctcctgcccctgaatcctgaatcctgaatcctggtcttaaagcct

SEQ ID NO: 55376 - DNA, 2741 bp, Homo sapiens
tggccttcagagagcagacagaccagaggtggcctcggactccaagagacgctcctggctttccactctcgccctgtgcagaccagcagtgcgaggggtgttgtggggttagggggtgacgcaggttatcccatgccagggagcccacagcctccacccagggccacgcctggcgccagcacagggaggtcacagaggaggctggagcagggcgtggtgggagggcaccgatgtgcaatgccatgccaggcctcggggagcccctcgacgagacccatggctcctgcacggatggtttcacattgtcaacacggctggaaaaggacacggtctacaagtggaggctcgaaggtggctgagagttatggcacctgggctttccagaagttggcttgaaataattggtcaaggtatgtggctggcgagggacgccagggatgcggcctcctgcagtggtcagatgccgtcctgtgggatggggcctcctgcagtggtcagatgccgtcctgtggggagggacagtgtggccttcatccgtggtgacgccgtcctgtgtggggactgacagtatcgtctccgtctgtgatgatgccgttctgtgtggggagggacagtgcggcctccatgatgtcccccacactgtccgcgctaggagtgcaggtggtttccagcagctgtctgccggcagggaggctgggaagtcaggctggctgtgtccaacacctcctggggcacagaggagtgtgggggagacactgttggaacacaggtgtggacattgcgacacgtgtaaagatgtcagtggggcctgcgttcgaggatgttccgaccaccatgctggtcgcaccctccagcgatgggtcctcggtgcagtgatctcaagcgtcgcgtctagaatcaccgcaccccgttgcttccagacagcctcggtagcgttgagtcccctcttcctcttcctggatgtacacaggggccacgtgccgtctttggaggtcgtgagtgtttgagtcttttcatctcggcccctgctttgctctttctggcattgccatctgaaagagtctagcccacttgtctttagggcagcctgccgtgtgggtcactgtggtcattgctcgctccgtggttagctgtgtcctgtccgtggttagttaggtagttggttgctccatggttttcacttagagattttgggcaggaacattaccaaggtgagcttgggcgcttcttgtgccatcagctctgggggcccaggctgctgtcacagggaaggtggcatcgccccactcccagcttggcgggaggaggctcctcatgtatgacgccatttggggatcttctgtgactcctctatgggtcctttgcccgtttttccatcagttttgttttgttttgtattttcccttgacttttaagagttctttcaattgcaagaagattaattatctgtgatatatattgcaaatattttcaaccagtttgacatttgtcttttgattttgccatgccaaagtttaaaaaaagttagagttgactcactctttttaaggattgtgtttggattttgagtcatagtttatttttccatatgaactttagaatcaccttgtctggtttgggctgggcggggcgggccgctggcaggctgtgggacaggccagggctatttctgcgctcgcttggagaggactgacagctctatggcgccgagtcatggtccctggaaacaagagaggtcttttcatggactcaaagcttttgttcgtttccttcaggaatgtcttaaagtttttctcttacacaatgttcacatatgcaaaaggtcgtttgtgaggttacctttttccttgttgcattggaagcgggccttctcttccagcaggccttccgcctggttgttgttggtgtctgtgatggctgttgttttgtctgttaatttcaggacctcctgctttcctggattctcctgttgtctgtcctttttctgcctgcttctctgcccctccaggtgtgctgtgacgccatctgcaggtgcagggagctcagatctcctttcccggagctgcgcctctgcatgtgttccctttcgggtctcattccctcccccgatatgtcaggtgaaatggcactgggcgtaacgggcgcccttgctgtgtttccttgtccgagggaatgactgggtttgcccaggaggaaagagccggctctgggatgaggtgtcagcgtgtgtggggtgggatgtttcgaatccacgtctcatgtggtattcagcgtggtattcagcgttgttgctattaaacaagaaataataacagtgaaaagacaaagcgtttcacttataaggctagagtatagaactgtgccataaatgagggaattacggaaggattatataaatccaaaaattattgaataaaatacagaaaaaaaccccagaaagacagcaaattaaggaaatggcaacagtttgaaaacataaatgaagcacacatttggtaaagctacctgagagagggaggggcaggttgactgcatagtagtgtgaggaacaggaggattcatacagtttaacaatccattgtaagatagtttgttaactattcggggaaaggtttaaattggggtcttactatagacattataccaaaacaaaatctaagtggggcaaaaatgtttgtttgtttgtttgtttgtttgtttgaaatggagtcttgctctgtggcccaggctggagtgcagtg

SEQ ID NO: 55377 - DNA, 862 bp, Homo sapiens
aattattctatatccataatgcacataaccagtttctccagaacatgtatacatgaaatgtaattgaaaagctaatgatttttagaagacaaaagataagagtcagaaccattttaattaggatgcaaactccttacataatttaattggcataaaagtttattgatttacttgtataatcatttatacgtagaaaaatataacaaatttcataattaaaactagttattttaagactgatatttttctttgttcattattgaaattttcaatttgtgaaatatttattattcaaaaaatagcatctgcgttgcaaatgaatctcattttgagaggaagagctctaggtgatacaggtttaaaatgactggtaggcacccacagggaaactaggttcctcacacagcctcgtttttcatgagacctgcggaaaggctctggggcgtcacgtctccctgtggccgaggctgctgttgtctggcacaccgtgagttctgggccaggacctttccacctgtctccctccactccgggtgaaagaggcatggggaatttacttgcttttcctttttgtctggcatcagctcgtgaaatatattacatcagacaaaagtcaatagagatttcccttttgaaaagcaaggtccatgataatgggctgaacacaagcaggtgactgtgtgggacagggctgcccaaaccgccgctggcctacagactgctgtcccggccagtgctccgctccctgcgcccctgatgagatggcagccctgggcacctgtggctgctccctcctcctgactctgctccaaggtgccacctgcccaaggttccgtcctagtccctgaccggcccctcctgt

SEQ ID NO: 55378 - DNA, 459 bp, Homo sapiens
ttctgtatgttaaaaccgacttgcctgccatttctcttcttatccctcacacccacccacccagcctgggccaggcctggttctagggcgcggccaacggtcggggacaaaatattcatggtttctgggttcgtggtcaggcagtttgggtggacacaagcaagtgccacgtaaaataagcaacggtgagaatggttatgagtcgcaatgacactgtgaggcactttaacaggctcatcggcgtggccctaggccctgccctctgtgagcccaggtcacccccaggacgcccagcggctgctgcgccacctccctcctcccactgtggccaggcctggcgggcgggtgctgcctcccgacacgcacactttgccggggcaggtccgcgccagcgccgtcgccagaagagcctcacaaagacgcggctgccaccgtttggcgtctttgaagactgttcag

SEQ ID NO: 55379 - DNA, 1810 bp, Homo sapiens
ggatgttgtggcgccctctctttaaagccggccaagtaagcctggagcagggaatcccggctgcagcagccgcgggcctgaccccctcgcagtccccacctgctgccccaggggagtgggctctgaagggaccgggagtttctgctgtggaagcaccgtccttctgggaaggttcagccccaggaggccctcggcccagccacctagaaacagctgaggctgtgcgggggttggcgatgcccccgcccccaccatggcctggattcggtgcagttgaaggctgcagagaggagcagccaggggaggcaataaagcttccaagatcacctcggctctgaccgagagggaggggcagcccgcagccttcagaaacgccccaggacacatcccagggtatctgttaggaggcggccctgaggacgcagctcttcccacagctccttcgtgcatcagaggcctgagccttgagggcctccccgctccgcacacggaggcagcagccggtgccacgcacacaacacgccgcgccaggcgcgagcccacttggagccacaggctgtctttctgcacactccccactcccgctccccacccccacgcacacaccagtgtcctcgggccggccggacagctcccggccggcacagtactggggtgggtggctccatcctgtgacgtccaccaaggcctccaggtgaactgtcatcccaccgagtttgcagcgtgcagtgggaacgttcaggtgggcccttcgcagacactcctggaaagcatcgggtggtccctggcccaaccctgtgcccagtactgagcccaacacaccccatgtctcagaattcccctggcgttcagactctgcttcccacacgtgtttggcttggaaggttctgaaatctccatcggggcacctgacttgcatgggaaaaccgtcctgggtgaggtgagggcacggtgaggttgcatcatcatcccagaatgccggaaggccaagggtgcagggcagctgccgggaaagcacggtggcgccaggcccaggacatatgcaggcttcataagatgtaggaactcactcattctacagctaattataatggctggctccatgatggggtcaagaaatagacccctatggacacccaccggagcccctggaatgtccctcccttgacatggtcccaaagaaaatccaaatggctgctgaacatgtgaaaagatgtttgctcattgcaatcaggaaaatgcaaaatacacccccacgaatgccttcccaagaccgccaggctggcaagaactgaagagcggacagcggcttgtgctggcaaggacggcgcagcagctctccctcgcgccagtgggaggacaaatggagcagcctctttggaaaacagcccagcattcgctggtgaagtagaaggcaccagtgccctgtgtcccagcaacttcactatggtgtgggccccagagacacgtggccgtgcgtgtgtgagaacactctcagctggaacctaccagagcatcagcaagtgggccagcaggtcctggaggaagtgaccaggttggatcccagtacaggcaaagaaccaccagtacacgatagacagggagatgttctgtgggggtgatgcaaggagggcttcctggaggtgtcctgcccgggattcccatgagatttcagtcactgtggatgggggtatgggatctgaggcagaacagtgcaatccaggcagaacagcggctgcagaagaggcacacagtccaggcggctggagtcgatggatgggcaatgctggctgccccatgggaattcaga

SEQ ID NO: 55380 - DNA, 932 bp, Homo sapiens
gtgctgaagggagctgggggcgtggcaggcctgcgagacgaatgggcgctatcagctcagggctctgcctcggaggagccacccggaggcagcacccatgggtgtgggggcttggccacaggggacgtcaggcctcctcggtgcagcaccagatgcgtctaacagcctccgccccgtgggcgcccactcagacttgctgctcaggtgcctagagcagaagccacctcctcagaggccagcgcgccagcctggcaccacggggacgctcccagggggtgcccagagggaacgtgcgcatcgggcggggtactgcggcgcgtgtgggccgtgagccccgccctgtagtcggacactggagtcccggatcctacagatctgaaaggctgagtcggatgcagcaaaggcgaagcggggttcgcagccccagactcttgggcgggggggtcagcgagcaaccgggaggggcgccgcgggccattcgccgcttctcctgggccgagggcgcaggcccctgccgcgggggcccctcggactccacgacttcgcggacgcgcgcccaccgccatagctgaggtcccgggccaggcggcgcgtgggtggctgagcgggagcgcgtccagccaggcgtggaggccgcgcggggccggggtcgagcccagcatggcggggggggtgcggggcagtggcccggacaagggcatggggccggaagaggcggggccgttgccaggagacgagacggaatgggcggggcgcgggcgggggccgttgccgggagacgagacggaatgggcggggcgcgggcggggccgttgccgggagacgagacggaatgggcggggcgcgggcggggccgttgccgggagacggggcgggggcggggccgggccattgcccggagacggggcggggcaggggtagcgcgggctcct

SEQ ID NO: 55381 - DNA, 801 bp, Homo sapiens
tgtgaatggcatgaaaagcaagaaagcaagggctggcactgggccgcaggtgacttctgctgcctgggggtgtgtccgcttgcctgtgtggcacaggacgaggtcccccaggctgccgagaggctcccaggtagggctggggatactggcctgtgcctgagctcatgcaggtgaccctgttattatagaacaatggccagctggcaatcacacttcccttccttgacctcatggtgcaagttactcaacagcaaagtgcaaaggcggcacgctggccacatcagaggcacagcaaggcccctgccgacgctgagctaccagggatttattcctaaaaagacaggaccagcttgggccagaacaggctcctcccgcgctgaggaagttccacccaatcccacagaacacagctctcctcttcagcaggtgccggggggtctgggagcctgaaccccacagccctggaggcttccctcccctcctcctatcaccacctgcaaaccccacttctcaaggcccagggcttcccagaccccaggacacaagatcaggggtttctgggcctcggggccaggcaggaaagctagcaggctcctctgctcaccagtccggcatttgcacaacactgagactgacagcttgggttgctgataaatgtgtttactcacaggccagacctgcacagcctgcagacaaggaggaagcggtttgtggctggagagttggacacccccacccccactcggcggtgctctcagtgaggcagccccgggtgagagctgcccacaacccttgttcccc

SEQ ID NO: 55382 - DNA, 1674 bp, Homo sapiens
gttacatgatttccttctgtgcgatcatcagagtcactcgcagacctggatggtgtacggcctacaatgcacctaaaccacctagaggagcctcttgctcgtgggctacaaacctgcccagcaggtggcggtgctgaacactagacaactgtaacacagagatatttgtgtatctaaacatggaaaaagtacaggggcaggcatggtggctcacgcctgcagttacagctctttggaacgctgaggcagcaggaccacttgagcccaagaatttgaggccgcagcgatctatcagctatgatcgcaccattgcactccagcctgggtgacagacgagaaagctaaagcctctatccgccactgggcccattctctgcagtagatctgaagcgtccactgcttcccgcgtgtgttgtcattcaccattttaattaggtgactctttactctgacgtctgtctctcctacaaggctgccgcgccctcctgtgatgccttcccccacacgccctgagcacctagcacaggtcctgtgtttcacgggagctgcggggactggagaggtcgacaggaccccgacaaaccaggaaagggcctttgaactaaagtaacgggaagtcacccaagggctttaaattaaaaacggttacaataaaactggagtcactttggctccagttcgcgactggtttagagggaacaagatccagggactgcagcgggagacgacaggcggggcaaggcggacgggagagggcgtgcgagagggggacctgcgacccggcttcccagggctgggaggggacacccgggacgacccggaggcccgctccgccccgccccggctgagtgtcgggccgcggggcaagacgctggcctggccggtgcaggcccgaagggcttcggccccagagttcggggaccgctgcacagccagagggagcgcgcgggaagagccgcgtcccgccagccccgtcgcctcgtgggcccccccgggcctggcagtcccccaaccccctcatcacgcccgcgcccgcgttcggccaggactcaccgcagtcccggagccacagcccccgcgcagcccccgacggcggcggaagtgagcgtgacgtcacgtccggctcggctcgcggacggtggccgacaggctgcgcccgcccgcgcccggggtgatgcagttgccccccgcgctgtgcgcccgcctcgctgcggggcccggggcggcggagccgctgcctgtagagcgggatcccgcggctggggccgcgccctttcgcttcgttgcgcgccccgtgcgcttcccgcgggagcaccagttcttcgaggtgcgtgagcaaaagagggaaaaagtagttgtaggatccagtggggcctacggcggcgaggcggggccggagcctggagtgggaggggcctacgactgcggggcggggccggagcctgggacaggcgggacctgaggtggtggggcggggccggaacgtggagtgggcggggcctgaggctgtggggcgggaccggagcgcgggatgactggggccacgggtgtgggcgaggcctgacgcggtgggcgtgccgcgagtcacctggccccgcccacggcgcacttttcctgcaggatggggacgtgcagcgccacctctacctccaggacgtgatcatgcaggtggcc

SEQ ID NO: 55383 - DNA, 622 bp, Homo sapiens
tacacctgccccccagacacagagatggaaagaccacaccccccacccccctccccccggacgcagagatggaaagatggccgcatccccgggaacacgcacaggtggagaggccagggcccagctgtgcatggacgactccgagctgaagtgcagccgtgggtgccagtgccggtctccgtcctccttcacaggaaacacggaggccggggccgccaaccccggtcccttcatcctctggccccttcgcccgctcctcacacggacgggctgtgcctgtgtctgctccactggcagccggtcgatacccccgggcgtgcggagatgaagacctcaggcgaccgaccgccgtcctcccctttccccgcggcccaggtcggcgtgtctggctgcagcgccacctcctggaggcgtcagcacccttctccgctgggtgtcagttcggacactgtggagggacgcgcttggaggatgtgggcggccccgcgcggagcggtgcagagtcggcggttgtggtggtcctggcccagcatccaggcctcgcattgccaggggcaggcggctgggagcctgtgggaggaggtgtgggagcagggcaggggtccccagagatcctcccggt

SEQ ID NO: 55384 - DNA, 1879 bp, Homo sapiens
agagacggagtttcactatgttggccaggctggtctcaatcccctgacttcaggcaatccacctgcctcagcctcccaaagtgctgggattacaggtgtgagccaccgcgcccggtcaacaagcatgtttttaaaggcaaatttcttcctcagtcgtgtggcaggccctgagcaggcagctgggtgtccccgctcagatccaggcccgagtgggctgggcggctgcagagccagtcacctgagctacccagggtgggatccctggccccgacctctgtcctgacacgccccaagcggcagcaacaaagccccaattggcctgggcctgggcaggaggagctgggccgggtgccagatactgggatcagccactgcagctccctgagcactctctacagagacgcggaccccagacatgaggaggtaatgccaccatccctgagccccaatccccaccccacccaaacctggaggcctggcccttagccagagggggcccagctgtgctgcgctccagggggcctggttcaggggagtgtgcgggtgggagggagaaggaggggccctctgagggtctggggtctgccaccaggctctacctcctctgtggccccgagtgcacttgcctcttggttcccctggcctggtggagaatcacccagggacccccacccggaacaaggaaaggggaggtgccaggctgaaaccagcaggcctgtgactgcccaaaaggaagggggctgggggaggggaggggctggggcgcaggagccaggggctgccctgaggtggtgtcaccctgggagctgtgatctggagctcagggaagcacccgggctcccgctggaccctggaatcagaggctgccttccttctgtgggggtgtctgtcttccccctccttgtgtgggggacccctctccccgctcctgtggaggtgccctcctcctcttccccctcctctaagccagggccctccctgcccctcctctcctggtgtttctcccttgtagagaggtggcttctgggtagcttggggaccctttggtgcccagagccgtttgcctggagaggggacccacggggatcccacagccaggctgcttggcagtcaccaccgaccacctttctaggggctaccgtgacccgaatcccaggcccccaggctgtgtgtcatgggaggtgggcaccaggggtggcccaggcagcacggcagtgggattggggtccagtgcccagacaagagcccctgcccagcatcagaaccagctgggggtcctgaggagaagcagggcccccgaaccagaccagaccaggtcccggccccgggctgtccggggcatcccccctgccctttgacctctcaccatggctgagtcacccagagaacgggcaaaggtccctgtggagctgcaatccaggcctgcagggtgtcccagacactgattcttctgcctcagcaggagtagctgcgattacaggtgtgtgccaccacccccagctaagttttgtttttttttttttgagacagagtgtctcgctctgtcgcccaggctggagggactgcagtggcgccatcttggctcattgaaacctccacctcccaggttcaagtgattctcctgcctcagcctcccaagtagctgggattacaggcacctgccaccacgcctggctaatttttttttttttttttttgtatttttagtagagacaagttttcaccatattggccaggctggtttcgaatgcctaacctcaagtgatctgttgcctcagcctcccaaagtgctgggattacaggcgtgagtcaccgtgcccaggcagtttcatatttttagtagagacggagttttgccatgttggccaggctggtctca

SEQ ID NO: 55385 - DNA, 1348 bp, Homo sapiens
caaaccccaagctggcttaggggagagaggcatgggtacgctcatgactcttgatgcctgtgcaggcatgaggagggggcaggcttcccttccctggggtcagatggacaggcctcaagacacccaggtggtcctaggtggatgatgtgggtccagatgagcccacatgaccccaggtggacgaggtgggtccagatgagcccccgtgaccccaggtggaggaggtgggcccggatgacacccacgtggtcccaagtggaacaggtgatcccagatgaacccatgtgacccaggtggaggagggcccggatgacaccccttgatactcacctgggccttgaaggccagaggtgactccatgtgctagtggctcagctgcactgtctgtgctgacagtggtgtcctcagccgggactatgcctggggacgggccctgttccctggcccatgtcaaggccacacagtcttgcacacctgggatggatcgggaggaaggaggcccacgccttccttgactggagacgcaggagcatgggcacagcccccccacggtgctggtcctcccctggagccactggtcctcccctggggtcacctgctttgctctcctgtctgtcctttgccccactgaggatggctgggctcagagcagctgacaactaaggttggctgggctcagagcagctgacaactaaggttagctgggctcagagcggctgaccgcgttctctcggcaccagccaggaaggggtggtgcagacacagacccaaccagtcactgcagaaaacagccagtgcattgacggccagggttgggagtgctaggtcagggatacggtgccaggttacatcccagtcctgtgctgccccagacccggccagaattccaggccagctggtcatctgggcacaggccggcaacctcaatcccggcttgcaatcccaacacccgagagtggcttgcccactagagacgctcgagctgtgctgagctggccctgcccccaccccctgcagccacctccaccccatgcagccccaggtgggcctcggagcaacctctccccaggtgtcctccacccgcgtggactgtggcccagcccacacctgtgactctcccccaggtccctatcaagatgcaagtcaaacactggccctcagagcaggacccagagaagtaagtccccccaaccccacctccccaccacccattccctgaagctacagcccgttctgctgggcccttcctgaacctggagagcacggggcagatgcagagaggagccctgtccagcagcttttggaaggagggggcactccagcctcatgggcatctgtcaacagcgcc

SEQ ID NO: 55386 - DNA, 891 bp, Homo sapiens
gtggaaagtgcacaggtctcaggtgagggcgggtagacccaggcccaggacatggcctttctgccctcctgacgttctgtgcagctcccactctgggtgcccatcctgtcctcctggcccagcaggcccaatgctgcagcgcaggtccaggctgctggagtcactcacacaccgcatgtgtcctgggcacatgcaaatgtgggcggggttcctgcgtggcagtctcatccctatggtgagagagaagcacctggtgccaagcccggggctgagccacacacatttgccagctccagcagctaagacagaacggagcaagggagagaggccacccgtccctcatcctgccgtgttcagccctcgtgtggccactcagggggctgagggtttgcccaggtgtggaagagctccttgcaccgccagcaaatccccgctctcccaggacaccaacggctgagagtaactgcccaagggtgccccacggtgtcccacaatgtaagagctgttaccctggcttatggatgagctggagaggccagtgacctttgaggttctgtcctaaaagggccagagatgggctgccagcttctcccttggcagcctcccctgtcatcctgataagaacatggggtaggagggcattgagggatcaacacgctcagggctgagatttgggcaactccttccccactccctgagccccaggcaggtagaagaccctggatctctgagttgcaggagggtcttgccctaggcagcccaagctggtgtttgtggctttttttttttttttaaagctatcttgattttattttgttttgcccattactttgttttttctcgtgattttacttagtttgctcatatatggcttcatttatataacatgct

SEQ ID NO: 55387 - DNA, 1741 bp, Homo sapiens
gtgggagaccacttgaggacagagcttgggaccctctgtctttggctcctcctgagcctccaggagacagagggtccctggccttttccccacaactggggctgcaggcttaccacacagccggccctgcgtaggatggactcgtactccgtccacactggggtctgcaggcccctctccttgtcgctgggcaccagctccatgactgcagcctagagggaggggtcagctctggggccctgggcactgccagccttcctggtcaggtgaccattcgggactcccctggtgagggtcagggcccctttggggacacatggcttccccccactccaaggcaggtgggccctatgaagcccgcaaaaggggaaactgaggcacggagcagcagggtgcaggggcgactcagccctcaccggactctccacataggtgtccaggggcagcagcttcagcacggcctccaggagctgcgggatgcccaggcctggagggcagaggaggcagcactcagtctccagcccgcccgcccgcctgcctgtctgcacccttcacactgcaagcatggacttggggccacggcaggccacagaggagcctcagagccaggagcaccgctcacccgcccgccctgccctgggggacctggggctcgctcaccgtctgcacggatctccatgggcccacactggcagatggaggaggccgggaagttcaagtccgcaagaactaaacagccgggaggacagcccgtgtcggcacctatccctgccctcggggtcggcgccgcccgtcctcccacccagtcatggcggcagatcgtgggtcacaagaggtctcaggtcagccagttgggcgcccccaccgccgaccggccgcagtcagatccgcagggctggaagccacgcggggaggtggggagggcaaggtccctgcctgggaggcagagaggcgtcaacagctgcccgcgaggctgtcgggtgctgaccaggccagggggccgacccggacccggccgcctccccaggggccagaggacgcgcggctgcccgcgatgcccggaccaggcccccggccacccaacccctgccccgggaccccaggccccaggagaagaaaaagcgccgaaccctcgggggcagcccagacgcgagggctctcgggccgtctggggagggactccgggagaagctcgggccggctccgcccagagccccacgaggtctcagttccctaaagaatgcgggggagggggcttcctgcccggaagccagggaggcccgagcaacgcccacaccccaggacgcggcccttcccggcccgggggtccccgtgcaagcctcgccctcctgcctgtcccggggtgctccccgaggccccggcccgctgcgctcaccgatctcgtccccgtgccccatccgcgccagcgcgtagagcagctcgggggacagcagtgcggggacacccttcagcgccaccatggcccggcagacggggcgggcggggcctaggggcggggcttgggggccggggcggggccttacggggagggcggggcttgggggcagaggcgggggccttacggggagggcggggcttaggggcagaggcggggctttacggggagggcggggctttattggagggcggggctttagggtcccgggcttggggcttggggacgggccgggcctagggttcggcgggctggggtccgcttgcggctcaaggaagggcgggg

SEQ ID NO: 55388 - DNA, 1130 bp, Homo sapiens
atcacttgaggtcaggggttggagaccagcctggccaacatggtgaaaccccgtctcttcaaaatatacaaaaattagccaggcatggtgactggtgcctgtaatcccagctacttgggaggctgaggcacgagaattgcttgaacccgggaagcggagggtgcagtgagccgagatcactccactgctctccagcctgggtgacagaaagtgactccgtctcaaaaaaaaaaacaaaaccaacaaagaaaaaacacctaatcaaaccccaaacaataatggggccagaggtcaactagctcaggagtgagtggaagcctcactctgagtctggggttcccctgccccggacagtggcacccctccctccaggctccctggggccagcatgaagacaaagtccattccccagcctaagggttgggtgtctgtccctgccaagctctggaaccagataactagacgcagccctctgagatgcggcttccatgctgggccctttcttggcttccagccaagtgtggctgacacaggtatgaacgtgaggctgcagccagccctacggatctctgaggttccattgcttgaaatcagattatggaggctgaccccagtgcacatgaaaaattaaacggagtggattttctcaatgttcaggcttcctcccttgcatacttgaacatttggtgcctatctatctctgcatatttactccaggctccagggccagtggttcatgacccacgcagactccacgtgctccactccagtaagtgagcaggttccagattccctaccccaagggaagagcctgttatgccctgttggacctgaatcaaactccctttgtacctgtttcagtatttgtcaaacagtcccagatcccaaggcttatctgaggcttatctgaaaagaacatctcccgcctgttttaaggccaactgcatgagaactcccacctgccctggcagaagcgagataaacctgctccaccctgaagccggctctgaactagtggactccaatcacagcacacaggaggacagacggggtgggtgggagtgcagagccaatgcctccgaggcaagcggtcgcagagcatgcgtgtgtcccctttgcgtgtacatgta

SEQ ID NO: 55389 - DNA, 1718 bp, Homo sapiens
aggacaaaatgcacctgcatctcctgttctcgggctggccggctgcacaggagctacgcctgctcttagagccgagggaacaccccggatttttacaacccccaccctgcgcccagttggccagaggtcttggcactggggcagtaccagccagccgccgggcctcccgcaggacgtggcctggtgagagtggcctcctgcagagccaggcagggggtgggggtgcgggccagggtcaggtgggtggtgtcggtgcggggtggcgggtggtgggggggtgttaagcctgggtcaggctgtgggtgcgggtcaggtggggggtgcagcactaggcgaggggggtgttgcaggcctgagccaggcaggggctgcgggtcggggtcaggtggtaggtgcggggtcaggcaggagagtgcggagtcaggccctggggatgcgggatcggacggaagaggggtgcggggtcaggccggggggtgcggggtcaggtgggggggtgcggggtcaggcggagtggggtgcgggtaggggtcaggccggagggtgcggggtcaggtgggggggtgcggggtcaggcgggggggtgcggggtcaggcggagtggggtgcgggtaggggtcaggtgagggtgcggggtcaggcggaagaggggtgtgggttggggtcaggtgggggatgcggggtcaggtgggaggggggtgcggtctgggatctggtctgggcgtgcaggtcggagtcaggaggagattcgggccgccagctctcaccgcgcactcacccgaggcgaagggacgccaggcgggacagcgaaccgggggcctcagcgggccgcggacgcaggacagcaggacacgcagggcggccatggctctctggactcctcgcccggccccgcggagccgccccctcgcctatagcctttcagggctcgctccgcccacaggccagcgccgcgagaccaggcggccctcgcgagatcagcccgggcagagtgagcgggtcgctctccgccaggccccgcccccaggcccgagctgccgctcgcggatctaaggccgaggggcgtccccgggaccccgccctgggctgggaccagcgccctccaggccccgccgcagtcgcccgcgcccccgcccccgccccagccctcggggtcccagctggccccggggagaccgcgcggaggcggaggcaacggcggcgcctgccgggctctgcgccgcctccccccgcccgcctgcccgcctgcccgcctgcccgcctgcccgcctgcccgcctgcccgcctgcccgccggcgtctgtagcagcggacacagcgcgcccaggcgcagggccaggcacggtggcagcggcgtgggcactgaacgccacattaggaggagttttattttcatgcacacaagacttcaacagatttaaataataaaaatttcattcatttaagttattttatttataccttttaaatatctagacaagtattgtggagcatccatttgtgtacttgcccggattctgcaaacgccagggtggagataaaaccaccctggataaaatggaatggaaagcgaaactgctattgtgaccggtggagggtgtccaggttcttgacgtcttgaacaaagaactggacaaaacgcacaaacaaagcacggaaagaaggaagcaacaaaagcgagatttatggaaaacaaaagtgtggccgggcgcggtggct

SEQ ID NO: 55390 - DNA, 2203 bp, Homo sapiens
ggcagaacaggtgacactcgtggcgggggctgcaccccaaacacttgccatccgactaagggtgtggggcagcccttctttccttagtcctggcatgtcgggtgggtcagcttggtggacagctggccctgctgacccgggatccgccctgggttccccatggcctggaggcaggaggagatggccactgcatccagcgtcgcctcctggtgctgcgggcccctgacggacagaggacgctcgacccctgcccgccaccgcccagggagtcagcccgactcccaggcacccgcccctctccctgcctggagctcagctcgcggggttggctagggagtgatggggagtggaatccagcgacaccaggtcacccttccgggagccttttctccagctgggacgagagggaatcaaaggaaagtaagacacggctcaggaggcccacgccgagagcgaagagtgaagctcacgctggcaaactggagcgcgcggcccctcggcagaggaccggggctcaggaggcggggacgcgcctgaaaacagggcgggagcctttccaacccccgcgggctgcgatgcagcagaaaactcggccgcctgcaccggggattctccagaaacacaggcgtgcctgggtgtgcgctcaacttcccgggcgagggacgtttctgcacttgccctcggcttctgaactttgtactttgcgagtgtactttgtactttggtcctgtgtccctgcagccctgtgactacacgcgcacacgcaggcgcgcgcacacgcgaactgacggctcgctggcgatgctggaggctttcacagcccccctccggacgcgttaagctctcccaggtcccacccctgacaccgtggcacccccagacccactgcgccctcgcactcgacgcgggtccctgggggaagcgctcgctgcgccctcgtctcccttggaggagacactggcccgcccggccggccggcttctccctccatggggacgctcgcgcgcaccgcccggcagcgcgggacgctccctgacgcctgtcctcgcgggccctcccacgcggggcgcttccctctgagacccgagcccagtccggaggctcgcggaggccgaggcgcactgtggggctcggcccggccccttccccgcccctccccgcccctccccgcccctccccgcgcctccccgcgcctccccgcgcctccccgcgcctccccgcccctccccgcgcctccccgcccctccccgcgcctccccgcccctccccgcccctccccgcccctccccgcgcctccccgcgcctccccgcccctccccgcccctcccagcgcctccccgccccctcgctccgcctccggcctcctccgagagctccagacctcccggctactcagaagccctcggactgcccggaccgcgcgatggagtcgaccggcagcgtcggggaggccccgggcggaccccgggtgctggtggtgggcggcggcatcgcggggctgggcgcggcgcagaggctctgcggccactccgccttcccgcacctgcgggtcctggaggccacggcccgcgccgggggccgcatccgctcggagcgctgcttcggtaaccgcccctcccggagcccctcccggaacccaaccggctgcgcccgaactcgccggccccaacctgccctgcgcgcagccgacctgcccggccgcctcaccgggctccccgagggaatccccgctcgcttaatccgccagagttcaccgccccgaaactcagggctcagagttagtcaggagggcgccggccagggaaggcgacctacggctccacaaggccgccctgattctgccccacgggggcccccccagccccggggtacgcccaccctgcgcccctccctctggtccacaccgcccgacaagtgccctcctgcccaggtgctccccttaaactgggtctgacagggccctgccctgggggaccacagggcccttggggacagtgtggtacatcctccttgggaaggccagcgtgggcgtggcccaggagaagggctcggggtgacccttctaggaaagggacctccaggtggcatctgctgtcccctcgcaggtggcgtggtggaggtgggcgcgcactggatccatgggccctcccggggtaaccccgtcttccagctggctgctgagtacgggctgctgggggagaag

SEQ ID NO: 55391 - DNA, 1271 bp, Homo sapiens
cttaaacccacaaaacccaggaacctccccgtccccccgggtctcctcgcagtcccgccccgacgctcgacccaccattcgtccctccctctgggcccgggccccgcccactccgggcttcgccggaggcggaggcaacgtcgtgcgcacgcgcaggccgtggtgcggccccttggagcgccggaagcccgcagtgccggaggcccgcagcgccggaacctcagaggcgggtcgcagcggcgcagaggaggtcagctgcgggagcgtttccggggacggtgccgccatgagattgaccccgcgcgcgctgtgcagcgccgcccaggccgcctggcgggagaacttccccctgtgcggtcgcgacgtggcgcgctggttcccgggccacatggccaagggtgaggcacggcggggaggggcaaggtcatgcctacggccgcggcgcctctgcttccctcccaccccggtttcggccgtcgcctgcttctcccggtcgttctgggctggccccgcccctcctcccttgtctcccctccttccccgctctcacccgctcccggagccgccgggaccccttcccctgcgcagctgcgggagaggcccgttcccgcgagtgcccccgcggcgcagcctcggacccagggcctgcttgacctcctacctctggcccgccgcccctgtcctctgttcccagcaagttccttctgcccttttaatcccccgaagcctccgtttccacatgttcttgacaagatagacttttctgagtcttttggggactaaatgaaacagtgggtatgaaggcacctgttcagttttaactggtatcttgagtcgttctcctgcttaacgtctttggtaattcttactgtttgtcacaattcggccccaagaagacctctggggccagcccagcccgtctaggtgttgtgatggccactcctgcgtcggctccgcgtgtactgggggccgagggggaagaagggcccgtgtgggtgactgaggctgtgtcctcggtcttcggataacactggaggggaagaaagctggaagctttgttatcttggttgtgtgtggtattcctggttaggggactatcgtcatcatccccgcgaggtagcaggggcctaatgagccagtgttactctgtgttatagcccagattaagacccgtggaagggcccggcccggtggctcacgcttgtaatcccagtactttgggaggccgaggtgggcagatcacgaggtcaggacatcgagactatcctggc

SEQ ID NO: 55392 - DNA, 870 bp, Homo sapiens
tatgtatttgatagtattgagattacaacagctgcagtatttatagataaatgcactaaacaggacacagagaggtagtagacaattataaaaggcataatttatgaagaagatgtaacagccacaaatctctatttaccaaaaacatggaactaaatatttgaactgagatctactagaaataaaaaaagaactagaccatagttctatgacagtggcaaccttcaaaacacagtttcagaattggacaaatttagtacaagaagcaaatatggaaaaaactgaataatgtaatcattaaacttactttttaaacagaagataacgttttgtttgtgtgttcatgtcccaattacaaaaatcaattttgtacttgggaacaaagtaaaccttatcaaattataaaaagtaaacactttacagtccacattctttgatcttaagtcaacaaagttagaaatagttaaaaggtaacttccccaatcttcattaattagaaattgaaatcagattactgaaaaaagtaagaacttttgaaactgatgtacactggtgatgtcctcatatctattattggaagtgccttattgccagcttttcacattgtgctgtcatcatcatttaacggactcttttgcaaattgatctaactcttgcaacatattatcattcgatttcatacaaaggttattccctggcatgcacttgaggagtctgggctttgtgggagttgtttctgggcatatattaacctacaaaatatacgacacagaagattgtccttgtaaatagagttttaagtttaaaaaatacaaactatggagtgttagacaggactctatttcctaggctatgaatacaactgacata

SEQ ID NO: 55393 - DNA, 1283 bp, Homo sapiens
tccctttaaaaatccaattacacagtataaaaaagaaaatcacagggaacattcaaagcaaaattcgggacagcggctacctctggagggaggcagttggatgtgcgagcttctggtagacgcagcttgaatgagatgttgtttggggttgggagtgggctgcctggggttcatacgtcaccacacttgataatttacagaagcctttcacgcgttttttcctgtgtctcaaacggggtaccaggaggctcagggaaacagcgcaggcgcctccccggtggcttctctctggcgccctctggtgggcggggcccgggtgagcggggtcccctcggggcctcagggagccgcagccccagcggaaccaggagggcgccctccgcccagccgcgctgccacttccgggttgtttgctcccggagccataaccgcagctcagcgtgcgggcagagccggctgacaggagacaggacacagcacagagccccgcgccctctgaggcgggaggcttcgttcctgcaccagcgtggcttgccctttggacgcggcgaggttgtgtgttctctgcttttgttttacttggaacagatgtttggcttttgtcaaggtcgttatttccagtgaagtatggcatcgaacatcagatagttgcccacacaaatgtctgttttaaggttctcaaccttttgacaatacaaaacaagaggaagtttccaggggaaagccctcaaatcagccattctgagcatgttttcagccccatccgtactctcctcccttcttatccagagccttttgggtgcccagaagagtaatattcttctgcctcgtagctctgtggtccaagggtttatggctactgattatcctcctagagcacttctgagatgttttatgctttctacttgtgagtgtgaagggaggagaggcaagtttgctgtcagtctgacaacatgtttttgccacgtgatctgccactgaagagaagttggctatggagggaggtcaagtagcccagggaggtgggcattccaagtgtacctcctcgtgcagcccaccctctccacataaaattgggtcctgattttatgtggaagatgttgtgtgtctaggagcaggaatccatggaagacaagatatgatatagaagaaacaggcgaagggactggtacagcatatatttgagggcaaataatcactcgataggtggctgaaaatgtgaatgccttagataaaaattaatttataaaacagaagtatatttgaacaaatttaaaactaat

SEQ ID NO: 55394 - DNA, 2636 bp, Homo sapiens
taaatttggaataattccaaagaacaatttttcttaattttctacagccagaatatatacctttaaaaaaaatgaaaacagagattaactttctcagaattggttgactcactctttccttttatttttcttccatggaattttccagttaacttgagaaagtggaatcgaattccgatgttgaattttccttctggccccattcatgtggcaggtggtgattcaggtactactgggggctgctcagacaaacctcctcatcagacatcaagaggctgttgcaccaggagggccggtaccgtgtctagaggtggtcggcatggggttggagttgtattacataaaccctactccaaacaaatgcatggggatgtggctggagttccccgttgtctaaccagtgccaaagggcaggacggtacctcaccccacgttcttaactatgggttggcaacatgttcctggatgtgtttgctggcacagtgacaggtgctagcaaccagggtgttgacacagtccaactccatcctcaccaggtcactggctggaacccctgggggccaccattgcgggaatcagcctttgaaacgatggccaacagcagctaataataaaccagtaatttgggatagacgagtagcaagagggcattggttggtgggtcaccctccttctcagaacacattataaaaaccttccgtttccacaggattgtctcccgggctggcagcagggccccagcggcaccatgtctgccctcggagtcaccgtggccctgctggtgtgggcggccttcctcctgctggtgtccatgtggaggcaggtgcacagcagctggaatctgcccccaggccctttcccgcttcccatcatcgggaacctcttccagttggaattgaagaatattcccaagtccttcacccgggtaagagaaatagtgttgattttagggagaataactcagcaattggatctggtatgtgtgtattcaactcatttgcagacaaattgtggttgttcaataccagcctgttgtgaattacctgaattgatagcatcctggagcgacactcaaaatgtgtcgcctgtggtgcagctggagcccggagcctgcgtgccaggccccggaggcccccgccggtgccttgtcctggggctgatgatggggaggccggcgaggccgggctgctgcgacgccaggataaccgggctggcggccagatgcgcactcgctgggcgtccgcctgtgtttgccaaagcacgagttgaaacgtgaagtgttgggccagcccgtgtggcaccaatacctgccgcctacgactgttgtgaacactgaatgggccaacaaacctaaacgttaaatgaactgataacgccgtcagcacggagcaggcgctgggtgtttgcgctcttgcgcgtgcgctctgtggggcgcaggctgacggcgggcgggggtcgcctgctccagctcgggctcccgcgccagaaccgggtccagaaccttgattccggaagcgggcaacggggtggttggtgggcgcgcctgagggaagggacgtgaggagccggagtccgcggagttgccgcggagttgtccgcggagtccaggcgggtggggagcagagcagctggaaccccccgagcgccctgcagacgcagcagcctcttgaggggagggtctcccccacctcgggctggacaaagacagcttttccccacgtccctctgggttctctagagcaacagcaatacccgcccggcaggggtgtggcttagagccccgcacctcctcgccgcgcggcgggcctgacttctagccacgggtctccgcagttggcccagcgcttcgggccggtgttcacgctgtacgtgggctcgcagcgcatggtggtgatgcacggctacaaggcggtgaaggaagcgctgctggactacaaggacgagttctcgggcagaggcgacctccccgcgttccatgcgcacagggacaggggtgagtccgcgtccctggcacggagcggggggtgcataacacgccccgggacagttacgggcgctagccacgtcggcgatggccaaataataaactaacagtaatattatagtaacagcatccgaaggatgagatcaggattagggcgatggcccccgcgcgttgcctgcggagcgaggcgcactgagtcgcccaggaatccggcctctcggcgactgtgcgggagagtttatggggatgggcggggctgcttctgagcaggagtcgccgcccccacccccaccgttccgcctctgggcccgcaggctcctcccgggagcgctttcccctcctgttcaaccgccggggtacaggtggcttcgtccaccgaggtcccctcacccacgctgaggcgtcggaagctgcggacactgctcgcttcagggctttgctcagctgcagctggtgacctccagagagggagtctctgatgtcccgctggggtggatgtcctgagaccgggaagggggaagagacccactgaaatcctatctcccagcctcacctctgctgtctcctccacgcttcctgtctccagagccccgagttcagcataagcagaaagcggcctgttccctctctagggagaggagggttgcggtct

SEQ ID NO: 55395 - DNA, 5023 bp, Homo sapiens
gttgcatccatcggtgagcacggcccctgacccctctcactccaaccacatctgggtgagtcagaaatctagggggccctaaccaaggttccagcaggtgaatcttgcacatgagacaggctgcataaaggacgatgtgtgtaagggcctgtcatgtgaacacatgtcctgtgtacacatcaaggtggggatgggcaagcacccacaatgggttcggtccaaccagcaccttctgagactgtgtagcaaaaactggacccagccctggggtgctagtatgatgtgacacttgcatccagggaggtcaccatctgtgtatgtggagcccattcttatagaaaaagagtaaactctgctaagagcatagaaaagacttgggaaaagtacccagcaaggcagcagaaaggctcctgcagagacgacctttgagctaggtcctgaagaggtggcaaggaaccaggacagaacattgggaaggccctttaccgcacagaaaatggctgagcaaagttcccaatttccccgagacgggagctgaggtcgaccaggagcgggatccttggtctgcatcccgcatggggcttcctgcaacacccagggcagagtgctcgcagaggcctggcctgtgacaggctgggccaggggataaggaagttctgtcacatcaggtgcgtgagaaccacctcctccctagcttcagtgtcaggaagggatgccagcgtccttccagccacttcatatttataaattcctttaatcatcataacacctcacagagacaggcatcaatatcccactttgcagacaagaacacgggctccaggaggggaaatggggccaccgaggccaaagtaagagtcctgcttggacaccagcggagcacagcctctactcctagggcctggcctcgggacctgtcgaatgccgactcccgctcaccccgaacccatgcagaacgatctcacagggggcggcggggagtggggagaccccgctgctgcgcgacccctcgctggagctgctgggccgccacgcgcgccttcggtcctaacggcagtgccggccgaaacccggccctgctcggacccggaaggatccgaatccgcccccctgacagggtcctctcggccgaggtcaccccagctgggccagaggcaggcgcacgcggctctacaggcagcggcgtcggtttcggcccggccctgcccccaacggctccgctctcccgcgctcaccccgagcccagtccgccatcgtgccctgccccggctcctcgacgcggacaccgacgcggccacagccgcctcagacgtggcgcagtcgcggggaaagagcttccggccccgcccccagctagcgatggccccgcctccgcaccgaccacgcccctagatagcccagccccttccgcttcgggctcgctgacttccggcttagggccgagggtggggaactgccgggcgcggaagcgatgggcatatctgtggcttattttcagcactgtcgcgcagacagtggcgcgatctcagctcactgcagcccccgcctgccgggctcccaaggtgctgggattacagcagcaccgcggatgtgacgtttggtgttcctgtgaacgtggggcggggcggggccgtttgcttgctcagtgcctagacgatggtggtggaaagacgcttctgtgggttaggtcctaacggttaggaaggattcacaggcgggtcatgaggaaggagcagacccctcgggcagaagcccgcgaggagcactgggtgtggtgggggcaggggtgcctcctctgtcaagtggagatcggcgcctcgctcgtgcctgcgagtgcgcgccgcgtcgaatacagccgtacagaacgcactacaggaaagtgaagccgggagagagactgggaggcggcgcggggactgggggccgtagacgcctttgctcccgggcacttgttagaagagcgagtggatcgcgcttcctgtgcgtcactgaatcctcatgacggccactgaaacggacacgcaggatctttgcttttcaagagggaactgagtccaggccagactgggttgctcccctttctctcggcccctccacctttgcaagtgctgctccttctgcctggagtggctcctccagtcttttcccggctcacttcccaccgtccggtgtcagcaaaaacagcacttcctcacagcccgttgcagcccagcagtcgccttttgcttcttttgaagcacagccctgtgaccgcctcgtgtccttttgtttttccttgtcccccttcccctctggaacataagctccacaaaggcagggacctgggaatcccgttcgcctgcattccccagcaaacgcctaacgaacccaatggcccaggactgaaaattcctttccacttcggctttcccctctacatcccatcggttctgtggagctcgaggggcgtcactgtgtgtgtggcagggcacggtgggggctgagatcgtttcctgttggaacttctggcccaagaagcgcgggtcacaaggagaggggtcagttcggttcagagcgactcagcccctcgactcgggtcttaaaacctccgagccgccagttctgcctcaggccgcgcccccttaaagcgccaccagacgctgcgccccgttaaagcgccaccagacgccgcgccccgtcccggcctcccccgcgcgctggcgcggggctttctgggccagggcggggccggcgaactgcggcccggaacggctgaggaagggcccgtcccgccttccccggcgcgccatggagccccgggcggttgcagaagccgtggagacgggtgaggaggatgtgattatggaagctctgcggtcatacaaccaggaggtaagcggccgcctgaggccggggggcgggcacggagggggtggggcagggtcgtgcgcgggtagcagggagggcgtgggtgaggcagaggctgtgtcagcaagcgtaggggacgcggcggggtgcggggggcaggtctgggatgcagtgttgcggggagagtgggggtgcacccgttgggtggcaggcgtgtagggatgggggcgagtgccgaccctgccatccgttctgagcagtggctgctgcctgagttagaggccaataggccgcccgcatcagcggacgcggatcctacccctctgtggatttgaattcactagttctctctgcagcactcccagagcttcacgtttgatgatgcccaacaggaggaccggaaggtgggtgctggcccaaggggtaaaggggcagggacgggtggccccaggaagaagggcctggtggagccgctcttctccctgcccacagagactggcggagctgctggtctccgtcctggaacagggcttgccaccctcccaccgtgtcatctggctgcagagtgtccgaatcctgtcccgggaccgcaactgcctggacccgttcaccagccgccagagcctgcaggcactagcctgctatgctgacatctctgtctctgaggggtccgtcccagagtccgcagacatggatgttgtactggagtccctcaagtgcctgtgcaacctcgtgctcagcagccctgtggcacagatgctggcagcagaggcccgcctagtggtgaagctcacagagcgtgtggggctgtaccgtgagaggagcttcccccacgatgtccagttctttgacttgcggctcctcttcctgctaacggcactccgcaccgatgtgcgccagcagctgtttcaggagctgaaaggagtgcgcctgctaactgacacactggagctgacgctgggggtgactcctgaagggaaccccccacccacgctccttccttcccaagagactgagcgggccatggagatcctcaaagtgctcttcaacatcaccctggactccatcaagggggaggtggacgaggtgagcactgaccttaacccatggatgggtctcaactcagctccaacatttcctggacctgcttcctactgggtaccttcaggtttctgggtgtcagacatggagaggacaggacctcccagcctgttgggacaaggccaaggagatgccagttctgggctgggacctcaggaaaggcttctgagggaagtagaggccccttctggctcttgctgcctggcaggagggctgtgtggtgtctggggagactgtaagagatcctccaccatgaggctgtgagtggggctgagacagagtgtgacttcatccctaaggtatgtgttagcattcctaatcagggaagtgctcttagaagaatactcatggagtttttaggaagacagcagtggtcatcttttgcccccagcactacccagagtcacctaggaagaccccaggggaccaggtatgcagtacaggaggtgcacagtcattgccacacagtcctggagtgcaacagacagtggagcctcagcaggcagcagtgggatgagtggggctcctcacaggaacccttctttctttggtcaggaagacgctgccctttaccgacacctggggacccttctccggcactgtgtgatgatcgctactgctggagaccgcacagaggagttccacgggtgagaatggggctttttctgggagggaagtgtgcccacatgtctagatggtcgtcctcaaccccggctctgaaccagaaccacctgagagcccaggccccaccctagagagtctgacgttgtctgggtgagtgagactggacatagccatgaatttgggggcaggaatgtgccaactgggccttgggtagtggcaacagtatggtacttactagggcacattggttccttgtccccgtttttggtctacctgcccctaggctggtctgggtttccagagatggtctggcgctttggctcagacagggtcggggaggcagtgtgtctcagtgcccccacttccccaggggaccccactgtacagctgagtggcagtgcctctcagatcagtccctgcccttggctttggtccctagcgctgccccttt

SEQ ID NO: 55396 - DNA, 2486 bp, Homo sapiens
catctgatacctaacaaccatggaccttaagattttttcctatgtagcctcagttcttagatgcaattactatggagacgggtacgatcacatgccagtgggagtattaaccgcacaacatttatgagggatcattaaagcgttaaatgcatatacttttggacctagcaatcccagtactaggaatttatgcaaacagtgaggtgccaacaaggttattcaccacagcatgatgcacaataactaaaggttagaacgtatttcaatgagggaatggtgaaataaacgacaaaacccccataagtgacgtccacagatcagcataaagacggaggccccggtgttggaacgcacgtaaactcccagacatgccgcaaaggaaacacggcaaggtgagaaagagtgggcgaggtgtcgacaacgaacacgcaagaagtgcttgtccttgcccaaaatacctcgaaaagaagaaactgggagctgctgccctcggctgcctccggaatgccctgggcacctcgggtctgggaggcctctgcaaggggcgcgccgggtccaagggctcaccgcgggccccatggctgcctctcagccccgcactcacatcgtccctgccgccaagcaccagccgacagccgcaggcctgaaacggccccacgcctcccccggcctcgacccgttcaactacccggccccacagccggagggctgccgcggcgcgccaaccccagaacgccatgttccgcgcagtccaaggagtcctccggactcgccccgcccccggcgccccggccccgcctccgcctcccacccccgcccccggcgccccagccccgcctccgcctaccgcccccgcccccggcgccccggtcccgcctccgcgccccgcccccgcctccttgccgacgcctccggcgcgcccaggtagacgtagaggcgagtagaggaagttccctagtctggtgtctcatctctcgccccggaggtcaaacctggagccagcatttctgtaccctgcgctcacacctttttcaacccggatggcggtgatagttaatactttctgagcgcttttactatggtcaggcattatatttacacctaatcctcgcaaaacactactgggaagatcctcatttgacaggagcaattccgggtcacaaaggctgacaccacaaagctagtccgtagcgggttcgaccacaggcgcccacactctttgacgcctcaatggcacagccaagtgcgcgggaagtgggctgcaaacgccggagagttttgtccggagcgcagagacgcgctgtaaccgagcaaccagcggggcccgcccccggcctgctacggcgctcccagcctgccccgcgccgctcggcgccggaagtgagtgagcatttccggcagccatccccgcggtgctgacatcccggttgttcttctgtgccgggggtcttcctgctgtcatgaaggacgtaccgggcttcctacagcagagccagaactccgggcccgggcagcccgctgtgtggcaccgtctggaggagctctacacgaagaagtgagcgccgagcagacgggccctgggccccggcgatagagggagacggagggggcaggcgggcggaggagcggacccttgatgggctgagggcgcccagacccaagttggggggaaacggggacgtgtagcgaccggctgtgccggcaaggtttgctgaggaaccttgagtggcagggtcgaggaataagagggatgacagaccacgagggccaagagctgtagccaggatgtttcggtctgagattcactgcttccttaacgggggactgagactgaggcttctgaactcctacctcgggtcttactaaaacggttcaggagtagcctttgattttagctcttgattccatctaacaagcaaacacactttcagggccaccacccactttgggaaacatgttggtgattcgtgcttagccttgtcatagtgtaactgtatctacagttatctttctcatggtctggagttgataaaccagaggctagtacagctttgctgttttccctattcattctgcagctggttgcacggggtgcaaccacttccgccgtcccattgtctttaccttccattgtatttctcatgggctttctgcccctagaaagatcttaaagtttaggtttgtttagaaacaggatgaattgcagagcaattaaattcttgctaagcactaacctccttttaatatgagtagaataaattgctggcattgggctggagctattccatagaaaatacatctcctgtagtaacctccctgttaaccctagcatttaatataatacctttcacatagatgttccatacatgttttgatgatgtttagcattcagcagccttctgctattagcagtttttgagagcaaattaatgtttggcaaataatggtttgtgttggatagcacttggtaattttcaaagcatttt

SEQ ID NO: 55397 - DNA, 1004 bp, Homo sapiens
cctcagggtgactcggacccccgtggcgccttcccctgttcccgccctcggcggaacctcaccccagtttcccttccagggctcgggctcggctccgggacgctgctctccgtgtccggtgggtctctcgctgggggggcacgagtgtccccaaccccacttggagggtcccggggaggaccggggtgggagggccgccaggggcgtgggctgtggtcccgtagaggaaactgaggcctgagcagggccggggagggcgtgggctcccggagggcgcagcctgccccacctccgacccttgtccccgcgctgtctcccgctgcgcccagagtacaagaagaagtaccgggagcacgtgctgcagctgcacgctcgggtgaaggagaggaacgcccgctccgtgaagatcaccaagcgcttcaccaagctgctcatcgcgcccgagagcgccgccccggaggaggcgatggggcccgcggaagagcctgagccggggcgcgcgcggcgctcggacacgcacactttcaaccgcctcttccgccgcgacgaggagggccggcggccgctgaccgtggtgctgcagggcccggcgggcatcggcaagaccatggcggccaaaaagatcctgtacgactgggcggcgggcaagctgtaccagggccaggtggacttcgccttcttcatgccctgcggcgagctgctggagaggccgggcacgcgcagcctggctgacctgatcctggaccagtgccccgaccgcggcgcgccggtgccgcagatgctggcccagccgcagcggctgctcttcatcctggacggcgcggacgagctgccggcgctggggggccccgaggccgcgccctgcacagaccccttcgaggcggcgagcggcgcgcgggtgctaggcgggctgctgagcaaggcgctgctgcccacggccctcctgctggtgaccacgcgcgccgccgcccccgggaggctgcagggccgcctgtgttccccgc

SEQ ID NO: 55398 - DNA, 1635 bp, Homo sapiens
gtggtcaggacattgaggccgggtcagggagcgtgagataccgggacgagcgggcccagggctgagcccagcggcgtccgggtgggcggtggcgttgagatgggaattgggaattgcaccggtggtctcaggaggatggaaaacccaagcagcagctgcaccaggaccgaggcaaagggaccgcagtttaacagaaaacccaaaacgagagcgagaaaacggccaaacacccgtgcgagtgagacgtccatgagccttcccggcaaaacgcccaataagggagaaggggcaggcgcggcgggggccggggttccctgaagtccccttcgtttccagaatccctaaagatcattccgccccccagggaggaaacccaagctccgccgagcgcggcgggtctgtgccttcgcttcgcttccagcctctcgcttccttctgacccgaccccgagttctttctccggacggtgtcgagaacccgggcgccggctggggctggagtctcgctggcctcggagcgcccccgagccctcgggcgacagcgaggcgaggacccaggtggaggcggccgggggcgcgggcggagggaggaggcgcgggagggaacccccggcccgcgggccccacccacagccgccccgggacgcagctcggggtccaggctcgagctttgctcactcagggcgcttcgtgcagggaacgccaggcccccggacgcgacccacgcggccgctgccagcggggaccgaggggagccggggccgcggccgcgagtccacgtcccgcccccgggcccggcccagcgaccgcccccgccgcccagggaccgcccccgcctcccagcgaccgcccgggccctcggggcggggaccgcggaccttcctggtggcgcggcagccgggcggctcctccttcctcccggccctggcgtggagcagagggacacaggttcccacgctggcgcccggcgaccgggtggggctgcggtgagtcccagaggcccccgccccgcagctcccggccgccccggcccgtccccccagcccccggtcgccccatcctccctcccccacccgcgcctgccccagccgcctacacccccgagacccccacccgcccggcgccccggcagccccggactccctcccccatcccgcccagcgctccccccaccctccacacacgcccgcccccacgtgccaccaacagacgcaggtcccgaccacagagggtgggggcaagaccggggttgtggggggtgcgtttggaaagcagggttaggactggaattctaaggtagcaggagggagagacacactcaggggctcagctgggttcctggagatcaacctttggggtctgagcccctctgagagtcgagctcctttcctgcgaggccccgtctaggaggggcctcaggaaaatcggggctgcccagctggttccgcaactccccccagttctgagggaggcttcaggggattacagacggtctcaagagggaggcccagccagtcccgcggcccctgacaccccatcaggccgctcaggcccagcagctccatggaggacgccggcgaggaccccaccacgtttgctgcccactctctgcccagtgacccccgtctcttggcca

SEQ ID NO: 55399 - DNA, 514 bp, Homo sapiens
gtgaccggggcccaggcctatgcctccaccgccaagtgcctgaacatctgggccctgattctgggcatcctcatgaccattggattcatcctgttactggtattcggctctgtgacagtctaccatattatgttacagataatacaggaaaaacggggttactagtagccgcccatagcctgcaacctttgcactccactgtgcaatgctggccctgcacgctggggctgttgcccctgcccccttggtcctgcccctagatacagcagtttatacccacacacctgtctacagtgtcattcaataaagtgcacgtgcttgtgatgatgctgtgacttcatctggagtgggggccctgctgaggggtcccggcctagtcctgagacagcccagtgctcagcccctgcacagccgtatccctcctctgtgaagctctcaggggagcagggatatgctcagaatctgctggtttccgcctcctgctgtgggcagcatctggaccaggaacgtgggg

SEQ ID NO: 55400 - DNA, 1143 bp, Homo sapiens
tcgcgagggcctgggagggcagcttccgaccgggagccccgcgggagctcgggaagagggtcccgccaggtggagacccctctggtgcagccagcgagggccccgggatcccgcagtcttgaaatgtgacgggaagtccgaggcatcacgaagtcggagacgcagggcgcgtcgtgggtcccgggcgccgaacgccagctcgccacggcccagcagcgcggccagatcccggtccccacgggcgtcgggggtgcgcgggccgcggggaggtgagaggcgggagccgagaagtttcccagacggcacccgcgggagcagagctggtcggcctggccgctcctcgccgcggactcctcgggtgcccgtggacagcagcccgtgccaggcccgcagcggccttgggcctctcctcctctgcaggggagactccggccgcgggctctggaaaagggcaagaccaggcacggcgcaggtgctctctgtcgggagaatgcggccacgcgcggtgcgttcacagcgggagaaaccctcctgggagggacgggtaggacgccgagcccaaggcgggaggcgccggaggacacacgtgccctacgcggggtgccgggggaccggccaggctgaccccggcgtggacaagtttgcctcccagagggcggagactgagaggcgaagggaccggccgactctgggtgcggcgggcgtccctccccaccgggagggtgtgtgctgcgggcatccctttgcaaccgctggaggggccttcctgcccgcgaggacattgcggtaaagaaagggtttgggaggcggaggctgcagtgagccgagatcccgccacgcgccctgtcctgtgcgacagagaactctgcgtctcaaaaaaaggggtttaataaaccccttctgtcctcgagctgagtcgcccctcccgggtggggccgcaggagctgtcaggtccaaggggagccatgggagtcaggcacgcaagaaaaagggggggaatctcaaaaggccaatcttaagctctaaattatgtggacgaaaagagtcgaactctgtaaaatatttgaagagatttattctaagccaaaatatgagtgaccgtggctcgtgacacggccctcaggaggtcttgagaacatgggc

SEQ ID NO: 55401 - DNA, 1252 bp, Homo sapiens
tctcgtcacaggcctcctctgctgaaatcttcccttttctggggctgcggtcctgctctatgtgggttcagaggcctaagcctccccgtgtctcctggtgcaggtcagagacccagtggccactgctcctgccccacagcagccctccaggcccaggaccggggacgacagggagcactgactgaagaggaggctgtctttggacacggggaggattccagggcctgtgggggcagcttcggtgctcagggctcacacgtgtgaccccctccttccgctttccggggcccctttgttttataaaatgccacagaggtcgaggggacatgagggtcaggggggaggggggttcctggactcggggccacacccagtagggcttgggcagggctctagggccccactggccaaaagcttcctgagattacagcagtttcctcttcctgcctcagtgccccacggacagggggtgcgatctgagcagaatgaggtgacgtcactgggtcagcggctcctgtggcatctggccaaggacaatgtgctgagaagtttcccctgaaaaaatcagaaacaaaactcacctcaggagaggcccctgcaccctccaagaggaagtgggagtcacgtgaggctcgtcttgattggggttcctggagaggaggccccctctccccaggtgggggctcctgtttcccctgctctgctctgaggtccccagggtccagtcccctccccaccctatcctggagcttgtcaaggccaccagagacctgctccctgtgccgtctcagactggactctggggtctccggtgcctcctctgattctgcacctcggtgcagcctctggcctggctgcgctctgaggagctccctgtggccaccgagcccttggaacgtggccagttccattctcaaactgctgtgagtgcaaagctcatgctggattttgaagatttggtgagaaaaaaaatttctttgtaaaatgtcagtatttcatcaatagtatattttgttgatgatatgttgagaaactattttggatatgtttgtttaagtagattgctggccaggcatggtggctcactcctgtaatcccagcactgggaggccaaggcaagaggatcgcttgaggccgggtggttgaggctgccgtgagctgtaatggtgccactgccctccagcatggatgacagagaccccacctctaaaaacaattaattaattaaaattaaatcagtaaaaaatttttt

SEQ ID NO: 55402 - DNA, 1703 bp, Homo sapiens
accttggaggcacacggagtccattttccaccttgtgtgactgtgtgcctggtgctagtgaggcaggaaaacaaggcctggagacagggaacataagaccgattcacacctcagctatgacaggaaatatcctctccatagggcctgcacccagtaaatgactttgtaactttacttcatcctctccatttacagagggcgtacaccaagtaaccaacggaatcctctagaaggtatttaaactccccaaaattctgtaatggggcccttgagccccatgctccggccgctcccacgctgtggcgtgtactttccttttcagtaaatctcttcattccttccttcctttgtgggttttgtccagttctttgttcaagaaaccaagaacctgggcaacctcaacaggtaatgatatgaaattcatattcacccagtgactctgagccctttttaaagaagagagactttgggtgtgttactttacctctagaggggctgaaaggtccccccagctgggaaacgaaggcccagcccgagctgctattggtgggcggcacccaggccatgagagcagaagacgctcagaaagatctctttctaaacaaatcaaagcccagttttgtttttgtttttctggctttttgtttttttgttaaagcaaagtatcagactgcgaatagacaccagtttcatctcagactcactgctggagaaccagcaaatccctgtgtctgcccggcaggttcctatggagaaccttcgactggtttccagggcaggaagccaggcccaactctgtggactgagccagtgaatcggcctcaggccaggcacagagccggccccagaggctggggtgaaacacgagctgtgagctgcaaatcagaaacagagcgacaggacactattttcatgacgaggttctgggtttttccctgatgtttgtttcctcggtttttttgtttgtttttcccttcccagtatttttggacttgaactttagaacttcaacttctctgaggtttagcttggcgggaggagggggattaattaccgtaccgtaatttctcctgggatactggatttgggaaagggtatatatcctaatttgccattctgaattggttgcatttgattaaaagcatgacttctatcatggagggtccagccctacggggcttggcgggtgttctccccgtgtgtggagacgagagaccggaagaaataaatacacaagacaaagagatagagagaaaacagctgtgcccggggaaccactaccaccaagatgcggagaccggtagtggccccgaatggctgggcacgctgatattgattgcatacaagacaagggggcagggtaagaacggtgagttgtccaagtgattgataaggtcaagcaagtcatgtgaccataggacaggggcccttcccttacaggtagcgggagcagagagggaaggcagcatacgtcagcgttttcttctatgcacttttaagaaagatcaaagacggccgggcgcagtggctcacgcctgtaatcccagcactttgggaagccgaggcaggcagatcagttgaggtcacgtggccaagaccagcctggccaacatggtgaaaccctgtctctactaaaaatacaaaaaattagccacgcatggtggcaggcgcctgtagtcccagctatttgggaggctgaggca

SEQ ID NO: 55403 - DNA, 1926 bp, Homo sapiens
taacgggtgccttcccaggcactggcgttaccgcttaaccaaggagccctcaagcggcccttatgttggtgtgacagagggctcacctcttgccttctaggtcacttctcacaacgtcccttcagcacctgaccctatacccgccggttattcctaggttatattagtaatgccacaaagagaaatattaaaagctaatgactaataatgtttatactgattgataatgtccacgataaaagctaatgattaataatgtttatactaatgattgatatgtccatgatcatctctaatttgtattataactattcttattctctttattatactgaaagtttgtgccttgtctttttttttttttttttttttttttttttttttgagacagagtctcgctctgtcgcccaggctggagtgcagtggcgcatccgggctcactgcaagctccgcctcccaggttcaccccattctcctgcctcagcttcccgagtagctgggactacaggcgcccgccatgtgccttcagtcttttgcctccgcacctgggtaatcctccgcccacactatcacatgccctgaataatggggttaagaacaatttggggtggaaaacagggtaggaagggaacagatggctcagaacacaggaagttaatttaactgcagtccagggaggatggcattctggaagccgagtcggcctgaggtctaaggggcggagggaactccaagcttggcctggagctcagggaagggagctcgcgtggacttcaggagcccggtgggtgcttcctgtgcacaaacgggcagggtctgagctcccaccgtctggaaatgctgcccagtggatttcagcctcattttacccagctcccaatcaagatggaattgctctggttcaaacgcctagcttcgccagctagggggtgaaccggccacagatccccggaggccaacagaagacagagcccctgggtcagaggcaaggacggttgacttctcaggcagggaggtggccaagggaaccgcttctgcggcggcttcccaagccccagctcccgcagaaggcctggaggggcccggggacccgtgccacgcagtgagtggcggcaggacacgagcccgggggcgcagcttcctggacactctgcccccagacactggctgccacgcgggacggtgaccagcgctgccctcggcgcccgggaggcctcccagggctgtgcgccaggaaaacattcccgaaccgacggccgggaatggaacggggcggggcgtttcccagcccgaggaaaacagccctgaaagcgcggccaggaatggatgggggtggggcgtttcccagctgctctccagggagccgcctggagcgggggaaggggggggcggcgcgttccaacggtgggggggctcgttccaacggtgggggggcgggtctgcgtttcgggcccccagacacgcagcacgcggaggagcgccccgccccgtctagagccccttcctccacagcagggccggggcgcagggggtctccccgcacccagcgcgtcccgccccgtcccgaacacaaagggctctgcccgtccgcgctcccacgaggcggcccctccccgcttccggccgaggtgcggtcgtcacttcggggaaacggagaaagcgcctggggggcggggcacacacaccatgcacatacacaccccacacacacgtaccatgcacacacatatacacacaccacatatatacatgtcacacacataccatgcacatacatacacacaccacacacatacacacatcacacacacaccatggacatacacacacaccacacaagcaccgtgcacacaaatatacacaaaccacatacacacgtgacacacatacacacatgcaacatgcacacacaccacaaacacatgc

SEQ ID NO: 55404 - DNA, 1399 bp, Homo sapiens
tgtgatggcctgtgaggcccaggaagttcccaggcagaccgagggccgagcacctccagggcagaggccgtgcaggggctcccggtgccgggaagagtcctcaacacctggagcccctccaggccctgtgccctgtgcctgcccccactccgccctgtgctgagcttctccagttggggagtggggctgggcgggcatacccaggtcgccctcagggtccgggtccacctctgagtccagggcccggccctcagggactcggcctcgaagaatcagcatggggtccttgtcgtcctgcagctgcgtctgggggtctccttccacaggcctgtactgcaccttccgcggcagcgccagctgcacttctttccaaaaatcggaggaaggagtctgggggccaggtcggggcggtttgcaggtgtgaacacctcggaagcccctggcgtcctggcccccaagagcacacctgcggctgcccacgggttccacgccctgcgacagctattccgtggctccgggggcctcaagggcggctccccgcatcggggccccaggcagcggaacctccccccagggcccattcacaaagcgtggtgccgcagagctccccacggaggggtcccagcctggagcccgggcaccgcccatctctaacccgccgctagccccggaccctcccgcgcctgctccgcaccacggagccgggcctccagagcagcaaggtcaccaggtggcggtgctggcgcagcaggcggagcgccgggtgcgcggggtcgcgcctctggccctcgaaggtgatgaagatgggtctgcgggtgagctccagcagccggcacaggccctccctgcggggcgggaccgtcaggggggtgggtgctacgctggggcccacccaaccccgcgcgggacccaccggaagctgtggctgcaccaggcccggctcaggaaggcgtccgaaagcaccacgatgaggcgtcggcagcggctcaggttcaccaagaggtcggcggagggctctgcgggagggcgggcgtcggcggcgcaggggcgggggcgggggagggcggggccggaggctcaggggcggtgccggacgcagagctctaagggaggggcggggcctgcggggtgggcgggtttttgaggcggggcctcgggtgggcggggatgggggcggagctcgatggtgggggtggggccccgggtgggacggagcatggggcggggcggggcgggccctccgggtgggcggggcacggggtggggcccgggataccagcgcgcggcaggaggtcgcggtcgtccaggaagagcttgtagccccgacgccgctccagctgcggctttaggatgaagttcacgaacttgcggtcctcggggcagtcgctgtaggagacgt

SEQ ID NO: 55405 - DNA, 792 bp, Homo sapiens
ctcagacccagccagcgtcctcggtccgcggccgcccctgcccggtgggttcgacgctcagcacccagcaccctgcgggcgactcccgctcagctcggacgcgccgcccctccgctccccgtgcgcgctgggcccccagcgcctgtcctgaagcaggaacgtgggtaaaaggctgcggccccgcaggccgaggggctctggttcgctcccctaccccgcgcccacctgcgccctgggcgccctccaagtgaggagggcggagaacgaggacgcgcgcgggaggcgggcacgggggtgcggctcggggcgctcggccggggcagaggcgcgcggatggcggaagctccacccggcgccgggcgagctcgggccccagcctgactcttggtccgccctcggcgcctcaggaagcctcgagctgggatccaggcttgggcgaccgaggtgggatccctgcgcgcctcggcgctcctagccccgctctgttctgcgcgagggtcaccaaaaagccgctgaccacgtcgggcagaggaaagggtggcccccgcccccttcgcccactttcctcccttcccccagccctggaaagggccaggacgcgggcgagctcgggcttccgggcgacgcgggaacctccccggccccgagccatttcctgagagaccgcgcccagggacaagcagcgccccgggccccgactccaggcctgcagcggctctgggaggactgcgacctccactcaccttcgcgggtctgatggcgaccgccactcacctgctgccaggacctggg

SEQ ID NO: 55406 - DNA, 1100 bp, Homo sapiens
gggtgacagagtgagactacgcttaaaaaaaaaaaaatcacaatagttagcatttacaaagcgttgggaattctacttggcacgtggccagagctccgtagtgatgggcaacgaacacgtggtctgcgcgcccggggccgcgcggtctggcggggccgcgcggtctagatcacgctactccgggtcccaaggccccgccctcaggccccgcccacagaccatgtcctcggccccgcccctcacgcgcccttgggccccgcccccgagccgacaggaacgagcgtcattgcgaggcggcctcgcgcgcagcttccttggggccagggaccccagtggggccggtacatctccccgccccggcctctgcaccctggagggacggcaggagggctctctgtgcagtttgagagaacacccatacgcaggaaatgaccccaacgccaccgagagggcgcctggaatgtgagcgccacctgctgggatgggaagaggtctgggaggggacctgaaggatggttcacagggaaccaggcctgtcgggtgattgctggaaagatggcatggacgggagctggctgctctggccactcagccgaccccagctggacgcggccagggcctggggcagggggccaggcctggggaggcccaacagcacgccccctggagccagcgcctcccgcactgcccagcctgtgtgtcaggagctggggtgaaggtcccatcacagtcaggccccatccctgctgggcgtggctgtgcaggagccccgcaaatatgtttatatatttagtatgtgagttatatttcaataaagctgatatgagatatacttcacatatcatgcagttcacccattcaactcgtttcgagtggacagttgagtggtttttaggacattcacagataggagctgaggtcaatattacagcactttcatcgccccgaaagaaacctgctaccctttgtagtcgctccttattaccccttccccagcccccggtgaaaactcatctaatttctgtcttcatagatttgcatttcctggacatttcatacaaatggatcacataatgcgtagtctcctgtgactggcttct

SEQ ID NO: 55407 - DNA, 1405 bp, Homo sapiens
cagctactcgggaagcttgagacagaagaatcgtttgaatccgagaggcggaggttgcagtgagccgggatcgcgccattgcactccagctcgggcggcagtgcgagactccgtctcaaaaaggaatgacccgggtcgcatggggtgaagggtcgggaagcgccccaaaaggagaacggggctgggctccgggatccgtcggcgaggaaggggcgaaggggtggagggactcgggccaggccgccggggatgtctgtggttacctccaagctctggaggccttggcgagacccgcgccatccgcagcttggttcctgcgacctcagccgcagggcggtccggctccggtttcccagcaaccaggcgtcatccttcccagcaagcactgcgtccaacccgcgacgtcggaccacaaggcccagcatgccccgcgcggactacaagccccacaatgcaccgcacaccctttactggccggccccgcgctgctctcctaagaccccgcgggccagcgccgcgaccccttcccagcgctcctcgcgctgtgtgcggcgcgtcctctcgccggtgacccggtgtgcgtggggtcgaggcgccgggcggagtggctccgggccgaaacgccatgcggaggggcgagcgcagggacgccggaggtccgcggcccgagtccccggtgcccgcgggcagggcctcgctggaggagccgcctgacgggccgtctgccggccaagccaccgggccgggcgagggccgccgcagcaccgagtccgaggtctacgacgacggcaccaacaccttcttctggtgagggcagtgggcggccgcggggcggcgagggtgccctcgacctgggggttccggcaccgctggcctgggggtccccggcagcgccctctcgccgtcttggagtccaggactgtggccgggggtttgagggtgtggcagcaccgccccccgggtcccggggagcggccggaccgagctcccgacgccgggtcgggcggagggcggcgctgtaggtgggggagaccctgggcagaccctccctgcggccgctttgcgtctctctcgccgccctccccacccctgcccgccttggctctgaccgcgcggttctgcgatccagaccccttccccgccacccgcctccagcgtcaccccagaaacgctttctctgtcctgctgtcgaagcttcacctgtgtcccccgtcattctgcctgtggttgctcctcagtgcttgcggctgcacgaaatcatcttgtgtgtcgcgcccgaccccacgtggcgatcgtgttgattagcagagtgttgtgcgtgcttcaggaatgtagtcggtgttcgtcgaatccaggctctgtttctctcctcagttgcccctagcggggccagcgcctcctccct

SEQ ID NO: 55408 - DNA, 1359 bp, Homo sapiens
tgggtaatcggaaggaggaggagggcagtctctgggtaatcggagggaggaggaggggagtctctgggtaatcggagggaggaggagggcagtctctgggtaatcggagggaggaggaggggagtctctgggtaatcggagggaggaggaggggagtctccgggggagtctctgggtactcggaggaggagggcagtctctgggtaatcggagggaggaggagggcagtctctgggtaatcggagggaggaggaggggagtctctgggtaatcggagggaggaggaggggagtctccgggtaatcagagggacgaggttggagtggccgctgtgatggtggattaccattgcacgtttagcccagaagagacaaagatggttaaacagtgtgtgcgcagtggttaatggatacacacagatcttgttgctgtacaagctgagggggcctagaaccagctatgcttgcagcagtgagcacacccaggcccagatcctggttcctagtgccctccagtccacggggccagggctctgaggagaaatggctgattccagcaccggggcaggaaatgcccaggatcagctgatcctggcagttccagaaagtgaggagctctgtaaacaaaaccccacagtcacgggattgcgtcccagtgaaagagcctcccagtggccaaagagcaacaaaataataaagtagtattagaatataacccagagtagaaaataaacatccacgagcccatagtgatataagtgattgagtaaataaacagagggaacaagaccaaccttccctgcagaaggttttcagtaaatgaggtagatccccccattccaggagctggcgtgagctcccggcaccgctgtgcgctgcgcgtggtgacctgacctccttcctgggcgtgcagcacggagagggcagtgggaggaggacgctgcagccgaggtgcccgcagacacccccaagcccagtggtcaggtcagcatgcactggtcatgttcatggcgtggccgacggggaggctgctgccccatcctcccaaccccgacgaccccagcccggccatgcagaggcatagtcgaccatctcactaaggaacattccacagaattcctgaccaggcctcctccaaaccatccaggtcatcagagacaaggagagtctgagaaaccgtcccagcctcggggagcctgaagagacagaacgagtagatgccatgtggcttccaggaagagattgttgggggcggggcagggggaaggacatcaggggagagcgaaggaagtgtaggcctcagcagctgtgtggcagcactggcttatttattttttattttttatgtttattttatttt

SEQ ID NO: 55409 - DNA, 1767 bp, Homo sapiens
ggccaaactcagtatgttggtcgcaaactcctgggctcaagagatccgcccgcctcggcctcccaaagtgctgggattacaggctgcagcgcacccagcctaatgtaactttttttttttttttttttttttgagaaggagtttcgctcttgtcagccggctggagtgcagtggcacgatctcggctcaccgcaacctccgcctcctgagttcaagccattctcctacctcaacctcccaagtagctgggattataggcgcctgccaccacgcccggctaattttgtatttttagtagagacgggttttcaccatgttggccaggctgttctcgaactcctgacctcaggtgatccgcctgcctctgactgcccggcccagtgtaactgttaacggcaacatcgtgtgcagtctccggcttgcattcggtttagtcagccaatcgctaagacgacacttgagaccgttttcagatctttaggctttccaccatcctagaagggggcctgcctggttctaaggcccttctgaaacactgccaaactgtcctcgggaaacggtgcagaagtcctctggtttcccccaaggcgcgtgggcaccttggctggaacctcgcccagtaacacgacgtgcctggggccccttcgtcatttccgccaaccccggtgacaaccctgacaccggcccctaagtgccattccagttatgttgctctcctccccgcagccccaggcggcagcttcgcggcccggcgtccggtcccccggtggtcccggagcgaagctccgcaatggagagcggaggaccctccctccccgacctcgcacgaccaagaccgcccacctttcccccaacgcccggctgtgggagccgttcgagtcttctccgccagggcgctccttcccgggaggccgcttctttgggggaataaggtcaaggattacgggatttggggaagcaagctcggctgggccaggattgcttgcgtagctcgctggaatctaaggcactagagggcttgacggccacgtgaggacgaaccacgcaggcgcagccccgcgccccgggcaaggacttccggcaagccccaaaggggagcgtgcaccgcgatgacgtcctcaaggcgcgccacgtccgcccggcggcgcagctgcccagcgcaacctcggccccgcctcgatagccccggacccctgccccgcccgaccccgccccgccacgggagcgcgccactcgcccgcgcagcaacggcctcaatagcgccaggcccgcgtctacaagaagcccgaccaaggccggcgtgggcgaggcctggctagacgctgacgcaccgctggagctactgacctcgggacgactggcggacggtcgcgggcctggagacccagagcgagacggcctacttcgttctcgagccagcagaacgggttgaacgtgtcgacaaccccacccgccagtcagcggcgcgggcgtgttcgagccggctcgtgggcgtggtcaggtgcgtgggcggggactactgggcggggctcggcgcgggggcggggcctggcgggagtagtctcggggtcggggcggggcccggcgggcggggctcggctaagcacagtcttggcgcagcggcggggcctggtggggcgtggctcggtgagggaggtctcgcttgggggcgtggtctcccccagtaggcggggcttggtgccgggggcggggtctggcgggcgcgggcgcgtgtgcgtgttgtgggcctcgcactggcacgcaagt

SEQ ID NO: 55410 - DNA, 650 bp, Homo sapiens
cctcgcaaagtgcttgggattacaggcgtgagccaccgcgccaggtcagctttttaaattttttttgtattgttggtagagatggggtttcatttggccaggctggtctccaactcctgacttcgtgatccggccgcctccgcctcccaaagtgctgggattacagacgtgagtcaccctgcccggccgcctgttcactttattacttggagaccgtattccattcccataacccaggggaggaggcacgcacgagccgacaccagcaggtggggcaggaaacgcagccagcgcggaaccggacgcccaggagccggccccgggctgcccacgacggggccgccggagaggactcgcggcgccccctcctggatgtggccggcggcgcgcgaggaaggagccgccccgaacgcgcgagcgaggccgggactcgggcgccctctgccggccgctctgagggaccggggcgggggggcgtgtctcccggtcacgtgacctggaaaccccgcccccaaaccgaggggaacttgcggccccaagacgcggcgcgcttacgagggcgcgcgaggcgccgcacgggggaggcttctccgaaagccgcgagggcagctcccgtgtgtccgctgtgcaaaccggtccttccgccaaaa

SEQ ID NO: 55411 - DNA, 1310 bp, Homo sapiens
tccctgggccccaacgccaggcagcaaggactgcagcgtgcctacctgtgcagctgcaacccagcgtgcgggagggctgtcgcctcgcccccacttgctcttaatgacccagtgatgggaaaagggacccagccctcaaaggcagggctgacagctgagcgctctcaaccacgcacccaaattagaagctgctgggtcggcagaaaggctaaagggaggcgcccgagggctgaggttaccgtcctccagaacaggtctggccacggcggagcgcgccacggcgtgcccgggcaggctagtgccagcctgcaggccccgcggcgctggtgcctccgacaagtatttgctgagcgcctactgcgtactaggcgccgccgaggggagggcagacccgggcagcgccccgcacccccggcggggaaccgggggcatctttcagccacagaaagctggagaagacagaggagctcctgggaagcagggactgagcgacaggaaggggccgagaagcggcgcgggagacccggagagggaaaaggcactggggctgaggcccccggcctggtccgcgacctgtgatgctgaatcgggggtgcccgggcgtgccgtggccgcggccgcctcctcccagacgcccccgggtgtgagggcgccgggcccgaggctcccgggtacgccggcgtggggaccgtgcccagcgcgaggccacgggtggggcccggattcccgcaggccccagggaggaaggggcccccgcccgccgcagcccccgacgcccgctcacctgtgcccgcgggccccgcccggccccacccacccgccgccgccgccgccgccgccgcttacgcccgccggccccgcgcccccggcccgcgccgcgcgtattgctgccgcctgggggcgaggagggcgcgcggcccggccgatccctgcccgcactcaccgttcacaggcgcgactgcccccggggccagggccggggccgaggccggggcggggcgggggcgggggcgcgcggttcgccccgcgcatgggctccgtccgcggcgggtgcggctcgggttgcgggcgcagggcacgggcggcggagactcgggcgggcctgcgcacgccccgccccgcgcccgtccgtctgccaggcgcggcctaccattggctgcgcgccatcgggccccgccccaccccggttggctgagcggcccgtctgtcaggagccgcggtcgggcggggcttccgggagcaacgcgggaggcggagccagtagggccgcggcctctcggggttgggcttggctggagaccggagccgag

SEQ ID NO: 55412 - DNA, 2616 bp, Homo sapiens
agccagcccagcatagccatgggtgtgtgggggaagcagacaggtaacagtgacaagctggggactgtgctgaacgctaactggcaatagtacactcctgcccacagcctgtttttaaattaataattaattctttagagacagggtcttgctccgctgtccaggctggaatgcttcggtgtgatgacagcgcacgttaacctcgaattcctgggctcaggtgatcctcccacttccgcctcctgacttgctgaaactacaggcacccgcctccaccgccaggcccagcccacagctcctttgacctcagtgacaggcactcacctacctgacccccaaactgaagcctcacttttcccagccgtgtccacaccctctgggctaccccattaccatgacaagtattccctctgctccaggagaaaagccaggtcccagacctgacccattaaaacccaatcattccagctttcacccttcatctctgcaactttcggctatgtaagggctccctgggggagcacaggagacaggcgggcaggaggcccacgcccacaactctttctgagctgggcagaacaatcaatggcccacacagctgaccgcgaggctgcggggccctgggcgggacagtagggtagggggtgaaggagcggcttccagccagcttcactgtgtgcatggcctggcactgggtccaaaaggggcaggaaggtgtcggagaagagcctcagctagagtccgggccttctgagcgggcacctcccgcaccaggactctgcgcccgccagctccgcagggctccacctccctcgccgggactggtgaccctgcgaccccgcgacccctgcgcgtccagactactgcagctgcggtaggccccaaaggctggcccgggaagcgaggggaggggctggccccgctgcccctggacgcaggcgggggttgcgggatctcaagccagagacccttcctgggcgggaacccgccacactagaaggctgctgaggaagtcggcccaggagcggggccagacacctaccccgacgcctgcccgcgggccgcagccaccgcatttccgcgtttttcgcggtaggcgggaggtgggggcggggactgcggctcggcgcccccctccgacccgcccacacctgtagtctcggggggggcggggcgcggcgacgagccaatgggtcggggaggggcgtgacagaggcagccaatgggcgcggggagggggcggaacgcccgcgctgagcagccaataggggtgctaggggcggggcgtgcggaccgcgggccaatgggggcgcggggcccgggtgcgccgcggcgctgggggcggcaggttgcggcggcgccggagcgggtctccaggctggcgagcgcccaggtgagccgcgccgggtccccggtacttgggagcgcggggcgcgcctcgagccggccggacgccgactccaactggggagagttttccgcgatgcccggacggagagcgggggcggcgccgcacctgcgcccgccctgcggaacggggacgccctggctcccgccaggctggggtcgcggcgcgggcttcggtgcccgcggcggggaccgggactttcggggcgagcgcagcgattaggcggcagcggcggggctccccgggctggcgggggctgctcagacccggagtctgctccatctgcagggtcgaggtctgggttgcgaccccgagcgcctctgcggcctgagcaggtcggggtggggcgttcccatgccggcggccgcggggcctggcgtgcgggcgcctccgcgccgcccggggagggggcagtgtcctccgagccaggtgaggcgagtaggaaatgctggatctggttaatgattcgccttgttccgggagtgcgagcgtggcaagaggaagctggtgaagtgggggaggatgcgtgctccggagggccgccaccccaggaatgtgtggctggcgggtggggctggcacaggagggtggggcccgtgcggaggggcggcagcccagccgtttctagggcaggccaagaggatgaggagaggaggaccagcctgcgataggagtaggcaggtcctgacccggtgcctgcgccctccccacaggacaggcatgttgttgggactggcggccatggagctgaaggtgtgggtggatggcatccagcgtgtggtctgtggggtctcagagcagaccacctgccaggaagtggtcatcgcactagcccaagcaataggtgagtcctctcggggtcaggcaggccgggcaggtagagctgaagtgggacctggtggtccagctccatggtctcccccaaggagagtggggctggttgctgatcctttttgttcttcccaactcttcaagccaggtggacagagagtcggggggacataggctgaccttctcctcttcttcccaggccagactggccgctttgtgcttgtgcagcggcttcgggagaaggagcggcagttgctgccacaagagtgtccagtgggcgcccaggccacctgcggacagtttgccagcgatgtccagtttgtcctgaggcgcacagggcccagcctagctgggaggccctcctcagacagctgtcc

SEQ ID NO: 55413 - DNA, 2272 bp, Homo sapiens
tgaagatatgaccacacctgtgcctgcccagggccaccttcagcttggcaacaggaactccgcacactggtaccctggacacacaaggaaaagaaagttccctccaagagggtatctggcccagcctcagccccaccaagcggagggcagcaaagcccccgaatgatttcgcttacccccacccgccgtccctgctggccagacaggcacaccccgtccatagggcaccccctccccacggtatccagctgccctcgcgtccccgtgtggccgctcgcctgcccgccagacccggacacggggccaggagggtcgcgctgcccaggcacagatcagccgctgtcacacgcacagtgggtctggggcagcgcagtgtgcggtgggcaggggctgccctgcgcctggaggcactgccgggtgggcgggcggagggattgaccccacccccgtcccctccaacttgggcgtccgagccccgccgcgcctgcccagcccgaccccccgcagcccccgcgggagggcggcctctgaggggcgccccgcccgccaacctgggatccctcgcgcgtcacctgcgaccccggcgcggggccgtcgccggctctcggcccaacttcagctgcggccgctggcaccctctcgccccccggcccgacccgaccggccccgggccccgcggctccacgcccagccccgtatgcaaatgacctggtccctcagccaatggccggcctagccgggcccgccctaccgcaacgcagccagtgggcgcgaggggggttcgcgacgccccgcccaccgccgcgcggcccttcgcgggcgaggccggcgcgttcttttctgcacgtctgcccggggaggggcggcacctgccgggcggggcctgcggggcgccagctgcgagggcgcggcggggccagggcgcgtcccccggccgggcggatggtacggcccgaggtggtcctcctcccgccgcgcggtggtatggcccgggctcgcggggcttccgggctgggcgtggggcgcagcctggcgacgggtcctccgcccgcgggtgtgcgtggggcggcagggccggccgggagctgcccctcttcccgcggcgcggtggtacgacccggccgcctccgtgccccgcacccgcgtcccgcgggcccgccccccccaacccgctgggcgcccggcgcacgtatcccgggccgtgacccgggtggggcctgcgcgggcccggacacggcgtcctcgggacgcacgcaccaccccccgggcggcttggggtccccaaaggacgcccgggtccgtcctgctggcgaagagggggctctggctctgcctggtttgcctggcgacccccacggggcgcccttgggggctctgggtccctcctgcgcgctctgtctccgcggaagcctctggagcctggagggggtgcctcaagggctcaggggtcttcgcagccctgtgccggtctttgaggggacgaggcgagagaatcctgtctgtgcgctgaaaacgtgtaaaatcaaaggagccttgacggtttgaccttcgttaggactcgcagggccagcttcagacgtggaagtatcggactccggggtggggctccaaagtggcagccaaaggagatttggccgccggccccccttggcactgtcaccctggtcctcggccccgggccgtctcccctcagctccctggccctaaactcaccgccctgctctttgtcctcccctggccccatgacctccctgcctcggcatccgcgcaggcctgggccgcagcctgccccctgccccagccccggcggcaaagtgctggggccccagggagcttccgaaccagcccatgtcctcaggggcttgaaggctggggacaaaaattcagatgcagagtctggggtgactcagacatgatcagcaagacatgaccgaggtcttgctgaccccttgacccttggcccccgatagaaccgagtggctccttgcacctgtggctgcctgtggatggggaaggtgcccagaggatcacggagccactcggttctattgggggtcaggggtcagcaagacctcgatcctgtgggtcgtgaaggagcctctaagagtcagtggggtccctgagaaggcccacgtcttcatggcagggcagaggctcctagggcagtcagactaggggacaagaaggggcaagaggacagggcagctctgtgttcctgtcgtgccctgctgacgtgaacccacttctgcccccagtcctgccaatttcacag

SEQ ID NO: 55414 - DNA, 2131 bp, Homo sapiens
tccccggagcctcccctggtgcgctgcagccacgcaggcctgcgtcccgaggcccacacggcttctgcgcggcatcctcaggacgacctggagccaaatccacacgggacggcacagcagcgtcctgccgagcccgcctcgtccgccagcgcgcacgattcaccgcgcctgctgcgggacgggcggacgcggggctgggctggaatagccggctcacggagggctccggcagtgtttgttcagaggagcgcggcgctggtagcaggcgacgccaggactcttctccccaggtgctcccgccgcgcgcggggctagggaggagctgcgggcggggttgcggcgtgggggcggggctgcgagggtgggggcggggctgcggagcagcgggcgtgaggcggggctgcgagggagggggcggggccgtgggcggccgtcccgaggcagggcggggctgcagacgtgggggcggagctgcgggcgcgaggcggggcggggctgcgggggtgggggcggggctacgtgcgtgggggcggggtggggctgcgggcccgaggagggacggggctgcgggcgtgggggcggagctgacgtacaggaagcagctcccattcgctctgggcggtgggcggagatccgggcggtaccagctgtcccggccgcgggggggacggcctggaccagcccatggtcgcgggttaaacagtacgagctcttccaggatattggtctccccgggcggcagtcctgcattaaagagtgtttccaaggtggaagggaggccgtttgaacgcctcgagacccccggctgcaaggagtggcaccttcctcacttcagtcatttctttcccgctctggtctcagtggttccagtcagcgagcaggacagaggagcccggaagaggcgccgtgcacttccgggtcgaagagcgcacggcggcggcagaggcggcggcggccgggcctaggagcgactctcggtcgtgcagcggcggcgagcgctcgcgagcggctgcgggacgcgaggtttccgggtaagtgcggcggccgcgccggccctgggggccctgctcctccgggccgcgggccgcctgtgggcgccacgcgctttgtctgcggcctgcaccgcggggcgaggcctgcgccgcgctggccgcgggccgggagggcgggcgggcgcgcgcgcgctgggaggccccgccgagactgggaggccccgccgagactgggaggccccgccgagactgggaggccccgccgagactgggaggccccgccgagactgggaggccccgccgagactgggaggccccgccgagactgggaggccccgccgagactgggaggccccgccgagactgggaggcccgtggcctgcgggcggacgtcctgggcttgcgaggacgcggcgagagcccactcgcctcgctctgtggcacccacgcccatgccccctgcgagtccgccctgccgcgtttgggagagagctgtgacttcgttgccttgtgtccggcccctgtgcatggttgccgtcgtgggcttctggccttgtctgcatgtccacaggcctgtgtggctggcggttttcctattccttaactcttgcagtcctcacaagagcctctcaggtgtaggtattgttcccgttttacagaggaggggattggagcccagaaaggctaagtaactggccagcgccggcagccggggatccgcgccagccccgactcctaccatgctccttttgacggggcttgtgttgccccttcttcggagtttatgtgctttacttgtttcgacaacagcagaacagcagtcagctgggtgaaccacgttctggccagtggtcaatggacaggctctgaggccgagctgaggtttgacttcgggtttggcatagttgatctctctcctggaccatccggttttctttcttattggaagaatgttaagtcagagtgctagtggatggatggcacctcagcatcatggccatgacaagcctggccttggccctcagcagggctgtgtttatctcaggcccgcggagacctttgtgcgtgcctgactttttgacttccattgcagttgacaattttgagttctcctagctgatacagcagatggtgaatac

SEQ ID NO: 55415 - DNA, 929 bp, Homo sapiens
gccaaaggtggccagcagctgggaagggctgtggtcttttctgcagaaatggcttcctggcctgtggcctgggacatggcagaggtgggtatggggaagggaagatttgttggagttggggctgctggtgcaaccaggaggtcctaagctaggggctcccattaacccagcatcctaactacaggtcctggtggtcccaaacaggtcttgtgcctggtgcttgtgccagagggtacctgcggaggcttcctgggttattttgtgttctctggcaaaatagcccctggttacttttgtgtgatatcgaggaaggatgttgttcagcctcacgtaacctgaacgttcctgctgctgtggtggaggagtgtaagaggcccgtggagtcttccctcaccagctgtggtaaagttcaaaggcctcaggacttagccccacaggtgcatggactcgcaaagttcagcctcattcctgagctggtatttctggccagctcctatgtgccaaaccccacacggcctcactgatctcttctggcagccctggggcaagccctgccattgcctgtcgccccacctaacccttggaggtggtccccaatctcagtgcatcaagggagaggccaggagctgtttgttcacatactatggctcactgcagcctcgaactcctgagctgaagtgatctttgcacctcagactcccgagcagctgggactacaggcggtttccaccacacctacctggtttttaacggttttgccatgttgcccaggctggtctcataacttgcaggctcaagtgatctgcctgcctcagcctcccaaagtgctgggattacaagcatgagccaccacgcccggctgattcacatttttttttttgagactgagtctcactctgtcgcccagtggcatgtagtggcgcgatctc

SEQ ID NO: 55416 - DNA, 948 bp, Homo sapiens
acagccactttcccccgttgctgtggtacatgtgcagcccacagtggtggtgggagctgagctccaatgcaaggaggccctgaactcgagggcagctctggccccctacttcctggcctcttgtgcgatgcgctttcctctgatcatggatggaggttggacttggtgggaaacagagtgctgcagggccggcttcactgcctcgctggattcctgactcactctcctaggacaggcctttcctccgagagtcgcctgggaaacaaggtcaatagcactgatgagaaatgaaccacgtgcacgtatctcctttcttatctgggaccaaagtttgaggccctggtgtggaaggaggagcgtgtccaactagatttcccaaggctttgtacgggatcctgtgtggtttcacagtgaccttgcagagtgggaagggcaggggtcccggctgacgggtcagggccttgagcaagtggtcttgggagccgaggggtgggcctggcctctgtgccttctgcctcctcagctctgggtaccactggggactcagcagcaccctggtggatggggttggggtgcggtcagaggagcctccaggcatcccaacagtggccagccttggcagggagagcaccctacgtgtcactgaggcccctcttgtgcccagctgataaagcccggctctgcctcagctcaggatgaggccgttttgttcgtatatggtgttgcgattcctcaggagcattgcagttttttgagatggagttttgctcttattgcgcaggctggagtgcagtggcgcgatctcggctcactgcaacctccgcctctcaggtgcaagcgattctcctgcctcagcttcccgagtagctgggattacaggcgcccgccaccacgcctggctaatttttgtatttttagtagagacggggtttcatcatgctggccagg

SEQ ID NO: 55417 - DNA, 464 bp, Homo sapiens
ttctgctgcctccctcgcagctctcacttctcccagcctctttaacagtgtaaatatttctgttctgggtgtgtctttccctttgccagataacagagggtcctggcagtgatgccccagtgctggcagggtcctgcccacatgcgtggaaccgggagggtttggagggtttcgggcctaggaggaacctgccacccacaccgagtctgctcctcttcccatgtgaacttgtgttctgtttactttagcgttgtttcattggagtttggtacaaagaagatagcagtgcacgtatgggctctgccgtgttgaactcggagcatctccctgctccctgctggtcaaggtgtagcctcagaaccactccgaattggccagaacggttgtggttagtggcccagttaggagtctgtgctctgcctcccacagggaggaggaacaggcaacctcagaaggaagtccct

SEQ ID NO: 55418 - DNA, 1730 bp, Homo sapiens
ttccgaggattctgaagacgacggggagacattgctggaggtagcgggtactcaggggaaactggaagccgctggctctttcaattctgatgatgatgcagagagctgcccaatctgtctcaacgcattcagagaccaggccgtggggacgccggagaactgtgcccattacttctgcctggactgcattgtcgaatggtccaaggtgagttcacctctggttgggtgcttcctcccttcaggatggcctccctgtttataggtgacccagcctgtgttcagcctcttgtgaggttctagttgtctgctctgcggctgaccctggggccacaggattgagtctggcttggtctttgctttgtgagcaccatggctcttgggggtgtgggtgagctcatgtgaggcgtttgtggtgtattggtcaggggcaggagagaggatggccgtgggtctcccaggaccagctgcagaaaccctggttgacataggggccatcttggcctgcaagccagaggcaggtgtgctgtggtgcgtggtcactttgctgccttgacatgtggttctctcagttgatacagaaaacaccggtacgatttggcattcattcacaataactggcatcaaaagagactgtccttaaaacaggtgaatagagtttaccgtaaacgtgcagtgtattttatatttcaaaatgaacttttagaagcagtcagctcccccctccctttctgaatattgtgaaaaatgtcagaaaaggagagcttgcagtctgaggatgactcatgagtccccgacctctgtactcagggctcagctccgacaccactacctcttgactccctcccctccctgcgattgcaccagcagcccgtgctgtccccggctctcttcaggaccgtgacctcacccagggttcctagtgactgggtcctcctgttctgtttcactgagtagctgaaaactgcctgtatgcttagtttgaagcaggacccagacattcctcatgctgctggtggtggcaggctgtgatgtcacccaaagtctggctctggtacttcctgttcctgttctgttgtggtgggtccacagcacacagtagattcagacttagacttttctttttttttttgtttttttgagacggagttttgttcttgttgcccaggctggagtgcaatggcgcgatcttggctcaccacaacctccaccttccgggttcaagcgattctcctgcctcagcctcccgcgtagctggaactgtaggtgcccaccaccacgccagggcaattttgtatttttagtagagacagggtttcaccatgttggtcaggctggtcttgaactcccaacctcaggtgatccacccgtctcggcctcccaaactgctgggattacaggcgtgagccaccacgcccggccatttttatttttatttttttttgtagatttttcttttggcaagtgaagctttcatttaaattgaggaacaagatacagtgtttgctatgtattttctgtctggcatttattagataaatattgggcagaagagggcatttgcaaacaagtttgtcagtatagaaatcttacaaatggaaccgggtgcagtggctcacgcctgtaatctcagcacttcgggaggccaaggtgggtggatcatgaggtcaagagatcaagaccatcctggccaacatggtgaaaccctgtgtttactaaaaatacaaaaatta

SEQ ID NO: 55419 - DNA, 607 bp, Homo sapiens
aaaggcaccagaggtgacttctcccaaaaacgcctggtttccctggggccagagctgcgaggtggggctccctccctccctccctctgggaggccccggtgagcacctcttagaacagcagccggagccagggctgtgggggaggcgcaggcccggcccagccccactctccctggctcccgcctgctgcggggctctgcctgggtgcgggccctcaggccgtgggaggcagtgacggcagggccttgggtctgtgcccacaggaggcgcctccctgccgcggtgccagagccagacttggaggaggagccagtgcctgacctgctgggcagcatcctgtcgggccagagcctcctgatgctgggcagcagtgatgtcatcatccaccgcgacggctccctcagcgccaagagggcgggtgagtgccttccctgccacggccccttcctctgtgggctgctggtcctcaggctgttcgcaagcactcagcccatgtctcagtcacggaagatgtagctgaagttggggggaccattcctcagccatttttctgcattgatttcccttcttgagcagtttctcagttagctccgagttcttacccagc

SEQ ID NO: 55420 - DNA, 1453 bp, Homo sapiens
atcaaaaatggattatctttagaaacctcttgattgacttactacttggaagataaagcacttggtgatcaagaggggctcctggtggggtggcgcgtccttgataaatctctaggtggcctcccgccaacagctgctgtgtacctttggctctgaattaggaatatctttactttctcttttccaattatgttgtgctcttgtaaataattgctcgagtttgcactcaacaccgttgcctcctggaggcagggtgcagcagtggcagcctgagggctggcgacaggtgtcctgcatggggaaatgctgtccctgcccttggcacagctggtgggagtggctttggcggccactggcctgtcaagggtcttgttctttgagtcaaagcttggctgtgatgtgtgtggtgaagacagaagtgagttggtgtgcagggaggccgtggaggtcccctccctccctgggcctcacccgtgttcagcctggacccaattccccaccagccaagatgccagtacgtgttctggagttctttttattagactgggcggccgcggccagctctaggtgggctgctccagctttctggagttctcattagactgggttctaggcgggctgctccagctccataaggaagcactcgatgtcgtcatagaggctgttggcgctggacaggcagaggctgaggctgctgctatccagggaagacacaccctcacgctgcgtgccctctaggtgcactcggcacagccagggttccagctgccaggagggatcgggcgtctgtcagtgacccggcgtgtgtcctcccctccccctccccaggctctgagggcgtcgggcgtctgtcagtgacccggtgtatggcctcccctccccctctccgaggctctgagggcatcaggcgtctgtcagtgggcctgagcacatggcctcccctccttgaggctctggtctcaccttcaccaggaccaggctcttctccttgggcctcccagctgacaggtcctgcccgaagcccaggtagatggtatagcgtggggagccacggcgctgccgtgcccggaattccaccagctctgaagaaggggactctgctgagtacctggcaggcaggtgctcccaaggacccctggagacagccccccaggcaagggcctcactgaccttggaagaagactctgaagtcgaagatgggggtgtcacagttccgaggcagcaggcaggctggggtggaggggctggcggagcctgggggtccgcccacctcccagtacaccttgcacttgcccatgcgccgggcccacagctgtggcccccgaagctccaggtgcaacccaggggccacgtgccgcagcagttcctccgtgtagcgcagctgcttctggtccgggagctcggcagggctggggaatgctacctgctgggggtctgtggcccggacagctgg

SEQ ID NO: 55421 - DNA, 1798 bp, Homo sapiens
aagtcagggtgaacgtaagcagctccgcggcctggcaggaggagaggcaggcagagagaagggtacctgtggtggtgggacagctgcgggggcctctgcctcagtctggtccgtgcctgggccttctgagagagaatggggcaggcgttaggccccgacaccagagtgagagatacaaggagagcctggtgtagcccccaccagcttcctggctgtgaacccttaggctgtggcctgaggaggtggggatgtggctctccacctgtcctgggcctgctggcagcctctcccagaacagcttctaaaaccacaaatctgacccagagaatgttcccctttgcccaagcaggacgaatgccaacgcccttggcagccggcgtcgctcacctcgccagcacagctcccggctgagcgcgtacaccttgtgcgggtcggccgggtcccccgagttatcccgcagcatcacgaagcgacgcgtgctgcgcagtgcgcagcggaagttggttttccagccggcgcgctccgcagtctcagcctcggggggcgggccacctcccctgctgctaggcggccacctgccgcgggccacagcccaggcctgaagagggggacagaacacgtgtgccgggcccgcggggtcctaggcgggctctcccacccggggcggggcggggctggggtccccaccttgaagatgcgcgcgtcggcctcgctcaggtccttgcgcgcgaagtgcttccagggcacgcggaaacaggtgcgggcctcgtccagccactgcagcccctcatagcagccgctgctgatctctccaaggagccactctccgaacagcacgcgtggggctgccctgcgggtgcccggccgcggagagtcagggccggctgcagggcgctcggggactggcatctggagagggtgggccgggctcttacctctcaggagccaaggccattgctccttctgcaggggcagttaggtggcggtcaggtgttataacaggggaggtaagggctcctgtcgcagcagacgccaggccgcggccacaggtcgtgtggccaggtgtcacaggtgtccacaggtgtggactgagggcttgtagccaccgacgctgcctcggtatggatctcttggcagagggggctacaggtgtgactgcaggtgtggccggcgcgcacacatgaagtcacaggtgttgaaccagtgtccaggcctggcgggaaggcgcaggccggaccctgcggagacgggaaaggcgacgtcaggggcgggtcaggctcccgggaaagcgaaacctaaacagtggcgcttcgcaccctcctcgatcccaccccgtccggttctcagctccgcggaaccccgcctccgcctccgcctccctccccgcccgaccctcatctctcaggctcccccagctcttggctctacccctccggggtcacggagcccccacggaggctctcgctcccggcctgcaccgcgtgggtctggggtccccagtacctgggtgccagagccgccgggacgggaagtttcgtctcgcggggaagcggagggccggcgcttttatggtggccaggcgggagtttccgggaagggcgcgcgccgcctgttcttattattggatgcgaccagcggaaccccgccccggccagcgcggagtagggaggagtggagggcgttgggagtggctgcagtgagccgagatggagccactccactacagcccaggggacagagcaagactcagtctcaaaaaaaaaaggaagtgggtaatgggaggtggacgtgcctcgaa

SEQ ID NO: 55422 - DNA, 1784 bp, Homo sapiens
gtggggggctgtgggggacacgtggggagggagggcgagtgggaaccaaggtggtccccgtgactggcaggataaaggtgcctcccttgtggatggttgagggagtgggtgggagtcttgggcacactggatggggtgtctgctggacaaggggtcagtgacggggactccacagctcagggcagagtctggactggaggaaatgtgggcatcaccctcgggggggtggaatttgaaaccacaccctagctgacgtcatcaaagactggtcctggaccggcagggcagagcccagcagaggtggccgggtggggcggggagagcggggcggggactcaccaatgtgcctccgctctgacacagcagctgagcctcaagcagtgacttctcctgtggatgtagacaggtctgcagtcaccgtcctgccccacaggtggggagactgaggccaagtgggcaggcgctggcccagggtccccatcatcagtggtcagtgctgagggtgtgggcccaggcagcttcatcccgaaatggcccagccttctagggcaggcaccaccaagcatgggtgtcagtggatgcccgcaggcatagaactcctaggcccccaagggaggtgtggcctgaggatgcaggtgcccttctcccgggacccccatatcccgcccgcctgccgcccacacctcgtaatcaggagtcacgttgagaaacagctggtttccctggatccgaaatgcaaagggggtggacaaggctccgagggtcacctcctggccctccgggacgtggatgtccaccagcggctcggtgacatttgtgttctcctctacttcaaagatgtccttgttcacagagcagtctgtaaggttgcagaggagggatcagtgcctcccagcccctggctccccgccgcccgtgccccacctacccctgcccgcacatacactgggcctgggccatggtccccgggggtcggacgagcagcccggtgaacagcaggggaggccacagcagggcccaagaccccatcttggcggctgtcacctggcaggagggtctgagcgggtctggcgtctaggactggcgcagttcctacctcagcgaccttcgccccagccagacgccgcccagtttatgatcctttacgaccggcttctgccaagggggctcccgctggccggctggtccagcccactgccagaaggaggggcagtcgtttggcccaagttggactgagtgcaggggtcaaccagggggctcaggtcacaggcaccgaggcacagggcagaagggactggagagcggctcatgggtgccgtgggggtaggggcagggcaggggcagggctagggtgtgggagagaagctgggggctgggggcgggggctcggcccttggtgtcggggtgtctggaacctgcctccctagcccaggctgccctggcttggctcctcccctaagatctccctcaggcaaagttcctaaggccaccccttgaggctcagaacccgggtgttccccagggagcacctccctccctgcctgacagcaggttctgaaggaaaaggctctcctcactgtgtcctggggacacccctgcctgccccagagacaagtcggcttctcagggcggggctggacagggccttagtgactgaggctaaggcggggctgtgaggggcagctgggagttcctggggggccctggtgcccgacagagggggtgaggtgagactcgacacttgccctgctcttttcattggccccccagaagcccccagctct

SEQ ID NO: 55423 - DNA, 576 bp, Homo sapiens
atccaggcctcacaaatgaaaataatgatgcgtggggcttgctttaaaatgctcagccctcagcccaaagagagagggggacaagccaggagggcaggcgctaaagcagctgatacaggtgagggcgacgggcctctcctgggcgatccaactcatgtgcacgtctcacattttccaaagttaaggattaaaagaaaagtgttgccaccacagcacgtaggtgactcaatccaggcagtgctgggagcaggtgggtggacttgacccaggcggtgctgggagcaggtgggtggacttgacccaggcggtgctgggagcaggtgggtggacttgacccaggcggtgctgggagcaggtgggtggacttgacccaggcggtgctgggagcaggtgggtggacttgacccaggcggtgctgggagcaggtgggtggacttgacccaggcggtgctgggagcaggtgggtggacttgacccaggcggtgctgggagcaggtgggtggacttgacccaggcggtgctgggagcaggggattcctgttggggcttcataacatgcataaactcgtgtatact

SEQ ID NO: 55424 - DNA, 767 bp, Homo sapiens
aacaaacaaacaaacaaaaacaaagggaaatcagcatggaaatctttctccaaactccaaggagcttcactccagccaggccagcacagaaaatcaaactcaggagtccaccgctcccaacactcctgagcagggctgtgggcatcagcctgggcgcaccgtggcaggcatgtgtcccaaactgctgcggcggtgccccagccaacacccccacggccccacctgagctggtttctgtggtggattgaaaagatgccaccagaggtttgtgtactttctcctggaattacattattggagcttttctttttaatcagcgcataggtcaacatgctgtcaatgattaatgtttgcggcatgactaaggtgcttgacagttgtgagctccgccgtcaatgctctctgagacggagaagaccactgggcctaggagaggccttggcgccgcgacctgcacgcccgctatgcgcccagatcatccgcagctgcgggaggggccgtggccagtgggtgagtggcagcgtctgtgagcagcacagagcagcacaggaaacgactccagcgcggccccacggcccctgcacgcgtgcagacctgctccgaggttctgttctgatgcttgcctccctccttcgcaaacgtgatctttaacatttttccagttgtaagacattcagagctccgacattcagtcactcacttcagaaaacaggagcattaggaggaattttggtgctaatttaggttgccccctgcctctactttat

SEQ ID NO: 55425 - DNA, 609 bp, Homo sapiens
ggagaagcagtcctgtcaccaaggagacacctacagacacctgactctggtgaggaaggtcagagctgtctgtaatgtcacttggatgtcagggacgccacagtggggtgagacaggcggcagcacccctccctgaaacctgtcgtccacccccacgagaaagcacaagacaagcctggatcggggcacctggacaaactgcctggccaggccctctcagaactgcagggcatggaagacaaggaaagactgagagaccgtcacaggcctgagggtgctgggcaaatggtgcacgggaggctgtctcccacaggtggcagcggggacaaggtcctagagcagaaacaggacattgatagtgaaattcaaagtccggagttcacagggacacccagcgacggtttctcagctacaacagccatgccctgtgggctttgaagttacagaggggaggctgcggagtggcagaagggaccctctgcgctcactttgcaacttttctgtaaacctaaaattatcccgaaatacgtttattttttaaaataaccattcattagccgggcacggtggctcacgcctgtaatcccagcactttgggaggctgaggca

SEQ ID NO: 55426 - DNA, 717 bp, Homo sapiens
agacagagagtattttcagctttgccagttctggcatctgtcacaagtaacccactgccacacgccaaccccatccacactgcaccgcccacctgacgtggctcacacgctgtccccaccaacaaacgcctggttcaaggcccctctcgaggcacccagcagcctatgcagcccaatgtggcgtcggggatgtgatgtcacagacagggatatgctgaggacgcgtcaggcaggcactggagcagctcacctgtggcccctgcgaagacgtcgccctgggccggactctctgatatgacagcagtggcctctaccgtggacgctcggtcaaaggtcagtgcccccgaggtcgtgatctgtcccgagggggtcacggtgactggaaaggcagaagcacatttcacgcggccaggcagtggcgcccacggcacacaggtcccgtgccacccacgggcgccaatccttgtgggggcctgggctgaagggcgggcagtggtaactgtaccctcccatgtgaaggacacgggggaaatcccagaccttggagaagacctcacaggagaaaaccaggatggccaggatggcaacttgccactaccaattgttcgctgtttaaactgtgaaccatggaaatgtgctgcccagccagaaaacaaacataaaataaaactttcagtgatttttaagtacttcgtggttcgaattaagaaaaaatct

SEQ ID NO: 55427 - DNA, 2871 bp, Homo sapiens
gcctgcacaggtggctccgcagcccccctgggccaccacacagccacgctgacctctggcatcatggcctccagcaggctgcccacccctggctccccagcgctcaggtcatgcctgaactggccctcaggaagtggggggttcctggtgaccacaggtgcccacccaccccagggcttctccaggacaggtggggggagccaggatggacgaaggcagggcaggggcagagctgcacaggggggaccagtaggaggcggggctgccacaaagaaaaggggggcagggggcaggtgtgtgcagggcagggccaggtcaggtgaggctaggcaggtcaccaggggcaggtgtgcggggcaggtgtttggggtaggtggggcaggctggtcacctggggcaggtatgtggggcaggtgtgcggggcaggtagggcaggccgatcacgtggggcaggtggggaaggctggaaacgtcgagcaggtgtgcgaggcaggtatttgtggcaggtggggcaggctggtcacctggagcaggtacgtggggaaagtgtgaggggcgggtggggcaggtgtgagaggcagatgtgaggggtgagctagtcacgtggggcaggtgtgcagggcgggtggggcgggcgggtcacgtggagcaggtgtgaggggcaggtgtgcagggcgggtggagcgggctggtcacgtggagcaggtgtgagggacaggtgtggcgggctggtcacctgggacagttgtgcggggcaggcgcgcggggtaggcgcgcgggaaccggacgaggcgagaggccggcgggcgcacttgcctgcgaaggctgcggcagcggcggcctcgtcggggccgggcagggcctcggcgcccatgtccatgtgcccgggctccgccgccatcaccgccactgccgtgacccgcggcgtctcccgctccgcctccgagtctgcgtcctcctccgagtcctcgtccctgctcagcaccggctcctccgcctcgcctcctgccgcggccgcggccgccgccgccacagcggccgcggccgccaccgccgccgcctcagccaggcccagctgctttgccgccgagtccgagtcctccatccggactccgccgagccttcccgaaggcgccgtccgggaccgcccgaagcgccggtcgcggagcccgaagcggggcccgaagaggacgcccgagctgggccgaggccgcccgaagccgccgcccgaatagggaccgaaaaggcagccagccgccgagcagagccgagccgagtccgcccgcggagcggagccgaggcgaacagaggctgcccgagtaggagccgaacctgcacgaagccgccgagccgagaccgagtcctgaaccgaggagggtcgaagttccccgaagtgggaagccgaatcagtccgaataggtccgagtcctcacgagggcttccgagagactcggcccctgctctcctcactgtcctgacaggctgaggcggctgtcgtccccggccgacagggctggacggctctaggcagattctcgccggcggccggcgcaattctgcctctcagagagagcttagtgccgcgggtttcgcccgttcccgccgccggcggaagccgagtcagcccgaggccgagccgagacgagccgaatgtccccgaggccgaatgctcccgaacgtcggttctccacctcttcccttccgaaagtgcccgagcggtgccggacggactaatcgggcctcggccgtggctcggacgtccgctcccgaaacgcggcgcggtcgggccccttcgtcaggagacgcgaaaatggccgaaggagcgcgagcgcgcgggccgagaggctgccgggatcgcgacggaccggcgggcggggcgggtaagatggcggccccgcggcgaggtgagctcgggcggggtgggggcttccgggcttgcagcggcgggcgcggcgtttccctgtggtgacaatccggtttccgctttcggtgcgctcacggggccgtgccaccgtctctacgtgagcgagacagctccgtcaccccatcgagaagcgcggcctggcctggcctgggtggcgggcgtcctgcaccccgaagagctcccccgcgcgcgggcgcctggccccgggcagggtgggtgcggagcggctctgggggccccagtccccggcagctcttgtcccgcgcgtggtttttgtgaagacacgtgggcgggatgggcgcagggtttcggtagccttggaactctcgccaaagaaaatcgcgggcgccggtgcctcagccgtcctgcctgagagactcgcctccgagaggaggaagggacagaccaaagcagtaaatcggccatcctgcagaggagccgccttctgctgtctgtgggtacagccagaactcccatacgcgggcgctgaagtgccaaaccttcgtgcgtgttctctagtaattaggtgcattgttttgaaggaataaagaatggctactccataggcaggacagcctctagtaaccaggtttgttttgtgtattttcatttggttaaaaattaagtttaggttgggcgcagtggctcaggcctgtaagcctgacagtttgggaagccgaggctgcaggatcatttgaggccagcctgggcaacatagcaagaccccctctataaaaaaaaaactgtaaacatcagccaggcggtggcgcacccctgtgggccaagctattctggaggctgaggctggcggatcacttgagcccaggaggtcgaggttgcagtgagccgtgatggcgccactgcactccagcctgggcgacagagcgagacccccttctacaaaaaaaaaattaaaaattaccccggggaaggccaggcgcagtagc

SEQ ID NO: 55428 - DNA, 4828 bp, Homo sapiens
gttctcctgccctgcaagagagcacaccccacttgccagctggtcagttcctggctggcctcgccctcgggccctggctgccgggcgccttccgctcggtggactcctgagggcaggaggctgcgggactgtcctgggcctccactggggctccctcggctggggtggctgtggctgtggcacctggacagtctttcctgcctgtcttcgtggaagcggtgggagcacccagttgtcctgggccgacttcctttgacctgtctgtggcccccagtggccacggtgagctgcaggacagccctgaggacccacttcacacaccagcgcctgagcgcctcgggccacctccctcaccagcgcctgcactcgcagaagaccagctgggcacacctgccatctggaggacccagcccacaaaccatgcagaccagggaaggaccccctccctgaagctggagacctgttgccttcatggttaatggatcctgatacctccagtctcagcgagcacacaaaggcagtggtcacctgttccacagggaacgccatggctccaggtgacccggagtggatggggcccgagaggccagcctggactgtctcctgagggcaggctccgcactcaaaatcgtgttgacaggcacccgtttaggagtggagagggaccccaccccccagctgtcctctccagcgcctgtttcccacttggccactcccagctctgcctccaggaagggtgagggcacgggtgcaccgaggggttggcgtgtgtgaccctgagctctgggtcagggcaagctcatgcatggagcaggatcacggcaggttcctggagatcaaacggcaaaggctgtaaaccaggaagccaggtcttgcctgggctcaggggcaggcactgggcccgaaggaggagggccacttcctgccagccctccaccgagctcacctatggcgcctccccaggaagtgctccggccagcccagggtaaacacgctagccctgcccctctgggaccatagcccggggacccagactcttggccacgctcattcccacccctacccaggaccggcagccggagccttgggtccctgcatgggcctggggcgccctgtgccccttcacctcgtcctcgtccagttgactgctgtggcagccggtgctacccgctgtgtccactgcaccctggccctgttctgagcggtcacagcagctggggagaagggccatcctggaagccgggcagatgaggacggaaccagacagtcccactgtggtgggcagaggtggggcctgggcctgaccacggggcagtgcaaggagagaggcatcctgagagggcctgaggtgtccccacctcccctgacaccccatccctcagtgcccaggctgggcagaaaggggggcctggaggagcagctgcactgtgaactcagggctccaggcctggggtgggcatggctgggtcctgcctgacacccacccactcaccgaagcctctgcccctgggcctgcggtgggcccggtaagggaagtgactctgccccatgcctggggcacctgaggggtgcacctggcccggcggaggctctgacctccccagggctggagccctccccagcaatgcgccagcgctgcccccgaagtcccattggcagcgttcccccgtcccccggcctgctggggcgcagctaggccctgcccaaggaagagctcgaggcctcgccctgctcatcccgcggaggcggccctgcgccccgcctgtccccagcgccccagctctaggggctaggcccgcggaggggcacaccaggcgggtgttggggaggacgcagagggctggggctggagcccaggcggggcagggggcggggcggagctgggtccgaggccggcgggggcgcctccatcccacgccctcctcccccgcgcgcccgcccgctctcgggtgactccgcaacctgtcgctcaggttcctcctctcccggccccgccccggcccggccccgccgagcgtcccacccgcccgcgggagacctggcgccccggccgaggcgcgaacagacggacgcaccggcgagcgccgaggggacaggccgagcgcggggcgccggaggcaggtgagcgctgcggacacgggggagcgcgcccgcccgggcctcagtttacccggtggcgatgggacgcggggcttctggttcaggacaccgggacgaacgcggcgtcgcagggcgcggggcacttggagggcggccgggccgagggcgcggggcaaggggctgggggcctggtcgagtccccacctctcctggacgggtcctgctgcagcccggcctgcccccgtcggtcctgggcggcggccggcgagcaaggatatttttaagccagcgatgggtgactcacctgccccgtcctgcccactcccagctctggggcttggtgggggcaatccctgcgtccggagagcgctggtggtagggaggcttctcccggttctgtgagcagcaggaccctcccgagggcctgaccgtggaggtagcactgcacacccactccctgtgggccggagccaggaggcacttcctgggtgtcggagcccagaaggaaaccagtggccgggaagcaccagctgggtcagtctccaggtcagggttgggggtgggagtttcagggaggaggggaggctgggacaggggctgcagaggccctgccaggagaggcaggagggtgggctggcaggagcctgtgggcacgcgaacttcagccatcctagattcctggtccctgcgtccagctgcctggcgttgccccttgctgcggggtgtccctggtggcaggggagggggaggcagggccgggcatgcccggacctctgcccccacccaccccgtgctcagtcctgggtcggctgtgctgggaggcaggcccagctggcggcggcccctcccctcgcggcccctcctcccctcgcggcccctcctgggtcccagcctctcccgggcctgcttagcacccaggccttgttggcatagctctcccaccgggccttctccgcctgcctcggtctcctttcccaccctcagcttccccagcttatcccttcctccctcaagccatagcttccaaacaaggacagggccagggcctgaggggcctccccattccagggccccacccagcgcctatgagggcagcctggagcccctgtgactcagctgacccctccccaaggtcactcagcatgtggagctggaacttgaacttggagcccgtccctctaccctcctgccctgctgggacctcctcccctccacagcccgactgaccgggcaccccgctctgcctcacttcacaccgggaaaatgaccacagtacaaagtgcagcctgggcctccagggcttcgtccccaccaccagtgggccaaagaagcctccccaggggggcggggctcccacagggcaggaggcagccccatacccatgtgcttcagacccagacaccacacctggacccaccccactgctgcccggccctgcctgggcctgaggtccccgatgccctgcaggcaaccgaaggccaggaacctggccttccccaggggggtcgcgtgtcacagccctccatgtttgcgtgcccccaggcctgagtctgcaagggtgcgttggtgtctcgcccaggtgtgtgcctggacacacgtgcctggcgcccttggtggagcccgccaggaatcccattaagcaaacactcaggctcgccactgagcccgtgaacattccagacattctccacggatagatggatggaggaagtggccataccccctggtgcacccagcccctcatgtcagcggcagtgcccccgggcctcccagaccctcccactaggccagacctggtcaaaccagaaagtcccgggtgctccgagccactcccttgaccctccataccaacagcagtggctggtgacccccaccgtggcagacccaaactctgaagccacaggggacagccctgcagccctggcaggaggcagatggtgtggacctgtggggagctgatcacagagccacagaacagccaggtccccacagggcatagtccccttgggacaagtcagcctggttcagggccatcaggctctgtccatccccccgggaagcccctagggtccagcccaaatcagacccacctgtctgccctggcggctgggccttagtttccccaaaatgctcggggaagaggtcagcactaggagcccagagacaggctctgaggattctgcccctgggggaggccagaggcacctgccccatagccaccctacctcgttggaggggcagtgatactgtgtgttggggccactggactggctcccagtctcagcccccaccacacctgccctccagtccctcccctaggcttggctgctgccaggggttctgcgctggccacctggccgcatccctgccctcgaggtgaggaaacactgcaccccggggaccccagggtttcctgcccgcacagcctcttccctgccaggtctcccaggcccaggaaagagccaagggccagcctctttgctggggcctggacagaggtggcatgtgtgggtggcaagtccacatgtgggtgcaggagccccttggggtgcaggcctggggtggggcaggagtggcggctagagccgggctccctctggacttcaggacctaccccaactccagcctcacctctcctgccatcctgcagctcccacccgccctcccccaacccccaccgcacccccctccccccacactcccacctcatccccctccccttacccat

SEQ ID NO: 55429 - DNA, 1014 bp, Homo sapiens
tcgtccaagcctgggtgcgagctgggctcccggttgtcgtccaagcctgggtgcgagctgggcttccggttgtggtccaagcctacaggactaggaaaaggagggagggtgagggagcctggagctgggtcctcctgcaggaccagtcctttctgccacaaacagccctggctgggggcccaaaatgccccctggttcccccttgctgtcctccacacctgcagaggtgagacaggtcactactctttgagcctcagtttcctcgtctgtacaatgggtccaaagagccatcaggagtccctgagctcttgaatcgggctgttttgggtgaccagggccctcccagcagcctgggcagctagaccctgcatacagccaggctggtgacttcggccagctcagtgtccaggggaaggcacagagcagtggccgagttcactttagtcccctcttcctgggcagctccaccacctttctcagggactctgccctcttcgggaggagcctggggcctctcagcctggctcctggactttggccccagctggcctggcctggcccccagccagcaggagcctcgtctgcccagaggccaacagagtgaggagtggagggtgggtggggctttcctgcctctccccgatgaggacactggggaccagagagagggtgagagtctggtgggaagtctctccagccaggtgggggccggatcagattggccctgacagtgggtggggggcacctgagcccgggtccatggtttgcttttttctaagttatcacacagtaaaagccatgtgtacgtgggggtgtggttctgttgccaccatagtcgacccatcagccccatcactccaaacctgtgaatccccgaccttggtggctacccccaacctctggcaacacctgcctgccttcatcaccacagtttctgtttgtttgtgtgtttgagacggagtctcgctctgtcacccaggctggagtgcaatggcgcgatctcagctcactgca

SEQ ID NO: 55430 - DNA, 2432 bp, Homo sapiens
ccgggaggcggaggttgtagttagccaagatcgcgccactgcactccagcctgggcaacaagggcgagattccgtctcaaaaaaaaaaaaaagtcttttcaggtttttgcatttctgacaaccggatggccccacctggacctgccaaccagttgtgtggcctctacccagggactgactcagcataagcggacagcttcgactccctgtgatttcatccctagctgaccagtcagcacttctgactcactggccccctacccaccaaattattcttaaatactgggatccccgagttttggggagactgatttgaggaataaaactctggtctcccgaacaatcggctctgtgtgaattatgctttctctattgcaattcccctgtcttgacaatagactctgtcccggcagctggcaaggcgaacccatggggcggttacagtgtctgcaacgcagacacaagcgacagagacttgatcagaatatacaaggaactctgcaagtcagcgatggtaagaagcagggcagctgggcctcctacgcctgcctcgccgttcggtcccccggacacctctgggcttaggactcaggggaacagattcccagaagcaggttccccgccgcgtccggcgcccgggctctgcagccgccccctgctctgcctcctgcacccgcagggcgtcccccgccgctccctcccctgcttcctgcagcggcccccgaccccagtcctggccccaccatggatcctgcatcgccgggttcggccctggcgggttcagccccgcagagtcggcacccgggccaggtccatctcctccagccctcccggtgcgtcccgcggggcaggaaggaggcgaggcccagccgccccgtgtcgtgcaggtgttttcccgggcccgtccgcggcggctgctgaggacctggggagacccagcctgtaggatccgcagctgcggtgcgcggccggcagtggcgctcgggcttcgtccccgggggcggggcttcgtccaggcgcgcagggaccagcgggcctcgccctcccgcgccgctttccgattggcagccgcccgcggggcattgtgggccgtccgcgcgcccgtcccgtcgccgccgccgccgccgcagacccctcggtcttgctatgtcgagctcacccgtgaagcgtcagaggatggagtccgcgctggaccagctcaagcagttcaccaccgtggtggccgacacgggcgacttccacggtgaggacggcgcggagcccgggcgcggcgcaagcgccctccagaggccccggcgccccgatttccccgggtctcccgttccgggacgcggaccgggtggcggtgccccgggcggctcgttccgggaggaatgagcgcaggtgccggatgttggggccagggacagccgtgaggggagcggggcccgggtcggccgtgagaggcgcagggccagcggcgaccgtgaggggaacggggcccgggtcggccgtgagggagcagggccgggggcagccgtgaggagctggggtcagccgtgaggggctcggtgctggggtcagcggtgcgggcggtactgacgggtccttgcgagccgtggggcacgaagccggagccccagcctcgccctccgcccagggtggggtcggctgcgccctcagaccccgcacccgggacgggctgtgggcagcccgcgggagcccctctgtgcaccttcatgggtcgaggcagctttcagagcctttgagttcaggagagattcagggtagagcttcgagctgacttccacgtggccagtttgtggtcagcgagatgcaattttgttgggctgatgtctgcagagcggggacatcagctagctctgaccagaagctgccagtgctgccatcgcccttgagccctgcggtgcccagtgggacaactccgtgggcggcaggtgcccggcctgctggacagccaccgccagacgcaccgggtgggtaaaagccggtgcccatgaaagcacagggttggtacactgttaaatactggattttcctgggcttgagttgtttacattggagagaacttggaaaatacaaagaaggattatttattaatacttagctcttctgtcctctgcagtgcagagtagacgagccttgtgtctatgttttgttgagaacaagtaatattttttaagaaaatcatgaaacgcttcatggatgaatgctgcgagcacctaatacggaagtgacttcctctcttttctgctttctcatggtgacttgagaaacaggctttaattcctctttggtaactgagtaagggcattgtttatctagcagagcctagagagtgaattggcatgtttggctgcttaaccataaaatatggggattcagtgactggcttggggtgccacagtctgctccggacccctctttgggag

SEQ ID NO: 55431 - DNA, 603 bp, Homo sapiens
cgtgttagccaggatggtcttgatctcctgacctcgtgatccacccgcttcagcctcccaaagtgctgggattacaggcgtgggccgccgcgcccagctccccttggcttcttgactctgttgcagctgggtatggtgataatgacccagtccataagatcagcgttcacatgtggctcatgactagaccgcgcgcctccttgtggtggtacggcagtgggatgcacattttcctttgaccagcgttctcccagctgtcgcaccgctcactcccatgctgttacaggtcacctcttgcaggggcatatttgatcgctgggcacttagtgtttgttgttccatcattatgcaaacagccgcctcttgatgaaccttcagtgacccagaagaaggtgtgagaagtgtggctggaccccgctttcggaaatgctctggactcccctaacgtcctggggaattacagggttccttcacatgtttccagttggaagcaagtactccacttactttggcttttgaaaactatttccctagccatcgacgagtacaagccccaggatgctaccaccaacccgtccctgatcctggccgcagcacagatgc

SEQ ID NO: 55432 - DNA, 2994 bp, Homo sapiens
aagtgctgggattacaggcgtgagccactgcgcccagactcttcattcttatataagttaatacatattcactgtaaaatgtccacttatcgaggaaaaacaaagtgcccagtagactgccgcaggctctgttcccccagctgcccgcccttccggcctcctgaagtgctgcccccagcctgctggcgctaagaccccacgtcctcaacatgccggacctcctcacgcctacctgctctggaaacaagccccaacccacccccccaggactgaaccccactcgaggctcctcccacccgcagtctgggggcatcactcaggacccctggagctcagcacatcgtgacgccacaaccccacagccccatctccccgtccacacttgaggagctacagacttcaagaggcagacccctgggtcgcaaccccggcccccacctctccgtggtgcggtgaccttgggctgctcacttccctctccaaaaggctcagaacaaggccaggcaccctcgtgctccgctgctcatccctcccctgctgccctgagaccctgcaggctcagcgccaggggacgcaccccgctgcgctccgacccgcgtgagccccaggccagtactgccctggtacccttgccccaggacgggggccgcggggcgccttctccaggagggggctccgggtctcctcagaagccggtggctcagaaggtcagggtccccgcggccgcccgacctcagagctgggtcaactcccggaatggcccctccccacacccgggctcccctctcgcagcgcagcggcctcagagaccaggcccaggcacgcggctccctccgctagaaacgtcgggcccgggccgcctcgccgggcagacgagactcggaggagcgacgcggcgccgggatccatcacgaccccccgaccccgccccgagctccatcccaccaacccgcgaccccacccccgcccccgtccccgccccgagctccatcccgacaccgaccccgctccgccctcccccggcccctgcccggcgcccccagcggcctcggcctccggcgccacgtgacgcgcgcccaccgtgtcccgaacctcccgccccgggcagccccctcgcggacgctcttcggacactggccccggccgccgggcctcaccttcggcggcgccgctggccacgagcagacaggcgggcctgttagggagccgctcggacgccatggctcgggctcggcgctgggtctgcgcgtgcgcggcgtctgggcgcgcccgggagttcgcgggtcacgtgccctggcggccgggggcggagccgggtgggactgggcgcctgcgcgttcgtacccggtccgggtcggctgggctgcccgccgctccgcgcgcccgggcggtcgcaggtcgcgcctgctttggccccggcgggttcggcatccgagcctggcaggggccaataggtagggtcgcgagggtcctccccggccgcatgcgcagtctgagcgcgcgcggggtagggctcttggcctggggtgggggcgcgggcatcagcagagccaggcggcggtgtcggggcgcgaaggtgcccgtggtgttccggtggccacacccgaggagcaggggagaccggggggctgcggggtcagaagctccgggtgtccccggagactaggagggggacggcggggtccaggaggcggggtgggctccgccggcccaggacgggggcgtcgcggggaggcctgcagggttgtggggcgtcgggctgagctcctgggaggacggagtgtcacttcctgagatggggacacctcgggcgtgctggctttggtgaggagaattgaagcagtttttctttttttttttttttttttgagacagggcctctggagtgcagtggcgtgatctcggctcactacagcgtctgcctaccgtgttcaagcgatcctcccacctcagcctgttgagcaaccgggaccccaggtgcacactccaccacgcccagctaatttttttgtgttttgggtagagagggggtctcactgtgttgtccaagctggtctcgaactcctgatctaaagcgatctgcctgccttggcctcccaaagtgcgaggactacaggcgtgagccaccgcgcctggcctgaagcagtttttccttagactgtagttggagggggtgagaccacgtggagtggttggcagacaggcaggcaccctttgaggccaaaagggcgcttgagacagagccagcaggcgagcgggccgcccaggtccctggccccctgctgccagtatgaaggtcccaccaagcctctgctccaaccaggggaaccgtcatggttgggaacagccaaggtgaggaattctgtgggtcacaccccctgaaaaccactggcctccgccgggcgcggtggctcacgcttgttatcccaacactttgggaggcccaggcgggtggatcacgaggtcaggagttcaagaccagcctggccaagatggtgaaaccccgtctctactaagaaaaatacaaaaattagcagtggcagcacctgtcatccaagctacttgggaggctgaggcgggagaatcacgtgaacccagcgggggcagaggttgcaatgaaccaagattgcgccactgcactccagcctgggcgacagattgagactccttctcaaaaaaaaaaaaaagccactggcctctggctccccctggcccagcctggagaagggtccctgacccccgtcagacaagcagtgcaccctgcctcacctgacacagagccctcccaccacaggggaagtgggagctgggagctcctggtacaggcaaggccgagagttgggttagggagcagaggacggagctgagtgagtgtccagtgttaggtgggtgggggtgttagtggatggaggtgtctgaagcctcgcaggcctgcggtcacaccacaggctgggcctagccgcttggagagctttctggatctgcacaggatct

SEQ ID NO: 55433 - DNA, 3978 bp, Homo sapiens
ccagccccgaccccagtcctgacccacgtgggatctcccctaggcccgcctgcctcccgtttcccttctgtcaaacagggtggggggcacaggagcagagcccccacctctcctgctgccacatgctgggcccactccccgcgaccgcccggcacactcacatgctcgtgtacacgcgctggccgttctgctggttctgcagcctggtcttggccaggtcgatgggaaacacgcaggtgacaccgatcagcccggcgatgccgccattgatgagcttggctggcaggctgtgtggacaggggtgtcaggaccggcttccttgaccatgggtcagggtgggggtgaggcacgcagccaggactggagtctgacctgatctgcttatcagccatttaactcgattgcacccaggtaggagccgcagaggtggacgccaggccaggcggggtggaggtggaggtggaggaggccttgagggagggtgggacccaggggggttgggtggtgctccaccttcaggggaatttccaggcgtcagcaaccgccacttctgtcctagaaggatgagggaatgggaatgagtgagggtggggccacccgaagagtaatcctcccccagcctccctctctcacgcagcccctcacccaccaccccagactgaagccgtcactgcgtcctgagggtgcagcagcgggaggcacctgccacccagtcccatgctcacccctgggaccacctggcttcctttcagtccccccctccccaccgccagcgtcttcccagccagcctcacacgccgctcacgctcggggctcacgtgcaccccagccagctccggcttttaaagggccaggcacctctgggggcagtgccaggggccggggccagggtgcctaccggagcacctcgacctggacagctgtggtgaccatcccccacatccttcagcacagagagagcagcagccggcacctgcccccttcgagctaggggctggggtcccgggcgccctaagaccccccgacctgggctcagctatcccaggtatagctctcctcccatggcagctccacctagggcctgcagagctcctccccacgatgcccacaccccccacagccagccccttgcccgccccttcctcccctccacccctcccaggagtttcactcatggacacacagaagccagtgatgggacccctggaagccttgggggtgggggatggctggccttctgaggccccctgtggctggcacccccatccactacagaggaggagaggacaggcctctcccactaagcagcaaggctggggagccacagccagcctcaggggcctcccatagggtcatggccataaaatcccagcttcgggggcctttcccccctccctgggccccccagaggccagctgtttcacccaccggcagcgccgttgcccagggccacgcggctggctcacacccacagatcctcagggactcgtaaccttcacctcggctttccagggctgggccatccaccaccgacccccgctccgccacctgcccgctggtcctgctctcactctgccccaggcactcactctggatggctcttccacactccagcccagcactcacacagaaggggaagctgccgggggaggaggcgaggggccgcagggattggccgtggggcggggtggggcgggcttgggtgggggggcactttctctttcactttgggcaagcagaggcttccggcagccttgagaggagagatgagcaggggtgggtctgactcaggctgacctggcacagcgaggccacccaccgacagggacctcagcgcgtggccaccacacccccagcacacatgtgttcctgtctgctgcctgtgggttgaaccctatagcatttcctggcctggatctgtctagggctggtactctgagaatgaggctttctccgggccagggtaccctgtatgtacctggacagggaatccggtgctgtggagcagagatgggctaacacccactcgtgtctgtgggatgtgtgtctgctaggggcagatgcatgtcagggaagcctcatgctgggccacaaaaaaggcctgctgtccacagggaagagctagctgggtgccagaggccactgttgccacccacaggccctgctcacctggcaggtccagagggcacacgagctggcatgcccagagccctctgccccaccacccgtcccactcagggcttcaccgtcagacctgcctttccctgcctcagccagtggtggtgacaagctgacctctgaacttctacctgatccctcctagccccccccacccctgccgccccactcttcgggtgcagactggccacagctctccgggctgcgctgggcccttcatctccactctagtccctcccaggggtgtaccctggccctccagggactgagcaacccccttcctcctgggagcctatctccagtctgggatgaggacacctgcatgataggggcaatcctggaagtcaggccgaccgaggtggggagcggccattcgtcccaagaagagaagcaggcccagagatcccagggcggagaggcaggcctgggcccgcacgtcacccagtgcagcggagaggagcttctgggtggagaatgatgacagtgaggggctctgcctggggaagaaccggcaggggttccctctgaacgccaaccccgcctttctctgccctcactcggcagttcccacccctggtttatgagacagctggccagggccctccccctgcactgatgttgctatagaaaccctgcagccccagccgggccccgggctgtgagccgtcactgtccccccttcatagtcaggtgaactgaggccacaggcaagccagggagacagcaggagagcagagaccaccccacaggaagataccgctgcttccgaatctgcaggggtaaaatcctccacccaagaagccgccaggctcctcctacccccaagaaaggcaatgggggtgaggctccgagtctggccggcggctccccattcaatctcccgctgtccccgtcctcttggggcggtgctttctatcctgctggctggagggtcccggaaggggactccaactgcgcgatgcctcggccagaggacaaaggagaagcgggttgggggccgctctctgcgctcggaggccggctcaggcccctgccctactgctggggctcagccgaccgctccgtcctccgcctggccaccgcgactccggccacgcacgtgtccacagatgtccggtgaactcccacgtgtgcgtcccacacgggtcggcctttcttccttgggctcgggccccggacacccaccctcggggacacgtatgtgcggggagcgcgcccggaaccgtcggggccgagcacggcgtctcacgccagagcagccgcggatcggagcatccgctggtccaggaccccccctcccgcccgccaggccacgttgttcgggcagctgtcacctccctcggccgccgcagcacctctcgcccccgcagcccggccgcgttcggatgggcgcagcagaagggagccgccgggcagacactcaccacgctcgccgccgccgccgcgctcgcctgcccgccccgcgctcggccagcacctaggcggggaggcgcgtccgctcggcgccgcgcgcgctccgccctcggcctcctccgggcttcggctccccctcctggccgtcgaggctactgcgcccagccaggccacagccacgcgcccacccgccccctggccgtgggttcccccgggcagggtggcagttctgcgcgcagaggccgggccgcgcgtccccaaggtcctttcttggtttccgggcctcaggcccctgcaggcacaaggacccgcggggcgcgggcaggtggcagagcgccggtggatgagggtgccctgggggaggcgtggcctccagggcagacacag

SEQ ID NO: 55434 - DNA, 2568 bp, Homo sapiens
acgcctgtaatcccagcactttgggaggcccaggtgggaggatcgcttgagcccatgttggacaacgctgtctctaccaaaaaattttagccgggtgtggtggcacacgcctgtggtctccgctaggaggctgaggtgggaggatcacctgagcccaggaagttgaggctgcagcgagctgtgatcgagccactgcactccaggctgggcgacagaatggggcccagtctcaaaaattacaaaataagaaaagtcccattgttcccaagatggtttcccgcctttaccccagatgtgtgaccctgagcaaaaaaacctttctgtacccaactgcctcatctataaaatgggggtaatgataacgaggccacagaaggcgactgtgaagtcgagttccagtgcttgacgtatacacaccccagggtttgcactgctgttagagcccaacgggagctggcgctgcctgctaacacggtagatacctgcatctgaccctgttcctggtgctcgcccgggatattggcagggatggctccttctcatctctcagctcaagctttctcaggctgcccagaggaccaagtctccctctgtccctgtccttcggatcgcctccctattcacctcctgcgtcctcgcacaagaactcaagtccttaggaggcagggccaaccctgttccctcccaggacccgagaatgtagcggggtccctgaggtgctgatgtccacatggacaccgaggtcagttccgggccaaagcggccagcgcaggggctgaccactcagacctcactcctcgcaggggtgagcgggcgacgctgcctcacgtcattgtcctgccctccaaggcccgcgctcgtcctctgacaggatgccctgacaccgcagtgcgggggcggcctcccagatagggccgcagtcgctaagtccgaggcggctggctcacctcactgagcccggctggacgtgggaccaccggtcgccgcggccagggaaccaccaaggagtcaaggcgagcctaccgccagcagcttctgcccgggcccacgcgccgttccgggtaggcccgcggcgcaggccacttccggcagcggtgcaccatgggacttgcagttcgctggcaaaggttgagtcccgggcgtggcggccgcgctccatgttgggagctgtaggcgccgcgtggcatgctgggggtgctaggtaccgaaggcagatgccgtccctttggactcgcttcgtccaacgcccccacgagtttcggtggcccttcgccccacgctataagagcagtcacttccggaactgctgcccttcgcctttgccgcgaaaagtgcctgacgggggctgggaagggggagggggaaggagtcaacgactccctccccgtcgtcattggctgagcgcctcgtgacgtcactctgaggcgcctcatgcggcgccgcgcacgggtcccagagccttctgggtagcggtttaaccccgcctcttgcgtcggcgccttccttttcctccctgtcgccaccgaggtcgcacgcgtgagacttctccgccgcctccgccgcagacgccgccgcgtgagtgtggtgaccgggcccggggtgccggctggggacgcggagtccgtggggatgcggggtgggcggcggggtatttttgggacggaggcctacgggccgagccacgcgcggcctcgcccggcggccccgggatgggccggcaggaggccgccggggtaactccgccgtcgcgtcctctccgcccgcctcaggatgcgctacgtcgcctcctacctgctggctgccctagggggcaactcctcccccagcgccaaggacatcaagaagatcttggacagcgtgggtatcgaggcggacgacgaccggctcaacaaggtagcggccgcccttgccccgcagccgccgtggggccccagtgtcccatacaggcgattcttctgcctgatccggccacatgctggagggttcggggagaggctcgtttcagtctagttggcgatttcttggatagagaagtaagccgggcggaggtcgggcgcggtggctcacgcctgtagtcccagtactttgggaggacgaggcaggcggatcacctgaggtcaggggttcgagaccagcctggtaaacatgtcgaaaccccatccctactaaaaatacaaaaattagccgggcgtggtggtgggtgcctgtagtccccctacttgggaggctgaggcaggaaaatcgctcgaacccgggagatggaggttgcacggatcgtgccactgtactccagtctgggtggcagaaggagaccctgtctcaaaaggaaaaaaaaaaaaaaaagcagggtgggtacgaggcaaaatcgtgattaacaagctttggaagtttaataccagtgagctgcgtaagattgcgttaaaaaaaaaaaaaagcagtcctggcgcatggctcacccggctttgggaggccatggcgagtggattattggagccttgaagttcgagactggtctggaaaacattgcaagacccggtctccacaaaaaaaaaaaaaaaaaaaaatggt

SEQ ID NO: 55435 - DNA, 3371 bp, Homo sapiens
gaggactgggcagcatccccctagatggccccatcctgttctggccctgttctggcttccctaactcagcttgggttgggggcagccccaagccccatcccagaccctctgcagctctggcaacagctaggtccagagatgacctcagcctggggagccagtgttcctggggagacagaatctcattgcctcccaccccaacctgagaaagcctctcgtttgggggtggggtgaggttcagggagggatcctggatctactccaagccctgtttgctccactgaccaggagaaaaatgcggaaaaggggtgaaagggtgacatcacccaggattgctccacctctggggcaattatcgggagcagggcggccccagtcagacgcaggcagccccaaagcctgaacaggcagggccagacccaggtaagaagccaaggtccggaagggtcgcgggcgcggggcagggctgaggccccacgtcaggtcgcgtgggtctgcggagctggggtcccccacgaagggtttgcgggactcgcatccggccttggccttggatgtttatgggtctgtctgtgggtgagcctgtgggtcccggggctcccgaggcctgtgcggctttcaggtctgggggtgctgccggtgcgcctctgtccagggaccagctcctctgtcccgggtgggtgtgggaggcggacccggtggggaggggcggtggctgccctgaaaccagagctccctctcgccggtacccaggtctgtgtgaggcttccggcccccaggctcgggcctgcgcccagcccaccctacacccctaggcgtgtgcccccagccgtgcccagcaggggcggagggagggcagaagctttctccgggcggcagcggagggcggggctccagcgcggggggccgggtcaaggacgggggcgggtcccgagggcacggccgttccctgcgcgccccgattggtcttcgtgtgccggccccgcccccgccgtgagtcccacacttaaaagcgccgcctccgcgccgcccgcgtagcttcttcgcctccgccagcggggaccccgagctagagccgcagcgggacctgcccggcccccggctccagcgagcgagcggcgagcaggcggctcacagaggcctggccgcccacggaacccggggcccggcggccgccgccgcgatgtttccccgcgagaagacgtggaacatctcgttcgcgggctgcggcttcctcggcgtctactacgtcggcgtggcctcctgcctccgcgagcacgcgcccttcctggtggccaacgccacgcacatctacggcgcctcggccggggcgctcacggccacggcgctggtcaccggggtctgcctgggtgagcggggccgggggcggcaggcggggggctggcgggaaggccgtgcggggccgggggatggtctccgtgagcggaggggccccgcggcgagtcggtgggtaccgtggggagggttccggtccgcgcctggggaacccggcgaggatccaatccgggtcgctggcctgggggcggggcctggtttgttttgctccgagggtgcccggggcccgcctgtctggcgcaaaggtttgggggcgggcaggtgcagcaaaagctgcttaattggacagaaaaagtaactcgtgggcgggaccgtgagaatccgaggagggacctaagtcaccccgtggccctggatattacaaccggtgccagcgatcggtcacagtgtcctgggcttccgcagttgcaggctgctatcagggggcctggcatgggggtagcctcttgagaggcgtctgggaaccgtgacctggtccttcccaagggcccggaggaggagccccgctgaggtcagggctgggcgcgaaggggctctcctgccctctccttgcacacggtgccctgtggcctggctccccgctgcggcccaccgcgtttgcacacttcatgggtgagggtgcttctgggctctggtgcctgggtcaggagtggatgggtctctgtgtgctgggctggcctcggctcgcaccatcggctgccatgagggagtgatgtttacagcacacgacttcaggagcctgtgaggacacccaagatgacaggggcactctgctcagcaggagcctgtccggggctcacccctgccctcttcctctgaactttgtcctgggagggagggggctggaccacagaagtgaacctctcaggtcccaataactagagctattattgggaacagccccctccagccccctccctctcatggaggccttcagacaagcgcctcagtcggccccctggcttcaagatacatcaaggtccctgctacccgagccaaggacacctctcccacagtgcttccccaccctgctcccaacaagactccttctcacgggtggtcttgcacagctggagcccatagtgcagcaggtgctggctgaagagcccctggctccacactgccccactcctgaccagggtgatgcactggaggagggcttggacctcagctcctccctcagtgctcccgaccacttccagggactatccccaagctggccagcactcctgcgccccaagaggagtgtttggggtgcttcctcttggctgcagtgggacacaggtgtgccttcctaggaactgggccctgactacttccagcccaacactcccgggcctgtgaactgtgacctgtgtgccgggatgggttttgtgggtctgccccatccccgcactgctggatctggccaagtgggtgaaggctaaggccggtcagagttgagtttctgccttgtcccctctcctgggctagatgccacaccaggcccagtgactcatagggcaggcagttgggaaataccaggcagagggcaggtcctggtctcagctggccagcctctgctgtctgccatcccaggggaggtggccaaagtcccaactgtgagccaggccccacattcactgggcctcctccagggtctgtatgccatggaaccctggacatggggctatgaaggaaggtgggtgttgctaagcccaggagcatgggcccctaaccttggccctgtgccccaggtgaggctggtgccaagttcattgaggtatctaaagaggcccggaagcggttcctgggccccctgcacccctccttcaacctggtaaagatcatccgcagtttcctgctgaaggtcctgcctgctgatagccatgagcatgccagtgggcgcctgggcatctccctgacccgcgtgtcagacggcgagaatgtcattatatcccacttcaactccaaggacgagctcatccaggtggggcctggtggagccatgctgggtggcggtggggggggcagtg

SEQ ID NO: 55436 - DNA, 722 bp, Homo sapiens
tgcagcccagcctctgcccactttgtgtgtatgtgaccgcctgcttacttgcagtgagagcctggtggccagggtctggccctaccttggctgaccagcctctccacagctgcaggccaggtctcccagcgtcgcactcctgggcctggcatttggaacctgccaggctggcctgggaacacccccctacaggcacatatgaacgtactgcattcctgccgacccccctgtctaggatgcatccacaccccccccaattttgcccagcagcctcctggctgacccttggccacagccttctgagggccaatggaaatatttgggaccaagattcttggtaaataaaaacgaaaatgtttgcaaaaggtgtcgcctgcccctcccctcacacggtgacacagtggggtgtgtgactgttttggggcttggccagctgtgggggctgaggttcctgaaaccaagcacaggggacctgggaaagctgggcccctgctccacttgggcgtttggcccaaagttctctgtccccccaccctcacaagcctctctggcctggtgcacataccttcttgttcccctgcccagcctcctgccagtacacagggcagggctgggatatggaggcaggtgaggtcctagctgaaggggactcagccctgtgctggggaagtggtttcctgagggcatcctcttcatggcagggaggccatgaggggagaagg

SEQ ID NO: 55437 - DNA, 3379 bp, Homo sapiens
ggtcatgccccaaactcacactacccatcaaggctggagcccctcggggccctcgccagtgtgtggatcagggctccccactgtctcgccagggaggccgggcaggttcccggcctcagtcggccaccccctcccatgctggtcctcccctgtggctgtgatgaatgagcttggtgggtgggcagccccctccttcctcactcccactcttggcgtcttggtgcagccctaggccggccctgcccttcgtccctcacctcctcgcaccgctcccagtggtcccttccagtctggagggcatgggccccccaggaccccatgggtatgtctcgctgggaccccaggcctgcccgggtctccaggctgtccacactgcacgtacagtagcccttctcccgcatttgcccacagcgctaggccctcccacgccccaggccggcatcggttctgccgacccctgcagcctctgggcggttcctgggtgaggagaaagagatgggggttgggcatggaggagggccgggtcgccacagcccagggcctctggctaggctggtcgccgtcttacctccgggcccgcctcccgcccagctcctccgtccttggacgggatgggcccttgctgggctattggcgcccccagggctgcagctcgcccggcctccgcagtgccaggtcgacccccagcgcctacacccacgcgggttcagacctgccgagcgcccgccgccgcgggaggggcttgaggccggggcggggccggggcggggcggggcggggcgtccccctcgtaggctccgggccgcgcattctcagcgctgggagccgccgcccccgcagctgctgccgccgccgccagggcccggactcggacgcgtggtaggtgagtgcgcggccacgacagctcggccgagcggggcgagcggggcgaggggggcgaggggcgcgaggggggcgaggggcgcgagggggccgaaggccctgcgcgccccagccccggaggcccagccgcaggcgccgggaggttccgggaggccgcacccaccgcctggcccagctccctcgcctgccccagctccctcgcctgcccttccgcgggaggcggactccgggcgggttggggaggcgcagcgggaaggagaggcgcctcccgggcccttggaccggcctgacggcccccttcagcccaggggtcccgggacgcgcagcctggacaccctgctcattgtccctggacacggcagtcttccctccgcccgcagcagcccccgcccgcgtgcaagtgggcgcgccattggccgcgccgggcggggtcggcggcggcggtgacctcattgcagtgccccggggacgcttggcaggcgcggagtcccaggtccccctgactggggctccccctgatagggcgcgggccgcccaggggcctggtgcaggtcccggggacttggggaggaacagacaactatttctggaaggccctttcccagggggtccagagggaccaggcattcctgggaagaggggccactcctcagcgggtcgcctgtgtcctcgcggtggaggacgcatctgtgcccagaaccaacttctccagaaagcctgggaccttacagccaggccaggggcaggtccttgaggggctcacacatccccccatcggtggcagacgcacaccccgccccccggtggcagacacatccccccgctggtggcagggtctgcctgtgccacccttcctgcgtgtatttaggccctggctccttcatggagggtgaatatcccctctcagctcagtggtaaggtctgtccccctccagctccattccatgatgcctctttcccaggctgtagctgccgctgtttgtgggggaagggccagtgatgggtctggagcgaaggccaagagtggggcacctgggggaaggtatgaggtccctcccaggatcagactgtcccgaaatgtcgtctgccttgggaggccaaggcgggtggaacatctaaggtcaggagttcgagaccagcctggtccacatggtgaaactctgtctgtactaaaaatacaaacattagctgggcgtggtggtgggtgcctgtaatcccagtgactcaggaggctgaggcaggagaattgcttgaactcaggaggcggaggttgcagtgagctgagatcgtgccattgcactccagcctgggtgacagagcgaaactccatctcaaaaaaagaaaaaaagaaaaaaacaaaatgtcttgtgccttgccccaccctagcccagactaaaataccgggcttggccactcctctctctgcctccagaatgaacccggcccactctggcccttgggccagacctgtaacctgtgacctgacatgtccttgcccctctagcctagagtcctggggagcttctgtccacctgtcctgcagaggagtcgtttccagcccggctggtgagtgctggccagggtggggcagagcaggcggggcggcgaaagtccagacctggctgtgctgtctggaaacgtggcccagggcgctcagctgctgtctgcaccccacgccctccctggcttccccatgctcacagcttgcccactgctgcaggtcgggcgggcacggggcatctggggaggggcatagcctgtctgtgctgccccctcaggttggtgtgggtcgcctgtccaggaaaaaccctcccagtctgccaggctccacctgcctccacgctccattctccccaccccggccaggatgaaggaagggctgccctttaacagaccgtaaacaggcctggagagcttaggaaggggctgagctggggcctgtctgagcccctacccctctgctgtctgagtggcctcctccgcccttactgcaggcccataggctcctgccagcctgtgacgtgcggccccgggaatgccgtggggagcgggcaggctggcatgagctcaccggaggtacccgctagggcttcctcccccggccgctagcaggggtgagtcagcagtgatggcgggaggtcctccatgacccctgtcctgtctgtgggcaccaggggtctgtcctggctgtcagggctcctgagtcgctaggaagtgacacgtcctgttcccacaggggctcattcacaggcctcccaggacagtggctggctctgccccgacttctgggctggcttgggtatctgtgtcccctcttttttttcttttttattgagatggagtctcactgtcgcccagcctggagtgcagtggcaccatctcggctcactgcaagctccgcctcccgggttcatgccattctcctgcctcagcctcccaagtagctgggaccacaggcgcccaccatcacgcccagttaatttttgtatatttttga

SEQ ID NO: 55438 - DNA, 3698 bp, Homo sapiens
tggtggcacacgcctgtagtcccagctactcgggaggctgagacaggagaattgctggagcccaggaggcgggggttgcagtgagccgagatcgcgccactgcactccaacctgggcgacggagcgagactccgtctcaaaaaagaaaaataaaataaaataaatttctggagatcagggtctccccaggttgtccaggctggtctcgacctcctgggctcaagcaagcctctcgcctcggcctcccaaactgctgggattacagatgtcagccgccgcgcccgcccgtcctgcagcgaggtttgcaggacatggggtgggcctgggggcagagatgggaatagggcggaggccaagggctttactgcgggtgacaagacgcctgcgacccgccaggccacctagaatccccaggacaccactggtttgaagcccaactccgttctcttccccagacttcaggggataaggttctcccgaaagcagatcacagagcggggctggagaagccgggcctgaagctgctcatggggcgctggcctcaggcagcgctgcgcctcccgccccggcgcgcaccccagggcggactcagcccccagccccggcccgcgccccacggcggactcagcccctagccccggcccgcgcctcacccctcggtgtactcggcctgcagcagccccaggtaagcctcccacttgttgccgacgatcttgccacaagtgaagcagcgtacagggatgatcatggcggcggcgcgtcccagactgcccggcccggcccggccgcacgcgaagaacccccccaggccccgccccgggcgcgtccactgttgcgggagaatcggctccgctcgttctccgctgttccggccgtccctccaccggccccgccaccgctggccgcagtttccgccgcgataggggcttcccgtgcgtcccggggctcctgggcctgtgcgtcccggggctcccgggcccgcgcggccgcggcagcagcagaccgcacacccccgcccaccgtcttggtgcatcccggcgctacggcgtctgagcagggccgtaaagctgcggcggcggttcgcgtttctcgtgtccgcttgactgacagctgcgcggcgggagcgggcggcgcgagcgggaggcggcggcgcaggtactgcgcctgggggttgtgggggcgtgcggccagggtcccgtggccggaggtgtccgaccgggagcggctggagccggacgcgagcggggcgcgcgagttcgagcccagagccgacacgcagcaacaagtggggtccggcgcgggggctcggggagagggcgggcgggggccggggcgggtcttcctgccgcccctcctggccgcgccgagtagtgggttcctccgcctcggcctctgcccgcggggtgtccggggctctcggcgctgagttcgggggtcccattctggacgcggcccagcccctaggggcgccgccctggcctcagctgcgcaattacagcccccgccggcagctccccgccccgggctcctgtccgcgttctttccgctctttcccgggaatggggtcggggtgcgccctcccgggtcccggctctgctggctgctcgccgtcccgagctcccgacgctcagacgcgcctctgagcacggggagaggggacccgggagggaggtcggggagggagtcgtggaagaggtgctttttgagctgaacctggaagaccccggcacaggggatccctgggcagactcccggaggctgcactggcaggaccccctgaaggcctcagctctggcttgccctggagctcagggcctacggacgacgagggacgaggagcccgtgtctctcggatggagtgcgggggggctggcaccagcacccttcttgctgtgcccctggggtgggggtgaggaaatggggggtcggtgtgcagtgagaggcaaagaaggctccttggaggtgcgaggtgggctgtgggggtgggtgggccgcaaagcggcacccatggggggctctgggctggtttgccggcctggggcttctggctggggtgggacctgtgttgggttccaggcatcagctgccgctttctcagggcaatgctgcgtctgccttagttgcagaggaggaggacgaagggttttctgggtccggagtggtgctagccagatccactgcacgcttggggtttccgctcccaccctggccagggccctgggcagcttccccagtggcatttgccataccccacccagccacgtgcggagccacgagccgaggccacttcccttccctgaccccctccccccaggatgagtggacgcacatcctgctctgggcagaagggcaggacaggggccctgagtaacggtggcctggggtcagagccaggttcagctgcgaggctgctggtggctgtggaggtgaggggggcaggggggtcccggatgttagcagggtgggccctggggagtgggtgggggcctggaggcttcttggaggagggtccagggcctgtcccgcccctgttcctgcctgcaggagttgtttactcagagcaaggggtggtggggagtgagctgctctccaaatcctggcttgggccaagctgacattcttggaattccgagtgtgtgcgcttcctatccctccatttcccagcagagcccctgagatctggagactgccccagcctcaggctctgtgcatctcccccgagcccccaccacatatgtgcggaggcccctgggggcccaggcctgtcctcagtcccgactgggctctacctgaggaccctggggagcctgggcctggccctcctcaggcaagcgggggtgggagggagcctggtggcggggcagggcactgtgcccgccagcaggggcgggtgggggcccctctctcctgggtgtggagtgttggcgcagactcggcctggcttctgggggggggggtctgggatggggccaggagggtgaggcgctggttttatagaagggggcgttgtggagcctcctgtggtcagggcagggcacagggagcagagggtgggctcccccggctgcttcctgctagaggagggatcacttcagggcaaaggaccaggggaaacccatgattgaagttttagctgctgacccctcccaccctgggtgttgccctggaaacaggccagccacgggaccaggagggctgggagggggagcacgggctgagccctggctgggattcagctgaacttgcactctggtctgggatcccagcccacgtttccctgtctgtaaagctcaggtgggatcagaaactgcccgcccggagggctgcatccctcctgccgctgaggctgggcatgaccttgactgggagagggtgttgaaggtgtctgtccccagcctcgcccccacacctgtgctctctggccctgtccatgcctgggacagatgtgtgctcacccccagggtgctgtgggatggggtgggtgcacacggcgccacgagcacacgtgcccgacacctcagcggtgcacacagccaaggccactgcccaccgtacccacgccgtccgtgtcctctctacggtcctgggagactggcgttgtgagcagtggggcctgtagatggggccgggtcctctctacggtcctgggagaccggcgctgtgagcggtggggcctgtagatggggccgagactgaac

SEQ ID NO: 55439 - DNA, 2451 bp, Homo sapiens
agtgaaccgagatcgcgccactgcactccagcctgggtgacagcgtgagactctgtctcaaaaaaaaaaaaaaattcttagctgagtgcgctggcgcacacctgtagtcccaagtagctaggaggctaagagattactagagcccaggaagtcgaggcggacgggcgggcgggtcaccctccagtttggacagtcagcaatggaagcttcaagggttggggctgaaccaagggtgggtgggatcgcgtctgatgcgcccacccttcacggggaccgcgtgcccctcactgggagggcagcccgcctggagccctactgcctctgctccctctgggggtcctggggacccgatggccaccactctgccacacgagccgcgcgctcacacactcctcacccgccggccacatcccttgtctgcgcactcaggccccttccacccagcgcgcctagctctcaggcttgctcgccccagcgcacgcgctccacctcccactcgcggtccccccgacacgcgcccccgtccacactcgccctccacccccgctctcgctcaccctcgctctcatagcaaccctctctcaccctcgtcctcacaccctctcacacgccccctcacacacttgctctctctcacgcacccgcccggcgtcgcccgcgaccccacgcccgtcctcccggggccgagcctcgctgcccggcgcgcccactttgcgggagggaaactgaggccgtgcaaggaggaggagcaggggccggccgccgcggggctcacctgcatgtcagggaggccggacggccacaaacgcacggccggaaaacgctccagcgcgccggaagtcccgccccaggcgcccgcgcgccgccgccgcgcacggcacgctgggatggagaggggctgggccaggacaggggactgggcagggctgcccgaaagtcggggccggggccggggccggggccggggcggggccgcgccgggggcggaccccgggcccggcgcgttcaccttgagcgcccctggtgctcgcgctggagctggttatcaggttcccggcccaggggtagccgggttcccagcgccacggctcttaggcaggcctggcgcccttggcgtggggccgcgcggggccttgggctccagggcctctgcccggctcggcggtgccgggagaaccgcgcggtgggctccgccccggcacgctcccccggggacccggagtcaccactcctggcgtccccccgacccccgcctgagtggaccatctccatccccaggccgatggcgcccactgcgctgtctccagcggggactgcccgaaacgcgcgctctctcggtccgcacccccgccttgcacattgcacgagccggagccccaggaggcaaaccaagttcccaactcagcccctcgcgcttggatgaacgagcgcgtggccagcacttttgagtcaccgcgcattctacgcggcacaggctgtccgacccccacccccagccctagccgttcccagcgcagtttcctacagaaaaccgcacggccgggccccaccctgccccgctcagccgttcccggggcgcgcgtgggctccaagacaccctgcacagctgcttctccatttctgctgcttgggagctttctccttaaactaagctttgtctttctttctagtcacgtttccttctttcccttcccggtattttctgccagctgacgcccacgcctttcctagaaggggctgggggctgcatgcggtgcgaggcacgtcccccaccagctgtgggctcttactcagcttagcactcgctctcagcaaacggcctggatggtggcctgaagcctgacctttgggggtgaagacctcaagtcggcagagctctggagagggtcccagtaagctatggcaggtgtcctcagggacatatgcgcagtcctcccaatgctaaggaggccatggcaacatccaacttctcttaggaaaggcacttagccattttaggatctcattgaggtcagaggtctttggcgctaaagaattgcagaatcgatcgggcagccgccgcctttaatcctagcactttgggaggccaaggcgggtagatcacttgaggtcaggcgttcgacaccagcctggccaacatggtggaaccctgtctctactaaaaatacagaaattaggcgtggtggcgcatgcctgtaatcccagctcctggggaggctggggcaggagaattacttgaacctgggaggctgaagttgcagtgagcagagatcacactgcactccagcctgggtgataaagtaagactcggtctcaaaaaaacaaaaaaaagaattgcagaatctacttagggttcactctgggccagaactacagacctcaagagcagatggggcccgcagatgggaggataggaagcccagagccaggcccctctgcagagctcccaac

SEQ ID NO: 55440 - DNA, 1925 bp, Homo sapiens
gcaatgagccgagatcgcgccactgcactccagcctgggtgacagagcaagactccatctcaaaaaaaaaaaaaaagtgactgtaaagtcttctaggcttaaaagggaataatagggggtttgtaaaattgaacttaacaggttaataaattgggttttgaatttctaacttcaatgtattgaaattaaattttaataaatcaaatcctaattgttgaaatttaatataaatccaagcataaccaccttgcccaggcactaaaccagccctcagcccccattcccagccctccttacccggggtgggtgtggagtgccctggcggaggtccaggctctgccctgtaggcccaggtctgacctgccctgaggccctcctgcttgcccactgcctgtctgccgtgggcatgggggggacagagtagggcaggggcaggccggtggggtgaggaggcctgcagagatgagtgtttctgctgctgactggatccctgctttaggagaccccatgccttacctgggatattcctgggtccccagcctgaggatgcctctcacagacatcctcaaaagcactcgaaggctgggagtggtggctcacgccgtaatcccagcacttcgggaggctgatcacttgagcccaggacatcaaggctgcagtgagctgtgattgcactgctgcactccagcctgggcgacagataggaccctgtctcaaaaaaaaaaaaaaattactcacacctggttgttggaggtgcctggtggctgtggggcctttggggctgggtttgtgtcttccccaggctggccagtgctcctgggtggggtcgcggcggctctgggcgactcctcatttgcagagtcagcacaggcagggcccttcccaacagtggcagcctcgtgactctgtcctgttctaactaggagaccttggcctgggtcacccaagggcaggacctgggccactattgctgaccacgtcctgtcactcctaggccttgaaacattctagttcagaggccggaagcccaggaagagagggacacacaccagcactccctgctgcctagccctccccacctgtggacggagacatcctctctgggtgctgggataagcaaatccagggcaagcaggagggggaagtggcacactcacgcccagcggaagcttctggatccagtgccagagccagcacagcagttctctgcctgtgttccacgtgtgggcccccgctggcccagccggccctggccagtgacagttgcgtgtaggtgtctggttggttgctgggctgatgctgagccccgaggtgggcatgtgtggtggcacgtggccctagctttgtgtatttgccctttgcaaaggctgcgtgcgtcacggcaccattgtgggttttatacttctcactatcacacagccaacttaaagtaccgcaagctggctgggtgtggcggctcacatttagggaggctgggacaggcagattgcttgaacctcaggagtttgacaccagcctggacaacatggtgaaacctggtctctacaaaaacatttataaattagtgagtcctagtggcgtgtatctatagtcccagctcctcaggaggctgtttgggagggtcatctgagcccagggaggtggaggctgcggggagctgtgatcacaccactgcactcctgcccaggtgacagagccagaccctgtctcaaaaaaaaaaaaaaaaaaatctaggctgggcatggtggctcacgcctataatcccagcactttgggaggctgaggcaggtggatcacaaggtcaggagatctagaccatcctggctaacacggtgaaaccccgtctctactaaaattacaaaaaattagccgggcttggtggcgggcgcctgtagtcccagctactcgggaggctgagccaggag

SEQ ID NO: 55441 - DNA, 1835 bp, Homo sapiens
cgctgtcactggggtggggtgggtggttgtttctctgcaggcccaggtgatgtggagggggcacctgggctgccacacagaccctgggctgggtcgggcacggggcctgcctcgcccccagctcagggaccgcaagagatgtggccctggcggctcagggcggcaggaggggcgggccagccccaccgtctcaggataccgtgctaggggagggtttcctcgccaaaggccgtccagcggctgtgaccccttcgcctggagccccagcttcctcccggcgccgccctcccgccccggcccccgcggaacaaacaaggccctggcctcggagctgccccgccgcccagcgctcacaggtcgtttattccaagtaagaaaacggagactgctcggggcaagctagcggggccgaggcccaggacgaggccgtacgcgtgtgcctgcgtggccgcctcttttgcagtgaccaccaacaacgacagaggcggcccgctgcacacgcgggttcccgcccggacccacgcccttcccgtgggggacgcgggcggcatcgccagcttggcgcggccccgggacgcgaacgcgtggcttcagcggctccgtccatggtgtccgcctgcagggggcgcccccgcgcctgcctcgaccggctcgcccccgtgccgcggacgcgcgcgcgctgcctcacgcgacacccgccccggccgccgtccgtcgtcgctcgcgtgcgtgcgcgtgcgtgctggtgcgggcgccgtacgtgcgcgcgcgcggcggcccagaaagcggcgctgggaccctgaggcggccgtggttaggcggctccccggcggctcctccgcggcggtgacggcgaccgcactccccgcttcccgctccccgcgctcctccgcccgggtccgccagccgaggccgctcccgagcgtcggaagatgccggccgtgtccaagggggacgggatgcggggcctggcggtcttcatctcggatatccgcaactgtgagtggcgggggcggcgtggggccggggccggggccgccggcggagacggggtctgggagcggaggcccggggcggggcctcgaggcgggggtgcaggctgggatgcgggcggggcccggggcctgagggtgcgggcggcgctcggggtcttggggtaccgggtctgggggtgggggccagggtgcggggtgggggtccagggtctgggggtgcgggcggcgctcagagtcttggggtatcgggtatgggggtgcgggtcaggatgcagagcggggccctgggtctgggggtgcggggtggggtgtccagggtctaggggtgcggggtctaggggtttagggcacggcccttcatccacatctccactcccgtttgctggtccgtgcggggggctgcggcaccaccaagggggttccgggccaagacgcccctccccagcatgatgtcaccttggtctttctagtactggagcgtttaacccagcgttttccaaaacggcgtggattttagctttgggagcagaaatctggaaatcagtgtcttcccaggaaacagctttgtgacctgggttctggaggcttattaacccctgattagatctcacctacgacgattaaaatgactcattcccggagggaatctggacacgagcagcagtcggggtgtgggatggcctcgctgcctgctgctccaatcacagacctcgttctcagccccgtgcctgtcccctcggggtgggaaaaatccacaccaaaccgttaaacaagccaggaaggctgggcctgttagaaggatgtgcagggtggctgggtgggtgcaccggtccaccaatt

SEQ ID NO: 55442 - DNA, 646 bp, Homo sapiens
tataatcatctgtcataggctcctttactattttttgtggaacttgggctgttcccagaatactaatcctctctgttgattagttcagcctgtaaacaagaaatcattaaccagcatgctgttcctgaagaatgaccagggacaataattgtaaaaattcaagagcttttatccaagcctgcccctatagagtgtgttctttgctacttcatggaatgcaaattgtaacttgcttttgccagtagctatggcatgtccaggttactcattagccaccagagctcctaagttcactgcgagaattccctgatgcaagtacagtacccttagtgctgatgggctggctgcatttcagacaggaatagtgcaggatgactgtggccagcgtctctttaacaaagatcagactgtgtgtggggctgggcttgttgctgtgggtcagttactctttaacaaagatcagactctgtgtggctgggcttgttgctgtgggtcagttactcttgctcatgctttaccctttcagaattcagctcctccccgcttctcctcaagctaatttatctaaaaagataagatttttttgctagatctgttcccggcacggtggggtggttgaagtcctcctgtgaggccctctgcctta

SEQ ID NO: 55443 - DNA, 735 bp, Homo sapiens
tgcttcggcttttctcctgccttgaaacggggcctcatcccattcgtgagttctgagtgtcagtcttatcagggaaatggtgtttctttagaaatcaattaaaataaaaatggctttttgttcttttttttaggtaaaagtaaagaagcagaaataaaaaggataaacaaggaactggcaaatatcagatcaaaatttaaaggtaagtatgtttaaccttttccatgaaatgtcctgttgtaaattttctgtagtaagaacccagtcttttaatactgtcttcttttctcccacactaaagtgaagttctcagtttgtacagtttctatcagggccctgtcagaattaggaaatggcatgtgtggagctggttaggtggggcagcccctcctggtgtctggtcttttcctggagctggaacagcactggtctagtgcccagctgcatgtcgcagtattagccaccaggccagcgtgctgggggttcagaggacagacaccaagtacgggaagtgctctgtgtaaggcgccaccgaacgcctcctgctgacggtcaacagggacctgacctgcgctcggtggactgcctctctgtgagccagtgtgtgggctgagtgccttccctgaacatccttactttgaagaattgtgaagtacggatttagttttcagcccttgggacatttttgaaaccccagttaatccttaaagccttaatttttcagttaatgtttac

SEQ ID NO: 55444 - DNA, 948 bp, Homo sapiens
cctcttccccagaacagctccctttccccgttaggaatggggttcagctctctgcaccctgccccatgcagggctgcctgtaacctcagacagggctcctacctgggaccttgccatgggccaagaggggtgttggggtcagacccctgagcctgggaaccaccactgcccgtccagaggggacacagggtcagatctaggggacctacctcaggcttcagggctggaggggctgtgctgggcagcttgtgctccgctaggattcctccaatccccccagggcagggggagcctggcctggaaaatctctgtcctgaggcccgcctggggcatgtcagggtcaggggactgcagttggggccgtccttgggtttccccagggctcagtgccagtgtgcggaggcccacaccaggaagtgaacaatgatctcctctggcctcgcccagctggctctggtttcctaatccccggtcctcctggcaggggccacacactgagcttcctccacgtgcccaggtcctggcagggagcgcagaccctggggcctggtgctggcgggcaccgcaggagggcgggaggggcttcgtcccaggccctgggtctgggcagcaggtcagccagggaaacaggcttggtgctttgggccccgagtctctataactgttggggtgagtccctccccactgccatcatgctgccggcatgtccctggcatgttcaggccaaagccaggaactcaactcagggcccctctctattttcaggaggagaaaattgtagagagaggggagggcccccagacctcagtttacccactggcgacacaggggtgcctgcctgtgccctcccgggccggggcaagcagtggtgggcccagtggtctcgtagtctggggtcggtgtgagttccggttctccaggcttttttccagacaactgctgggattg

SEQ ID NO: 55445 - DNA, 2206 bp, Homo sapiens
atgaacggctctgccacatgggaggcccatggagccgacagccactcctgggggtcagtgtggcccttgctgtggacacgggtgcaaggaactgacgctttggccagaaccgtgggccttgggggccagagctccagtagcccaggccacatcttgggaggaattctgtttgtccagtgattcagagaaaataaataaacgtaggaaggctccagatcatgcagccccgccacaaaatcaaatttactctgccccctccctgcccagagggcccagcagggtctcagctccctctgggcaagggccacccaaccccgccatgggtacgtccgccacagctctccctcgggccccctggtaaagtcgggaagaaatttaagcctccttcctccttattgtgtaagttcctggcttggtaaaaatctgccgccgaagcctgctctttctgtcaacagccgctgataattcatgtgtcagtttcccagtcccacccagggtgcctccccttccaaagccggagcgtatcctggtcccagcgctgagaaactctattgtctttctgtgaaatcattctccaattcccacacgaagccctaatcaggcttcctgattctgccacgtcccccagaacatgggctgtcagaggcccggccaggggctgtcctggaccccacggcccaccccggccttggcgagactgagggtcacaggtgctaagctaccatcattttctgaaccaccaggcatgagagaggctatgttcagagcatggaagtggcagaaatggcagaacatggtggctccaccccgttttgtggatgaggacacaggcactttgcaggcccccagtggtcccaagtctaggaggagggtggggcgggctggcactgagctcacctctggacccagcatgcctgggcactgtggagatgcatggctgggttcctcctaggggacctagcatgcctggacgctgtgggggtgcatggctgggttcctcctagggcagcagggctctgagcagcgggctttaaatgagccatttaacagatggtacaggagggtaatgcacgggctcagggccccacagcgggagctgctggagtcctacgccaccccccgcctggaagggaagatgtctgctccacagagccctggggtcccctgtgggcagggtgtgtggagctgccctcccctggtctccccaggacagacccccaccctccaccccaggtgccttagggtaggcgtggcctccccaggtcctgccagccagagccaggctgaccccagcggccctgcaggtcacctcctaggggctgtgcccggaaactgggatggaagcgacaggctgggggcagagtgtgagcccagcccagggcttgcgatgttgaaaccagtgcttccctcccctgctcacctggccagtaaccaccgggctggggtgtcctggctgggctcaggccgggctgggggcctctcctgatgctgctggagggcagactgggccaggtgcccccaacagtgtgcgctcggcctggtggggctgagaaacctggaacatacacacctgtgggggtgtctaaggggctcccagggagttctggggggtcctggggagcaggaccctcttcactccctcctccaggggaagtggccctggggcacccccggctgttcccccagctctgtggggccgaagccatccacagggggctttccccaccggatgtggtgcgggccgtggttaatctcacttgagttagtcacccaggacaaacagctaaccgacacaattcctcccaagtccagggggccggaggcggggtcagcacctggcggcaggagacagtgctgccctgggatgtggccgggcctccctccattcccaatcctgttgtctctgtggcaatacctggctgggagctcctatcaggcccgtgacccccgccctttctccagtgccctcctgtctgcattcacctgtcagatcccgaggagagaggggcactggcggccgcccaggaccagagctgtggggcctcccgcaccagagtgcagtgaaggtttgtgggctgcggtcccggcggagcccacgtgccacccccatgcacagctttcctcctgcacatcccacagaagcaaaagctcccacctgcccggcactgtccccgccctggggaccctcctgcaaacactttccaga

SEQ ID NO: 55446 - DNA, 1793 bp, Homo sapiens
cttctcaggggctgaggcagggtctgctttaggggttgcgcctgcttttcagacaccggcccccaggcccctgctgcagccccacccggaccgcatgcgcagccgtgcccgctaagtggtcggcgctgcgggcagggtggccggggcatcagggttccgagatgcaagtgctgggcttggctaccacggggggtcgggagctcacgggggaagagtgatcctgattttgaggccaagtcgctggtcttacacctgtcctggctgccggtctcagagctgacaccggccccaggctgggggaaggtatccagccggcctggccagggcccctgctgggaggcagcaggaggagttattgtgctggatgggggttgggagctgaggggactggagatggcatggagccctccggtgggtgggactcccgggcatatgctgagagctttaggcctcagggagggttcccaggaggcaggtggctgcgccacggctcggccagccctgcctgcaccctctgagagcccccagcaaggctgcagtgaccacctcagattcccctctgaggcctgtggcgtggccgggacctcactgcccctggggacacacagaaaatgcccacagagctcagaaacaaggcccagtgggttttctggaaagttctgggtgtgtggagcctggggctgtaggctctggaactgtaggcactggcttcaggcctcctgaggcctcggcctggtggggttttcatgggaccaggtggtcagcccgtggcccatgcccaggggttttgggtgcctgagcccaggccccaagaggaagcccagcacagccaggggtcaccaacactggtggggggaagtcaccccagctggaccccagcagcggccctgggtgacgtctggctgagggaggagaaagctgtggctggggcggcaaggcctgggtggccagttggccaggtgccccggggcttggcccagcctcagacacgcagggggcactcccctctgagggccacgctggtgactcagactgttcagaggtcacggtatggactgggccagtgactcaggcctgtcctctgttgggggctggacactgactcacccactgcctcctgtctatctgagggcgtaaggagggcaggccttcaggcactcacatgcggccctggccagggtcccggtcacacctgcagaccctcaagcccttccctatgccccactgacataaccacctggccctgggatctggtcccaccgcggggcccattgtccactaccaggaccctcctctgccttcatcagcaccaggcgacctggtgtccactcctgggccagggcaggggaaccctggctacacctggtcgagtcagacctcctgaagcaccagtggctggggtggtccaccctaaccctgtcagccgctcagccttaaatgtgatcactcgctcagtcagtcgccacccactcactcactcacccactcacttattcactcactcacccactcacttattcacccattcactcattcattcacccattcactcactcacttattcactcactctctcactcattcattaattcgcccattcactcacactttcactcactcacttattcactcatacactcattcacttatttactcactcattcactcactcattaattcacccattcactcactcacttattcactcatagactcatacactcactcattcactcacgcatccactcattcactcactcatttacccactcattcactcattcactcactca

SEQ ID NO: 55447 - DNA, 807 bp, Homo sapiens
ccatgcctgctgcagggtaactcagggctgaggtcgcaacggccaggtcagagaggggtcagcatcccaaagccccctctgctcaacccagcccagttttgcaaataaaccctgagcattgagtacgtttcctgtcctgacgtcttttcttgcctaccgtctttcccaggctgtccaggtcctctgtgggctgcttgcctggggcctgcaggctggaggacacatccggggggcagtccaggacccccagcagccactgaaggaccaggaagcctctgggaaggccaggcagggtgggggacaaggagccgcttggtcatccacatgcccctgtgggcaccccgagagtcagtcttgggctgtgggagcactgcccaggggacagggggcagggggccgccaggactcagaggtcaccccggctgttatttccagtgtaggggattgtgtgaggaaaccagctcatgtaggaagatggaggcagtcagtggggcaagcaggcgaccaggcccggtcagcggggaggcagctgccccccagggcaggtgcacggagccaggtgcaatgctcccaggctggtgctgggccctgcggggccgcctttcaccctgttccacgcgcacctctccgggaatgctttccttggggcacttgctacgcaagcgacacgtgagcttgctggcttcctgtcccgcctcctgtcccgcctcctgtcccgcctcctgtcgcgcctcctgtcccgcctcctgtcccacctcctgtcccgcctccacacgcacgggcagggctttctgcccttcctttcta

SEQ ID NO: 55448 - DNA, 2780 bp, Homo sapiens
gagtggggtggaggcctggttgctggtggagtggggtggaggcctggttgctggtggagtggggtggaggcctggttgctggtggagtggggtggaggcctggttgctggtggagtggggtggagacccagccgtctgcaggggccccggtcagcgccagtgccctgggcagttgttttcaggaaataccgagtggaacctggaaccctcggtgtgtcggacgtgagcttaggcaaagtgcacgtgctgaggccgccagaacgcctctgccatgcacaccagaaacccgtacctgcctgtgccatggactcccaatgacacggtgccaggcagggctccaggaggttctgagttaagccctgcacctgctgtgctctgggcgcctggcacttcaaaggaccccgagagggtctagctcctcacctgtgtccccatctaaggcctggagcgcacaagccagtcagcgctccacaaccaatgtgagtaaacagaagggacccggacgatccaggcaccgcttcgagcagttacggactcaggacccccaagttcgggaagctctctgcaggctgcaccccaacctgagcagccagcatggcgtgtgctcaaccgctcttctctaaaaagcaaaacacactttgtgcgtttccccacactttaccccgtttttgactgggacacgtcacgagtgacctttgccctgtgagagaagccgtactgcgagaacaagcagagcaccccggcttcacctccggagggtgtggcataggccagggcccggagggaccccctgcccttacggacaatcgaggagggtgcagaggtgcctgagcggagtgggcccatgccaggagtcccaggccagcctcccccaggcagcctctctcgaggcgctgtacagctcaacagcaagctctggctcaggagggcgctgagaggccccatggcacgagatgctaagcacctgttcctgttggcacacaggaaacactggggtacagaaggccagggcccttcgcctgcctcccagaaggattcacagcccagagctctctccccgggggacacctggccacacaggacgtgcttccctgccaaccccacagggccctggcacagcccatgccagcaggctctatgactagctctgtctgctcaccaggaacgggttatcttgcagaaacagactcgtgctaaccaagttctcaggactaacatacacaggccaaattcctgtttatttgtgacaactgcttcctgtgtgccacatgcacagctctgaggacatggcaggaaaagcaccgtatctcctgggcacacatggcagacagacaggcggctcgtgccctcctgggcacacgtaggggacagacaggtggctcatgccctcctggccacacgtgggggacagacaggcgactcatgtcccggagacagcagcatggagaagccagtcgggggagggtgtgggtggtcacagggacgtgtgggcgtggggtccagaggcctctgagggagcactgtgggtccctcgctgctctggatcctggttgtcccggtatttgaaggcgtccagcgctccatctccttgctctgcactctttaggtgtccgttaaagacagtgggactgctcattactgggagaaaataaaattatatccaaaggcctaatgatcaagtgtcatttttcaacaaggatttaaccataaaatggcaaataggaaaagagggtttttaaacataaaccgtgtggatagaacacgaaaaggggagaagcagctccctgcggatggagctcatcagccccacgcagcccggggaccgcagccagcgccatgtggcggggcaggtgcgcgtccagctccccgagatgacacacgcctcacatctgggttttcttcccaaaaacccacaccccaattaagagacatctgacaaaatccctgaccagtcagtcgtcctcaaaccgtcaaggtcccaaaaacacaaggaaagcctgagagacggtcccagattggagatggcagacatgatggctaaacgcaaggcagggtgctgggacagcaggggacagtcatcgaaaaaccaggacagccaaataaaacctggagccaacagtcatgcccccagctcagcgccacagctgtgagagctgttcccggggaggggagcgtcggccaggggacatgggtgagacacacaggacctcttcgtgccagcttttcaattcgtcataagactgaacactacaaaattcaaggtttttcagaaaaatattccatttaacctgaagacaggaagagcaagagaggagacggagaccaggcttcagtcctccccgtacaaatactggttacgcaacctgctgccccgcctaccagggagaggcggcttgcctgctgctgcaatgccctcgtttctcaacttagagcaaagcccttcaaacgaggagggagtgctaccagttcatgcttcacgagtcacaggggagagagtccaggtgctgaagtaaaccctatcgtttcagtgacgacactcggtccttcagtaaatgtctattttgaatttattttttaaattcagtgctaatcctaaaatttatttttgccatatgatgatggaggaactatttcaatggtcacataaaaatatatgctttaccctggttcaaaggcttggaaatatgaaaacaaaaatgattactcccgatacataatggatatttttctagaattttgcttccatgtacaagatgcacatactgagttcaacactaaca

SEQ ID NO: 55449 - DNA, 3478 bp, Homo sapiens
ctcacggccaagaggggagccccgtggaggtgaaggactcaccgacactcactggtggccactgccattgccctgtaagtttagcattttccaaaataaggctagaaggaaaactgcaattccccatgcccactcagctgctggctccctcacccaccacccttcacagcaccagcatccaaaagctggaccagtacctgaccctgcagcccctggcactccagccagcctcggcctcacgctccacaccagcctcctgacactccccaaaacccactccagccagcctcggcctcatgctccacgccagtctcctggcactggcatgttcaataaacaacccttgagcaaataagtggcatttcatgcaactgctcttggcaaggcagctcccacgccagtgtggacgggcagtggtgactttgtccccagttcccacatcctcctcccacggccgctcagcagccccctcccaggagccctcgctgagcactcattcgccgtgccttgtctccccttccggggccttcctcagacagggctttccttccctcttcctatcaccccctcccctcttcctttaattatacaaaacacaacaggcgcttcaaagccaacatgccgggaggttccctggctctgctaaagtctcaaagcaaacactagaatttgtgtaagggaagctgggagatgacagtattgaaacgaacccgtgtaagctgaagagcggtgaaagggaagagtacaggacagaatgagaataagcatagattataaaagctgactacagaacaagcgactttaaatggggtctctgccaggaactccactgcaggcagccttgcatcctaagtgctgggacggtcaagcaaggcagaggcggaaaaccccttctcattcagatgaaacaaaagccagtcaagcagcaggccaagggcggacagagatccagagagggacggcatgtgacgtggcaggccctgggcgccgggcacagggcgcgcgctgcggcagcctctgcgtgtcactgtgtgcctgaggcttccatggtgaggtgctggggcacccctgctcctgggatgcttacacgtgagtggaagaagacaaacgggaagcatcatgagttatgctgtatgctaacggcaggaggcgctgtgcaaagaaacagggcaaggccgggtggcaggggcacgctgcacttcccacagggcagcaaggcaggcctcaccagcacggtgccagggcagggcccgcaggatctggagacagtgactcagggacaggaaacacttgcacagcaggcctaaccaggggcctgtcgggcaggtcaagggacagtgttagaggcccagatgaacagaggttagggccgggtgcagtggctcacgcctgtaatcccaaaactttgggaggctgaggtgggcggatcacttgagaccaggagttcgagaacagcctggccaacatggtgaaaccccatctctactaaaaatacaaaaattagctgggcgtggtggtggacgcctgtaatcccagctactcgggagtctgaggcaggaaaatcgcttgaacctgggaggaagaggttgcagtgagttgagattgtgccactgcactccagcctgggctacagagcgagcctccatgtaaaaaaaaaaaaaaaaaaaaagacctcaagtgaactgggaggcaggccagaagcagcgtattcagaaggcagcaaacagagggccaaaaacgaaggaaagccggaggaagggacatccactcccgggctgctcagcagccactccaggagccaggagagggcggggtcccaccttcgaggcactgaggacaagtgaccgtccaccgggagtactgtccacctggagtaccgcccacctggagttccacacacacaaaaatagctgtcaggacacagagaaaaggcatgtacaagcaaaaatcaagtttgccagcaaggaaaattctagatgaacctgaagctaaaggaaagtgaccccaaatggaaggcccgagacaccagaagggataagaaaagagaaacacagaaggaaatctaaacaagcgctgactcgagagaagtaacacattcctgcgggagccccaaggggaggtagcacccacacaaggcacagcagcacccgcgccaggacggggcggccgaggtctccgcgtggatccggaggtggcacagacaatgattaacttcttctttatttattctttagccgggcagcctccggagccagagttcactcagagactccctcatggcagaagctgataagtgcatgttaccatttccaggggagcccctgtactttcccagcacagtgtgtatgtacttgagataaaacaactgaattttttaaaactccatttaataaattcaaaaggcaatgagagaaaaaaaataagaaaatgtaggacaaataaaagcaccaaagaaaacatgtaaaaaatctgtaaatctgtgtatccatctaggcatctcttaactagaaagatgaaactagcgcattcccatcaaaagacttagtcttcttagatttgactttttaaaaatccagctacgtgctatcgatggtgcacgtgtcttaaacaaaagttttcagaaaaatgtaaaatcatagaaggaaaaagtactaggtgaatactctctaaaagacagctggggtggccatgccagtatcagacaaaataatcaaaggcaagaggcctttatcttccaagaggcccgtgggtccccacacagtgaaaagatgtgatttccaggcaagcacagcaattccacacctgtacagactcacaacccggcctaaaaaatccagcgcaaaggttcacaggaacccagagagaaaggactcgtgaggaggcggtgagtgcgttccccgctggctcaggtgcagtcagcaggaacggacgccctcccaggagcagcccaccagagccagcggagacgggtaagtgccactggctcagacacacaggatgcaggaaaatccacgggctcttcacaacactcaggggagagaaagcccacacacatctacaaagaaaagcaactctctccttgaggtacgggaagatgagggaaaagcatctcacttgcctttctttcacgaattgtgtttcaggacagccagccgacaccggttgatggggaaagctaatctttacaaacaatcccagttaataaacaccgaagaagtgataaagttcagaaactaccctctgccatccctaatgaagtcaccgattcggcaggaattatcaacgatgtgaagagtgaggggacctggacaggaacaggcctctcagggaggaagggaggggccaggccgcctccagctggactccatggccaaccagcacctccagaagcaggacaaggagtcagagcagcctggacacggcacagcgcacccacctctaccaaggaggcctctctgacggcaccgcggtggctgca

SEQ ID NO: 55450 - DNA, 3147 bp, Homo sapiens
acacagcaaggaaggggccatcctgcctggccaccatgcccccctgctctccaggaggacacaacagcagggtgctggttcccttgttgctctgagtctcctgttaggcagaaaggagcacttggctgccacggcaacttgcggggactcactgtggtggagtaaagatgaagaggtagagacgctgccatcagaggccgtccaggacctctgccgacccgtaggctccacacctgagtctcataagtgtcaggaggtttccttcaaagtcctcagaaaaagcagctatgcccaaaacctggggcttcattctaaactcagaaaaaatgttctacctgaagaattatctcctcgggagaaacaccaggacttgtggatacagtgttaagggtggggagccctggtgacccctccaccacgtccagtactgggctgcgcgagggcagggaccttggagcatcgtgaaaaaggactttttccacccacggcatgttcagagccactgttgataaaaactgtaccgctcacgacagcctgccccagcccagcctcagtgagtgacacggtttgaatctgtgtccccgccaaatctcacgctgaattatgatccccaatgttggaggtggggcctggcagggtgggtgtgtgggtcacagggacagatccctcgtggcttggtgctgtcccggtgatagtgagttctcacaagatctggtcattacagtgtgtggcacctccccacccccaactctcttgctgctttcgccatgtgacgtgtaagctcccacttggccttccgccatgactgggagcttccagaggcctccccaggagcagatgccggcaccatgctacctgtacagcctgcagaaccgggagccaattaaatctcttttcttacaaattacccagtctcggtattcctttacagcaatgcaagaaggccctaacagtgagccaggaggccactcacgccaggagcccatcatctctgagtcagtctacaccagctctcctgcaatattaatgctatagaagaaactgccaggcaactctcaggagagaattcagagcaggaaaggttctctgaagttcctggcgcctatcctctcatttgcaaatgaagaaactgaggttttgcacggtggccactaaccggggacacaattgggcccaagaagtggtcaccactgccctcactctgtgtaaatgagaaagaggaaacagccatcatctatgggaccaactagagtgcaggcccgcctccacctggggggccatcagggtgcgggacccgcctccacctgggggggccatcagggtgcggggcccgcctccatctagggtgccatcagggtgcgggacccgcctccacctggggggccatcagggagcagggcccgcatccatctaggggaccattagggttcagggcccgcctccacctgggggaccattagggtgcggggccctcctccattcgggagtcagagctcggggccgcctccatctgggcaccgggccctcctccatctggagaccattggggagcggggcctgcctccctctggggcaccatggggcacggggcccgcctccatctggggctcacaacgggcgcaggccccctcccccggggctgcctccccaaagctctgccccggcacggcggtgagctcaagcctcctgcagcgtgggcgcgtccgtccggcccgccccgccccgaggtgtggacgccgccgctcccctccggccggccaggcgccccgcgtgccccgggagagccgcggagtcggcccgccagccgcagctgagcagtagccctgacccaaggccccgcccgcaaccgcaggtcaccgcccccgcccgaccctcgcccggctgcctcaccggcccgcgctgagtgctgacggtggtcgccatggtgctgcggcggcccccgtggctcgccgacccgacagtgacgcgccgggcgacctcctgcgcccccgccggagcctgcgacggagacagttgtcacctcgaggccgccgccgccacagtcagctgacagccgccgcgccccgcccccggcaccgccccactgcgcaggcgccgcgccaggcaccgccccttccggctctcgcgcgcacgcgcgctccagggtagggcaggcgcagcctctcgcccggcgcctgcgcacctgctctctcctcgagccctgcagcccggcgaaatggctcccggcggggccgtttgcgcatgcccagtcatgacggttgtcggcgcgggccctagcgtggcggcgctgcagtctgggcagtgggttggttcctcctcggtcctctgtcgagtggcgacagggcctagccacctggcgggggtgaccttcggacgtgcgacccgctcggagaagggagggaactgtggcccgcaacaaagcagtgacaggcccgacatcccctgcagggcgatctttccctcagctgcctgccggaggaagggcctttctgtttcacagggctaaagatggggcgcggttcctccacggggcggctgccgggtgaacggaacggggatggaggcgctgccagaagagcccgagctcgagcccgccctgccctcggcctccccgccgcgccgctccgcaggagccccgctcctctcctgctcgctccggagaaccccagtccggcctgacctcggccctcgcggtcaggcgctccaaccagagcgactccagctcgaacagcgctgggtaaactgaggctgaaccccgctggctgcatccccaggagtcgggcgtttacggtcacgggaacaggttaataaacttttacgcagcagacccggaacttaggtcccgatgtccgggtatcttaagaacaagaagcattcttagttgaagtttcgctttaaagataatgatacagatgcttgcggaggacaggcgttatgcaaagattggcaatcctttgacgagcccaggtagtacagcacgtctcccccgtgatgttttttggcttttatcttacatataaacaagcgtacccaggtggacgccttcctcctcgtgcttttgggaacaccctgctctatggagtagccattcttttattccttcactgccttaataaacttgctttcactttactctgtggactggcc

SEQ ID NO: 55451 - DNA, 1924 bp, Homo sapiens
cagtttttcacagtagttgtcgttgatggggacccgcatgaagcggctctcgcagatgaagtcaggcttggggcaggagttgctggcgttgaggacgtagcttattccattttgcgtcatcagatcctggaggggcgggagggcgggttggaaaggggtgggagaagctcggggcgggagtgaaggtggaggcttttcctgccctgccgtcaggagggcctttagaatcctgggagccttggaatttgtcccagatcccagtgtatccaggggagggcccaggaggcctctctggtccaccctggcaccctgggcccgtgcggggggtggggcacggctggcctccgactgcaggccccacccacggctggtggtgggctcctaggaattttatgattgcctgggtggtggcttttacccttttccctcgtcaccatttttaaaacatgggattctttcagagctggccagaggcccagtgacatccgcagcttggcatgccagctccccgctcctcccccgagccctgccgggccctcccgcaagccctgctgtggtccttccaggggcatgggtggggagcctggggtcctcctgggcccccacccatgcttctcccacacccagctcatccactgccttcagctcctttcctccctcatcccccgctccgctgccaagctgcttctggagctcctgcccctttcccattgaccaccccccgaactccactgcacacacaccttgtttaggacgtccttctgcgagcccaggtagaggtgaggcaggatgcgggtcaggcccacgctgggcacaggcaggcagggctgggagaggctcatgggtagcagggcagcaggcttgccctcgcagaggccggggaagcaggaggagaaggtggcgaagccccctgtaggaggagggccgtcaagtgggttgagagaacacctagggctccctgtccgcctagggtgccctgtccgcctagggcaccccatctactgctgaggatcagtcacacccagcccagacccgagcctgagcccagccggcaagcctctggcggagcacctgctctgcccgcggtggggggagggggtactgccacacatttacagcctgcacctacgcccacattcctcctcatgctaattaggggctgacccagctgaggacgccgctaggatgcccgtaaaggtggcgttgaggtggctggccatcacggcacgcgctgggcccaggcaggggtgggctcagaggccacaggggtctcctgctgagggtgtgtgtcacacagcccagaggagaggccctcacgagcccggccatctcccatacccatggcctggggccaggctgggccttcctcctcccctgcactgatgcaatgcctccctgcctccagctggctgggagccccaggcctgggcttgggtgccaggaccaggaggccagggcttccgagaggccctccccgtccccaggcatgacatcaccctggcacagccctcggggcatttgctgtctggttatggctgtactccacccagcaggggaggacggagagtggagaagcccggggcactgggggcacgcagagcaggcagtgggcacccgctgcacacgtgaccagcgtgtgctgctgccttccacacacgtccaagtccgaggccacaggctggtgggaggaagtcccctgccctgcaccagctggaaggacccgaacgtgaatccctggatgtctgactcagtgaccatgggtagtgcacaccatggctctggtctcagcttcctcctcctgcctgccacacagcatcatgtggttccaagaagataatgagcacgaagacacatggtgagaatggacctggccgtccctgacctggctggggcgaccaccgatgtggaccagaaactgggcagc

SEQ ID NO: 55452 - DNA, 2765 bp, Homo sapiens
gcatgggactgtcctcctggtggagggctggggcctggggtgctacattcacccctggaccgccctaggtgcaacagtgtctctgggtgggctgtgccagaagggaggcaagggagagtgccggggtttggatctcccctcagaccccccgctggggcacaaaaggagcttccctggcctgcagcaccccacccccaccccaagctgcacagcaagagcactgcggagccacgctacatcctgccaccccctcctccatcccacagtgtccccgccccccatcactgcagcaccagagcccctattcccctcagcagaggccggtacaccccgcagcagggagacggaggcagattctcccagaaggggtgaccctgttggggctgggcctattgttgccccctcccctccaggccagactattaggtatccccacctggtctgctccgcatcccaggctgggcagctgggcctagcgaggtggctgcagcagcctggctgtgccagcccctcccccagcgccgcggctgcctctgcagcaggcggaagggcgcgggggctttatccctcaggggccggctgggcaccccgggatggggaggcagtgcggcctggacactggggggatggatctgcagccctcccccccgacaggggaaggccccttcccgggtgtcccaggccagaggccgtcgcgtccctcccacggccgaggctccacacctcccggaccgactccgggccagggtccgcctgctccggttctggcccccgcgggggtgacgttcgggacgtcgggggctcgcgcagatccgcgctggatctcaggcggccctggtgggtcctggatttttgtcccccccccattccacacccaaagaaggagctgcggggagaagggcggcaacgcggcgggcgggcgtgggctgggcccgggtccgccgggcgttgcggggggcggggaaggggcctccctgtccctggcgtcctggacggccgtggccgctcattccggggccgcctcctcctcccgggcgcccaccgggtgccgctgccccagcgcccccgacgcggcgccctccgccccccggcccgggccggtgaaccccatccccggcgcccgcccccgccccgccggcgcctccgctcacctcgctcgcgctcgcctcgggggcgctccggggacccgcgccgcgctcagggcgcccgctcggccgcgccgtccatgggcccggcgggggcccgcgcagccggggcaggggccgggggagcgcgcgggccgcgtcgccgtcgccgccgtcgccgccgccaacgccgcggggagcgctcgctcgggccggggcgcgcgcactgcgggcgggcacgcgcgctcgcggcgcgcatcccagccccgcggctcggcgggcgcggccgggaggttccggcgcggctcgggctcgggctcgggctcgggctcgggcgtccggcgtccggcggggcgtcgtggggggagccggctcggccgccgcgctcggccgcgagtgacaggcccggggcggagggcggggccgccggcggggatgaggtcatgccgagcgaaaaaagcccctgacgtcacctgcagccaatcagcgcgcgcggctcgggggcaggtgacgtcagcggagcccgggctcggggtgaagctgaggcggctgccgcggggggggggcggggtgcagggtgcgggtgggtcgcgccgccgccgccttccgccctcaccccgggaccggctcttaaagggaccacgcggcgtccgggaccccgcctccaggaagccctcccggccccgggccccgcgtcacccaggccccccgtcacccgggcccccggccgcgtcgcacagaccccggacggtccagctgagcggctccgggcgcgaagtcctccccccgacccggacaggcgccggcgccgctccccccttctcctggcctttgttggcgctgggccgccgccggggagccctccccagacccaggcgcggcgttttacctgcagcggctgtgctcgccccgccgcgacccccgcaggacggagccggatccccctgcactcgggcggacctgggaccctcagaggcgagccggctgcctcgggtcacacatccgcgaactccgggggcgggctccccaggacgccgccgaccccccacgacccccagccctcccgcttccgtggaaagccgccccgacgacccctgtgcgggctgttgaggggccgcaccccgccgaccgctgtgggaacacctccgcgcgtgcggcggggacgcggcgagtccggggcaggaagaacgcacgggtaattgcaccttcggcaggtgttgggcgggagcaagggggtcagactcgcgctgcagggggagggcgggggaggcctcgctgtcctggaggaaggggacaaagacccctgcccaggagcctgggagcctttgaaagtaatgattttttggcgggggggggttgtcacgagacaccctagacatttctaaaaggccccctccccgctgccgggtggagagggagcgtggggggatccgccttctgcccccgagcccccagccagcctgggccccccagggtcaccctggggctctgaagggggcttcggccgctggttgaatgaagggccacagaaaatgaagctggcgcaacgaccgcagaaccctcagtgggcaccaggaccacggagctcagggtgccaatggtgatggctgggggtggggagtactgtgggcagcaggggat

SEQ ID NO: 55453 - DNA, 1517 bp, Homo sapiens
ggccagcctgaggggagcggcagtggcccgtatggggtgggggtggcggtggagtgcgtcctggcgcagagctggcacacagcacaaacaaacgccttggcgggagtgggtctgtcccggaagggagcccaggggttattggggttggggctgcgccccaaagcgggagggccctgcgagaagggaggccctggctggagggggaccctgagactggaggtgccggacccggatgcggggccaggtgagtagggctgcctgctgcagccttgctgggtttgaaaagtgggggaggcttggccctgggagggggcaggaggattcaggctgagacccggagggggcgaaggaggtccttgaggaggcagtcacaggcctgaaaggacctgggacccgcaggcatgggagctgttagccgttagatagaggggctgtcgcctggggggaagcctcacctggcttgttccccctgccaggcctaggtgagcccgatgggcgtgtcttctgcccagctgggatgtggccagcatctgcctgtggcctgggagtgcccattgtcccctaagagctctggttataccctgggcagctactggccaggctggagcaggtggcaggcagcgacctttagtccctcctggaggctcccagggggcggtttggaggggaatacggctcccctggagggcctgggctgtccctggggggcagagtgccctgggcggcgattgttataatccccgtagccattttcatgcaaataagcactgagagcgttaggttctgcccctaaccaggctggcggactagggaggtggcaccctggggaggacggtggtttttctgcagccccgccttagttccacgttgcctttgcacccagcagaggccggcctgggcggtgggctcaggggcctgggtgcccgaccaggtcggctcggctcagctcagctcggcggccgcaccgcctcccggcacaggtgtggacgggggtgggaggcgcgaccagggagggggctgcggtgtcagtcccggcccgggcctgtagacgccgcctcgggggtctctggggctcgggaggaccttgcgaggggccggggaggcgccaaggccgcggcgagggacgtgcgggggtccagcagcctggggcggggacgcgcgctccgggccgtgcaggtgggggtccgagcggggccggcccggcggttcgcgcgcgccctctgccgtccgcaggccgtggcgcaggctcggccgcctgaagctcctctcgcctccgggaggacgtccaaggtcgtttcttaaagcatccctattgcgcagaaggaacagtggggttcacttttctcgctaatgtgcatataatcgttgcaactaattatgtgtagcaaacctccatgccactatttccccaacttttttaagtcaaggcatagctaactcaatacaatgcccatcccagctgttcaagtagactttttctcccgttatttctttaaaaaccgtatgattttttcttg

SEQ ID NO: 55454 - DNA, 1095 bp, Homo sapiens
ttaaaaaattatatgcgcacagactctaaaggaaaaaccagagacaaaccgctcatattccatgaaccttccttctgcataaaccgccacgtgtcgcttggcaaagccgtgggcctggcagtggggttagcctttcccactcaggaaccgcgctggccacgtttctgccggcatcagcgcccctgagctgctttccaaagcgcggcgtcaggaacgtcactcttcactgttgaattcaacgtgggcacctttaatggctcagtcatttttttaaaaaaaatcaaaattccacgcaggggccttggttccagagctccctttccaggaggctgttgcgcgggctggccaccaggtggcactgttgcatagcaaaaggaacgcggctccgcgctggagaaccgggccgggctgcgcggaagccctggagggccagccgggtggagggagctgcaggagggggcggcgtgctttccgggggtgcaacttggttttccctggagggataaagctctcctttggcaggtgcctgggggtgccctttaaagcagggagcccagggaagacccagctctcttcctgtgagctcatccctggcattcagggtgaaggacctgcagcctggtctcggaaacggccctccaaggcctccttgtcccctgaagcacacaggcagaccgcgggtcggggtgcaccgtggctgtcccttccctccaatgctgggcgacccgggcgggtggccaccgcctgacctgggcctcctggctgccagcctgcacgccctgggtgcagaggcaggcgagcctggcctggtctgaacagtcttatgaggattctctgggcccgtgtgctcccgcctgcccctgaagggcgtagtggaagcatccgaacatgcactgggtaccctcgtggcctgggacagcccttccctgctgggctccttgctttgtgttaaccctgaggcctgggagcctgagttggggaaacgggggactccagacaacacccagcttggatgccggcgtccacttctgctcagagaatccagtcaactcagggctttgggctttcccatgaccaaagaaaagaagtcagtga

SEQ ID NO: 55455 - DNA, 802 bp, Homo sapiens
aggtcactgtggctgttttgtgatgcgtgtgtgggctcatccctcagtgctcagaagctgcagacactatggaaccgcttttcaggccccgtggccgtcacccccgctctagagacttgattgcagggaccatgcccggccggcctaactgcacccctcactccaggtgggtggggggacccaggcctgctggcccctgtggtggtgcagcccagaaggtgtgaatcagtttacactgttcagtgcctgaataaaagtcacaggacaaagaggacttggttgcacaaactactgacatgaaattcacattttgtcctgaaggaaacgcaagatgaattgaactcatgttcagtttttatttctcatttctcccgcctcagtctcttctcacgtgcacgacctcacagcgctgtcacaaggcctgctgggcacacgcagctcatagagaagtgatggcttcctccttgccccctcacctccctccttcccctctccccctcacttcggagcacgcaggctgattgtggagacatctcccagccaggatgtgtcaacagggaatgtgctggggacagcgggagttcacagccacccccgcaggcgccttcctggagcacgtccacaggccatgtgcagctgcatcccccacgacggcagggacaagttccttccatagggcccgggtggcccccagagctgcaccatttatgatccggtcctttgcagaacgcaagggacagacacatgaaccctgacctaggttcttgtgcagaaatgttctctcatcggaatagaaaggtat

SEQ ID NO: 55456 - DNA, 3263 bp, Homo sapiens
ccacgttgtcatcatgtattattattgtacatattactgtatccagtttgctaaatgtttgcctctatgttcatgaggggtattggcctgtagttctcttgtgatatctttgtttggttttggtatcaggataagcctcgtagaatgtgttaggaaatgttctctggtcttcggtttcctggaaaaagttgtacagagtcaggattctctatttgttgactgctgggtgaaatttaccagtgaaacaatttgacctgtcatttcctttgtcggaaggtttttgaactacaagtttaattttcttaacaaatacagggctctttggtttatctatttttttagtgactttaataattcgtgtctttcaaaaaaatgtatccatcacatctgagttgtcagatttattgacctgaatgttctgaatagtccctttcatccttttacatatttatagaatctccttctttcccaatcttgctaatttgtgcagtctctctctttagtgattagacaggggaaagattaatcaattttatggattttctgaaatcatgtgtgcagagcagccacgggatagcacggcctctgcacgctgtggggtgttcatcagctggacaggcagctgccacctggacagagtgaaacccaccgcctgagttctggagtaattgtcccaaggaggacctttccactctgggttgtcctggaaagaggctgctcctcgtctaggaagtgaggtcctgggcaaagacctcagtgggagggaggagacatgatcttcctgagtctcagccccaaggcaccagcctggatccctcggtgtgctgcccagagctcgtcaggcactgatgaggattgagaggagggcaggggggagcacccacgtacgacaggacacacacacacacacacacattcccctcctgagacatttgcatccagggaacatgcaggcaattccttgtttgtgcaactaaaactccagagtcccccaaagtgaaaacagcaggcggctccgaagtgaactgcaactaccacctcttccgagacagaaaacgctcagtactgggaggacagggtttccagatttttcttccccaagtaggttccaaaaataccaaggcactgagtttcagccagggcacgcctcgcacctggcctggtcccggggatcaggatgcactctccgcacggagccctcttcttggtggcctctgcggcctctgcaacggagcttgtcctgggacaacaaaggtcttaatctggcagctcctcaaatgaccagccctgggaagggaacatggtcatgaaaataataagaaagaaaaaggactacagcaaaacagaaaacctgatttaagacagcaggacttttgaatcctgatacaacaggttatcagaagaacgaataaattaaacttaccaattaaaagacacaagagtatggatggagttaaacgatgttacccgcgagagacacagaatagttgacaataacaggaagggaaaatgcaagccaattgtatgtggactgaaagaaggctacaaaaggattaaaacattaagccacaatgcagctttctgacagtcaaatgatcaacatacagaaatatattttccaaccacagggcaaaaaaaaaattagaaattaagtcacaaaagggatagtgcaaatattgtatgtttggaaaccaaatagtctattaccataaatttggggttaaagagataatcataattattaaaaagtaataaaaacattgcacattagaaggacggggcagagtgaagcagctgttactgagaggtgtacggtactaaatacatttctcacaaattatgaaattggatgtctacgcagatgttttgcctgtttctaacggagctgtttttgtcattaattttttagttccttttccattctgggttcaatctttcatcagtgatatggtttgcaaatacatcctccagatctgcgacttatcttccgatttcttgttagtgtcttttgaagcacacatttgaaaaaaattcgatgaagttcaccctatcaatgttttattttacgatcttatttttgatgtcatggctaaggaattgcacctggcccacagcttccttgactttctcccatgttttctacaagttttagttcccggttttcatgtaaccctctttgtgttaattcttgtggaggacatgagatagggttccaaacttctttctcatgtggctatccagatgtcccagcactatttgtggaaaagactgtctgtcccccgactgagttctgtttgttgcctttgtcaaaaatcaattgacaatctacataaaacgttttttttttttcctggacttttgatcctgtttcattgatctgtgtggctacagtgaaaccaatacgagactgtctttgttactaaattttgttcttttaaaaaattgttttatccataccgggtcctttaagttatttttgtcatgaagtttttagctcttttttctattctggatacaatcttttatcagttatatgatttgtcaatattttatcctaatcggtggctttcctttcattttcatttgtaaatattaggatcaatttgtcaaattttgcacaaatgcctgctggattttgacagggattatattggatttacaaattgccatgttaacgtgattgtgcctctggcccatgaacacgggcggcctccccagttgctcatgttttctttaattcctctcagcaggatttgggggttttagcatttaactcttatacttctttggttacgtatatgcttctgtattttattctattattatttaaaattttcttaatttcattttcagattgtctattactaatgtatagaaattcagtggatttttgtgtattgatactacactctgcacctttgctggattttttattagttctaacaggagtgtttgtgtttattctgcttagggctctccaaaattctcaaatatgtgattttttttgtctttgactagctttgggagactctcagccaccatctctccaagtagcttttcttccacgatttcttctttcctcttaggatcataagtggacattcactagagtgtgttgaagtgttttaaaggtcttggatgcttgatttagttctctctctttgtcttttttctctttgtgttcattttggatgacttctactcacctgtctcccagtttatggattctttccttagttctttccagtgtgttaattagccta

SEQ ID NO: 55457 - DNA, 736 bp, Homo sapiens
caggtgtgagccaccacgcccggccccagggagggtttcctcagtgcccctacagctccattgcagcaggcccttcatgcctgaaccacagaggtggttttctccatgttcttgccccttcgttcattttacgcaacagatatctattgagcaactgccatgtgccagacactgagctcaagtatggtttattctagcgaggcaggaagagcagtgggtctatttatgtgattctggaaattcacaaaggatgaaacctatgactactcaagtattagctgcaaaagctggtaaagttcaacaaagttcgaaagcttgctatggttcagcattcgtttatgttagaaaaaaagaaaaacttgaaaagctattaatatctaacttctgaagaatatccctcgggaagtgatattaaaagtcacatagaaacattaggagaagcagctactacctgtcttattaaacattgttttgaatgatagcattgggacacactaaaaactaaatacagttcaaaatatttaaaaggaagaaatgaaacaactagaacaaaagctgagtaaagatacaacattataaatcaacggattttctagacactatgtagagaaaataccacatgacaacatttcccatttataattttaaaattatagaattctatgggcagccgggcacagtggctcacacctgtaatcccagtactttgggaggctgaggaggccaggtcacttga

SEQ ID NO: 55458 - DNA, 1172 bp, Homo sapiens
tgggacagggccgtggggagtgtgacagggccatggggagtttgacagggccgtggggagtgggacagggctgtggggagtgcgacaggtctgtggcgagtgtgacagggctgtggggagtgcgacagggctgtggggagttttgaaagggccatggggagttttgacagggctgtgcggagtgtgacagggctgtgcggagtgtgacagggatgtggggagtgcgacagggctgtggggagtgtgacagggctgtggggagtgtgacagggctgtgggaagtgcgacaggtctgtggcgagtgtgacagagctgtggggagtgcaacaggtctgtggcgagtgtgacagagctgtggggagttttgacacgtctgtggggagtgcaacagggctgtggggagtgtgacagggctgtggggagtgcgacagggctgtggggaatgtgacggggctgtgtgggagcaggtggtcctgtggggcatcccggggtctgtgctcaggctgtgggaggtggggctggcaggggatcctggagaaacacctttgggggctcaggtttggtggagctcccacttccacagtggctctgagtggggcctgagcaggttttcctggcagtggctgagggtgggtgggcctggtaggtactgggctgctcagaagccagccagctccatgttgcccacctcagcctcccaggcttctcagggcccagctgtgctctgtccctggggcccttccctccccggacactgctcacccctggcaagggctctgccctgggacacaccctgctagaccctcagatctgatcccagcccttcccatgtgactccctgggtgctcccagatgactgggatgtggggaaggatcaaagagcactttggttgtctctgtaactcttctagtgattagataagggctggatttaaggattacttctgcaatgcaaatagatgaaaggaacaagctaaataacaaactcttcccattcccagaacaaagtcagctctggcctggttccacgtgccctgtccagcacgtcccccaagcgcaggcatgggcccccggaccagccgcggacccctcctcgcgctttgcaacgcctcacagctggccccgcacccctggggcaggaccactccctcttcttattcttctctgtgtca

SEQ ID NO: 55459 - DNA, 1509 bp, Homo sapiens
cgttctaaaccagcatcagtgcatgccacaaaatagaagccgtgcattacaaactagaaacgagggcttggttgcaggcaccttccctagagaccctggctgagcagaggctggggtctggctgcgctgctctgacggtgtgcacgggcgggctaggcactcgccctgagtcccagaaagaggagcccacagatacaaaacttaaaggatgtgttattttattttttaatttaatttttgttttttcaaaagcatcaaagtcattgtgattggaaggaatgcgcaagttggtctggggtgctgtccctgggcgccgaaccagccggggacatggcccctggagagctgccgaccccggggctaggggagtggtcttgcgaggagcctttgcttcccactcgccggccgccccgcggggccctcctgccaccaggtggcgcttctcggccagcccgggccgcaggacctgcagtctcgtttccccaggaatggcgacggccctgttattcccatcacaattttacaggtcagaaaaggagactcggagtgcatatatagcaacttggagaaagtcgcaagggacgaaggacccttccccggacacaggaaccttctgggggatggggacagggactcaggtgcagagaaaaccagagctgctaccgtggggacagaaagggagtctacccagagacagcagaggcaggagctgccccccctctttgcccccagtggccccgagcgaggggttgccaccacctagagcctggggaccaggggccagtgcctggggacggaggccgtggtcgagacaggcgagggatgtggcggagacagggaggcccaggtcggctggcacagggcaaggagcaggcgagccgaccccagggccttgcccttgtcacgccccctgccatgttcctgctggcccccttcctgttctgtgaggtcaacacgcaggagaaaggggcagaagggaaggtctccccacaccgagggctctgcccgcttgggccaggggttggggggtggtcatggcaccagggctgctctgagctacagccccgagggggggccgggcgatgcctcctcctccgtgccagcctgtgccggggcccctaggaacccccaagtccctgcctgtgacctctgcagagcccagcaggcgcctccccgccctcggccacaggctcggagctcacggcccccagggggcgctcaaggactgctcatctgcgcttctgccgcgggcagctctgacccctcccgctgcgctcctccagccgcatccctgcagccttgggccctactggcccgggggaggaggcactgcgctttggggaggaagagagactaaaggggagaccgagaaccccgggtcaggaagcggagagctaaaacgacaaccgtgggtcagcggaggccggcaacttcatttcatgacctctggcctccaaagcagctctgcaaagtggtcaatgctcctctcgttgtgtagatgaagatact

SEQ ID NO: 55460 - DNA, 1675 bp, Homo sapiens
atctccccactgggcctcagaaggcccggctgtccccagagccaaggcccatactggagggaggggcatcacggggcccacagctgccaacagccacccactcccacctgctcagcctgcagggaagatgggccaggtccccagccctcggtcctaatgcccacgggtacttggggtctctagacccctggcttctgtcacctacccctgctcaatacatggtgaggctgaggacttccccacggaaaagacaaggccagaggtcaagccagggtggggacagacgtggccctcagcctgagccccgggtgcaggaaagcccggcctggaagactcccctggtggcccgcagtccaaggtctgagaaaggaagtgacttcctccccaggttggggccatgtcaaggtctgattctgggtgtctcagtgcctgccctgccctccagggtgaaccccaggcttggagggcttccaggcagaggggttcagctggtcaaggggagaaggtaagccttacaatcactgcctgcccagcaaccctgccttaatggcccagggcctcagtttccccgtgtgtacacagggatagcaggcgcaggtgggggtgctgactcagggatcaggcaagtacaaggggtcccatgccgccgagcctctcaggaggcagagagtaagagggtcctggagtttggggtcgcctgggcgcccgcttcccccaggattggagcctgggccaccgtcagccaccagattcctggcaccagcccagcccaatgtttctccaaccgcctggcttcacggagcagcagcagctgctgactcatggccccacagaagtgaccactggcagggggacactcagcaaatttccatgtgtgtgtgtgcatgtgtgcgcatgcgtgcatctgcttgctcgcgcgctaggacaatcaggaactggccagtcgggaccaggcacacggcgcctggttccccccagggcccccctggcccagtcacatgcctgtgagtcttgggcttcctgtcacagccaggactcgggccaagcaggacagagggcaaggctcccccacagtgggccagagccccgaggctggacagtaggccctggcctcgaactgaccccatagagctgggaccaggctgaccaagccccagcttgctaggtggcttccagagtgctccaccttggatcctgcttccccctgaaggagtagtgggcacaggaggggctgttgcgagaggaagaagatggggaggggctggggaggccacgagtcaccacaggcctcccagcaggacagcagtgaaaggctccaggtcagccggccacactcaggcaggcccaaggaccgccccctcaggcgagctggcaccaaggcccgaggccactcccaatcaccctcccaggccctagcaggaccaagaccctgcaatgacaggggccagtggcaggaggttccagaatggggaagaaaggagtgtggctgagccgggacgccaccgtggccaggtgagccactcaaactgcgctgctgagaacaggaggtgggaatgttccccatactgccacggagctctcctgacagtggctccgcttgcagcagggctaagacctcatactcacgtccatgtagttcttgagcacctcgggaatgggcccctcggtcacggct

SEQ ID NO: 55461 - DNA, 3139 bp, Homo sapiens
gccacccacctcagccccacacacccaacctgggggccagtgtgcccaaccctcctctcctcagccattctggaggctccaaagcccccaagggtctcccgtcctccctctgcacctgcgctggtctcttccaggatggtggccagcatggctgctcagggtgctggcgggtacctgtcactcctgcccaaagtgctctgaggcagcccactgtacccagcccccatcacacctgctctccacccccagacacctgcacgaaggtggccccacctccaggctggcactggcagctctgcctggcctcctctggccatcagatgggccctccacaccacctccagaagccctccttgactacctgtcctcctccacatggaccctgtggctgcccagtgccctcatcccacatctgtttctgggcatccgcacctctcctcactccatgcggctccacgaggtccaggactgcacctggggccttagaggcttctgtgctgccccccccaccgccctgcctcctccgacagctgcactcagggtacccctccagagtcctgtcacccagcacaccgccagccagggtgcaggagggagctccagactgagatcggggtcctgagttctaaacccaggaagcgagtaagagagagaggggtccctgctcctcccccagggccactggccttccccttggtgtgaacccactccttgttccaaggaagctcccctgggcttttaatcacttaaataaaacctcttccctgccccagggacttgagagtacaaggtcatagctggcttttcctggcttgtcaggggcgtgatcccggaagatgagattattgcctaagagctggtgggctggaagagctccaggttttgtcctgggggagggacacgccctccagggaccaggaagcaggtgtaatagtatcagtcgcacaagagctggaatcgggtgagggcttggattcagctacccttccctccaagaagccccaggatcgtttcccctctgctgtgtctgtcctccttggagaggggaggcctgtggataggctggcaaggtcaaggcaggctcaggcttgtggctactcccccacaacgactttaattggggctacccgcccccgggccattccccacagcctttggtgaggctcagtcctacccagctggcccagccagctccagcccctgcagccttctgacctcacccacctgccaaaaggcagtggacccatcgcagatcccaggtctcccacaaaggcccagagcaagggtggggcaggtgcccaatgggatgggtcagcatacccctcctgggaatgcgggctgccttgcaagggctggggagggggtcaagaaagcagactgcagcatggccctcctctgcccagctggtcaggcatggccgggccccatcccatccaggcccaatcggtggcctcacctggcacaggggatcggcctgaggagcgtgtgggcctcactacagcacaaccccaggcccggggtgggtgagccgacccactccccatgcctcctcctctctcagggacatgggaactcctagggtctcgaggggtctcccagcccagggcctgtgataagagccgctggagcaaacttttaaagcccccagttcacaggtggtaaaggggtccctaaggaaatggactcgcccagactcgggggctctgaggcctgacctaggtctccagcaacaagggcgctcagtacagaccccaattccacctgccccgaatgagcactacctccccccgccccgccccgtctccagggaggctgcggtcagtctgcagtcctcaaggtacaacccagggtggcatatgggggagaggcatctggcgcctctgccccgggtcccctgcacctccggagcccggcgccccgtaggcgggtggtccgtgcaggaggccgcgcagggcggcacaggtgcattccagcgcggggggcgcaaggggctcgtgggggccacaggggagcgcgaaagtcaccacaggccccgggacctcggcgccgcgacccctgcccgtccctgagccccggcccctgaggcttcacctgacgagcgcggaggcgggtgcagccagcaggcagagggcgagcggcagaaggctggagggctgcatggcggcggcggccgggtcggagagggtcgccgaggccgtgcgcttatagccgggatgacgccgcagttgggccggatcagctgacccgcgtgtttgcacccggaccggtcacgtgggcgcggccggcgtgcgcggggcggggcggagcggggcctggcctgggcggggcaacctcggcgcacgcgcacagcgcccgggcggggggcggggtggtggtgcgcctgccgcgcctacagttcccgccgctcgcgcccgcggggtcagcccggcccagcttctggggtctggaggattcccgtttcggcctggcctggggtcgtggggcggcccaccctggagggccccgcggggtgacccctgtcccggccgccgcggccgtccccgcgtccaggcctgcgcggggcgctgcgccgtgggctcctgcacctgctcctcccggcgccccctcgtccccctccgagacgctcccagacatcctctctggaagcctcttgcaaaccaaggttaaattcaaagtccccagcccaccgaatggaccctccgctcctctacagggcttccagagaaacctggaaaaccagctcaggccctgccgcaaagggggtcggacccgctccgccctctccctctgggcgctgtgcttagagactcaggcctcaccgatggctctagcctccagatcccaaattccagcctcacactggcacagcctcacgtggcagacagcaggcccgaaggcaggcaaagtattccaccctaaaatacattcctttcacatgttttgatatggcactgcacagctgtctcttgagggggcgaaattcgcgttttctagagaagctccttcccttaggaggtcgggcaccttttgtccactcacgtcaactcttttttttttttttttttttttgagacagaatctcgctctgtggcccaggctggagtgcagtggcatgatctcggctcactgcaacctctac

SEQ ID NO: 55462 - DNA, 733 bp, Homo sapiens
tgcagagaaccgcgcgcagggcacgtagctcagctgtaccctggggccagcgtcgagccaccccctgcatgtgtccccttgcttgcctaaaagccccactagggcagcctctggcccttctcatcccagattgagtcagactaggagacagacccataccctgtgcaaacaccagaaggacgtacaagtccccacacgcccagggccgcgtgtgaccggacgggcccagacgtgcacatgcatgcccacacgtcctcctgctgtggcccgaaagcatcctcggagcctgggctatgtcctccacacttgctgcctgaccagccccgtggggccggccccgctgggacaggttttcccgttaagcattaaccaccagcagataagggctctgagggaacgccctgacctgggatggctgctcctcggtaggcccaagtcatggatctgactagagtgaccagaccagactaactggcagagcagagggagaggagcttaggctataggctctgctcgggggtccaactgaagcaagaggcactgaggttagaccagagtgaggacttccagccactcacccgggggccagctgataagaggatcactcattaggaaaccaagaactcaagggattgggtcagcccagcaggagacaaaggcacagaggggaatggcccgaaggtgcctggggctggaagcagaggcagtggcggagccaagccggcccacctgg

SEQ ID NO: 55463 - DNA, 868 bp, Homo sapiens
tggaagaggtgggctcacgctggccttggagggtgagtcggatggggatgcggagaggccttctaagcagcttggcagctgcaggagcagagcagccgccttcgtggggagagaggagccggtttccagagccttaaggagcccgctggagcggtggccaggggggagccggggaggagggaccgtctccctttcctgggaaaacatggcgtgaactcccagagaaggttttcccagcagggccacaggagacagacagccaaagctagacaacggggagagcagccccgggaggctcaggcagggagggcgggggattcccagatctgggaggggagacccgagagcccccagcgcccaagggtctccagggcactgtccccgggagccatgagggaggccgggtcccgaggggcggacggcgccacctggtggccatgcgcccgctgcacctgcacctccctggggtcccggcggtccggagggaccccgcacctccccaggctttgggacccccagcatcggcagccagcgcccccagggtcctggggttctccggagcagcttctgggtggcccctgtgctcctctggggacaaggtcaccaggctggcccgggagtgccgctggccggccgcggcaaatcactgcaggggagctctccccgcccggccctgactgttcttagactaaaggaggggggacgccagcaaagcgggggcacaggggaggggcgcacgcacacgcacacgcacacatgcccgcactcacagatggagattctgtattggcaacttatccggaatctcaaccataaaaatctggagtgaagctactttaatctcagcatgtatacaggctctgacatt

SEQ ID NO: 55464 - DNA, 612 bp, Homo sapiens
tcttccaactgtcaaggcaaaaggttgtccacatataggattggctgcaaaatcctccacaaataaaagtataccccatgagtgcacataagagatccctttttagttctattattcagaggcatgacagtctcaagttcttgggaaaaagctgtccatatctgggatgccagctgcttctggggagaaacttccctgattagctttaccttaaaatctccaatggggctgcagttgctggagtctggcgatgccctcttgagcggtgagataacgaacccagggttcaaagtcctagaatttcactgcagtgtgggtggcaagggcagtctttctgtgatactctcagaaaaccaaatgtctgggttctagattgtgaagcgtttgatagggtcctcagtggaccatgaaaagctttctgtacctggtgaaaatatacttaggcataatgcattaaggcctaggagcctttagccatatcggagttgaggagtggaagatacatgaggttctatataggacttccagggactatttcataaggcaccaacttatgttttccactggaaatggacccgacggccatccacctgcaacacccttgaccaaggc

SEQ ID NO: 55465 - DNA, 2030 bp, Homo sapiens
ttctccacttccagctcccagcagctgcaagcgcagcggtgcggggccaggctgtggcctggagctgccaaagggcaggggcacgggtgtggggggcgtgcaggccggggtcccgggaggcagggcagacaggcccgaaagagtgcgacggcggcgggaggtctctggggctgggaggggtgcgggcgtgggcggggcgcgagcagcaggggcgcgggcccgggcttcaggctgtggggccgggagtgcggggcgggactgctgcggccccgcgtcctgtggagtctgcggcgcggggagtgggggtcggggcggggaggaacgtggggtgcgggacaggaggggggcagggagggagaagaaggcggcgcggggcggggcgggcgcagggctggggacggcacgggcgcgcggcacgggcgctggcgcgtgcggggggggcggcgcggcctccggaagcgagggggcgctgtgccaggcggcggccgtgcggggcgggcgcgctgctccttccgcctcgcggaccccggaagcgcgcgtggccgccatggcgcggaatgtggtgtgagtaggggtcgtcacccccccgtcgcggggcgccccttagtgtcacaagcagacggaccccacagggcgcgcggactccggggagcggggtgggcgtccctgggccgcctcctggcccgggcgaggcagggttctccgggaccccctgtcatgccttgagacacgcgaggcgggtggcggaggagccccccgccaggtttagggcaaccccagggggcgggcgtggccgggctggggacagagggtccgagccaaacccatggaggccacggtgcccccgcgtggggagtgggagggtggcccggggtcaggcccggggctggtcccgcagccagggccgagggagctgtttggagacgtttctgatcgtcacggggcgggggccacgtcggctgttgggtccaggcggggaggcccgggcggcccccaccgcagcgcgggcgcggcctgaggcagaggagctgggaatccagattgggtttgagtgggaaagggcagctgaccgcagccctcagggctttggggcaggcagggcgggaggcccggttctgctcagcccagaccccccacgcccactctgcatgttctctggattcccagggggccatcggggcgctgtcctgcaccacttcgccctccccaaattgaagcaggaagccctgcatatttcttggtgaacgaatgactcaggcgtaatcagtagatgtgggctcccgggtgggttttggagaacagtaatcagtgtttctggagagggacggtcaaggggccagggtgtggctttggaggcccctgcacatagctggggagagaggggagggtggcaggtgggacccccagtggaggaggcttccttcagcagacacctgggaccggtgctgcgcgtggccctgaccttggggaacacccagcaccaaggaagaaaaggtctgagtgaggccaacactgccctgagcctcacgtgaattccacgctggcccttcgcctgtccctggagaatgaggaggaagtgagggtcagaggacccgggtggggtgttcctgaagggccaagggtggtgggcccctggaaacggatcaggtgtggttgccttggaggcagcggggcccgctcgcccagcagtgcacacactcctgttgccagggagcctttgcagggagcgctgactggacttgctgtggactggatgcagctggggtgggggtgccgagagggtgggatcctgggtgagtcactcgtggggccgtggggaggcaggctggtggcagtgagccaggtttttgtgttttgaggaagaagttagtgcagagttctacttgagataggttaccgtggaggtgcttgtgaaatcccatgcggagtgcttggggtgctccctggggagagtgggactgagggaactgagggctggtgggcccacaagggttcgagaacaaaagagaggccttagagccctgtcctgg

SEQ ID NO: 55466 - DNA, 1491 bp, Homo sapiens
ttacagtgcccatttccctgagaaatcgcctttttgagtttttaaaaacatatttacatttttaagagagcagaggttcgttttagtggcattgacctctgaggatgtaattttttaaagttctgatttttttaaagttctgatttttttttcactcccttccggcaggctctaacaagagaagagatcacagaaacgtgaggatcaagaagccggactacaaggtcgcctacgtgcagctggtgcgtgtgagctggccagccccagcggggcctccgaggggctcctcgcaactgtgtccttggggatgtttgtgccggagacgctgcgctggggcccagggagcccccgtgaggccggatctcagggcctcagcgcagaggcaggctccacataaggtcatgctccgtcacggccttgggggtgttagtggtggcgctgggagcacgtgagcactggggcacatggggcacgtctcagcgtccggccgttttgtgattttgaagtttgaattctctgtgggcaaaggcagccatcacaggcctagtgggtttcaactccaacgcacaccagggtgtcagagcatgggaggccccggcctctggagagcctgtccttggctgggtttcagcctcggaggcagagtgtgaggcccctgagggcaaaggtctttggtgccaaggcaggtctggctggccgggctgttggctgaggcccatgtcctgcattgcagggtagcaggtcccacgtacttgttagggctcagcaggctgcttctgagcaggtgctttcttacgtatcctggggggctctggggaggaagaaccctcaccccacgttgcctgggccttcagtttctgaaacccagacttgtcaggagtgagacccacagtttcaaagcctttctttgggctcttcattttgagtcccaggcaaacccagaggcactttctctctgggccaagatgtccacagcctgccccggccgcctcctgggcctccccactctgcccctggggctggccttactgggtggggatggggttgtcttccggtgtaaatggtccctggaggccgagccggcgggccctgccactagatggcagtcacacgatggtggaaaccgcctcctgggccagccggcctgttgtggggctaaggaggcagtttgtgaaaaaggccaagttagcatggcagcttttctgaaaaacagtcacatttgttgttctaaacaggggcccccggaataatttggcctgatatttgctgtgcatgaaatcagccaatccaggtggggagagcagccgttggcctcataaaggcctctgtgtgctcagtgtcagtcgggcccatctgtctttgtcatggcatgtgggtggacatcccgtgtgccggcaccgccacgggcacttcagaggcagctacggttacaagtggcattcaagtcatccgagcccttgcgttcttcctctgggccccacctcccatgaa

SEQ ID NO: 55467 - DNA, 1371 bp, Homo sapiens
tgcaatgcccccaccatcatcatcagacagctcctctcattcctaagccccatgcccttcagagtgcccagcagggccccccacagcccccatagtccctgggagtgcctggcagggccccccacagcccccaagagtgtctggcagggcccccacaggccccacagcccccgggagtgcccggcaggggcaggatgcagctgctcagaccctgggtggtggccagaacctggacccgtggctggtggccggagtgcatcaaaagtgaggctctgatgccatctgctggtcgcacccgtgaatggcggctcctggccacattgctgggtgtggaaaggtgcccatcctggaaacagctacctcacagcctggctggagagagacactggccaacgttcggcccaagttctgcccagggctacctttcccagaaactcaggcttaaacactgcctgtcctggcctcagtctcttccctgggctggacccctgctgggcaccaggacccgaagggcagggggctaccctcagcaccgctgagtccacactcatccccccggggtctgctcaggcctggagagtcctggagacggaggacagtaaatatttgctgccgacaggggaaggcaaacactgccccaacggccaggcaaaggcgccagttatccatgccaggagcagacgcaatctagggggccagcctggaggcagccacaccgcagtgtgtcctgggtgggtgggagcacgtgccatgtgcctggctccaggcttcagtctctgcttaaggaatgtggtataagagtttcctccctgtgcagcatgtgtgaaggcaggacgcccagacagaaggctgtgtgcgggatggcatgcaggctgccctcggtcctccaggaatggacagaggcttctagaggggccagcaggtttggggagacttggggagcagctgccttgtgactggggagcagttagatggacccaatgccagggtgaccgccggggctggaggcagctgagtgcccctgccagcccggtgggcatgtgaaaccgaggctccaaggccaggcaggtctctggacactgaagggctgtcttttagcttcccagaaggggtggagcatgggcagcagcccagcaggcattgcagagccaagctctgtgggcctggctcacatggggtgacctgggggctccgggagcatgcacactccccgccagggcatctggggaccggcacccaaggtggtgcctgacaggagactgggtctgatgctgcctctgccacctggatcaccttggccaactgcttctcattgggcctggggggatggaggggcgatacctcgccctggctgcggtctcccgtgtccac

SEQ ID NO: 55468 - DNA, 1621 bp, Homo sapiens
ggctcctcctgctgccctccactccaacacacggtcccccacagagcactgaccctcccctcccagaaggggcctctgcccatcactccctacggccttgttggccatcagggtcagccagggcaacagcttggccgatggctgactggtgggcagcctcccagccggcccaccgggccccgctttggcccagccccgcgcgagctcacatacctcagctccagcagggcgcccctgtctctacccgtgcgagtggggccggctgggtgttcccatggacggctgctgccgatcccagccaccgcctccctcctcttccggggccagtgtccggccgtccacccgcctgcccagccttggcccccactctggaggcggggctagctgggggctgtgacatctctgggtggaggggggctgatgtggtcatggggaaggggtgagctcagagcttcaggaacagggctgccccagtggccaggtccccagctggagggtgagctcctggcctcgaggcccaagctggcagtggtctgcagccacagcccatgccagccccaggcccagccatccccagcccagccctgggtggagctctcaggaaaggtgcagattggtttggcctgggtggcaggcagactggcccagccacagggtagctagggtcacccgctgacctcccaggccacagtaggcccaggcagcccctaggttctcgtctgcccactaggctgggtgcccagcggagccaccctgtcctcaggggtgctgcagaagaggctctgtgtcaggacccccaaggacctggagccacaacgaccttgtcaccagggcccgtgggcccttctgggtgagcagcaggtctgtagcaaaggaagccagccaagcagccctgcttactgggagggggtgggctaaggggctgcagggggaccctggccctggtctctgcccctgtggccctggcggttccctgcttctcctgggctgcaatcctcagggcctcatggccggggtgcccaaggcatgggttctgaggccctgccaggtgctgccacggtccctgcacctgccccagctcatggtgccatctgacctctcctgcttcctccaaggcaccagtgggtccctcaggtgtctggctggacctgggctggcataagctgtggctgcagacggctgccagcttgggccgcgaggccagggtgtgtgactgtcccggggctgcccagagctggggatagcgggtggctctcggcagcctctccccaccttcccagccccccgccctgcaggaccccctccctcagcccagcctcctccctccacagggactccatcagaaataactctaaaaatagaacctgggagggctaggtggggggaaaattgctggaatgttctcattccctttcctgaacaaggtctctggggactccaagagtccagagctactgaacaagaagtcacttctcagtggccccaccacccctggcccctcagagacccccgcagctcccatactggaccctgagccacagggtgggggcagcaggcagccgacaggcatggccgctttggggagagccactgcatgctgggcctggccggcgttggcacc

SEQ ID NO: 55469 - DNA, 1301 bp, Homo sapiens
caattcgtgggtggaaggagaggcctcagcctggacggcaagagggtgaggcctggattcagacccccaaacccacaccccaggccctgcagggaggggtcaacccaccgtggacagcttctcaatttcctcatccgaggcccccagggacgccaggccaatgtcctgtggagcagggaggatgaaggatggggagaggcagccctgggtcatgctcgaggtgggggcaccgggggtgtcagcagcccctccaggggtctctgggacacttccctggcggcagagaccttccctggccgcccaggatccgcacctccaccgggcctcctcctccaggcagccctccttgaccacattcctaagcccgtgggcgccgttcccaggtagccggcaggtggcagcacaggccgtgggaggctccgctccagccccgccctatgccgcgcgaccctcggggcgccgagcctccttggcggggcccgggagcaggcagcacacttcacccacccgcacatcgatccccgcccgcccccggcgccaagccagcccctgggtgaccccggctccctccgaggccgcggcgtacctgcgagaactgcgcgaaggtgcggtcggccagcatgggcacgtgccccagcagctcgtggcagcagtccctgcgcgtaggagggagaagggggctgaggggccgcccgtcgcaccccccaccctcgggctggcggccagggcgcgcactcacggctcaggggagtgcatgggcgaggacgcgtggcggatatactgggtgcactggaacacgcggaaggccaggctggccaggaagtcccgggcggacagcaggccggccacaggccgcagctggaagcccgtgcgctctgcaaggggccacgcgggtcactgccgagccgggacgggctggagccgcgctggggtggggcgcttggctgaccatccccggccccccggctctgcgcccctcccgtctgggcacacccttcaggaagcgggagacgtcctccagctgggggatattgtcttcccggtagccgctgaagcgctccagcaaagcaaaggcctccaggtgctccccgcaggcgtgcgtggcgtagaggcccttcagcgtggtgtagacctccttcctgcgggcagccaggctcagggccctctaatgccccaccccagtgcccgaaacccccctcctgaactgtgggtgcctctgcctgcctgagcccctaccaacgcaggcctcttggggacccctgaagacccaggcccccgggaggggcttttgctggtggctt

SEQ ID NO: 55470 - DNA, 1431 bp, Homo sapiens
ccattagaggtgcctctacctagaaaaatagtcaaaagcgatacaataatagtcagtcaaaagctgcatttccagaggaatttcagaggttagtgccaccatcaaatacctgaaagatgcaggggcagtgatccccaccacagccccattccactcacctatttggccagtagggaagacaggcgggtcctggagaatgacaagggattgtcctaagcttgactccaactgcagctgctgggccagatttggttccattgcttgagcaaattagctcatctcttgctacctggtgtgcagttattgatctggcgaatgtgtccttctccacccctgtccacaaggcccagcagaagccaggccagcaatgcaccctcactgtcccacctcaggggcctctcgcctctccagcctgtgtcagaggtaatcctcaggggtctggatcacccttcccttccccggcatgtcacactggcccattacactgatgacattatgctaactggacataaggcacaagaagcagcaattattctatacttgttggtgtcagagggtgggaaataaatccaactaaaattcagaaccttctacctcggtgaaatttttaggagtctagtgctgtggggcctgctctaaggtgatacatagattgttgcaactgaaccctcccacgatcaaaagagaacgacaccaggtgagcccgtttgatgtgaggaagacaggttcttcctcatttaggtgtctgactctggcccatttactgagtgatttgaaaagctgctagttttgaatgtggcccagcagcaggtccaggctctgtgcaagctgttctgccacctgggccaatgacccagcagatccagtctgaggtgtcagtggcagacagggacactgtgtagagcctttgccaagccccagtaggtgactcatagctcaggcccttacagttttggagcaaggccctgtcatcatccacagataaccactccgttttgagaaacaggttttggactgtgtattagtctgtttcacactgctataaagatattacctgagactgggtaatttataaagaaaagggggttagttgactcactgttctgcatggctggggaggcctcaggaaacttacaatcatggcggaagggaaagcagacacattttacatggcggccagtgggagaagaatgagcaagacaggaactaccaaaacttataaaaccatcagatctcgtgagaactcactcattgtcatgaggacagcatggaggaaacagcccccacgatccagtcacctccggccaggtctctcccttaacacctggggattacaattcaagatgagatttgggtggggacacaaagcctaatcatatcagcctgtgtctaggtcttcatagaaactaaacacttgaccaagggccacca

SEQ ID NO: 55471 - DNA, 1163 bp, Homo sapiens
tctggcctggcccctgcaggaagcaatcactggtctccctgtttcccatctggccccaaggtctgttcttgcccttcgaccagagaggtttgaaagcacaactcgggccctgcgtgccctgctccccagggctccacacctctgagcacccgcgcagtaacggaggctcccagccccgcctcgccccagggtcccctccaacactctctggccttgggcctttgctatacccggggcctggaagggccccctcatcccccaagtgtcaggcaaaggtctcagagcactgtccctgcccggcgtgcttggtcctgactgctaggccccaaatcattccttttcccattacctcttggtttctctgtagctggggtcactaccccaaattcttgaattgactgacgtgtccaactatttcatgttttccccctctacactgggagccctacaagggcagggccccctgggcaagaatagtgccagccaggagcccctggagaagatagctacacatgtgccccaggccccagatggcactcagccctgcctgtcaatgctggacatagggcagtttttatcctggctttctacacaaggaggaaagactaaccatgccagcgggcagcggccggatcacgtatgtcagtagaactctgacccctgagaagcctggaagccaaaccacacctctgtagcaatcacgccacagactcaggccacggctaacggctgccagttcacctatttttgcccccaactcaagaccaactggaggaaggcaaatatgtccctgacgaagggtggccgcctccagcctccccagcccagagcctcagcctccccagcccactgcctccagcaacacacatctgaagccttctctgttggttggttttattggtattttggaagattgtttgttttttgttatgagatggagcctcgctctgtcccccaggctggagtgcagtggcgcgatctcggctcactgcaagctccgcctcctgggttcaagccattctcctgtctcagcctcccgagtagctgggactacaggcacccgccaccgtgccaggctgatttttttgtatttttagtagagacggggtttcaccatgttagccatgatggtcttgatctcctgacctcatgatctggccatc

SEQ ID NO: 55472 - DNA, 1475 bp, Homo sapiens
aggcgcgcgcccggccagagagcgagcgcgcaacggcggcgacggcggcgaccccaccgcgcatcctgccaggcctccggcgcccagcgccccacgcgcccccgcgcccccgcgcccccgcgcccctttcttcgcgcccccgcccctcggcccgccaggcccccttgccggccacccgccaggccccgcgccggcccgcccgccgcccaggaccggcccgcgccccgcaggccgcccgccgcccgcgccgccatgggagtggagggctgcaccaagtgcatcaagtacctgctcttcgtcttcaatttcgtcttctgggtaagggctgcgccgggggccggggcgggagggggcaggcacacactccacgttgggcaggtcccgcggcagcgtgctaggccccgcgggcgcagcgcgggccgcgaagttgtggggccacctgtgggctccaggagcggggtggggggtcgcccggggccaccgcgccccccgacattggggctgagggctgcgagccgagtttcggggcctctgtgctcgggggcccacctctgcggccgggccggggcttctgggggccgccgggcagttcccgctgtggtggtgatgggtgcggtggtcgcgggtcgggacccgagtacccggccgcccctcagctaaggaggggcctgcgcgggtccctggccgcggattccggactgctgcttcgcggggacgaggggggggctcgcgggcgggactcctggcgccccgcccccatgagctcatcaagagccgccgcccctggatggtggggcgggggcgcacactttgccggaggttgggggcgatccgcctcactctttccccagcccagctcactctccaatctgcggtcaccacccgagaccttcctgggggtcgcgcctaaaaggagcgcagactcccgccgggatggcccagaagctggggtgcgcgcaccctggccgtccctgcctgggagccgatctccctctcctcacccagacacgttccagcggaggcctcctcccagaagggctctggaggcctcgcaggagtggggatcccgcggttctgagttggcacaaggaagagagtggcaccaggggcctggagtggatggcagggtccgggagtggggccgctgctttgcaagaggggcccccacgctgggcatctttgggtgccagcgtgggtggaggagggtcttttgctgagaatggctttctcctgaccgcagtctttgctgctgggaagtgactgatgggctttcgccttttgtttccatttcctgtcggtgttagaattggggagggggtggaaatcccttcttggcctggaaggactggagtgggtgtccatggccgcggcctccccgtggccacgcccctgggcatagactgcaagcccctccccgtgccccccaggctgtcacccccttctcgtggaagactcggctgatgtcccagtggacc

SEQ ID NO: 55473 - DNA, 1063 bp, Homo sapiens
gagccttgccttcctcatctgtgtaatggatataagagtcttctcctcgggggctggccagggagtccagaagaggtgtcaccagtccccgcagggagaagagcggtgtcccccgcctgggactggctgctcccccaagctaatgcagctggtagccacctcccagtggcagggcagccaaacccggccgggaaagagactgattagaagcctcgctcacgggtatttctcgcttccagacagcacatgactgtcatttggcacgtctttcgccgtccttccgggagaggggctgcaaccctggcaggcgctgtgggggagggggctaggacatcctgtgcctggtttcaccaagtgggtgtgtggactttccctggctcccccaggctgtctggctgcacagctttggggaaacggccactgggtcaagcgggccgagaagaggaagtctgtggtttgtctctgctacagactggccccagtgaggctgtccagcagtgcagggcacagagcaaaagcagggaggtatgggcctacttccccggtcgcccctgtggctggctgtggctctgccgggtgctgacaagtcactcgccctccctgcggtcaccagggtgcatgcccgaaagccctccattctttcctgggtttgagggtccttctcctgcacccaccccagcgcccagttcagctcaactttcagaaatctggttcacccccaatccctttctcataactgcttccaagcccagacaaggagacagaccccaaaagatccctacccctatttccgcacctgaaatcgcaccacgggaagagctttgctcatagagtcaataaggcttagagtccaggcgcctgtgcgagggagcaggtcatcacccttgtacccaccgtggttttagacaggaccctgaggttggggtggggctggggctggagaggagccaggtgccctgccccttgcttgggccccgtgtccctgtgatccaggctgggcgtgctatgggtgctgggtgatattccagccctgcaggtgtccgccttgttcccagcacccctc

SEQ ID NO: 55474 - DNA, 3230 bp, Homo sapiens
tggttggggttgcttagaattttactttgggtttaaaccagggagcaactccaggtagcaagggccctttttgggagcgttctctctattctcttttgggagaggccctgtgttgcctgcagccacttccaccctgccccttgggcacacaaggggcacacagtgtaagcaggtgggcaggaggggtcgggcagccagggaatgcagtgagatgggcttggggtaggggctgggtgcgctgcaggactcctcttcctcctgagggatggtaaaggatggacacactgccccctcccgagcatttgagggtctctgccctgcccatctgttacctgtaaatgttcctttgaggagctgatggctcaggcctgagccacatctcagagggtctggaggggaagaaagacctcatcctactagggagcccccccagcccaccagcgagcggtggttgggggcagacaggctgtggggctaaggagcccctgcactcccccgtccttttccctttgtctgagcacctccagccagtgggcttggtctagactctcctatctttccccacatcgtggggtggggcttgctctgggttaggctacttttccctagttgtggggaggggggtgctggcacatttcactgttccctggaggaaatgagtgcctgggaattcatatctagggctcccagcagcctctttgcaggccaatttggaaactgtccccagccctgcattttagggggttacagagtctctcagcaggccctcctcccctgctgctcccaacttgcaagcctgcactggttgggagaacataatggtccaaggagccccctctctactttccgctgtgttccctgtggggagggaagagcagtttaagaaataaggaatcccaaaggcgcacagcagaccgggggccgaggagtgggtcctgcttcccctccttttttctaggctgagccacagcaggtccttgaatcctatttcccagcggatgccaggacagcaggccctgggggagttctctctcgagcctttcagagggaccagaggtctagcagccaaggagaactcagaatccttgagtgtgtggggcaggaactctcccagctgagaaggggcacaaggtgccaaccatctagggcccagtggccaaggaagacgcggcttgtcgcagggagaatctgggccctggtcctccctttcagggcgggcagctgacctgccccctgctgcggacaggcgaggccaggctgctggctcgcaagcatggcggagcccaaaccttccctgctgccgcccgcccagccacggctgacttggaagcttgaggagcgttcagcagcctccatcctgcccgggaggaccggggacctggaagggcctggccctcgcttccctgcagcgccctagggggacgtctcagtgcctcccggagcccggaccaatgcaccagagctgagggcccaagggtgtgagggtggccgggcagtggccccgaggacggcgccccacaagtttgcggccagggcccagcaaacccctaggggtgggaaagcgtcggcccagctagcgggtccagcagggctgcccccttcaccgtggcccagcggtcacgaccccacgtcctcatcgcgggctgggactgcctctgcgtctggcctgagcgggaccgtgggatcctggggagccccgcctcggtgcactgacagagcccagaaggagtgacggttaccgcttccggtcaggaccggaagtgccgggaacggcattcgtcctccgtgcgagatgacgcacttcctgcctgaggcggccgctgttctcgcggcttccggcaggtggcgctgagaccacgggaagccagcctggctgtcggttagccctcgagcattctgggaattgcaggcctggcccctcctcttcctgttcttggtcaattccggtcttgtttccccaacaaatgccgtcgtttccggggctgcttccgagccggacccaagggccggggcgtggaggagtagaggggcgagcgcatgcgcacaggactacacgtcccgacaggcgtcgggagcggcggcccagttccttgtgggagctgtagttctgcaggcgcggaagccgtggtgctcggccggcagagcactcggtttcccagagggctgagcgcgccgcacggaggtgcggcgccgaccaagatggagactgccgagcagccttgagccggtaggtttgtggtgagggaggacgggccgcgcgggccggccgagcctccgggaggtcaccgagcgcagctttaatacctgagctcgaaggccccgctgtgctcgccgacccccgtacctcgcggccgggcccttgggacccacagcatccttgtgaggcccggaggcctgtccagcccgactggacagtgccgaggggcaccgagagccagcttggcaccgagagttcgtttgttctctggcggggaggtcttgctggcacatatagtggagaaaggccgggctctgcgttcatgtggagaaagagacggcttccttcagcctacggacatgaaggagtcaactctaccttccactcgttgccggctttcgccgagaaccccgagaaacggactaccggagtccctatcttgcagcccgatccccgctacccgtcggagtgccccgctgaccaggctgcttctggccgcggcggcgttccgctgcagaggacgggagtgcgaatctgggaagcagggttctggttgaactccagcttcgtctgcaacatactgtgtgacttgggcaaattatttcccccgccccgttcctgccagctttaaaacggtcatcagtggggggtgctgcgtatcccctttcactggggtggcttcttcactgaggagagtcgcgcctcagaggaactgaggtcctgcctgtgttcgacctggtggggggcactaagagcccctgatagtacccctgaccccatccttattgggtgcacaagacacaggtcactctgggcgggcaaggagttttggtagcaggagaggagtcggtggatggatggctgaggacagtgcagaagggtgtggctgggccgtctttttttgcctggaaattcaagttctgaggcacccagtcactccagcactaaatgggtgcaggaggcagcacttgtctgcccagctggaaaggcagggtatgtgctgagtgttacaggtggaaggccactggaggtc

SEQ ID NO: 55475 - DNA, 2896 bp, Homo sapiens
ttcaggtccccaactcagactcccgatcctctgtccctaatgaggccctacctaaaaccaccatgcggactccagacccggactgactgggaccccaactactcagatcccaactcaggcaaactcccagccaggatgtggaccctagacccgaattctgatcccaactaggatacctaactcagaaccacaacggggattcccacctccgatcctaattcgggccctgactcagaaccactaagtggatttccgactccggtcccaattcgggctttgactcaaaaccacaacatggattcccaacttccatcccaatagcgcggactcagaaccacgatgcggattccagactccaatcccaattcagcccactctgaaccaccatgagaactatagacccggaatccgatccttgggacgcggccaggaactcggacctcgaccctggccacgctgtccataaggtgcagatgggagcgcactgcccaggccaggctgcactgctgacgcctgtgatctgggacggccgcggggcacacagctcacctcagcaacgccagtgatcacccgtcccgcgccgtccgcccaggtccgtgctgaccgtgttcaaaccctcccagagagatggggagggccgcgctgaggagagtctgggagaaccgcactgaggagccgccgggagagtgccgcgctgaggagcccccggggagagtgccgcgctgaggagcccccaggagagtgccgcgctgaggaggcccagggaggaccgcgcggaggagaaccatgctgaggagcccccggggagaacagaaccgcggcgagaggcccccggagagaaccgcgccgaagaacccccggggacaaccgcgccgaagaacccccggggagaaccgcgccgaaaagccccgggtgccccgaggagaacggcgccgaggagtccccggggagaactgcgccgaggagcccccagaagagcgccgcgctgaggagccccgaggagaaccgcgccgaggggcgcgccggggagaaccacgatgactgacgcaccgaggaggaccgcgctgaggggcgcaccgggagaatcgtgctgaggagccccggggaggaccacgctgagaggcaccccggcagaatcgcgctgaggggcgccctggcaggatcttgctgaggagctccctggaggtccgtgctgaggcgacgcggcgaccgttctgcctggagactgcggcagcgctccgactgcccccgccgctgccgacgtggcgaccgccccccacctgctgattgggcggcagcaggggaaggcttgcggcgggctgctgcacggattggctgggtgcggaaagtgatgtgccgtgtcctgtcattggccgaaagagtctcgttttgatgccacccgggctcagattggcccagcgggtccagcgccgcatgaggcactggctgggtgtgaggtggcgcgagccgccgccctccctgcccccacccgtcgtccctgagcaccaccgggggccggggccagcgccagcctcagcgttggcatcgccggggtgagctggagacacgggccagttctctgcgtgatgtgttcaccaccccggggtgaccgcgtgaggacagcggccgcaccccgacactgctgtgggccctcggtgtggaggcctgtgggcgtccaggccacgcccgagaccagcccctccgccggcgccgctgcagcgaccctcgaacccgggcaaggtctccaccgccgtggcaccgggtgcgggaggcgttttcccccctcccagcgggtccatgcaggggatcgggatgttctgaagcccccactgctgtgcctggaacacccgtgtctgccgctcacccctgaggacttgggacctcagggggtgagtggcaggggtggccgggacatgccaggccacccacctggcaaagggcagcgccgagggcgccccgcgcctgccagcgcccggccgggcccgccctgcccacctcccatcccccatccgggcgtgacacttgaccgcgtctgccggcccctccccttgtccgtcccctccgcgccgctggcgcgcgccttctgaatgccaagcattgccataaactccggggacaaaagcctgggtcacaaaagccccctctagaagttcacaccctgaggcttccctggcaaggctgggggccgtttggcccttccatgtggactgcaaaaacagtgttggaatgcaggactctgggtatgttctcgaaagttgttacaaccccaacccagggttgacctcaaacacaggaggaagggggaggctggagccagccaagcgagccagccgtccccccaccaaggcacgcaaggaggccattcatcttcactgcctctgccgaaaatatacgtctacgggagagccaggaatctctctccaagggtgaccgggttgggggttttgttgttcttcagcccagaagagaaagagaaaatggtgtcattttttcaggcagcaagtgattcctttcaggccttcagcaacgacgcccagatgagtccactccctgcctcctgctcagcccacaggcaatctgggcacaagtgacacatcccctgggcgcctgtcccttcgcactggcccagggagttcatgtgtctgatcagagggcgcagtccaccctcactatctagctgggaagtttttgtcatctgcctgtccgagaggcagctgtgcaaccagtgccatcactcagagccagtgctcaggtgcaccccagactcagggtttcacgctataatgtcactgtcttgaaattcttgatagttactatctttgaacttgtgttttagaagtgaagtctgaggggaaaatggagcttggaacttcagctcccaagtggctttcccacc

SEQ ID NO: 55476 - DNA, 506 bp, Homo sapiens
gggcggccgtggggccctgagaccagcaaattgggtcatgcagaaagagcgaaggctggtgttcaggtgcctggccccatggggctgtgtgaccacagtaccctgagtcccatgggcctggccaccctctgtcagcacagacctgagcagggctggtgcagacctttgccaggcagatggcccagtgggagatagcgcccatctggcaggacaggaagcaagacccgggagaggtcagctcacaggattggcaagctcagaggcccagaagccttggcctctctgctgcccggggaacacggtgtttccctggctttctctttgcgcaagggctgggtgactcctggctggcacacccagtacagcagggccgggtaccctgtgttgttggcatggccaggagtttctagacatcaaggaaagccgtggtagagacagggagtggcacccagttccccagcctccactcctgcttccatctcggctgcagccaggcaggcggggcg

SEQ ID NO: 55477 - DNA, 964 bp, Homo sapiens
agcgcctgtccacacagaccagccgcactgcagtccctcagaagccctagggttccaccccatctatgcaccctctccctgggttcatgcctgctcccctgggcccaccccacccatgcgcctactccccccacagcccacccatccccagaaccctccttgcccacatgccacagcagtatacttttgaaggcaacactgaaggtggggagtttctgaaatcctctgtgcttccatctcctctatgggcgcaccccaagaggttgggagagcgaggtgctggtgcccagcccagcacagatagatgaggccaccgtccagtctacttcgtttttccagacatctcacacccataactggcctgaggaacctcattccagcttccaaagaacacggagtgccaagcaccaccacaccccaggctccacacctcccagaacccttgtggtaggggaaggagggggttactctgccccatttacctaagggaaactgtaaggcctggatggagaagtgccccccctccagctcacacggctaccaggccagagacctttgccccaccacacatgttggcccacagatgaggcggtgagtcattcagccacatcacagacgggagatcccctgccccttgggaggagctggagtccccacacctgggatccagtgccaggctttagcacggacccctgtgtgcccacacccaccctgtctgaaccccccattaagggactcgtgtttacacaccggtccctgagtccccgatttctgagaaaattaattggcagggtaattctcactagagtgttgttgacttctccatttgtagcttgctctttctgacagtatctgcactgcagagggagaacctgaagaagacctcacctgagctccgaggtgtggatttctgggcagatttgagactttgtggcccctgctaaggggatataattgagggtcc

SEQ ID NO: 55478 - DNA, 2805 bp, Homo sapiens
tgtctcacccctgcagttttctgctctgtggagcgatgattgacacatggcagggggacactggttttgacatttgagcctgtgcccagcccttgcctggggaggaggtggggcaggagtcctgaatgagcatctccctacttagtgacagtcaggggcacggagaatggtgcccaggccaagggcagggcttgggccaagtgtgcgcagcgtggggtgtgtgtgctccagcggctcctgctgcggagggcggcatgaggcttgtttacctgtgtgctggcatctctggtggcccctgcaagggtggggaagtggcaggcagggtgaaatggggaaaagtgggctctcaactgctcctagcagcctccgggtctggggagggaagtgaggaggggcccagagctgtctcctggtcactcttctggggctctgtgcagacctttggcagggccaggctacaccacaccctctacaacctcccctgacttcttcccctaacccctcaccaccattcctccgcttttctctccccgcccctgcctcccctccattctctccttccctccacctcccggtcccatcccctgcccacactgcccctcctcaggcccaaagtggacaccggtgctgcctgagggtcagagtgtccacctccagcagcccgggcaccgggcaggattcaagctggagggggctggggcgggcgaagccgggcacggggcgagcccgctggtgggcggggcaggggcgggtccttcgaggggaggggcgggctcggccagtgagagcgcagaaaccgtggcacgggcgctcccggaactggcgattgcaaagcgcgagggctggaactcagacccagaggggcggtccctgttgcaagtcatctcccgaaagggcggggccggggctcatcccggaaggaccggtgtctaggtcaccctggagcgctcaccccaccggcacccgtgcccaagcccgcccctgcaaaggcaggtactcgagcacactccggagagggcggcctctgagccccgaaccccgaactccggcgcagcgtcgcacctctgcccaatgaggtgcccctgacgtgcctgctgcggctgccctgctccccccagcctccctgcatcccgggatgggggagggcgccaggcgcagctcccggaccctcaggggtctccccgccctaccccaccagcctgggttcggtacctcggggctcagatgtgcagtcagctgttaatgtggcaaaatttggggaagtcctctgcagccgcaaaatccagttcccaccagttggaggccgggcggggaagggtggggacagacagcactccgctgtgggaggtaaggcagagctactggggagcctggaaggctgagctatgtctcccctacgcaagaccattccagaagccccttggagctctggctgctggccacaggggaaggtagaccttccctgagagctgcactgtgttggggacagggccactgtgggcctacggagggcctccaggcacagggacccacatcagccctctggccacagaaggcgctgatgatttgaggtggactcagccaccactccgagcctctgcctccctctaaaagtggggcatggcacattcctgtgtcaggcaaccaggcactgagcctggcccacctgcaggggtcggggggagcagcttgtccctgtctcccctccccgggaggctgtgtgcctggagaccagagctgtcaaaagtggaggagggggaccccctgatgtgtcctctaaggtccaggtagcaggagagctccactggggagggggtcctgcagtgctgtcctctcttgcaggcaaggccaggcgggtgctgcctgggacccagtgactcagcacccctgcccggatcaactggacttttgccccctgctccgccagcctcctgcttggatctctcctgggtctccctgctgcgcctgtccaggatgcagggagctcgggctcccagggaccagggccggtcccccggcaggatgagcgctctaggccggtcctcggtcatcttgcttacctacgtgctggccgccacagaacttacctgcctcttcatgcagttctccatcgtgccagtgagtaacacaccccagcccctgcagccccagccagggctgaaccgctgttcctcctgccctccatctgggccgtcgcagagagtgggggtgggggtttcatgctgccagggcccctcccagttgggactcatgccacgcttaagctgagtaagttaaggactctgcctctggacccccgtcagcacatcctgtgctccagcttcagtgccagccccgggagaagccatggggagccaccccacttccctcctgggggcagcacctcctcaaaccttcctagcgctgttcctcctgcctctcacccggcagcctttgccctctggagtccctgccccaagggctgttcaatccggtgtggctctgggcggatcacccctcagagaggctctccttgcacctgcccgcagcttctatctctcccctccatcttcttgggtccttgttgtccactaaatgatctgtggcggcaaattgatctcaagctttttcttgcaagagatagaatgctgtcttattttattatctctgttgccaaatgcggaaacatttcattggcaaattcatgttagtttagtgtatcattcagtagtctataccacagtgtgtggctctggaagctgtaatagtaatgattaaattatattcaccaagtctggagaggcttgggaacaaagtctcacatca

SEQ ID NO: 55479 - DNA, 2900 bp, Homo sapiens
tcatttattcattcaaagccggttcccagcgcctttcacaccagccccgcaggactggatgagggtgtcctgcccgcccattcctgggcctccaccctcccagcaggagtctcactgagccacagccggatggtagaaaagcaaactggccaagtgatttatttgcaatgggcacagtgatgcaaaaacaagatattaagactataaaatatgtgactacaaagaaccagcgaaataaatacatagatattagatagtccaataacttaaggcgcccgtgcaacggagcgaggatccgcgcgcacgggaagttcttctgctgcagggctggagagcgccggccacgtcctagcctcggtccgactcgtccagcgtatggccctgtggggaaaggactgggtcagagagctgtgccagggccggtccgggtccagcctgaggggccccgagaccctgacgcgagggggccagcgcgattgcggggcgccgggtcccccaaggaggtgcagcgcccccgccccgccgtctggggttgaagtggtttttcccaaaggccccggtcccggctgttagggcgcagggctcgccgggacgcgggcagtcactcaccgcggcgggctcatggcgtgcggggtttgggctgcggggatggcctggagggctccgagggctcggagggtgcggcggccgcggcagccacggcgtcctcggcgggtgcggcgggtgcggtgcgttcctggcggctgcgaaagtcctgcagggcgcggcggttctggaaatcgatgagcgccagcgcgatggccgcgttccagcagctctcgcccgcgcagcggaagtcgatctccttgtggtcggtggtgacgatggtgaagtacacgtacttgcccgtgcgctccacgcagtccaccttgaggatggagtggaagcgcagctccttggggcgcgcgcgggggctggcggggaacaggctcaggcggtcggaggtgagcaccccgcgcttcttcttccatagctggaagaggctgtcgctgcgcttctccaactcgccctcgcgtagcacctcgtcgggggatttcatgtcgtgccgagcgcgggactgggagcggcaatgcgggcggtgacggcgccggctctgctcctcgtggccccggcgcggcctttatagctgcccctccccgccccgcccctccccgccccgccccggccctcgggccaccccgcccgcctgagccccgcgcgccccgggccataccctccccaagcccagccgtccgggcccgcaccgtcgcgtccgcgctctggtcggtccccggccgtcccctcccatctcagaagcccgcgctcctcttgccccccgtgccccagctgtccggccccgtggggtgactcgaggtcccgccccgcccgggcgctcgcccgcaccgtctcgcaggccggccccgcggaagaatgcgctgcagccagccctgcccgcgatgactcacgccggggagccccgggaagcacccgcgggcccggggccggcccaccgtggggagacagccgggaccagaccttcaccctccaggcgccccaagtccagccctgccgctctcgggctcccggggcagaaggagggtcgaggcccccttccttactcccgagccctggccgttccgtcctgttcgggggcctttcccagggccgcccagagaccctctccgaaagtggccctgccctagcggaccgagctcctatcttgccacccacgggctgcgccaagaacgaccacctctcttagcctcggttttcgcttctgtgaaatgggaacagtaacctttgctggattagggaacacgtggaaagggctagaccagcaacccatagagctcagaaaatggaaggggaagaggaagcccgttctcctccctgcgccctcgtagtgtcccgaactggggtacggactgctccgaccgcgcccccacgacccggaccggagagaggtcccaggagctgaggggttcgggctgggccgcgacgcccgctctctgggatcagcctgggggcgagggtcggcgggggcggctgagtcatcgctttccagctgggcagacgggcggttttatttaccctcttcctttaaagggtttaatagacaggaagcgaaagccggctcttcccgggttcccaggggtgggggtggagccggccgagaggaccccagagaccccggctactactccacgtctcccaccttcccgcacccctgccccctagctgcgccctggggtggttacagcaggaagtcccaactctggggtcagaattggcctcaatgacggggctcacgcaaaatgaaaacgagagtcccctgattcaaaatgtatttaaaatgtcaagacagtggcagcagagcgtaaaacccagacctgggaccagccctacctccacctgcccttcagggtcactgtaaaggataaagagacgtccggctcagaggagcgccccagacccggttctgtgaatggcatgcaggtagcagctgcccggtggtcccaccggtgtggccagaggacctggcagtgggcagggatgtggtgtggaggggcagtgccggcagagggcagggttgggctgtgccagggttctggcctgggagtgagacacctgcctggggccggcgggtcaacactgccccctacctgacacctgtccttgcagcagggctgggatcctgtggtgagggagcagcaggtagggtgggtgggtgaggggaggtcagcctttggcggggagaggggattcgagcattgttccggagaggctgcaggaaggattcggactctggtgtcccttcttttgcttccagagggccctgggctgccggacagtgggacctgggcaagaggcacctctgggca

SEQ ID NO: 55480 - DNA, 2030 bp, Homo sapiens
agtggctagggtgtgatataggaaaggcccctgagagcaggagcttcccctggactacccaggtgggcctcacaagggagaactatggagaagcaggcataggggtaggaggccacgtgagacagaggcagaaatcggaaggaagtggctgcaagccaaggaatgcctggagcccccagatgacgaggaagggtccccacataaggtctggtgttctggtccttggggagggcagcccctgctgaaaaggggcaggttgagacccagggaccacttcaggccctcgctggcggcccccaggctgggggcagcagactctagcaactctggccagtgcctgcacctgaggccccatctccaggcgttccctcttgtcctcccagccctgcacccgccttgctcagtgaggcactgtcctccctcctcggactggcttccagccaggcaggcactggtgagggccggtgtgggcagccctgccatgcccagggtctgggttctgaggaggtgaagcttctccccatgtcccagatacagaaactgagacctagggagatttggaaacttggtggacaccacagacttcttgaggagctcgacaagggtgatctgtgtgggtccgccctgagtggggtcctggacacagctgtagctgccccgtttctcctgggctgggctgggctgggccaggctgttgggttgtcatggtaagtaacatccggctgccaccctcagagagccatgagtcagcatggccaggatgggctagtgattggcaccttggggacagcctagcaggcggggcctccctcaggcacaccaaggtgacctggcctcggcaagaggcgtccaggcctcaccctgcaagagctgggccctggcttctgtcctgagactcgggtctgcatctcttaaatggggaatgtcccaggcgcatgaggtgcctggaaacccacaccaaattcagcgcatcagaagctcagccagggccagcccgaggaggcgtccttccaggaggccctgctgttgggggccactgcttgccagtgtctcctggtgggtggggtccaaacagctgggcctggggtcccttgggccccccactccacatggggatgctccctggggcgggctggggaggaggtgcctgctccagcagaaggaacctgggaaggcacctgttctgagggttttggggcagaggccgaagtccatgccaggctgtggccaggctggcctggctggcagggaaccacaggcttctgcacacagcaaccccttctgcaggcccagggctccctcagggcactgcagctggagttggctgagtctgggacggtcacttctcccaccgctgcccctggctgttcctctgttgctcaccagttgcccagccctgagccctgactcagagccaggcaagccaaggacccagcaggggcaggtcagaggtcagtaatatcaaggtgtgcctggatgagccaggcagaggccaggggctccacctacccacctggctggctggtggagccagctggctgccccctacccaccccacccctgcctcccacctcaggggcaagcttggatcctggcagctcatgctgactcagcctgcccagcgatggggctgggggcagcctagggcattttgagagtgggacaagatgggtggggtggcaggaagccctggacctgggacttggggaagggggctctggccccatgggtggcccttgggcctggggaggtttgctgggcagcaggacaggagcagagtgggatgtcggcttggtcccagctccacataaacgggagtcatgagcctagagagcagactggccaggtaggctgacctggggtacacaccacccgcggacccacacgccaggcagctgtggacaagggtcccaggtgaccctgctggggaaagcagcagccatcaggttctagggagccatagctcctgactcaagggaaaaaacagaattttaagtggaatcaccctgttttggggacttctgaaaact

SEQ ID NO: 55481 - DNA, 2724 bp, Homo sapiens
aaaaaaaagactgcaattggatatgtaataacagctatttaagacggcagtaacgtgttaaaatggttcataaaaatcacatcataaggccctgaaattctagtaaaaatatctctaagtaaacttgtgaactactactaaataactaattttctctctctctgtagtcactcattttatctttggattactttcccattctatcaccacgttgctttctctgaacttcattttacatttgcatattatttattccattagcaattgctcatcccagtctgaatctcaaaattctactataggaggcatttggcattctgtggaataagagaattttgagatggaaatgatcaaccagctcaaaacctcgtaagctagagttcagttaagcttagcacaatgatgaaaacaatttctcattaaaacttctttcattccctctacagaagcagtaaccctgggtacagttaaaactgcctgggtctttaagctttgtcacctcggacaagtcattatacctaacctcccagggcctcagcttccagagtagttaaatggaaaaacaatagcatctatctcaggttattagattatgaaatgagttaacacacgcaaacaggctgaaagagtccctggtgcgcagtgcaggtattagtcatttagaggtatagttactattacaggaaggtagtaacttagaaagacttacctttaaggtccaacaacctaatctacatatttgtatatttctaaggtaagagaatttttaaaagtctattttcaccccgtaaacctaatgcaggaggataaggcacgggttactacaggaaaaagtaatgcagactgggggatgcgaaccaaagcacagacgaatgtgccccgacgattcctccgagaacataatgaaatggcggaccttcctgccagaggagcgcacagtcacccaggcaggtgatgtgacacacacgttagggtctaaaggtcccaaggctggagtcccctttactggaccctaaacatgtctgcctcctgccccgcaatcagacttagagaactgtggacggtggaaagtcttatcatgaccaggccatccttcgctggggtgaacggaaagcattcagaaggggaaaattgaaaacaacaaagactctggtcaggtcaaaaaatacaaatgtgacctcttccaccatctctgaactgaaagaaaagcatggcactttcccatccataacatgtacaatttttttttttggagattttgcttttcccttgtgaaagacggttttaaatagtaaacagacttgctgcccaccttggctgggaaaccaagtcccgtgagtaactagtctaaggccactcaggccagtcctcggggagcgcacgccgcccagctcgctcccaccgcacagctcccaacagctaagaagcaacgccaaggactttcttccccgtcagacatgccctcggccacaccaaactgacatcaaaaccccagttagcccagcctgaccccacagaggctcacgatgacaaccgccctacggaaaaactcaaattcctaaacatctaataaagaagtcctggacgtctccaccttaaaaacgggaagcctgaacgctccggcgcgcccggccgtgtaaccgccacagcccccgcacgcggggcgggctgggctagcgggagatttgagcggccgccgcctctcgccgtcttcgcctcctccaaggggccgccgcccaggaggccgcccgcggcgcagaacaaagcgccttgaccttcagtgaggcgggcagccgggcgaggcgcgccgggagttgggaggggcctcccgccagcgccccaggcccgggctccaggccccaagccccaggccccgccgcggccgccgctgcctgccccgaccagaacgcggccccgcccctgccccaccgccccgaggcttccagagatggccgccgccgcgcccgcgccggacccgcggccccacccgcccgtccgggcccggccgccctccccagcgcgccgttaccggcccagcacccgtgtctccgcacctcacgcctcctgcggcagtggcggcgaccctagcttcgctcgctttggggctgcgccgccgtggcctccaacaacgccggctcccattggccgaggctcctagctcctctctccgcgagcaagacaggctgcgattcgccgagcgcggcgcaagtcaactgcgcttcgcgccgcagtcagcaaccaatcacaagcctccgaagaaacgccgcgccatatgcaaatattcctccgcgcggcgcgcgccctgcgttcctccgcctctttaaatggggcggggcaaggtggagaccgcgtgtgtggttccggggggtcccgggtccccgctcccgggaccttccccgggtggcaccacatcctcgcgggacactgggcaccacccctctccgtgggccccggccccagccgtctttatctcctgcgccctcccagttccctagttcaatcccgtccgcggcgggtcggtgcctccagcactccgtgcgcccgctgatgtgagaaccccacctcccatgtcgtcccctcgcgctactccttgagaacatcgcggagggcccctccgcctgggagccgttttcaaccagccccgttagtggttgggacgtaagcctaacccccgctcatcccccaggtcccaggttggagaacacttcctctgcgaagaggtcg

SEQ ID NO: 55482 - DNA, 3028 bp, Homo sapiens
tctctgggggcatcatcctcaaccagtttcccaaggaaggccatgaactccctcacacctgactctctgtctgccaaacatgctccctgatggaaatccaagcagccccgcccagagcctggtctgaaatcactggagtcactggccatgccctgagccaagcaaaccatgcaaaccccattctgttaggaaccaatcctgccttcttctcaaaacctgctgtgctcccaacaacatccagccagtttgccgttttgtccatcctgcttggctcatacagtgccacctgctgcaaccacgcgtcctcctgaaaggcgtggctgtggatgacctcaagtactcatggttgggcagagtccgagagacaagccagggtgatccatgcccagaagtcatgggcaggcttccacatgaggcatgatacttcacgtgtctgggtttcagaggacagctctgcctctgggccacagagactataacatggaagtgactgaaggatcttaaacctggatttatggaactccagatcccaacacaaggaacagagaagtctgttgtgcgacaaggcacatgggctgtcctgcctcctgcctccccattgtgtgcgtgtgccacggcatctgtgttctccttaccttgttcctggtgaggctgttgtaaaggtggagtctgcatggctgggtcccagcaggaggggaccactggggctgcacacgccggcctttgcctgggaggcagagagagcaggatcagggtccaggggcagcaccaggaagtgcaagtcgcctcttcacctggagacttggtttttacaacgggaccatagttttccatgaaatttaaacaatgtgaaaccacacgaatctcggtcaacattacgcaggtcaaagacaactgcgtctttttttttttttagacggagtctcgctctgtcgcccaggccagagtgcagtggtgtgatctcggctcactgcaagctctgcctcccgacaaccgcgtctttcttttgctttctaatattctgtatggcagcataccccaataacacccttagagccccaggagggcggaggaatgcctgcacagcgtgcccagcacattccactgctcttcaaatactggcccctttctggcagtgagcacaccaccacctggcactcctgggtcagtcagggcttgacactgacaaggtatggtctgttctgccgcagccctgggaacctcccccacccaggatccctcacctggacaaactgaggattttgaggactcttgttgggacagaggccacctccaagcctccaagccctggcagcagaagccaggagtcagagcagaaaggaccccctgtggccacggccagcaggcaagactggctccagcccagcccctcctcatcacttcggacactgcaggagtggctggctcccagctctgggcccacagcccagcagactctgatccagacactgggcttcaagctccacataggtctatactgccttcataaataacctgagctcctctcagcctccaggcagagacccctgccagccagcccctcagtgcagtcacctcctcctggccagacttccctagttgttcccctccactcgcctgtgggccgcctgggctgctctgagcacactgcttccaggcctggcttccaacctggcacaaggctgtccttacacaacctgcatctgagatccctgaaggggcagagctctgtccctggggccaggggcagccacagggtgattattcaccctctgaaacgtcaatctggcaaagctaggtgtggaggacggtacctggtgactttcccgttgccctcagccggctcctgcctgccctgccccctcagcagatccccacttttctccacagtcgtcgcccacaggtccaggttctgcgttatgctctgctgggcacctctgaccccagctggtgcctggccctgggaagggcttcacatgtctctgctgagtggcaccaggaaggcctacgagatggatactcctagcactgacctgtgcccaccccagcaggccgcctggcagctcaccagggtgctcgcatcctgcctcctcctgtccctggtttctgtgccagagggtctggcagcatggccagcaaattgccacacactgatcacggggaagttggtcctgggcaccagccatctcttggcctcccggctctagctcaggccacacgagccaggacggcagacgctgatgactaacaggccaaggggaggaaggagggcggctgcactgtgtctgggcagtgggggtactgtgggcaggtgggagatggggcaggagacggagagagggccagtgctcagcaggagcccccactctaggtgagttccagtggtcacaggtggtcagattctaaagcgtaggcaatctccaatcttaatcaaacatcatgtgcttattgaggccaagtgcagctcggcctcagtgtactttaaatgcctcacaagcccttgaaggagaatctcactcaatgcctggaggcattcaaccggccactctaggatcccatcactctcctccctcacaaagaccctggagctccttcaataggacactgctgccatctcagacagctggagacgctgcccagaaacacagccatgaggccacgggatcatcacactcaccctgctatgaggaaacggcccagggttcacaggactgaaagcttgtccaagaagcctggccacagccagcattcctgctcccctaaggctgctatctccacacagctggcgatgggctccccaggaaaacgggttaccaggcccagatatacaaattcagatttgcaaaagggaagaactgagagatatcacataaggacccttgccccccttttttttttttagataaaatctggctgaagtgcactggcgcaatctcaactcactgcaacctccgcctcctgagttcaagcgattatcctgcctcagcctcccaagtagctaggactacaggcacctgccaccacgccc

SEQ ID NO: 55483 - DNA, 972 bp, Homo sapiens
gtctggtccctgagcccatgagcacaggtgcatccaaaccttgaaccagtgattgtgtttgctgagaggactgtgggaaaaggaccgatgcttgctccttccagacagataccctctcaccccagagttcactcagggtaggaatgcacatgtctggccaccccttgctgtgccagctgcccttcctgggcacaggctgcccgacatcacagccatggggcgtggatgccctgcacatcacagtccccctctctgccttctcccattcccttttgtcccccatctccgtgtttactcctggcacagagccagagtcaccccaaccaagcccacacagcttctgaaaacagagagcagagtgtgttgcgggggtaactgcacacgaatgcctttctctgctttgcttagtgtggggaaagcccttcgtgtcaggccaataactggcacttcccggaacgctgtggtgtcagcaaagatgagtcagaatggagtgcacagctgcagcagcaagaatgccccactgggccgagctcttcacccgccagggagcctacggagccacgtgatgccccaaggcccagcctccgtggctgccggagaagatgtcctgaagccacctcttctctgcagtaaaggggtgggcactctgtgggagagccttcctgaagtctcaacatggatgcagggcttaaaatggcttcctgggatgactctcgctggtgggatgacgagtgcagcgtccctctaacttgccctgcttccttcccactgcacggagccactgtcccatctgaccccaataagatggccacccactccaagcagccacaggcacccagaagcaaagctctgggcacactccctagccaaaactggaatcacacccctttacaagttatccttaggagcacccatagccaacccacgggaggatccggggcctctaactcaaaagaagctttggacttgaga

SEQ ID NO: 55484 - DNA, 1869 bp, Homo sapiens
ccaataaaccctcaggggcaaagggcaccaccagatgctaaggaaatcttggtacgatctaaactgagggtgggggctggaggtgtcttacaagaacttgcatctaatttttgccagccaaaagaattaaaaactagatactgagaatgtttcctttggaaaggctgctccagactgttaggaatctgggctttctgattcagtctcttgcctttccagcacctaaaatcttgctggagggacagtgagagaagaacccactggtctctcaaggtctacccgctggtgacatgagtgactgggggagctgacacagctgtgtccctggggaacctcccgggttggcaataaaatggggcagtaatgctctgacaatcagcttgcagtggactgcctgcggaactggagatgaaagccttcgtaaagccccaagcccttttactgtgtgtacgcgtacccctggcgtcctctgccccatttccctaaataccaacctcaggtgccctccgcccacctcccggaagctgccaggtctgggcagaaaaccaaaacaacccttgggcctttgtctcccccctaaaggccagctggggcaagagggagcgagggcccgcccaggcaccggctggggaaaggctgtttgatgtagggccacctcccggggtgaggatgcaaggggacctcggcaggaaccaagtgaggaaactgaggctgggtggtctgggcagcgccccgctcgggctcgggtccccgcggggtctgtgctccagccacgggtctggcagaccctcacgcaggagtcccaggggtcccagtggccgtccctcggagccgggcacccgttgtccttcggatcctaggacgtgccacccctcgaacctcaggacccgccgtccctcagaccccgggcactgacacccctcagaccccgagcacccccgcccctcggacccaaggacgtgccgtccctcagaccccgcgcactgacacccctcagacctcgggcactgccgcccctcagaccacggacacagctgcccctcagaacccatgcacccgggcccctcagacataaggactcgctgcccttcgagccgagcacccagcgcccagtcaggcccccagccgccctcagcctggcccggccgcgccgctcaccctgctgcccggaggaatctgccatggctgggaatcccggacccgcagctgcggctacagacacttcctagaatctgatgcaaccgccgccccggaagtcgcgccccacgccgggcccgtcttccgggacacgcccggtcgctaggcaactaccaggggctccggatgtcgccggcccggagcatgctgggagctgtagttcaacccaatggcgacccgcgctccggagcatcgcgcggccaagcgttcagtggccgtgctgggagtagtcagcccagccgcggggagacaagcactaaagactgagcgtcctgtaataggtgtttaagtcatgattgcgctaagcgccgtggggaccaggcccagcctggaggtcagaggcggcctcgggacagggtgtgctggcgagacgggatggttcccaggaggccgacctggagcagggcctggggatgggcgggaagagcgctccaggcctagggaccgccctgccaatgaccctgcggaaagcaagccactatgaagtgttgcgtgaacaggcttctccatctccttctcagaccccattctggagccatccccaacccccttagggctcctgccttctgtgtgcatgatgtcacctcccaaggatatcccacccaaggttcgtgcacccatccaaaatgagaggaaatgctatttaagaaacagaattttaatatgtcaaga

SEQ ID NO: 55485 - DNA, 1338 bp, Homo sapiens
aaatctaactcagatgcgtttcttgcaaatgactatcttgcagaaacaaaattcaggcttcgtcaaccacaaacctctaattaacttctgattacaggaccagaaaatttcagcctagatagctgaaatcaggagatgacgtaactgtaccgaactaatgaatgaatgtggtttgcttcctcatgcacctgataaaagcctttccttcaaggccggctggtgggacctccaaacccaaaaaacatggttgggtcctctgccattcatgaatcgctctttgctcaaataaaactctttcacatttttgcaaggactccctcgagagaaaggagggactggggcccccacgggctacagatcatcctcttatgcacaaaccacccacggagtcgggattctcccttcctgactcggggagacgagggtctgcgggcgaagagctgccggggggacatggctctgggcttgggccaaagccgctctgcagggatgcgccggggcgcgcggggcccggccgccatggtgcagctggaggggcctcgggtccgcggagcccggaacccacccgggcagcccggttcctcccgagccggtaccgcgggttccagtccgcccctccctgtctctcaggaggcctggcccctacactcaccatctcctggcctccagagagcctggcgtttcacttctggatctcccggtgcctgcgggtcacacgacctacggctagcaggggacacagagccgcggggacaggaagtggagctctgtcgggacaaaggccccgctagatcccggaagccgtcctctcctctccagacatgtgcctgattggacagtccccgcccctactcctctgattggatagggcatcacgccccgccccctcaggccctgagtgacaggagctgtaatcagacaatgggccgaatgagacagcaaggacaggtgctggccgcgatcttttggagcggggcttcctgcctgcgctgtccggccccacctagaggatatttacatttcatcttgtgactgcggttatgtttatttataaataataaatatatgttattcaccaatggaaagaagaaaataaagacaatcattttgaatttttatattttatggccttcctggcttttggtcctttgaacagacagcctgaaatttcaaaaaggattcaagcctctaagaattaaaatgtaagccatgtgtgaatcttaaattttctagtagccacgttttaaaatgtactaagaaacaggtgaagttgattgtaataatttaacccagtatgtaaccattttcctctatggtcaatatacaattggtaaggaa

SEQ ID NO: 55486 - DNA, 848 bp, Homo sapiens
cacaccccttcctcagagcctccagtctggggacctttccgagactgtaaaggcggggccgcagtttggctccgcctgagaggggagggccgggggcggaggacccacttgaaggctgcggaagccgccagcgggagggagcgccgagggctctggcgggcgctgcgctgtccccggaggagtccggagtccggctgaaagcaaaggttctcgaggctaactgtagcccccgcgctggtaacccgacacccctttcccagcgccgcacgcggggccgggagcgggcgcgccagggcagggactgaggagcaattccctttctcaaggcctgcggggtctttctgcgggaccctctttggctgtgagtgatggggaggaaacttgtgagactcggcctctccctcaggcgggccctgacccggtcggcccctggtccccggcccaccaggccaggggccccgcgggggtcccgccggccgagaggtcgcccccggagcactgcgatttgcatacagtttgcatttggcccacaccctgggccacgtgctccagcatctgagcagcgcccactccctgcctgctctgggccctctccccattcgccttcagtggggttgggccagagacagagcccttggtcgcagatccacagggtccggtctcgcccctcccccagaccgctctcgtggccgctcagactcaggtgacccatgtttgtaaacactggcctttcccccacctcctctgggcttatctataaataacctggctctgagttttggatgccccgtcagaggtcatgggagaaggggccagcggaggaattggtaactcagggaagagcttcc

SEQ ID NO: 55487 - DNA, 981 bp, Homo sapiens
ccttggtctcccaaagtgctgggattacaggtgtgagccaccactcctggcccacaattccgaacactgctaagagctaaccatttctatagcatactcactttctgaaacattcctctggtaaggaaaccaggtcaggtgttctttgctggaagtccaactatgttttgtgactcactcaggttcacatagtgagtcagtagtggaggggattccagctgagtaacccctatcctgaggcatctaagttaaatggaagttccagacaacagagctgacccactctgctttctcatccctgaattcctgaaagtctcagaagtctttggtctaatcttaattggaatttgctcacatcttcagcttgacagatcaaaataagatctggaatagtactcatgctactcaattgattcctcttgaaaatagccctgtgtgaagtaacatcagcaatcattatcccctttacaaaagggaatctgatttagaaaggtgaagcgtcactcagggtttaaaaacaaaaccactatagtagaagagcgaggaggctttgaatggtatattctattgggcaatttgagacccgggaatctatgtgcataaatatatgtacagcaatcagtattaatcaataatcaactcccttgcccctaaatttccccttataaatctagcctttgggctaatctatctttcagtttagcacccaattgttctctttagcccatggcctgtctccatttagaaggcaaattcaaaaacaggctaaatcaaacaaggccaccataaagatcctcagggtaagaaggctcaaaaatacaaagggaaagccaataccaggaatgctataaacattttatttattttttaagaaagtagcttcagaaaaagaggaaaatatctagatcatttatttatacatatatatattttttaataaaaacctttacattatcttcatgcataaagacccaggtgtgg

SEQ ID NO: 55488 - DNA, 622 bp, Homo sapiens
ggaaaatgctgattgttaaagttgggatataagtacatgagagttcattataccattctttccagacttggatgagtataaacatttttaacaaagtgtcacagctcttttagaatttgtctagcagggtttctggttttcaccaggaaacaaaattttttttttgcagagggggtggactttctggttttaaaaaaaaaaaaaaaaaaaaaaaaacccctccacaaaaatttttaacaaaaagtttaaatgtaaataaggattgcttcaggcaattagtcatacacgatactgggtaggaagggaggtagatctccggagggttgatgggaattagacacttccacattttaacatttctgtgacatgaatgtcacatcatgttcacagggtaaattccagggcagttatttcataactgcattttagacttcaacattaagagaattattttctggtctgaaaattagtaacaaattataactttctgtcaaccaaaataatataaatattttaagtatcttctactgacaatcagaagaaggccatgaaaacttagaatttatttctactttcttaaaaactgttaaagagatcttatcctaattattttttcaagacg

SEQ ID NO: 55489 - DNA, 2081 bp, Homo sapiens
gtccatgccgcaccgacctcctaaagggaattcttaataatgggagactgaaatatccagggagggtgaggtagtagaaaactgtttagactgtcaaaaatctggcattggctaatcctgcctgttactccgggcctcggtttccccatctacaaaactgatgtaaggtagggggattgacttaaacaatttctaaagtccttatggctatagtaatccagaaactcaatctgtctcctcatctggctttacactgaacacgtgggaaaatagaaaagaaccttttgctccaccgaaccgactcctattctcagatattatcttaaaaatctcccaaacttcggactcaccctaatcctcggggtgcccacttcccttatggagaagccaaggcaaataaagcccagtcccacatgacggtcaaggaagtgcggggcagaccgtattcagggtttcaaggcgctgaccccggaaaggccagcccaccgtggggtccttacaccactgaatgaatgagtacaaccagacagacacccactcgcgtgggcagcaactggagacctccaggcctagaccccactgatgtccattctctcccagggcctccaaagccgggcctcccgggctccgggcccccgggtcctcagcaccgcccctctctcaggccagaaggtgcgcgcagcggcgctagacttcgaagcggagaggccctgagacgccccgcgcgtccgcccgcccggaaggggggagaaacctgccggtctcggccgctgcagctcgggctcccgacttaccgcggttcggtggggaaggggaagtgtcaggagtcccctgctgccacccgccgctcacagagcagcgcgcggcccccacgaaaccgtcgccgccgccgctaccacccctgccaccgaccgccgcttcgggcgcagcgcgcagagggcccgactgcgtcacacgccgcccggcgtcagaggctcgttgcggacgctccgccctcgccgtccgcgaattggtggacgcggccgccactctgggtcgaccctgttattcattgggcaacgcgtcttttgaaaccgaactgaagggggaaggggcgagagggaagaggaggggcagaaggagttcggggaggcacagggtaggagcggtgagagggccgtggagtcccgcccctcgccgccgcggttggcgggagcgtgtcgtgacgtcacacagggcctctcgaagtgggcttgtgaatggctagattgggaagcaccggcggggtgtcgggaagggtggtgacgcaacatagagactccgcccccttccttggagcgccgcgactcgggctgagggagctcgggccaatcagagggacggccccagaatggcatggtaactattcgaccctttccttgccccggtccgccggcgctgctgggaaggcttcctagtctctctgcccgcacttcccgcccagaccacgtgcggagcctgagggccctcttggaaggtctgtctgtccaaagagtttgcccgaggcttcttcagggccctaaatcctgaccctattctctcctgacccatgctcgccccagcactttctttccctccctgaatttctaggatggacattaggagcattagagatgccctaagggactggcccaccaaagggcctggtacaaatgaggattgttggaacgtctttcccagctgcacgtggagaacccctaattctttttttttctttttcttttgagatgaagtctcgcgttgtcgcctagggtggagtgcattggcgcaatctcggctcactgcaacctctgcctcccgggttcaagcgattctcccgccttagcctcccaagtagctgggattacaggcgtccgccaccaggcccagctaatttttgtatttatagtagagacggggatttcactgtgttggtcaggctggtctcgaactcctgatctcaagtgatccacccgcctcggcctcccaaagtgctgggattacagacgtgagccacctcgcccatgaactaatttttttttttttttttgagatggagtcttgctctgtctcctctttctccc

SEQ ID NO: 55490 - DNA, 1819 bp, Homo sapiens
tggtcccttcaccctccttccctgttgggctgggatggtctttgcaaagggagccaggggtccccctcaagttctttcatgggtcagtcatggtcagggtagggagggaactctggcagctggttttgggggatcaatcctctcattgtggggagacccaaggctggtggctggaaatcctttctgcgctacgtaggacagggcgccctctcctgaacaaaggcgggaacagctctaggccagagtttctgggatgtgcctcaccgggtctcactgcctgcaaaggtgctcttcccattgctgaaatgtccccaaccgccctgacgagcaaagtttgggggaggggcgccagggctgggaggaaactggcttaatgtttcagaagggcgaggctggatagttcggttagaatggaggtgcgaggcaggagagacgggcggatgagaaagaaatccggcccctgttgaattaattttgtgttctttcaacaggtagatggaacgcagctgagaggtaaggcgacaaggtggcttatccaacatgctcaaactcaggtatccagagctcttccggctgccctcacgcagccgaaattagtgggggcagacccgggctgtaaagcatggtttgaggacacgccagattgaggaggagagccaggggtcggggtctccagaagcggggaggagccagcggaggatctgggcgcagtttcctctctaagttccgccccgagagcgccggccccgcccccgccgttcgcgctctgaccagcccgcagagccagcccccgaccccgggccacctgggcccccgggttccgccggcactctcgccaccaccgcgtgggtgagtatgggcatggatgtgctgggctgccgggcagccccactcgggagcttggccgcgcggtctggcctctgcagggccgggccccacgctgtgggagtcctggtacctgccgtcctatcgcacacactctgtttcccaggaactgctgctctctggacttgccgagctggcccccttcttctccctccccagcgtggggccgggtgtgcaggggttgagctctccctttattccgcggggcctcctggtcaggagtcctaggtggggaggatggggccccggggttggaaccccatagagtagttttgaatggcagctgtgccatttattagccttggccttgagtaagtgttttgaacctccctgagcctcagtttcctcatctgtaaaatggaaatatacaggctgtagcacctacctcatagaattatggtgagattaaaagagacaatgtatatcaagtacagagcagggggcctagtattccgtaggcactcagtaaatgtgggttcagactcgaggctgaggagatctctagggactttggagctgaggtagctccaaagaaagcaattttcagctaagtagtacctgtgaggaatgtagaactatctgcaggctgaacaattgcccttcagctccaccctgaggtgtggagtagaatgaccaagttggaaggaccttagaggtaatctaaaccatgtgattcccatgttgcagaactgtggaaacagatctagagtgcttaagtggcttgccaaaggtcacacagctaaatgggaggccaggcatacctccaagaattggaatggattatcccttgaacctcctcatcaactcctgatttgggcagtgcctcttcattccctgaagatctagtcttcaatttgggaatcctagtggttcctcagggatctagagctgcagccttcagggagggatactgggagggaagactagtgctact

SEQ ID NO: 55491 - DNA, 1991 bp, Homo sapiens
aacaaaaacttgtcagggactatcagtacctctgaatgagagtccttccacttccagttacagggcaagaccaagttactcccaaaagagcaaggccaggctctggtcagctaggaacagcgtctgctcactaaatacctactgcttggctccaggtaaggtcgggactcaggaaaacagacatacagacaacgactggggtcggcggggctcccccacccaacccgggtcctcctgagtgcagagggccttggggctgcagaccgagtgtgggtctgtattagcatccatctgacagggagagagctttcggaggccccagacaccgcccctctcaccccaagtgtcacaactgccagagcagagggagcgccttttccagcccagaagccctctcccctcacgcacttctcaacaccccccccaccaacttctgaggacaccccacctgcgtccgatctcccagctctgagctcttccacttcagagacacttatcttggagcccgggaccctccgacctcaggggtccctctcggctccctagaggcggtacagccgccgggaagccaccctcgccgagcctccgccggctcgcagtggccccgttcccgccccgcccggccggccgcgcccgccctacttggactgaaccgagaagctcccgcccgcggcctccgccagcaaactcatgagccggcgcccgcgccgagtcctgggccggccgggctctcctcccccggacccctacccgccagccccggccgggcctcacctggtgccctccccgaggcgggggagctgggggcggcggcagcggctccgggctcgagaaggaagtgagagcgggaggccggaggaagtggggggggcgggccggcgaggcggggcgggccggggcggggcccgaccaggaagtccgagggccgatctccccctctccagccccggcccgcccccagcctcgcccccggcccagtcccgggcttgccacgttcccctcccagtccgctgcccctgcggtcagtaagtcaggcctcccaaggtcaagtctctccgcctcctcctggccaccctacccctggaggccctaccctgggcgctaggcgttcgtcctcttccccccatcccgcccccaccagcctccgcgggaagatgctgagaaaggcgcccctgggcctggtcccttcagtcaaccccagggatagagtggtggccgaggctggggcagtccccgcccctgccctgagccccgggggagtgcgaggtggtggtgattcagcagtgggaaggccccagacccctggggagggtggggagactcggggggaagaggagctggcgtcagcacccaagggaaagacaagatcagcagaggcgcaggcggagccgcgggccccaaaaacaggatgtcgagtcgtcattcagcaccgtgcagccctgcgaggcctggctctggggagggggcggggcggacggaggacttggggcttccctcgccccctcgccccctgttctgctggggcgcgcagctgcttggggctgaagagccgcacccaggcctgaggtccagcttgggccccggcgacccgcgggtgggcgggctcatgggcgccctctggtgcttcgctccctggctttgcgctcggagctttgacttgagaatccatatccttcgttcagcacaaagtttctgagcgcctaccacgtggagagagctaagtgctaggtgctgtgaagaaacacagcgtttaagacaggatccctgtcttccagaagcttttcaaataaacggattgattccaggaataaatagcttaacctttctgagcctcaaatctgtctttggtaaaatagaataattatatttcaccccgtagttttgaagataacatgagaatgggtgtaaaagacctgttgtcaatgcgtatctcaaacactaaacaaatatcttttaaaaatatcataccctaagagtctggcgcggtggcg

SEQ ID NO: 55492 - DNA, 2518 bp, Homo sapiens
accagagaggtagctgggagaatgagatgcagggaggaagcatttacaggccccaccgaaaaaccttaaagggctgagagcttgagggcaggtaggaaaaagggctgtgagagctaagggagggcatcccacttagcttggaggggaagggaggcggggtcgggaaagcagatggcaccctttagcccagactcaaggaatgtgtaggggaattttagctagagtggtttggacatttcattttgctttctggcatcatcatttcctcagaaaacactcgcaggccccagtggccctcgtgggcctcccccggggcgggtcttagcttcactcggcaaccctctgcaaaagagcaggccctcccaggagcgccgagtcctgtctgcagtttgctgattttcccaccaggggccgctgcgcatgggcgacgaagcgcgcgggttcccaagccgcagagaggcggaagccgattggttgtcaggcgaggcgcgagggcggagcctgggaactggccgggagttgggggctgggagctcgcccccgggccgagccgggtcaggctgttgtcgcctcaggcagctcctgggaggctaacgtcgtgtcctgggcctctgtttagacagctctagaactgaggcgagtggagcagcaccaaggcccggagatcggggcagggcagctgctgtcgccgccgccgcaggcctgagttacctgagtaactgcgggtcagggacccgcccgacggcccgcggttggcgctggagactctcggtggggaaagggaagctgggacttgatcctttgcgcgggatcctggcaaagactagcgcgggccgggggtccgggagagcccgctaggggcggggattccggggagccgtcttcaccggttattccgggatccagctgggcgctggggctggcccgggcttcgctggggaccgggcggcgcggggcgggcgcggagacgcacgcccccgcccgccccgggcccgccccgcgccgcccgcccgcctggaagccgctgtcctgggcctggccggtgtgcgtccgcctgctggacctgggcaccgccagccgcctgggcacgggactgggcgggggcgctgacctcggcctaggaggcccaggatcccggagacgcccgcgccctcaggaccctgcgggtcgcacgccctccccagcttctgctgctcgccgctcttcggcagggcgaggtcaggtgcccccttctcgcctctcttctcttctcttctcttcctcctccacttctgtgcccgcggagactccggccgcccccttccgcaggggtgtagtaatctgcggagctgacagcagccccgcagccaccctgcccgaagtctccggaagcggcacgagctcaggccgccgcagccccggcggacccactgttggacctgaggagccagccctcctcccgcacccaaacttggagcacttgacctttggctgttggagggggcaggctcgcgggtggctggacagctgcggagccgcgagggcatcttgcctggagaccgtcggctgcactcccgggctcctggctttgcctctgggatcccgaggtgtccacatcagacgcatgttgactgagacctagagtcatggatgtatgcgtccgtcttgccctgtggctcctctggggactcctcctgcaccagggccagagcctcagccatagtcacagtgagaaggcgacaggaaccagctcgggggccaactctgaggagtccactgcagcaggtaaggccttgctgcgggctggactgggctggaggctttggctcaggactgagtggcccgaagtgggcaagttgaaatctaggtttgtacatgtgaggttcatggaggattcacacatggcactgcctgttccaagtagttcaagaagttctttctggtcagtagtcatggcaaatgcctgtatctttcctgaacaactttcctcatcccccgcactcaggattttttttgttggcagtaagaagaagcctttggggcaacttgaccttttagatcagcaaggaaagaccccatcttaggcctacttgtctggaagaatggcctggtgagatgataagttcattgctcctattcggttttagtactgagcagcatgggggaggttggggccacttatgttggaaagggaaagttaaggctgggccacctctgttgcctgaaagcctggtgttcaggtgtgcctattccaacaaccgtgggaaccctagtcccacccttcccttaggtagtcttgtctctttgctgtgcgcatttgaaatatccaggcggtttcttagatggaatcctatttacaactagggtgttaaatggccttttcttgacatagacatgatataattcctgggaccacttgttgacttattctgtttcttctgactgatgagggtgggaattccatgctacaggtttttttttttgtttttttttttttttccctgagtctgcttgctagggaaaccatgctacttttgat

SEQ ID NO: 55493 - DNA, 1422 bp, Homo sapiens
tgtggagcctgtctaccctaatggagcctgtttgggttgttaggaggtctgggacctacacagaggagaaccaggaagcagttcacaatattatattatgttcaccgaaattggtctgggtacaattagggatatacaaagtcaaatgtcaagtgctgcttctttggacctatccagctagaaagcttttttattaggcacagaaaaagaagcccagcaatatctgtttcctatggtgcctaatatatgcaccctataccactctcttgacaatatctgttcagagcaatgaggaatctgtttgctgggatgtacagtataggcatctgaaggagacaggtcagagccttatgttgtatgtctcaccactgagctgttcagctggctccattatggatttggggcctccacaggcagggtaaatgtattaaaaactttgtggggttactcgtggccacctggaaagtgccaaggggaggttctctgggcattgagaatttgacaactttgcctgtgttgatacaacttgctagagcaggcaagacttgaagagggatggctgtggtcctgtcatgtttatcagagtggagcagatttcttttgtgtgagaagtcatgcaagaaaaatccggaaatgagccaacagcacttaaacttttgttttctgctggggagcatggaatagagaaggtgcaggttctaaaatttctgtatgggtggtggttgctttcctgacacagagttccagccccagaccactttactcacttcatctccctctgttccccttgctgcattcttggcaagccaagcatttttctttgttctgatctgcagaacaaacttttatttatactgcttcacttttgtttttacttatgtcatttaacttccttcagaatgtctttattacctgtccttctttatttctacttccagtcctctatgaagtctttcctgacactaattctagctgtgagatactgctgacctgtgaacaaactctggtagcacttactatctgcagtgctctctgtgcacttcacaccctgcttacgccacaagaggcagcttgctatgtcttttttttttttttttgtgacagagtcttgctctgtcccctggctggagtgcagtggcgtaatcttggctcactgcaacttccgcctcctgggttccggtgattctcctgcatcagcctcctgagtagctgggattacaggtgcgtgccaccatgcccagctaatttttgtatatttagtagagacggggtttcaccatgttgatcaggctggtcttgaactcctgaccttgcgatccgcctgcctcggcctctcaagatatgtcttttacagcaagccagtacctaagagcactgggcattggtttgagttcttggtgacagtatgacagtgtgatccaa

SEQ ID NO: 55494 - DNA, 1428 bp, Homo sapiens
aagaaaagaaaagtaaaaaagaaattaaaactgtgctttatttattattattattatttttgaatatttccttgtctcttaagggcaagagccatgtctggtttgttggctgtagtacatatcctcagtacctatgagagtgctggtcagagagtatgtgcccagtagatatttgttgaccaaatgaataacaatgaattgatctttggattgagtaggtggggagggagaataccaagtacttgacatcagttcctgtaaaactgttagatgagcatgccctgggattgggatagaattcacatggtgagttttctgaggagttctgtagggattatttttctgcctgacctagtacttcatccctatttactaagcacctactgaagctgtgctcagtgacagttatcagtcataatgagggatggtttggctattgactttggttggcagtttttgtttgccacagcaatgactaccctgagcaggtggctgcagtaggagtggagaactgtgcttgaagaggacatgaaacctgtaggcaaggccttcttgggtcttcctgctccctgtctttggttccatggcccacatgggtttacctcaggtcaaatttgaggcagctgaatgaacagaatgaactttcactactttgctgagactagcttgtggaacggaggaggaaacctttcatggttcccactcctgggcttgttgtgcagcagagagataggatagtcctgtgaagattgctggctttttaaatgttatctctgatgctgagaactccagcctgagcaggcatcacatcagctttccttcaagacgctggggaggggcctcttgggagatgtgatggaggagacaaaagaataaaagtaactgtgctgtcagcacggcccagtaagggcttatctgaccctttcctcggttggccatatacacagagcccctggctgccttgtgttgatctctggcctaggtaatgaccagaaatctcactggcaggcaggcaggcaggcaggcaggcaagcaggcaggctttcaaatctcatgtgcctctaattttctcagtgtgattcagtagctctgctcctgtttggcctctctgggttatctcaggcctctcaggaagctctcagaactctcgtcactacagtgtatgttcgaacaaatgtgtctgtgcttgccaagttcccagagctggcttctgaaatacagcagccaggggagatgggtggccttcaggtgtaacacacacacacaggttagaaagcagtgtgtgtctgtgtgtgtatttgttgctgggtggtcgaatttgtggaggtcttgtttcaagaaacttttgctgacaagagcaaaggtcactggaactcacacttcatatctctgaagagataaatatgtaattaagacaactgaaataac

SEQ ID NO: 55495 - DNA, 2054 bp, Homo sapiens
aactgatggtagtcatattataataactccccagattggtttgtgctctgcactttacaaatcactccactgtttaagacctgtctttttgcttatcatgcccacagctgctctgtgaggtgggacaggaggggattgttatctccatattattgtaaacaaattcaaagaaagcaggtgacttcccaatgtcatatatgtaattaggggcagaacagaaactatatctcaggtttactaatttctggcttagaattttatctgcaggctcttctacatttgtttttttccttaccatttcccctcttgccttcaagggtcactcaaggcagaacatctaccttgtgggtttttaggaggtttggttggtgacccagtgaatggtaaagtagcccagatatcaatcttaggtacttctcagtggcatcagtgttctgggttgctattgccgagagaattctctttctgtggctattaggattaatgttgaactaagaagcattagattattatgaatggtcagaacacactctcatggagatccaggaagcaggacaggatgtgtggtgctgggcacttttgtgttgtggcaatggcatgagtttgcaagcagtcaggccagagtttgaaatctggctttgctgttgtttgctggcctcatgacccttagtaaatcattaatctctctgagccttagggccactgagagaatgtatttaagggccacataatggcctgtgaaaacagtatttgttgttggtttttattgccaatactactttaagtttaaggtgcctgaagggcattagaagcctgctagcacctgtgacccttgcaggttacttctcgtgtcttgatttccaagcattagtgatgactaccttggaagctattggctgatagaggatgagcttgaatgctgttcccaaagtctcccgtctcccaagtttccagtgccttctcagggcaatgaaaatagtttgtggacagctgggggatggtttcagtgtcaaactttgggagtaaaatctttcatgtttttctgaagaactttggcattagaattgttggttctggaaagtcaagaacacagttgttattgagagattttagttatttctgaaaccagatattgctccaaagctgtttgttaaatacttccctactcttcctaaacccctgcccctccccaaaagaaaaataaatcatattcagaccatcgtgcgatggttatatctctggcctccctggtcacccagcctctagctctctgctagcaccactccaaattgctgcttcaaaagaggtcagtcagcccctttcccttactcctcaaccatgacctggtctgtctggaaagaggatgagatacatggaccaatacatcctatttaaaagggagcttgctttctcactagggactttagactgcctgacacacaggaaatgactagaaaatctgaccagtggagcataactcattgctaaaatggcaggtttggacggctgcaggatgggagagcaggcttcctgaagaggcaggaaggggcagctggatgggaaaacagtgacttttgagtttttccttttagagtatggtgacgtaggccgtttattaaaaaaaaaaaaaaaaaggaaaatcacataacataaaattaatcattttaaagtgtacaattcagtgggatttagtactatcataaatgtagttcaaaactatttcatcaaccctaaggaaatccatacctgttaagcagttgttcctaattccccctctccctttcccctggcagccatcaatctgtgtatctgtgttttgtctgtatagatttacctattctggatatttcatataaatggaatcatatgatctattgatcatatgattattttattttatttatttattttttcaagatggagtctctctctgttgcccaggctggagtgcagtggcatgatctcggctcactgccagctccgcctcccgggttcatgccattctcctgcctgagcctcccgattagctgggactacaggtgcccgccacagca

SEQ ID NO: 55496 - DNA, 2496 bp, Homo sapiens
gggaggcagaggttgcagtgagccgagatcgctccactgtactccagcctgggtgacagagtgagactctgtctcaaaaaaaaaaaaaaaaaaaaaaagaaaatatactgggagagaaaggaaggagggtctaaatacttagcaatatcaaagatgccaccctgtaaggatgaccagggttgtgccagacagagtgccctggagcatattctgggcagtgtgactgtggaagtgcatggcatattcagtgaatgacgagttgttccctgaactggagtgttggactacttggagggagtggcacgagatgaagctgggtgtgtgtgaagggccagatcccgaatgaccttgtattttatggtaaagagcttaaatcctattggagttaagctttaccgtcgatatttaagatgggtgtgacatgaccagagtgttttttttaggaagacctcttatatgcctgtgcttagaatgtatagattataactagaggcagggaaggcagccagaagatttgcagtagcagatgatgaggctggaacaagggtagtggtcatgggggttgatttaaattgtgtgacggaaggatgaaggaggcagtgttaggtgactgggcattactgtgatgctgttaacacatggaatacaagagagagagccggggaagttaatgctgctcttgagatggttatgggtgatatccatgagaaaatatctggtagttgggggagaagacatgagttttggagttcctgagagaggtaggaatagacatgagagaatcatgaactctaagaaatagtagagactgtagaagtagatgagatcacctgagtaaaatttataaaatggggaaagaaagggggttaaggatagagcagagaggaactctgatatgtgtggacagaaaagttagggagggagcctgaggaggggcaatcagagaggcaagagaaagtactgtctgggaagccaggaatgagaaaagtttctaaaagaaagcaatagtgtctgttgcagcagagaacaggtagggtgagcctgaaatgaggctactgagtcattggtgaccatggtgacagcagtttcagtggaggggtggggacagaagctagactgctgtggcttagggagtcagtatgaggcaaagatgtagaacaaaagacttttttgagaaatatagttgcgagggaaggaaggaaagagggtggtattttgaagaggcagcagaggaggcaggttcaaagatttttttttttttttaaaggtggaggggtggagtggagacctgagctggtataggttgtggggagaagagattgagaaatgtagccagtgaaggtgccacatctccctgaatacttcatactattgtgggagtcttaaactgtgctgctctgctgaagcctgcggtcactagagcatggggcagacaagggagaccttgtcattcataagtaatcattgcaccatttattgagtaaccgctgcatgccaggcatttttctagatacattagacacatctctgatgctcaccacagttcccagaagtgagtattgtccctattttccaaatgcagaaacagatgagttaagaaacattcagctagttagtggtggagccagtttcagccaggtttctggaactgcatgatgtattctttctgcttcccagtgctattttttttccattaaatggagcttaatgttgaaactctaaagagggcccttgcagggggcagggtgggtggcctagagggacaaaggtagagttctggggctagtgctagcctggagggaacatgacttaatatctgggatgagggaggagggtcttggtctggccttgctctaccttttctttacttaccagtggctctggtggtttcaggcttttactctatttttctgcatctttctgtaacttcttaccagggcccctgaggccctagctgctgtgtgctatggactgttacagaggaaaaaaagaatcagcttccaggcccagaggggcttatcctttttgacaaactactcgtgaggaattgctgagctgtaggatgcactctctttggcacagtggtaggcttcttcctaagtatttttatttgagttgaataattttgattcagtggaaagagcaaaacactgagaattagaagacatgatttccagtctaagagatgaactaggttacctcaggcgagtcattctccctttgcatatttacttgatgtaaggtagggactgtgttttactcatccttgtatcctgagcagctagcatatgccctgactgaataggtgtcctgaataagtttattatggagctagttaatctgctcttctattaaatgagaaaattggaccttttgatttccaaagatttgccaattctaaagcgtattgttctgtgagggcttatgatgttttaattataaaataatatatactgtcacttagcacctactatttgctaggcattgtgtgaggtt

SEQ ID NO: 55497 - DNA, 851 bp, Homo sapiens
agccttaattcctgatgcctggatgattccctgaactctctcatatacttaaagacattttattgaggtgaaattcatagaacattaaccatttcgaattaaacaattcagtagcatttagtacattcacaatgttgtacagccaccacttctatctagcaccaaaacatttctgtcattccaaaggaaaaccccttacctattaagcagtttctccctattttccgctcccgctggcagccaccaataggatttacctattttggatatttcatatcaatgaaatcatataatatgtgaccttttgtatctggcttcttagaataatattttggagcttaatctacgttgtaacgtgtcggtactttctttttttattattttttttggtggtaaaatatatataaccaaattttgtcattttattcattgataagtatacaatttaattacagtaattacactcacagtattgtgcaactttcaccactattttaaaacatttttcatcatcccaaacagaaactttgtacttattaagcaataactccccattcctccctcctgctagcctttgttaacttccagtctactttttgtcttcgtgaatttgcctattctagatatttaattaagtggaatcatataatgtttgtctttttacgtcttgcttatttcacttagcataatgttttcaaggtccatctatgttgcaacatgcatcagaaaacttcattttttttttttactggctgaattatgtgtatatatacataccacaatttgtttattcatctgttgatgaatatttagactgctatgctatggacatgctagttacatgtacttgt

SEQ ID NO: 55498 - DNA, 787 bp, Homo sapiens
tcttttgttgttgttgtttgtgcttttgtgttgtatctaaaaaagtttgaccagcatggtggctcacatgtgtaatcccagaactttgggaggctgaggtgggcagatcacttcaggtcaggagtttgggaccagcctggccaacatggcaaaactctgtctctactaaaaatacaaaaagaattagccaggtttcgtgctgcatgcctgtaatcccagctacttgggagctgaggcaggagagtcactttaacccaggaagcagaggttgcagtgagctgagattgtgccactgcactccagcctgggcccacagggtgatacatctcaaaataaataagtaaataaataagattaaaaaataaaaaatctgttttcaaagccaaggttatgaagatttactcctcagttttatgggtttgctcctatgttttacctcaaagagttttatggtttagcacttatatttaggtcattgatccactttgagttaacttttgggtgtagtgtgaatttcttgaactttaaacccttgaatgtgtgccaatccagtcagtaatgtttttttttttttaattgagacagagtctcgctttgttgcccaggctggagtgcagtggcgtgatcttggctcactgccaacctctgccacctgggttcaagcgattctcctgtctcagcctcctgagtagctaggactacaagcatgtgccaccacacccaatttttttttttttttttttgacgaagtctcactcttgtcccccagggtggagtgtaaatgggg

SEQ ID NO: 55499 - DNA, 842 bp, Homo sapiens
ctttttatgttaaagcaggtgaacttctgctctagatttgtgtgttaaggagctgtgggaactggcagttagtaccccacattctggttccatgaagtcatttgcttgcatttacggagccccttgctgtatgctatgagataatggcattctgaggctggaggtgccaggattttgagagattggaatggcttgttgccagtttattattgcctctctcctggtggagtggctgaagctagtgccaagggtagtacacctgggatccctgtctttttgtttctagaacacagtgctttagacttgggcttataaatcagagctgggactttgagaagatttgtgagcaagttcatcaagatattggggtcatctggcctagtcttcttgagtttcacatgtagaaacaagcctagagaatactgtaacacaaagttagaagggttgaggagggcgagggaagggtcaacaccttaccgctgatcgctttgctttactcctgcattttttgttcagagtggaccccgttctgcaatcgttggtctgaaattcaacccagtcctaaattgcatgtctcgggccacaggttaccaagtttacagacaacagtcctgtgcctctctggacacgtgactggtctattaatagatctgaagttctgggagagcctcagctcttcccccacctttctacttccagcagcctgcttgctggtaatttcttcagtgcccggacaactggacagagaatggaaacagggcaatctgcccatccccttttaggaggtaatgcaggcccaggtgtatatatatgagtagcctctggcctcatgggtgtctgtg

SEQ ID NO: 55500 - DNA, 885 bp, Homo sapiens
ggcgtggtggcacgtgcctgtaatcccagctactcgggaggctgaggcaggagaatcgcttgaacctgggaggcggaggttgcagtgagctgagattgtaccattgcactccagcctagcgacatagtagactccgcctcaaaaaaaaagaaaaaaaagataggagttaagtcaccctgtgtgtctctcttgtgaaggatggtttgttgtgtagaactccaggggttagccttctctgattcggtgtagcattgtttgtcattttgcccagaggtgtagtctttgatctggctaggggccacatggacaggctcaggggatgggagacttatgacattaggacattgactcttgcttgcatgtcctcctgggatttggacatatgagtcatttggagtctgtatctgtactaagctctccttgccaaattctgcagcctgtcactgatagccacagctctctgtacttgctgttgccttcttcctcactctggcccagggattcttcctatcttctctttggaatggaaaacagaacaagacttttaacttttaggtgcttgaaccttggggacagggagccctgatatatcagctggtctgttgaatgagatcttcatgctggaactcagggttgctatctgagatacagatgttatagaggatacagctcatcctggcttgttttgttcagactatagtgactccaggtggacaccatgctgccaaaccctacctagatagggcatctgcctaggtaacagaatgatatatgcagataaaaacaacaacaacaaacaaaccaaaacaatcttgaggtttggtctgacatgctgaagctattctccttttcccctacagcttagctatgtaggagcgattattc

SEQ ID NO: 55501 - DNA, 2553 bp, Homo sapiens
ttttagcagcgggggggtttcaccacgttggttaggctggtctcgaactcctgacctcgtgatctgcccgccttggcctcccatagtgctgggattacaggagtgaagcaccgcgctggcctactttttctattttttgtagaaatggggtctcactatgttgcccaggcttatctcaacacctggcctcacatgatgctcccgccttagcctcccaaaatgctgcaattacaggctcacttacgactttccatgatttttgaaattacttcacagggagcctgggcagcttctggagggcagtgagaaaccaacgaaaaggctttagggaaaagatgccacagatgaaatttcataaagatcgctttgggtagcccaaatcagaagcttctacaccagccttacatattacggttctcatctattcttattctccactctaagtcaccaagtccatcctacctccacaaggcaaataccctgtctctgccaccatccactgaagaaccctaaaagcaaatgggtactgaccctgccctgcttaaaattctctcagggctctgatttgcgtcaggataaaatccaaacgccatcggccttgcgcggttttcttccagttccagagtgtcagtcctctggccgatctaaaagccctggggctccaagctgcccacggctgtggagcctgggctggagcccacagcggacggcagtgttagtattattataataaatgtcagagcaagaaaaacgttcccgccggttaggttttgttatttcaaaaataaattaaccgcctttcctccggcggagacgcgcaggtgagagggcggcgcctgacccagcgggctctaggtgctacgccagggccccgagggtcccgaactcggcttgcccacacaaaacatggtagcaggagagcagcatttccgccgggcatgtccatatccaatggggcccatgggagaggcgtagtcttctgggtcttgcccagactcaacatggcggctacacgtcgcctgtcagtctgtgaagcctaccccgggcgtgggccgcagcgtcgagtaacgtcattcgaaccccgtcgcgcccctttgtgcgtcacgggtggcgggcgcgggaaggggatttggattgttgcgcctctgctctgaagaaagtgctgtctggctccaactccagttctttcccctgagcagcgcctggaacctaacccttcccactctgtcaccttctcgatcccgccggcgctttagagccgcagtccagtcttggatccttcagagcctcagccactagctgcgatgcatgtgatcaagcgaggtgagggggggacgaggtgggcgagaaggaaggtgaggggatgcgggctgccgccgccggagctgatgcccagaccgcccgcccgccttcgctgcttcccgcctttcccgcatttcccgccgcggccttccgccctgtcagcccgctcggccttctgtcttcagtcagcctgccccgaacctccttcgggccttcaggctgcgccccctcggctttgtcatcctgccgcctttcaaaaggataacacttaccccgtatcgagtagtgactgcgtacgccgagcacttgccaggcactattttattcctccctgcaagcctctgagagatgattagcttattacagatgaggaaactgacgctcagagcgaggtgtcgccgactgacccaaagtcacccataggtgacaatacggtttgatttgaaaaccgtggggttggtgagctgtcttaggcacagggtcggggggcagctaggaaagaaggagggggcctctctaccctccgtaggcacttgtcagtttactgatctcttttgtggggtgaggataggagtgtggcgtggaaaaaacagatcccagacagacagcaccctcgagttcctttcccttcatgggaagagatgctgaatcagagaagggtggctgagacatcttctgacaagatggggactgggaagagtcaggaactcgtattctttctcaacagttctttttcattagacttgccaagtgcccgctttgtgcccagccctttgcttggctttgtgagattgtaggaggagacagtccctgccttgggaacaggcttcatcgggttggaaaaacaagagcaacatacttttaacaaccgcatgagatacgtatgaacaagttttgagttgaacctacttgcctttgttaaagcaatacaatgatttcaaaattgtaggcacttagtaaatactggttaatcgactggttgtttctattttgtcctctaggctgtgaacatttcaaagatggagacttgtttgagacagagtcttgctctgtcacccaggatggaatgcagtggtgtaatcatagcttactgtaaccttgaagtcctgggctcaagcgatgctcttgcctcagcctctcaagtagctgggactataggcatgcaccaccatgagtggctaatttttaaaaatttctggtagtaaaggagtcttgctgtgtttcccagtctggccttgaattcctggcctc

SEQ ID NO: 55502 - DNA, 597 bp, Homo sapiens
ggtcataaatcaattaaaaaattaaaaaattggtttatgaccaacaaaaaagggatgctgaaattactatcaccagattgatatttggttggttagatgggggttttgttcaactttctaaatagtcttggtaaacttgataaggatcatatcatatgatactgaatggtaaggtcagatctggcaggaagtaaaatgaagatcaaagcttgtgtcactattctattaatcatacactgctttctttaactggagtaaagtaaacattgggttttccttctttagagcataccagaaattcctgatgacctgaagcaactttataaaactgtgtgggaaatctctcagaaaactgttctcaagatggcagctgagagaggtgctttcattgatcaaagccaatctttgaacatccacattgctgagcctaactatggcaaactcactagtatgcacttctacggctggaagcaggttggtagagaatatcaaggagtacttaattgccagcttgagatattttggcattggaatgattttatgttttagccacctattaaatattatcacctagaagttctttaagttcaaatccag

SEQ ID NO: 55503 - DNA, 1101 bp, Homo sapiens
agctactttttaccatgtaccttccatgtgccagagatacttcatgctttgaatatatcttcattaatccctcctataacggcggaagtcagttgcatatatgtatgtaggtgtatatgtatgtatacacacagagtaacaggaaccgtggccagcactccctgggctcttttctcagctgctccaaacttagtttagttcctgacaacacttattctaggacaaagaataattctgaaggcctatacatttctggttgaacatcctaaacagcctgcccctctcacctctggaggacttttggacctgggagtctccagaattgcagacctccccgacactgggctccctaccctcctggctaggctgtagtcctggctatcccagccacacccagccgtcatcctaggtcaggtgccagcatgggggcagccgggccccttccccttctgggtaactccacagtcacgtccacaacccagcctcctcccaggtagggggcagccgggccccttccccttctgggtaactcggcagtcaggtccacaccccagcctcctcccaagcagggggccagcaccggaagcgcagctggtcttgggttgagggatccctggtgggagaaggggcaaatgggaccggctcaaggatggagactggaaggggctctgcaaccctggggcaggggagagaggtcccctaggagggcaggggtcccttgatctagtggggttcactcacctttacaggggactcaacgctggtagccagctccctatttcactttcagtttccgctcagaagcaagtctgagaggaaaggggagggaggaggaggagccgtgggaggagtgagggaggagcagtgggaggagcagagccttgaaagggtgtgtggagaaatgcggctgagaagagaagtcagagttgagctgggggaggcttcagaggctctgcatgcccaggaggcttctctgagactgggaaggagtggaaactcagtagcccgtggtcctggttgcgcgctccctcccatgtcttcattatctgatttggtaaaatatctacaagacgggggagtccgggctgctttctttgacac

SEQ ID NO: 55504 - DNA, 1453 bp, Homo sapiens
gcaaagtgaaatccttacatggctgatatggtttggctctgtgtccacacccaaatctcctctcgaattgtaatccccacatgtcagaagaggggacctggtgagaggtgataggatcatgggggcagatttcccccttgatgttctgtttaaaagcgtatggccccgcccccattccctttttcctgctccgctgtggtaagacctgcttgcttccccttcatcttctgccatgactaagtttcctgaggcctcccagccatgcttctgtacagcctgcaggaactgtgagtcagtcaaacctcttttctccataaaagtacccagtctcaggtagttcttcatagcagtgtgagaacagactgatacaaaggcctacaatgttctgtgtgatcacagctaactggaaaaaaaaaaaaagaaagcagcacccaggtatgggtagggcacattatattcacaggatcaacaataagactgatattaatagatacttgacttcaaaaaaagcaagtgaaggcagaatacaattaatatactaaagtggatgaaagaagaattgcccatttaaaaacctattcaaattgaaatagaattttagacagaggcccgggaggtgagtcatctttcacaaacaaagatgactaagataattttacaaatgagcaaaagttgatggaatgtgtcactatatggcctgtaataaaagcaaaaataaaagtagtttttcatgcagaaaaaaaatgatccagatggaaacatgaaaaacctggagggaatgaagaacaccaaaacaaagatgcatatgaatgtaaaagaatctagattttacaaaagaaaagatagggtggggaggatgtcaatgaattaaacagtctaagtgttccaatattccagcagttatctccagcatggtttgagccaatggccccactgcccactcccccactccatgtgcttcttatcctgctcctatgatgtcaggattgcccattcagaatggagttgggggcaaattaaggtgctttgttcacaaaaacactgtctattctatctggctcttgtctggcttttatctggcttttgccatattaggttttggtgaggtgcttttcatacaggctgtatccccttggcctagctgtacattgttaaaactatgtaggaattccactttatcccagcatcccaaaagatcagacttatcatggaggagtgctgagtccacacccttgagggccaactattacagaaggggaagttagttccagggtacctgtgtgggaagggagtgagatgactgagttacagcgttctgagattgcttttaaaaattatggggaattagggtagacaaaatccatggagaactctagtgaaaagcatcttctcaggtccttgaaaaatagcacacattaagtcagctgtaggtagaaagatcactctttatcat

SEQ ID NO: 55505 - DNA, 918 bp, Homo sapiens
ttctgtatatcctttaaaaggtaaatttaaaaaactaagtcatttaattgaagtttccttagctgcaaggtgacaccttcctgagttaagcctctcttaattgagatgctgttcaaactgcctgtaaaaatgtgttctagaagactcacttgtatgtgcccagaagatttggggatacttatgaaagagaatgtggcctgaaaaaaaattgtcaggtcaatgaaggaaaatgagacaaggttaccatgtctcaatattgcctttgttgtattctctgcaggcttgatgcatatgaggactctgtggaaataagtcttccctttcccacagaaacactccccaaaccctaatcccatctgtaggattcctgccgatagtgtgctacatccttaaaatgaatcagcaacaagttgcaagttatatagtttatagagacactgactttgtcctccagattaaatattaactatgttctagtcattgagctaacatggataaagcatttagttactattgacaggattactgacatagtcctcccaaccacactaaggtaagaattactctattttgcaaatgaagaaattgaggttcccagaagtgatagaattgcccaaggtcactcagagagcaatagtgaaaccaggaattcagccaagtttgtttttaaagctcaaaggcttccaagcctctctgttccacattttccttaactgaggaagggtgctgaaaggcctttcctggaggtctgagttgtcatgcacttagacattagctacacccattatttctaaagtcagaagtatacagatcaaaaagcagtttctttcagtgctgtttccagaggaaggacaaaacgtaaatctaggtctgctcactaattctacaactccataaagtcaagaaaatgttgaatac

SEQ ID NO: 55506 - DNA, 1088 bp, Homo sapiens
ctggggatgggtagttactgctcttcaaaataagacctgctttaatgtttgactttttattatacatgaattactttgagaaaattcaaataattaaacgttcggttgctttgactgtgccttccgtagggtacagcgagagtctgagaagggcatttgagaagggggcggggcctggaagacttccagttaggaccccagcgggaagggagtcgaggggcgggcggtaacctccggagtcagggagcagctcctggcctggccacagggcgttgggcaggtccccaggacagcgggcgggtgggggtaaagtgagcgtgcgggatctgacttcagaaaaggcagagttatctacccacctccctcctcggcccggactggcgcttcgcggcggaaactcaaagtgaagaagcctggttccgcagcgtccaatggcccagcgtcagaagctgccgttcccggcagctcagcacttagggccagagagcggcagaggcccagaacccaaagcccggcagcgcaggcccagtagcccgcagctcccagaatactacacccggctctaggccccgctcgcgggacggcagccaatgagcggccggctgggcccaggttggcttcgcccagggggcggtgtgtttgtgggggcagccaatcacaggcagggaccagggtacccctagccaattggtgatgagacgggggtttcggcgcttctaggcatgtcaatgttttttctctacttcctgggtttttctggtcccttcaccgactcagattcccttaaactgtagagggttctaggagttagttctaggataggtcaaaggattgaggctcccaaatgatgccgctcaggcactgcattaagagaggctcaggtggctattcatttgccagtttgacttgttaaactcagaagcctgagattggccaagtctggttctgtgacccatcttagcaaagggttgggcgcacatatggtgtggactctgctgttcctggcaagattcgcgacctctcatggttccaggctttaaatactgggttcttaaacaaaacaaaacaaaacaaaacaaaaccctctc

SEQ ID NO: 55507 - DNA, 1319 bp, Homo sapiens
ccttcccccctgagtctttcggcctgggtggaggacgcggctgcttcaagtccttggctctgatccaggccacagattccaggttagtgagcaagtttattttctggccagctaccgctgtccccacttgtctggagagtttgacccgctctgcaggtcgggttgggggtggttcacgggtgaaagaagaatgagggagacttctgcattttcaagtgaactcaagtttgggaagggagcacagaagaggcacctttgcagctgggaataggccgtgtaaagagagttaaacctctattctacaagctgaagtatgtagaggaggcagctctggaaactgctttagggaatcactgcaaaccattttgtcaggcgtggattcagagtcagcatcccttccccccttcccccgttctccccttccccccttcccccttcccccttcccccttcccccttcccctcccccatctccagcctggccgctccaggaagtgagcaccgtttatcccccaccccaggcggcccgactcctcccagaaggagttgggagatgagccttccgcaaactcctgacctgtgggtccgtccgttcaacggccaaaggctggcggaggagggatcccctgcctttctcggaacggaacggagcagagtcgtgcgtggttgagtttagataaaagccgagtgagcgcgctctgttccttaagattagtttaaggtgccttggattgctctgaagagctttgaccacctgatattgcttacatctggaacttcttggcttctcattccccagatgtgcgggtcagagaggtatgtctaccgttctgttgactggctcttattgtcacttctggcagaggtgacagggcagtgaaagagataaggtcctttccctttcggaactcattatatctttatttctttttctttctcactgcaaatgaccccactgaggttagagacattttaatcagtcagtcaatagagacagaaatgtgtggttaggagcatagatgccgcagccagactgcatgtgttcaaatcctgactctgacagacactggctgtgtgcccgaagactgttaacttgacttctttgagctttagtttcttccatctataagatggacggagtaatatgtatatcttagagttttggtgaggattgagtgagacagatttaaacacgtaggaggctgcctgacacaaattatggtcattattactggcaaactccatgcctagctttaaaaaaatgcacaatcaaaacaatttttaaattataggtttctgaaatgcagggggtagaaattc

SEQ ID NO: 55508 - DNA, 949 bp, Homo sapiens
tgttctcttcctccagattagcttcttctttccattaagtgagaggctctggtagacctcaggaatgaagcaaagcctgttctgctcctacagtgagatagcaaggcaaaagctgctgtgcagtgttcacatagtatatatggtagagtccctgtgtcttttggcatttttgttgccaactatcctttctctgcttctaaactagtaaagcagttactgttctggtcccagctttactagaatatttttagtccccatatcttggtgacctttggtgggggaagcgattccaagttagatacaggcagtttctctatgtgtagacacacattcctatctccagcactcatccatagcaactggaggaaattcacttctatccattttcctttaacccctgcatcccagtcacccctttattgcaatgcccgaggctctggatcactccaggctgctgcactctcttaaattccaggtaactcttttgggatatttatgactttcattttcagggctttgggacctgggagaatggtgtgagtaaagccagagggatctgagaagacagatactttactcctgcactggtgtctctagataatttcccagctggctctctctgcctgtgtaaacaagccttgaggatatgacccttgccaactcttgttagccactcctgtttacatagagctctaagtacatgcccatggaaatagctgcatattcttgaatgactaaacttgctcatttttctgtccaggtcatttctgctatccagaagcacagctcagctgagagtgaggcaccagaagaatgcctaagagtttccaaaagtgatgatttttctaccattaatatattatatgttggtagtatgaaaggaaaataaatcttggagcttcaaaatcactaggccaaatagaaaagtcaagctgggaactgcttaggg

SEQ ID NO: 55509 - DNA, 579 bp, Homo sapiens
tgaaaaattgaatgtcatccacacagaactgatgggctaaggtaatatacacatctcaacacatgctttaacaaatctgtctgatgctttactattgtaaatgaaagagtatctgagaaaactctcaatcaatttaggaagtttattttgccaaggttaaggatgcacccatgacagcctcaggaggtcctgacaacatgtacccaaggtggtcagggcacagcttggttttatacatttgagggagatgtgagacatcaatcaatatatgtccgcaaaggcgggacagctgagtccggaagggggtttccaggtcataggtagataaaagacaaacaggttgcattaagcaatagggcaaaggaagtaaccagatattcatttatctcacctgagcaaaggggtgactttgagttctgtctggagctttttttttttttttttttttatcttagtagctgtctttttttggaatagaatgggagccaggtttgccctaaccagttctcaacctgacttttccctttggcttagtgatttttgggtcccgagattttcttcccttttacactatctaaa

SEQ ID NO: 55510 - DNA, 1107 bp, Homo sapiens
ctcttgttcaagtttcctcctcgttcggtttgatttcaaggttacctcagtttcaaagcagccctttctgtccagggcacaaaactcctgatttactacttacaactagtggttctcagcctcagattcgcgtaaaaattacctggaagacttttcatttttaaataatgttactgatatatatgttatatgcaataatatgcacccatttactgtgcacagtttgatgagttttgaaaaagttttaccccttttaaagatttagagcatttccaacactcccaaaagttccccaggtcctttgtagccaacttttctcagcaccatccacctctccgccacccatcctccatctcctagcgggtgacatggtactttggtaggtagcacacaagtggatcgttggagctgaaggataattcaaattggtaaactgattcgagggaccatgtgcaaccatgaaagtggtaggagaaggggagttgggtgtttagctggcctgggaggcagggaaggttaaaacagggcttttcaaacacagcactattgatgttttggaatggatcattctttgctgtgggaactgtcccatacattgtagaatgcttagcggcatctgtgacctgtacccactaagatgccagtagcattcccctagttaacaaccaaatatctcttcagacattgccaaatgtgccatctagtgcaaatcctccattctgccctcgagaatcactggattaagagcattaccttctgtccagaggctctaaaggactacacagctcatttcacctagacgctccttccccttttctcttcctgacagccccaaaaatttcactttcatttctcaggcagttcctcctcaggagggagggacttcttcacacagaggaacctcatttgttgaatgaatcctgaccacacccaccctggcttttcttcacctcttcaaccaggagccgagatttctgttgctctgaaggtgtgtggggaggtttgtggggggtagagggtatgagactccaggagaaaagttctcagtgaagttaggggaatttgatttatggccccaagtctcccctgctctgtcgggagcaaagg

SEQ ID NO: 55511 - DNA, 1839 bp, Homo sapiens
gcttccctcctgagccagcgagaccacgaacccaccagaaagaagaaactctgaacacatccgaacatcagaaggaagaaactccggacatgccgcctttaagaactgtaacactcactgcaagcgtccgcggcttcattcttgaagtcagtgagaccaagaacccaccaattccggacacagtatgaagacatgtgtttataaacagaggtggcacaactggagttccaccctataggctaacactcctttctctccccgtactcagttcttttaaagccaatgctttccactgttttgggggagggggctttagagaaggagctctcttactctccactcctagcaagaaataaaacctgcttgccttttttcccattatctttgtaaccaatatgaactagggaaagaactccatttacagtgacaatgacaggactacagaactggacagctgtcacaccatgaaggctgatgtcacagagccaggccaaggtgatgagaactgacctgtagagttatgcagaaacactacattagtaaactaataggcattaaatcattaggattccaaggcccctgtctttgcccttgttgttgggagaagacactgaaagagagaattctggctctctacagcaaagttcaattaaaaagtatagagtagggaggggatggggagagagtcagcatggaaaaataaccagccttcgggaaacaaagcccttcactttaaagctctcccttctttcaaatctgcctgcccgccaggcggctctgttcccctcagtcagctctggcagcaagaagtctgtgaactgtgtcttttccccacccccgcacagcttttcagataagttaaactcaccaaggtaaatacagttttgtcccaaagacttcctacttctgccctccacaaaatcactcaatacaccttcagacaccagtgcagaagtggtgattctggggagaagagtgaagacaggccagggaagacgtggttaggattcactcaccaatccacgggcctgatctgcacaaaggaattttcctagaggaaccgcaggaaattcttgctcacactcagggcaggaaagtgaaagataaactatgggccaatggcatttctccacgtagggcctggtgagtcccgccctctgaatgaatcagccgggccgtgtagctgtgctgttcacaggaggagccgtgggaactagaggcattcccactcaatctcccttttctcttgagtctcaggatcttgttatcatgccacttcttctgacatagtttcagattaacccagccaagtattaaaaattagaaaaggtgccctttttcgaaattcttccaatgtgctcctcttgctcctgatctcacagctgagttctgcttctgggtgacagatatggcccaaagagaaggaagaacaaagttaatgatttttagagaattgcagtagatttctggtctggacttaaaaatcttataggacctatgaacagaaaaggagctgcaggtaggagagatgtcatattattaagactccgaaacccagagaggacaggatgctagaaatttatctggagagggccgggcgcggtggctcacgcctgtaatgccagcactttgggaggctgaggcgggcggatcacaacgtcaggagatcgagaccatcctggctaacacggtgaaaacccatctctaataaaataaaataaaataaaataaaataaaaaattagccgggcatggtggcgggtgcctgtggtcccagctattccggaggctgaggcagcaaaatggcgtgaacccgggaggcggagcttgcagtgagcag

SEQ ID NO: 55512 - DNA, 1963 bp, Homo sapiens
ccttttatttataaaaataatttttttaccattcacaatgtcagctgctaatactcatcttgtcagcccaaatttgtagagctttataactgagtatcttcctcgtcagactgcatttcaagaagctaggtcccaagtctctggatctttattttcctggcttaggtcttaaatataagataaattcgactaataattataggactgcattggaattctaagtattcaggcaagctgtataactgtaattcacattctttttattcaaatattcttgcttgagtaaaccacagtaagaataaggaagtagtgactgagtgccttgccagtacagcagatgctagaacataatgtagcattactttccccagggtttattgttatgtaagttcttgttcagcttcctttgttttctttcacttctgagaatttaactttcgtttctcactcagctcctgtggggaaactcatttgtggagaccagccctctggcttggtgagtgaatctggtttacaccggctcctgccctgccttcactcttctcccctgattcaagactcctctgctttggactgaaggtgagtggagcaatctgtgggagcatagaatgggaggctttgagaagaatagattgattgtgtctgggtgagtttaatttgtagttctgaagctgctctgcataaacaaaaagaggcagcttgtgaactgtctgctgagatggcagaggaagaaagcactgagtctgggagaggggtaacctttaaagaagagaggtttgcaaaagcaaaaagccttgcttgtttcctagagggaccattcatttcttcaatctaggtacctccatcaccttccttgttggaaataaagctcagaatcttaagggagacgagcactcaaacaaaggatttctcagcaaagcaattttatttctgtgcagaggggtgcttcttctttgccagtcgccatgagagcacactagaacaaaggaggaagaaagtttttattcctgacgcaaatcctacccctttgccctttccccattggctggagtcggccacacaatctaaactagactcagttggctaaacattttaactttctttagataaggtgggcacgtgagggagagaggggagatggggaaggggtgtgtgtgatgagctagataactaatcttcttccaaaataaggaaaggaatgtgagttggtactgataacgcctggtactgtgacatgtctaggcatgtagcaaaagcagaaaggaaagagaagagaagaaaagtgaagtggggaggggcactgtgaattaaagaataaaggattgatcaggctatttgaagagaaaccttatcataccccacattcctattctgtcattttgatttttccattttgccaacgtggatcagaattttcttttattcagaggcagcaaattccttcctcctttctcccgaagaagcctgtgcaatgaagctttgttttcacttttcataaagcaacctcatgatgaggttcagcagggatgagagcccttatctggatctgggtatgaggcgaaggagtcttaggtactcagtcttcagaagtaaggcccttttgaaggttatccttttacttgccttctggtaactttttggatgctgtccatagctttcctgataaattagcagccctctggttagtccgaggagagaggccgcaggacgggcagactgctgctcatctctgcagctccactttggtctcttgtctctgaaggtccagtcacagggaacttgttcttctgagtacccacagcttactcttcctttgtagcaggaccagccacagaaaaaactcctcagacaccgaggtaaagaaggaaggggtttattcggccaggggcataggcaagactcctgtctcaagagccgagctcctcgagtgagcaattcctgtcccttttaagggctcacaact

SEQ ID NO: 55513 - DNA, 1061 bp, Homo sapiens
ataacctgctctgatgtgtccatccttatcgcctcccatgcatacctcagtcagctgaagaaaggccaagcattcagtctcagtaaggtcttaacatgtccaaaactaaactgcctccagcttctggaatttaatttcaaacattaactgctcctaccttgcagtatacctgaggtgcccattattgctccaccacttgaccaacaaagggtactgctcatggaaccaaggaagattagcctccaggacccttcctcacccacctgcccaccgcagttctacaatcccatttcaaagacctcaagagaagatgttggaatcagcatctcagattccaaaagccaatacttaaactgggccctgttcacatacaacaaaagcataaaagaaagctatagtttggtattcctatcacctaattagactctctgcaatgttcagaacaagacaaagaaaaggttaaaatcaccaccctctcatggtgtcctttcctcccatagcaaagtccaaaaaaaaaaaaaaaaagcagaacctgccactctccagatttaccttcaggctcagccacagagtaaaaaggggaacgagctgatctctcagacccaaaatggccaagatcaggcactcaccttatagcccaaaatacagccttacagccacacacagcaagggtgacaaccaacctcggaactgcagatacagggcaggaagtggctcagcctcacttatgaacctttgccctgggagaggcaaagaggagggagctgggggaagggatatacctgcaacacctacattggacagagagaccaaaatgatcttccaagaacaggtcagtaaaattctgtggtgtctctctccttacagtggctcttcctaggcaagaagactaattactgacataaggaggatgaatgggctgttaccctaaatactggaagttgaatgacctgattaaaatctcatagaaatacaaagggaaaaaccaaccaaccaaaaacaccacctactaggaatttatactagagctcagcttacacatttcttccctgcttttccat

SEQ ID NO: 55514 - DNA, 1717 bp, Homo sapiens
atcttcaactatgcagtccagagaaggaactcgaaggaactgaagtttctgtgattactctgttgaagtctgagcctcaaatatgactttcattaccatagtactattgcctatgacaccttcattttctcgtcctccagaatatggaaagtccatgggagcagaggagtcaggtgcacaacacttccatctaagctgccctactttgtctaaaactattgctctcactggacagggcagtccatcgaaggaggcctcagaaccaacctctcacctttatccaagtctcacaagccctaattccctcctcccatgcctcgccttcaactccctcaccaatttgccgccaccccgcaggctcccacctgcgccttttactctctctctcctcgcgcaggccttacccctcactctagtcccagggtatccttcacaccagccctcagtagccccagccctagtaaaccgcgttcaggagtcccttcaacttggcacctccgaaagcacccagcctctcacagcccctcatttgtccactcacctgtaagctctcaccctccttccctatcttagacactcacacccggaccctcaccacctgccaacccctcacaaccagtacagtaaccaaacccgtcaccgtcttttcccagtctctcatccccacaaacgactctccaggccctctggcccatgcgtaccgttcactcacggaacgccgaacctggccgggcccggttgctgctgcggtgttaggtgagttcaggccgccgccatcgcttctcaagcgcaccagccgcgccccgccccgcgccacacgcagcccgcgcccccgcgcaccacacgcaaccgcccggcgtcgcacgactgggcaatggcgtgccagctcattggctgagccggaccaaacccgagcaaggacgcttgtttcctggcaacggctaaacgcaagggcggggtcgccgacggctatccgagggaggagcaccgcctctcctcttggttccgtcccttcgtacgtaaaccccgcccctcagaaggactccggcgtgtcataggcgaaggcctctgggaaggtggaggccggcagggcggaggcggagcccgggaaggaaaggtggaaccagagggcagaaggcgggacctaaggagaggcgatttttacaggcagggaaagatcagaagggcggggcttgggagagatggagccggaagaaagacgagcgagaaaggggtggggccatggattccaggagacgcttggagtggaagagtgggtgtggaggggcgaggctatcacgaaaagagaggaggaatcagtaggtgggccgggcctgcggaaaagtggagccctagagagggctgactgcgggcactctagttcattttgctccatcgtcgtgcatagcttggtctctactttagtaccccagcggtgactgcccctggctcccccaacaccgctgtgctgtgctgctccgtcaccccttgagcacttagtcaaggaacacggaataagtgcctgcatgcccagctggattccggatcaattagaaccggcctctgctctccaggacctcagagaattgcagcgtagtgtaataagtacattactacgggggccacctaggagcagcacttagcatgatttgcatgtatagaggatgagaggaaggtacggtgaaggagcttagggaagacttccgggaggtgacgg

SEQ ID NO: 55515 - DNA, 860 bp, Homo sapiens
accaaattctgcggacgtggcctgagctagagctgggcgggcttggattggccaggcggggctcaggcgtgagagggagggatggggctgggtcttgggaagtgggtgcggctctgtgagtctgttccacagcaacagacggcgggaggggtcaggaatgtgggtgtggtaggtggatggaagcggggagcccccagctggtggcccacaggccggcaaaggcctcggattggggaccgtttgaggtcactgaccttgaagagcagaacgtggagcttcccgcgcgccaccagcagcccgtggttggcctccagccgctgcacctgggctgcgcggcgcaccgcgcgctcttgggcggcgttggcgtgcgagctcacgcgctccgccttggccagcagctgcgccaaggtgttgctggtggtgtcgtggctgcgactcagagcgcccaggccgctctggatgcggcgcacggaccctgccaggcctccctgccttcgagccaggcctccctgccgctcccgcagagtctccagcatggaggccagcttctccagcagggtcaccaccgtcacggcgtgcacgggaccccccgccggcgcctcgggcacaggcccccgctccaacgcactctccctcatgatccctgaccgctctgctccgtctgcctgcaactgctggccgcactacggtcaggggcctcctttccctggctcctccccagctccagctgtgactcaggcaggcggagttggccttctggggcggcgggagggcgcgagggcgtggggatgttggcagcggggtctcttgaaagcgtttcgccttccgctgtcccgcgccgggggcctgctgggaagcct

SEQ ID NO: 55516 - DNA, 1006 bp, Homo sapiens
tactgtggtagacactgggcgtatcataatgaacacagtagatgtttcctgccctcttgaatcttaacagtaagcaagtttattcattcattcactcaacaaatattcatttggcacctgtaatattccaaccactgttctaggtacttgggttacactggtgaagagtctctacttttgtgcagttcattactagtggaagaaacagacagcaaacaagtaaataatagaagagaagagaacaaatgaatagaaacagtaaaatagaatggaagagagtagaatagaaacactagaacagaaaagaactaaacagagcatattagagtagaacaaaatagaatagaataggagtagggataagtgacctaaagaaaaataaagctgggtaaggacagggtgaggacccgttcctcaggtttccttccagacctcctcctgcttggctctgaattgctggggaactggtctctgcaggctgcatttcccaggctcccgttagctggtggactttgaccattcagatgaactggtaggagactggcagtcagaatccagcagcctgccaggatttttcaccaccttttcctctgcctctgctgtgactgtatctcatttaagcctccattgctgaataggcctgctgtggttctaccttctacacagtggccttcttcctgggaaaagtctcttctctgtccctcctgtcaggcctctgagccaaagctaagccatcatatcccctgtgacctgcacatacacatccagatggctggttcctgccttaactgaggacattcaaccacaaaagaagtgaaaatggctggtccttgccttaactgatgacattaccttgtgaaattcattttcctggcccatcctggctcaaaagctcccccactgagcaccttgtgacccccacccctgcccgccagagaacaaccccctttgactataattttcctttacctacccaaatcctataaaatgaccccacccctatctc

SEQ ID NO: 55517 - DNA, 994 bp, Homo sapiens
tagagccagaatgttgcatttgtgaaaggaaaataaaaactcaggactccagttgactatgccaaaaggaaaaaaaataaactgaaaactgagtcatgcaagaagctgcctttccttttgttcctaagcagatagctacagacaaaaggttaaatatttacaaaattagccgggtgtggtggcacatgcctgtaatcccagctactcagtaggctgaggcaggagaatcacttgaacccgggaggcagaggttgtggtgagccgagattgcgccattgcactccagcctggtcaacaacagcgaaaactctgtctcaaaaaaaaaaaaacaaaaaaaacacaaaaggttaaatatctccacaggcatatttactttatcttatgtaaagtgccagacgaacacataattgagtatctccctacctgctccttttctcttgcgacatgtggattaccatacccttcttctttccctccagctcacttttcccctttaaatattgaagccctcaaaatcatctttggagaaagccacagaccacagactgtttctgcgattccgtgtttatttcttccagccatgtccttaaccttggcaaaataaacctctaaattgattgagacctgtctcagacatgttttgcttgacacatccaaattccagttccagcacttactagctagctgtgggatcttgagccacttacttaatcctactttccttctccgtaaaatggggataattataataccgacttccaaatttgttgtgaggattaacgtaaggcagagtcctcagaaaagtacctacagagggttattcgggccaagggccaaggttgaggactgcgacccaggacacacttgcaagttgtcttgggggagcactctggacaacaaaagagaggctcatattttcaaagaaaaaaagatgaattaggagaggaaatgaatacaaaagttgttcatcaggaattctcattgtttacagaaa

SEQ ID NO: 55518 - DNA, 2241 bp, Homo sapiens
tttcaagagataattacttagctcaaagaagagtgagagtgactgttgctacattttaaatgcctgtctgggcctgataatttaaaggggctcatcttccttagataaaaaggttttgttttgttttgtttttcatagtacataatcttaaaaatgcatgctaattattactgtgagtactctatctgagatgatgtccccagaactggggggaaaaaacacttgtaaaaaattatcaaaggaaagaactgacaggacttgatagctctgaggattcctcagaagcactcgtcaaacagcttagggtttaattgctattctgccacttaacttctttgtgcctcatcctatctgtaaaggagggtaataatagtatttgcagggaccaagggaaactttcccttcgccctctgaaattctgctgaaaaatcaacccacaaaaaacagattaattgaagaaaaggcatagaaattgtattaatgtgtccacggggaaccacagagtgactacccacttcccagacgagttcagaagcttaggtgtcattcaggcaaagggggttgtgggagtgaggggaagaggaattctgctgagggagaaggaatggatcagggaacagattaactagcacattatcatgtgaaggggtctgttcaggtgtgattatattcttggttttgtagggaggggaagaaaaaaaccgttgttccttttgatgggtctggacgctaggtaacggctttgggagagagggcgcgggagtaggaaggccagacacaccttaaggcttaacttagtaagtcaaaccaccatattttgggtatggatttctgagccccaatataataggtacttcttagggttgttgtgagaattgaagattattaattataaagtgcctgggttggtgcttggcacatcataaacaactccataaatgctcgcttttactgtcgtggatacacggaggtgggagacccaattgggttcccgcccatgttattggcccccacggctatatggtctttacggcttcctagtctcttcaccatctctaaggtttgtttcctcatctgaatcacaggtgagtgattctcagggtgactcaagagggctggtgccagtggcagagcatggggaatcgagggaaggcgccttcctgtcagaggcaacacacccagtgggaggatcctgcccgccctgctctctcctacctccccttcccgggctaaacgctggggtcggtctggcagctattccgggaatctgagcgcggattctgacaaaggagacgtcttccaccgaccacatcacatggagctccaaagcacgagcacggcctcccgcggctgtgacctcaaggcggagcccctggtgacctcagggagagtccccacccccgcagcccgtgcgcccggggcagggcgggggcagggagagggggcggaatcggggcggtcccgggagcgccccgccccctccgcctccgcagcgttgacagccgcccgccaccgagagatcagctgtcagagatcagaggaagaggaaggggcggagctgctttgcggccggccgcggagcagtcagccgactacagagaagggtaatcgggtgtccccggcgccgcccggggccctgagggctggctagggtccaggccgggggggacgggacagacgaaccagccccgtgtaggaagcgcgacaatgccccgctacggagcgtcactccgccagagctgccccaggtccggccgggagcagggacaagacgggaccgccggagcccccggactcctttggatgggcctggtgctggcgctggcgctggcgctggcgctggcgctggctctgtctgactctcgggttctctgggctccggcagaggctcaccctctttctccccaaggccatcctgccaggttacatcgcatagtgccccggctccgagatgtctttgggtgggggaacctcacctgcccaatctgcaaaggtctattcaccgccatcaacctcgggctgaaggtgagcactgaaggggctgcagtggaggaggccgaaaggagtgctggggctgggggctggggctgatgctggtgcgctgggctcagaatgcatccctgatggagagggtggcatctacaatccatcactgagtttgctcccctttggggacacccatggctacatgccaccatcaccccattgtgacctttgtgaagtaagaaaataatgcagaca

SEQ ID NO: 55519 - DNA, 1191 bp, Homo sapiens
acagccgccccagggcacacccctcggtcgctgagggcaacagaatgcggcttgacagatccagggcctgggacccctgctggaatcggcgcggcctgccagcccaccccaccccacgtccccttcccggacctgggcctcccctcccccaacacccactgcccctcgcttcgcgtcctccatacccgcccctagtcaccccgaggggcaggaggtaaagggcagcggaagggacggtgtgagggcccgagtggaccctgcgatggtgggtatgagaggacggtctgcgggcgcgcggtggaagggcgacccggggatgggggatggggccggccgggggacccgggctgccgcagggtaggggctacagggtccgccggccgctggtgatcgggacgcagccaccggggctgggccggggcagggacacctcctacctgcgcggtgaggccccgggcccagatgacggaggtggctcaggctgcggggttcgggctccgccgcggcttctccatcacaacatcccccgcccaggagcgcgcgggccgcggggccgcgccccgagcggcggaggcgcgcgcaaggggagggggaggggcgccatcttggggcgggcgcgggagcgagctcggcgggcgcggcacttgccgcagcttcttgggggcctcaccctgcgggcggccctcggacctcggtgagccccgcggtccagccctcccagcagacacccctgcagccgactccctgggacccccgcctagcgcggcgccgtcctccactactattccacagactcaccctgcgcgccccgcagcgccctggtcccgcacccacgccgggagacgcgcggacggggctggagcccgaatggcggcggctgtgcggcgccgcggccgcgcggggaaggattcccgggaggcactctgcgccgctcctgctgcaccgctccctgacgtcctggtggggaggctctgaggacacagcgttgctcataataatagctcgtatttattgaccacttacaccgtgccgggctctctattaaaccgttaacgcgcattaatcttcacatcagctctgtaaaatcaccagaattattatcctcatttttcagaggctgaggctaagattaagagaggtaaagcgacttgcccgcagtcacagttagtgatgaatttagactggaactcc

SEQ ID NO: 55520 - DNA, 4921 bp, Homo sapiens
cagtcactgaataactactatatgccaggcattgtgagaggcactgaggataacaagactctgtctttcacttcaggaagttcactgtacaaaagcagaaaggactcctgcaatcctagccatgcaactaccaaggtgtagtgtaaagagtgcactgagaatatagacagagtgcctaagtctgcctagagaagttgtggaaggtttcacaccaaagaggaagcattgggcccaagagctgaaaaatcagcaggaattttccaggttgacaagtgaggaaagggtgttaccagcagagggagcagcatgcagagcccaaacatgaggaagcagtgtgctccaacctcatgtagattcgtatggctggcacacagtgaatgtggcaggggaggagataaacctgagaagataaccaaggcccagatcatgagaccctgtgtgcacttggtttgtagtaatcaggcacattttggggtcatttactgaaacaggaaacacaggaggaaaggttggtttgtaaagaagatgcaaagcttagtttgggggatgctgaattttaggtgcctgtagaacatacaattggaaagagatgtctggagctcagaaagtagatctagatccagtgtccacagcatagatattcctcagagccaaggtgatggttgagatcactgagggaaggtatatggaaaggctaggatggatccccaaggaacattagggaactggttgagatagaatgagacatttgagaagagagagaaaagaggcaggagggaaaacaaagccgacagtcaggacttccccaaccacacagcacctttggcaaggtaggaaaaggcaccccttcctctgagcagacacagcctgggtcacatgggacttggtgagcacagcagactggatttcatgctccacatgctcttctagccaggtgccattgtgttgggaacaacttgccttgccctatgaagaggacttgatacagggtcatggaaggcaagggaagcaattgccagagaaaaaaaggatggccagcagtgtgaggtacagcagagcggtgtagaactaagactaggactgaagaacagccactggatggtgcacctgccaggcccacacgcatgcacactcccttagcccaagcttttacaggaaaggagggcacatgggaaagaaatctgctacctattgctatgggctccatgccaaggccatttgggggaagggtccccagtgtcgattccagccctttccagcctggccctgattttggcccagcagtaccttgatcagaaagacactgttgtgaccttgacggaatgcagcatccacagggctggggaaattcttccatctctctgagattaactcccggtcccatttgtgactcttccacacaaactcccctgaaaaaacccacactcactgaggggcccagtgagaaacctttgacctactgagatagcttgagagaagctgtcagtgataccatcagataattcctaagacctcccacagacagggacaccctttgtgaaggagagtaagtctaaggtcctaaacgccctaacctcagtccctcctacctttaaaaaacagcatggttccattgtcatccagggtggtagcatcaaagctccagccatctgagcagcgttctggggtggaggtagggagatggcaaagtaaaaaaaaaaaaaaaaaaaaaaaaaaaaaaaaaaaaccagaaggtgataaaatgcagagacacaaccagacagataagacagacttagggagtcagggcctcaccagtcacgtctgggtctggcttggtctcgccttcagcaacattcccatgggcactagtcctagggagaacaaaatagatatcttgatccattgggaccgatccctttcccatagcccctgaccccaaatttgaccgaggcctaaaaactggccctaccttaccctagcccagaactcaatccttcgcttctagtcccagctttactcacggaggaagaggggtggcaatggccagagaccagcataggctccacaaccccagtgcaacgggtgctcccagtaccctagccatgctgagctgcagaggccacaggacagctctgggtgaccagttgaactccctatatagagttggcagcagcaccacccccacctccaactctactgggaatgtgctgtctcccaggactaagccaatattggctgattacatcactgcaaataaggtcagggtctggacagaaatctgaatccaagactcctttttcccggcagctgccccccaacccccttcagcaattttcaagcagtaactgggctacactgctgacgtccagctgtgactctcacactggcaatgggtccaggcatccataagtcagggaagtgagtagactgaggatcaccttttgtgattgagtttatctccacaatgggggaggtgagaaaaggagggaactaatattgctgtgtactgtgtcaagccctgctctaaggcagctagagacagcaatacttactacttttagtaaccacacacacagataaacttacttagaaatactcagagaacagctttttccaagcttcatcaggggcctttctggggcatgcccaagcctcttcagctttacccttgggctagtgagtctggggacaataatgtctcactgttgtcaaatgtccaagccccatgcccagcctctcgccttccctgactggcaaagggctttgcaaaaagtgcctggaagtgaagggttgacagtaatgaggcagaaacaggaggtgtctctcttccagagagcaccaccactactagtaattagtctttcttggtagtttccaccttgggggaaaaagctttatttaaccaacccagaacaaatagaactgtaactggaatttcacaatatttctagctgactcctgcttaaatgctaccttctcaatgaagcctttcttgaccaccttatctagccatttcagacccttgcttgttttattttacttactaaaacttgaaattctttcatctgtctacttatctggtgatggttgttgttgctttgctttgttttgcctgtcttgtttaccattatatatccctgactcctaaaatagtgcctggcatataagagttgttccagaaatatttgttgaatgaaaaaaatgcaaaaatgcatttcaagtactgagtagtgttgctagtgttgcagccaaatttctgacaatttccccccctctagggtaggagaatattaggaattgggggtaggttatggtagtaggcataatgagatctaggagtcacagacgccctttatctgacagtcctgtttctctctccagtgtctcggccccacatccatctcttcctgggatctcacctgctatcctcagtacttcctgggcccactcccaaagctgccccatttctgtgtgagatttgcctagtgagtcagaaaagaattatgggcagactcagctatgggccaggatgaagttccaggacccctgctccctagccaaggctgaaagggccctgatccctcacagatggctccagacccctgacagtcccatatataatcttaccaaaagtctcagatcccttttctactctgcgaagtttccttccaacaggaaaacacacattccggaacctctggaacaacatgtcaccaggcctctgccatcaggctcaatgtcctctcctgacttacgaatgaaaatgtgctgtgaacatcattccctcctcataggtcagtgggcaaggctggactctctgagtccttggcagcctgggcaatgccatcgctgctacagccaatgtctcatactcaccttctccccattgcagggcatgtcttctttctgggtgttgggcaatgggagccactattctaagactccccctcaccttttctttccctctcagcctctgaaaccttatattctccctcctgagcaccccatgatcctccatcaggaatttcctcaacaacttgtcttcagctgtcagaaccctgtctgaatcctacagattttgctgggcctgcctggggagagggaagctttcaccccaagaaacaaacaccccacagaaaacccatagtgagagtcttcaatagtcctattagcagggccttgcactgacttgccagtccaagggtgcagtctccttctggcctaacagggctgtctgagggcatacagcacatatactggatgatcatttttcagcttgaccccttccccacacacctggtgtggtccccctcacagcaccccggatccatctatcccagaatactactttatggtcccttttccctgttgcttcctaattcacctgtgtacccgagaatggcttagaaaccattactggatcctcctgctccacccagggactaggccagcagagtcatctgcactgcaggcagtccaggttgaagttcaagttttgggcaggagttgaaagtagaacattgtacacatttgggaacccagggctgtggatatgttggccaccctggtgttggtcacagggtacaagccaagacttctcagggtagtcaagactcagcagccttgcttctcttcccctcactacaggaggccccttctgtgggtcctgggtccttcccaggcttcctactggggctgaggaaagaagcttgtcggtacttgggcctgagcaccccctgcaggccgcaggaatcagtgcactcccgcccttcaactagaggccagagcccaggagtttttcctctctgaaactagctctccacagcctttgtcccacactcctctcagccctggctgtgcatccttagtggtacacacccttctatgcttctttcccttcttctgcaaaccttgctgcccagagtggatttggggacct

SEQ ID NO: 55521 - DNA, 1674 bp, Homo sapiens
cccaggatctgaagccaattgcagaagggaggaggtcagaaccagggaggggcctggggtcctccaggcagggctcaggctacaggagaaccagaggggtcctttcctacaaaaaaacagcctccacatgaggctttctgtccacagagcagtgcatggggaggaaagggtgtcctccatcctgactggtgggcctgtgggtaccagaggatggaaggggcggggggtggggtagggtgggggtgggggagcaaggggtggaggtgtctgcaccagggagaaaagagcccttcagacaagatgggccacaatattccagagtcccactcagcacgcaccaccaccaccaccctcggccgcagcgttcagcaccctccgccaacacacacaagctcccaaaccccgcgctcccctaaggaaccatcacccatccacccgcgcctccccgcctcaaaacagggacctcacgtgagcagccacagcccgaagaatccccctgctgctctcacggacatggacacgcctcacgtgggcagagagaggcacagcttttgaaaatcatctgtgcccccacccacagacgctccgacccagacccgggctgacaggaatacaaacgcacccttggggcccgcccgtcgcactcaccgcgttggaacaggatgcgagggcaaagctcggactgcggccactctgaagggcccgcggcgctgctactgctgccagcgcccgtccgcccggccctgcccgcgcctccgcctgtccccgcgccggcgccgccgccggactagccgcacaggccggagggaggggccggggcggggctgcggaccggccgggggagggggtgactccagtagggaagacccacccacgccccgcccgccgccgcggaggccccgcccaccccgcctgcccacccctaccgcacccgcacgcccccccgccaacgcctccacctcctgcggacgctgcctccttggtgctgctagggagccggcgggccggcgagccggatcccggatctcggatcccggatctccgccagctgcctccggctccgggaagggcggtgtagtcggtctcagggattgagatgagactccgtcaagaaaaggcagctggggcagcagggatttcggactctgggagcctgtctgggccgcctgcctcctggaggcgccctttccggcttccttggagtgctcctatggaatatgctagtctatcggctgaccaggaagacgtagaaaccgtctgtacctcagcacgatctctgggcggcagaagggcagtacccagaactctgggagaaggagttaaggggtagaaaggtgggggatttgattaggctttgggcgcttcaggagccccctcctgaggaaattctggttcagaccatccagcgactcccttcctcacaccaaagacactggacaattctcagaatcatcgccttgtgcaaaaagcagccccaagtggaaaataattgtaacagtttacagggactgagtggttattatgtgccgacacagaactagccactttacatatattatttaatagtcagtaggtagcatcttttattagcccaattttacaatgggaaaaaatagggatcttgctccccagacgttagccctcatcactcagctagaaagtggcagaacctgg

SEQ ID NO: 55522 - DNA, 2234 bp, Homo sapiens
ggatcccgtccgtcatggctaggaaaggtattggagtaaaactctccaccccagcaccctgcaaagcccaacacagaagttctggacactggccagcactctagaagaaggaggcctcctctgtcatttctttaaaggctgtcccagggtttgagtgtcccagcgtttggccatcattcctttcttcagatatatgtatttctcccctccaaaacgcacatttgaaacaggcacaccaaagcacggtgtcttctcacaagcccccaacctcaccaggactctggtgattatttctacactcattcagcagacatttagtgagtgcctactatgtgtcaggcactatttgtgacaatgaaaatacaacagtgaagagggaaagtctgctctcttagaacttatctccatgcaggcgtgtttatgctgaggagatgaaccctttccagggctcaggtcttcacccccctattcaggtttgttctccattgcttggcctttcacattcctttagcgtttcttcccccttccttcagggggtctcccctcctccgtctcatacacctcgtcttcctcgggccctccccaccaggccttagttagatcagtgggtgtatgttcccagtctctggtaaaagcctctctctcccaggatatcggtgacccttccacagtcagttatgtctcccaggtgtgtgagtccccgcccccacccccatacacctggacatcaggtgtgtcctcatccttccccggggctcggggcatcttgccctctggacaggtttgtgcgttcaacttcccgtcgcccaagcatgttcctctcacctcgggccgggccgctcttcccctcagggcgccaggcccgggccgcgcggggacctcgggctccagttcccgtcgcgatcctagcagcaggtcagggactcggcggaaatgacgtcctctccgggcagaagaagccggccacgtcgcagattataagggcggagctgacgtcgcagccagggcagggcgatactcgagctagctctcgagatcagcgagaggttacttccggggcggcaccgagaagctgaaacggaagtggcgtacggcatgcgccggtggcgtgatggagcggcagcagcagcagcaacagcaactgcgaaacgtaagtgagaactaagtcgtttcgaggccagacgttcagctcgcattcctgcacacatcgcgggaaccccacagggccagggatttgagggctggaaacttcgggctatggcgcgcgggcctgggaaactttgggcggcgcgaccttgactagaagtgtggggcccttatcgctgagtttgtggtcccccttttctctcagctgcgtgacttcctgttggtctacaatcggatgacagaactctgcttccagcgctgtgtgcccagcttgcaccaccgagctctggacgctgaggaggtggggaactgtgtagggaggttacgctgcaagaagagtttagcggtagactgcttccctcctcaccccacttcccgtacctctggccctggccttcccacgaccctcacccctaggctgggcatggggaagaaaggaggcggacccgacagggcacctttatcctccacttaaaccctatcttccttctaggaggcctgtctgcacagctgtgctgggaagctgatccattccaaccaccgcctcatggccgcttacgtgcagctcatgcctgccctggtacagcgccgcatcgcagactacgaggctgcctcggctgtgccaggcgttgctgctgaacagcctggggtctctccatcaggcagctagccatacccaaccccaggaaggaaggccttggatggaccctcagattgaaggacccggtggaccttggggttggtgaatcctaaacagagagaattcgaggttgcctgaaagctgggtgtccttgctccttttcctggagccaatatacccagtttttactcagtttgatttatattctgggcaaggaagctttgcctactttattggcacaatccgttgttctgtcgtttagtgcatatctgctggcttcagccctggcagctgagaaattgttttctatatgtagaaggaaaacctgagcatttgcaggcatctggttaaagcagggtctgtgtgtacaattttaaaacgggtaatatgtcatgctcttagttcatcttcacaacaaaactatgagtaagcggtattagcctcactt

SEQ ID NO: 55523 - DNA, 2457 bp, Homo sapiens
aaatatttaacatgtctctagctgcagtgtagaaaacaaactgaaggggagaaattgcagacagagaggccagcggcttggacaatggtaatggggctaggggatgaaaaaggaggaaacaaagcaggccgattccatgttggaggcagactgaagggtaagaaaagcctgaggaagcagggccctcacatctgcagaggctcaaaggagaagatgtattgtcgggaaggctgattctgtgttgcagtcctaccaggtaatcctaggccaggcacttaccctgattctaagtttcccacaccctcctttgaacaatgatactgacaactcttactgtctccaatccatcctccacactgtaaccgacgaccctttcaaaatacaaatctgaagaaataattccattgcttaaaacctttcattggcttctattctcaatatacgcaaaacttctacctcttgaacttgaacagcatatatgcccctttcatttactatgtatttcaaccacaaggaccacttgtgtttgtgactctgacagaacatgctctcttgtcccagggcccttgtacgtactttttcctgtctgaagaaccctcttcgcttcaccaacttctactcaacaactctctctgacccaacgtcagtttcttttggaagttctcggatcttcagatcaggactcgcccttaacggtgccacaggtgtccctccccgcaatacacacagcgctgggatccaccaatgtccgcttcgcggcctgaaacagctcccattgctcccgcgagtcactcaccttgttttgcgaggaggccgcaggcggaggtcgtgagattacgggcccaaggcccgcggctactggggccgcctcggcccactcaggctcttcgaacatgagggtcgggagggcagggtcgccgagtccccgctcttctccacgtgcacagcgctcctctggaagtcggagcgctcagacctgccagaaccgacccggaaaccaaagcgtgacagccaggggttgctagagcggccggcgcggcgcagcgaaccatcgagtttagccaggcgcggctagaagggcagggaggcggtgggaggggagggacggaggcccgcgctgcccaagagcgccacgggcggggcggggccggcggcgggctgcgggcgcggccggacgggagttccccggagaaggatcctgcagcccgagtcccggtgagtgcgagaggacccgcgccccctgtcacccctcacttctcctgagtcccaagtaaggaacggagccaaccctggggaggacccccggtcccctctcccagagtatacggagcctgaacctccccacttcccccaactctgttcgcggatagggtctagttgcctgctctcggacatccgttcagcagacactacctcttcgtcaccccctgcccaccctgacccgcctttacctcgcgtctagaggacacagccagggatcatcccgcagccccgaactccttcacagacccccactagccggggacgcagctcaggccccctacccccaacacaaacacttctctcctgtagaggataaagcttggggttcatcctccttccctggatcactccacagtcctcaggcttccccaatccaggggactcggcgccgggacgctgctatggacgacattttcactcagtgccgggagggcaacgcagtcgccgttcgcctgtggctggacaacacggagaacgacctcaaccaggggtgagctgaaacggttggtggatgagaggaaggctagagatctcctggctacgtggagtggagtgctcatgtctggtggtggcggctgcctttgctagccagtgtaatgagtgctaagcatagcctgtggggggcagagggttttcacagaggacgcagtttgagctgaatcttgactgcagaataagagtttcacaggcagaggctacagagagctttccagcctcagtagactgcatggccaaaggctagggggcaaggcacagagcagagagaacaggaaattgtctggagttccatatggctggaggatagatgatctctgtgggtcggagcattgggtacaagaggaaaagaacaggacataagactgtagaggtctccaaggatcagccagatcatgcaagcatatttaggctataagaaggtctttattttaaaagcaaggttttaaagctgtatagtgacataatgagattgtccatttttcagtatcgtcttggatgctttgtgaagagcaggtggaaaggaggcaattgcctagttcatcgtagaagtaatgatgtcttggactagaattagggtgagtgaaaaagagaagtgatcaaattccagaagtctttaggacgaagaattgtggaacttggtgtggggagtgagtaagggcaaagatgaggaccagggttctggcttgggaacttggt

SEQ ID NO: 55524 - DNA, 1528 bp, Homo sapiens
aaaaagaaaaagaaaacaaaagttgagaggtgagcaaatagtgaaagtgaatgtacaccagttctacaaggttggctgagataggaaggcaagaagagcagtagtgatggtgactcagagtggcaaaatcaaattctttattttttaaaattggtggagtttagtttttaggtttgacaggtcaggatcacctgtcatcttagtctagacttcactggttcccattaggttctacactatttctctttaatactttgcaaagtcatttgttccatttttcatataattctcaaagggtaccctgataaagacagtaagcactgttactgttttgttggtgaggaaatagaggcttaggcagttgcccagtgggcctagcatctaggaagactctagctgagtctaggaagactctaggaagatgctgccagaaggaaaaggggtggaattaatgaaactggaaggttgtggtgctggtttgaggagtaaagtatgggggccaaagttggctatatgctggatatgaagagggggttaattccttgcaggtcttcttgagatagaagtccaggccctgaggtggcaggcagcctgatagtgaacagaacccttgtgcccatacttttgccccccgagtttggcctgccctggcgccacaggcagtactggaagctgataagtcagggcacaaattaaaggtctaggaggcaagaccaactgataaacagggggcgtaatgcttcctggggataatcccatctcaaggaaaagcttttggctatttctgtgttagcagatgcgagcaagttgtggaggaaaatgattaacttaaaggccacaccccccaaccccttcagctgtacgggcatctggatggccagacccctgatcagctccaggccttgcctagagtcgcacacaggaagtgaccacaacactaaggcatccggaggctgctggcccagaccacggaccgccccctgctccgccccttgaatctgcagccccgaactggagggaatttccttttatggccccaggctgtcaggcaggcccagctccaaaccaattgttttgttttgtttgtatactttactttataaaatacatatttcttggaaaagaaaaaaatcaggtatagttttaatcccaaaacagccattctcattttcttctgttttctatgcacaggattgctaagtaggggaatcctgctttgcatggtggtttgttatctacctcatcagtagtcaaaagcatttctccttttcaacataaacccttccaaaacatcatttaaattccattccatttttagatgttagtttcagtaccagagccaaatagtaagtttgttccctcttctataagttgtggcctgccttctccaagacacccttctcccccactaacatgcactgaacagctgctgtcaatccattccctcaagaaacttaaaggtctaacagacaagacagtccattaacagatttttacaatccagtgcaacaagtgctgaagtaggggg

SEQ ID NO: 55525 - DNA, 2507 bp, Homo sapiens
acgattcagtttccccaaaggggtggcaggataagcctccactgttgtggaaggtaattactgattcattaagcctcccctcacaccttgctcttgctccgggagctgccggaggccgtgcccttcattttgcagtgctgtagggcatcattggcaatatctgagatgaatttctgggcagctaaggagatgagccgaattctagagagaaaaaacttagatgagaaggagatggacaacatactgcacaagcacccaaaactaacctgccctgggtttactcacatgcgtgggtctgaggcctcaaagccagcacggttcaggtagtaaccagtcactgcatctgggatctgagaaatcaattaagagaactgtcagcagagcgggaggagggtgagggaaatggataggcctgattatcaggaagctcacagtttgggtgagcagagggcaaacacagaagagcgactaggggagcaaatggaagagaacgctgaaaagcacgatgtggctgaaagttttgacagcaggctaggtggccttgttcgggcggaagcccaccgtaggcgtgtaatcttccagctgcatcaagaagtccaccaaaggcgtgctggacaccacgggcttcacgtctccgttggccgcgctcggcagtacgtaaaccccgttagatatggccccctccgggggcgccgcgccacccgccgacaccggagctggaggagaaccagcaaaatgagacacagaggtgggaggcgcagggccccagctaggtctgtctataccctctgccctcacccgccgctggacccagcccaagacgcttccctcgccctcacccgtcccggccctcacccgccccacgccgctcagctggctccccggcccgcgccgccaagggtcccgtgcccccagcagctgctccagccccaggtccccccgctgtccccgcggggctggccttgttctccgcggcggtgctggagggcagcgcggcgggagccgagaccgggggcgcggggcccggggccgaggcggcggaggccggcgccgcctcggggtccgcgccggagccgctgcagctcatcgggccggtgggagaggcggcgaacagagccgcttccgcttccgctcgcgccgcgcacaccccggggtgacgtcacgcgcccacgactcgccccgcctgtctctgttagtgctctccagcccgctccccgcctcctcccatagtggatctgcgggttagaggaaataggctgcagggcggagaccgagccttggcgaactgcgctgccgtagccattccgccctagcctctgccgtgctccgcggcgattccgtccagaccggaaccagcgtgcgtctggctctcctccgccgctctgggacacctcattctgtctgacgctcaagacctggcttcgacgtttatggccctatgtccctcgactacgggttgcctgcctgtctgcatcgtttcaagttcccttattcagccttttaaggattcatagtggatttggaaagccccctctcttctccgccagctgccccgagaggtgggggcagcagtggggcggcacacagtgctgctgtaggaggaggaggagtttcagcctgagtcaacaacatatgcaaaaatcacaacgaatgagaggcgtgaggttttcggtgtagcagacatttaattcttatttgccaactcctgagctaggacctgggaacacaaagttaaataggacacgattctagtcctctaggcaccaacggtcttggaaaggaaggcagacaagtaaactggccatttcaatactacgtggtcgttacaatgctagaggtaggcacagggggcgcagtgcaagggaggaagggcgttaacatctgccacctacttccaggtgccaagcactgttatcaacattattccactttattccctggtgattatgaaaggcaggtattgatattcacacttaacagacgaggaaacagcctcagggagataagcttacttgacccagtctctctcctagtccatatcagaaccaagattcaaacaggttttgtttagaaaatctaggatttttcagccataccaaaataaagtagcctcagggaatcaaaacattcacgaaagaaggtgacttctgaactgagtcttgcaagaattctggaaattaacctggcagttgtatcaggggtggtaaggggacggaacagcttgagcaagagtgagagttccttggggtttggggagggaggaggaaaaatgattttttacttaagaacaaatagcaaggaaggtttgtgagctatgattgggggctggaggggaaagcctgaattctatccagtaatccttgaagggttttcatccaagtggcctgatgggatttgcattttactctggaagatgacttggggattggcaggaagtaaggacactttttttcaagagaatatagccctaaactaaggtagtagcagtggggatataagtggataag

SEQ ID NO: 55526 - DNA, 597 bp, Homo sapiens
aaactatttctttgcacatgaatctcccctctataaactccttaagatgaggggagtgacgcattcatgactgtattccgtgtctctaatacagtgactagcacatggtagacattcaatacatgtatattgaataaatcaaacattaagacttcttgtgacagttgtaaaccccaaatggtcatttttaccccgattctctatggttactaatagtaaaaactccaggaaaccacctggagagttgccctcttgcttcaggcactagtgaggagagaagtctggaagccatagcccattggtcctggacaagaaggagagtaaacacgtggaagagtgggtggtggagctgcacagcagcaggcgagcaaatatgcagagtctggccagaggacaagaggtcagccaggcccagagctagcctggaagtctatgccctgaggagatgttcaagagtctggtggagtttggagacataaggacactaagcaccagcctcctaagaggactccctgcccactgtcctctctcctgctgccattctccacagtgcagccaaagcaatctttcttaaagacatatcagatttgcttagag

SEQ ID NO: 55527 - DNA, 1544 bp, Homo sapiens
agtacctggagtcttagagaagtatcccagaactggagctcccaggtcctgatcaaagtctcaactgtgccatcaagcacttgtagaactttaaagaggaccaaacttatagatctccaagatctcagtttccttacctgtaaaatgggggcatgagcctttgccaccccagtccttccttgctgatcaaaggtaggttcctgggcaaagtaataagcaattagttaaccctctttctctagggaaaaaacgtttcatgcgtgccccaagagcaggacaggtttgggctcccccaacgcgtcacgggctgcccaagtgtaagcaccagagaaccagacacacgaacggttctctaggagcgggatctcccggtctccgccacagacccgggggtcccctgctcctgcactgaagacgcgcgcggcctccgttgcttatccagatccccggccagaactctgccccggcaccgaacaccgggcacccataccccggggcccaagctgcttctgccctcctctacttgcctttattaagtcttaacgtgggagagaagccgtgatgtacccatctacacgggtgtctctggggtttctaaaccggagtagcttctcagtccctgaccctcgattttctgcccctcttccttcaagcacagctcgtcttgccctgtccgcttctggctcagtcctcctgagagttcatgtcacttaacggagcctgtgagagtggaccgggatggccaaaacactcagtccacacaaacaatggccgcagcccggctggaccgaaacggaagtcccaggtcttggagtagacactcgcagtgtttccatggatacgggaggggcggggcgggaagagagagcgcgggaaaacgtgactcctgattggccagaagtatcccgcgcctcccgacctttggccgctggcattcctgcgcgggcgggagctgcgggcgctcgggggataaggcgaggacgcaccagcattaatggaataggagaactcccgaagcttttagggccctgggaaagggggcgtggctggaaacggagctactggcttcggagaattctgtgaccctcaccaccgcgacgaccccgaggaaacgctgtcaggtcgcctttggttggcaaggcgtggttgtcctcgctgtcccgcgccttggcggaatgggcacctcactagccctggcactagctagcatcgctctaaactcaaggttagaggttttcaaattccgtcctattgttgccagacaccctcttcgttcctggtccagtgaggctttcctccctcccgccttcttgccaaatcccaggctcctctggagactccaggcagagaagggaaacgcacagtggagctgaaatgaagccatgagaaggagcccctcctcagtgtcctgggaccacagagagttgcaagagcctgttctattatttagctgagtgtgttatattaggaaaatactttcgcatctttgggccctgtccttcaaacttgggctggatcagtaatattcaaacattttattaggc

SEQ ID NO: 55528 - DNA, 1737 bp, Homo sapiens
cgtgctttggacacactcggcggtgggagcgggtgcttggtttgcatcagggatgaggggtggagtagcgaaagcgcccggagcgcgcactcactcacactccccaagccagggcgcggccgctctgggcgcgaggtcccaagccaagtctcgcgctcggccaggagccggggagtaccccaggtccccggtctggggccgccgctatcctaccctgcggcgcgcactcctgacctggccccgccccccggcggccgcgagtagcgggcggagcgcaagcagagaggcgctctgggctgtgcggcaccgcctctcctcggtgtctggggagggacggagggaccgggcgggagagagagaaagcctgaccgaccggctggcgaagagctgcatgcaaccggtgggaggccgggccggctgggtctggggctcgggctcaggctcgcaccgtttctcggcaggtccctggcggtgagcgcggacggcccggaggcggcggctctgagctggcaggcggagggctgtctcctgcgcccgcctgcccggcgcggtccgaggatgcgggggggcgatgcccggggccagggacgcgctctgtcaccaggcgctgcagctgctggccgagctctgtgcccgtggggccctggagcacgacagctgccaggatttcatttaccacctgcgggaccgtgccagaccccggctccgcgacccaggtgagtgccgccaccgccgcctggagggacctaagggccctgggctgggacttggggccgcaccggggcctgaggcagaacagcgacgcggactgggagagggcggggggcggccaccgagccaggagagtgatcaagaaccagcgcactgtggcctgatgctgtaaccaggcggggacccgggcggtggctactgcacggaggccgactccgggtcggctagggcagggttggagggaccacgcccgccacctgcgctcccatcgccaaggctcctgggggcggctccctagctccgagctacgctctccacttcccgggctatctgcactcagagcgaggggaggccgcggcggcctcggagccgtgggaagggggacgaggccgaaggaaactctgggaagttgggagttggggacggccccgggttggggccgaatcccaccgggtgctgctcatcctttctcccaagcgtctagttcctttccttggtatggggtgagaagggcgggacgcgatccggcgttgggccggggacagggtgcttctggccttgggcagacgggcctgaacccgttcccggcgggtcgcacggcatggaggtggcctgggcctgggcgctaggctcgaccagcgactaccgccggccacgatggggttcgtagactcgtcggtcctggcttgtgcacctgtagttactcctagtgaaagttgcaaagctcttaactttggaaagttcatttattttggcatttgaccaattaaggttggaggagggagttttagtggagccatttgcttttcctgaggtccctgggtctcccaggtcgtctcatccgttactggctactggaaaatgcattccttccaatgtttgcttgagatgtttctcacctggagaaatagttttctcgaatattctcccaacctaagtacttaccaaaacagcatattgtggttggattgttaaaaatgggatgagaaaatggcctttctcttgatattgctatgtataaatatt

SEQ ID NO: 55529 - DNA, 559 bp, Homo sapiens
tcagcaggtcagagtatgaagcagagccttaagactcatgattagtgattcttctctccatgtaaatattactctattcaagaaaagctttttctaggtcatggttttcaactttggctgcacattaggaatacttagggagctggaacaaacaaacaaagaaaaaacaaacaacagcaacaacaaaaactaccaatgactgggctgcaccctagaccagttttaaatcacagtctctgggaaatgggcctggtatcagtatttttaaagttcatctattgattctaatgtgcagccaagtagagaacaacctttgagaccattgggcaaagaatgcatccgcctaacccttctcagctcagctcacatttgtttcttgcaaaattaggaaagatagtatcaaaaactaggaaccttgactgttaccctgtacagctagtgcccatatcaactgattcttaactttcttttcccaacgttatcctacatttttcttttaagggctcattgaacatatcataaggctctattatgtccaccaatctgagaggggaaaaaa

SEQ ID NO: 55530 - DNA, 1914 bp, Homo sapiens
aaggtcctaacagattggaatcaatgaatggaagtttacccattttagatccccaacatatcaccctgaaacccaactgtaattaccttgaatagttgtaaatactgcctttagcaagtttagtcatctggttcaaacatctggattccagatataattcctgactatgccaacagtgacatcttgcttccttgcctggttatttagtaatgaaaaagcagtgtgttcagctgcattgtaactatccagtctgtggatgtgcacagtctgttttctctgaagttatagggcccaagagggaatacgcatggcaggcctgcctagtgcccaccaagccacgctgtagagatagttctttattgtgtgtacagggtctgccaattaacaggcataattttaaaaaataattgaattgaatgcccttaagtgggtcacaggctgtccatttctaatatctgcctcctcgtccccaccacatacatgtacactttgcttatcacatttttgggacatgcctgcctattgaagacatcttagtttgtatcagctgtagcactgcagaaccattaaaagagtttacgctgaaaattcaggtgagttttatcccttaattaggtattctggagacaggataaacattgattggagaggttatagtaggggatgccagttatttgctcaccatatatttattgagcatctactaagtaccaggctctatcctaggtatgtacaaatgtagatacctagacacagtattgtacatacagtagggaatgaaacagaaaattaaaagtttgccctcatgaaacttacattttgggaaaatgataataggtacataaattatattgtatgttagatagtagtaagtgctaagggaaaaaacaaggcatggaaagagatcaagacataaagactaaactggcaccactgagaagttgacaaatgagtaaaggtcagaaggaaatgtgggagcaagatacacacgtagcagggggaagagcgttccaggcaggagagcggcgggtacaaaggtctcaaggcaggagcatgcttgacgtgttcagatattagccaagggttagtatgactgtagtgaggttggcaaaaagagagtagtagtagatgaggtcagagaggtgatggcagactgattgtaggcctctataagccattttaaaaaagtgacttttacttgcagtaagataggaagccattagcaagttttaacagaagagagataacatctgacttaggaagagaaaggatcactctgaccagcacatagaaaacagactataggaggggaaggttgaagttagggagaggagttataaagctgttgtaatcatgtaggtgaaagatggtggtggcttggaccagagtgatagcagtggagatagtaggaggtggtcagattctgggtagctggaaggtggagatgacaacatttactaatagatggatattgagtgtgaaagacagagaggagtcaagactaagactgtggcctgagcagctaggagaatagagttgtaggagaagtaattttgaggggaatgaccagcagctcagttcttgatgtgggatattggaaatgcttattagtgagcccagtggggatacagactagccgtctggatatatgagcctggagtttgggaaagatggctaggctgaaggtataaacatgggagtcatcagcatgtatgtgatatgggtctggctgaaattatctaggaaggcacagtgaatgggagagtgaaggggacccgcactaagttctggaactgtccaacggtaagaggctagagagaacttgaggaactacaaaggaagattaatgaagagagactagaaatgaaagagaaaatccaagcaagagtgttgacctggaacccaggatgaaga

SEQ ID NO: 55531 - DNA, 873 bp, Homo sapiens
tgagactccacctcaaaaaaaaaaaaaaaaaaaaaaaaaaaatggagcaaaagcgacaaccttgccaggccaccctgaggtgcatagatgcatggaatgtgagggactaagtggcctcttgagagtgctacaaagaaagtgttgtgacttcaaaagagaaccaggattcagttgaagtgagaaagtggatagaaagtttacatgaaggattaaggatgtaggggaggtaggtgtggagcaccagaggaaggctggagacagtggaagtgggggctggtttggagaaggggaagtacagggcaggatatgatgacagtagggacaagaaaagcaactggactgggggtgtggaaagcacagcctgccaggtttgatctcaaggggcaaagtctgcttcacccacaggaagcaaggtgaccaggctatcctagaaaataaagccacagccatcctcagaccagctgttctcctagagttgtttgagagagggcctgaactgtctctcctcatgtacccatttattcgtccattccccagtgtttgtgagcattgggtctggtgggcccctgctcttcccaccaccttaaaccctctcctgcctgcccaactaccaccccctcccctgtgcccagctaacttctcaactcctgtctgccttctccccgatgccagtcattgcccgcctcccaagcaggcatgctttgcctgtaatatgatccctccgatgaataataatccaatgttacattttctactctatccagaccactgtgctcagtgctgtacaggcatccccagtttaactctcaccctgtgaagtaaacagttttgtctccccagataaaagaagctgaggcttaactaatttatcca

SEQ ID NO: 55532 - DNA, 3446 bp, Homo sapiens
gcccacataccctaagcacaaaagctttctgggagtgctgcttgtgttaggtttactgtgaatgattcccaacacactgaggccctggtaaatattctggaatctggacagaagccatacagcaggcaagcgactctgccacagcaggcatgccctgtggcaccgagggcagcatgcctcttgacaggggcttcctcagtgtttcccacgtgtttgtccaattcagctaagttcgagtcacaagtgcaggctgtggtgccagtctgtgtcacgtgctgaagcctctgtctttccaggttggtcacatgagaaggtttgctttgtgtgcttgcagctgttttcctgtctttgccaagcccaggctgggaccataggcagtgaagagaaaatgtttttttccatagcatttgagtagatatttggcagaagggaattactcaacccatggatacagtgtaattacccacagttctaacagaatggtacagagaggccaaatcctttgtggaatgagacaggtatgaataaataaatgtgatattacctgccctattacctacctatttcacagatagaaggaatgtgggctgcctcacagaggatagtggggtagatttatcaataggagtgagtcctgcaaccatagttcctttggaggcacagaggggaggttgcctgaaatgtgctgtctagattccacctgggatatgatttgattgacagctctgcagggcacatctgccccaaacaactcaccttggtacctaccttaaatccctgcagctcgaatcactcttttaggtcaagacattttctccaggaagcccctgttaagggaccactttgcttcttgtgagccagcgcaggtcagtatgcaggcctgggaatggggtttctttcaggtgaacgttttagctctggggtcttgttggatttaagtgaagactgacatcgacatggcctacatcagtggttcttaaactttgttgcacataagaatcacctgcggagttttaacagtcctcatgccgtggccatatccccaagaccattaaatcagaacctctggggatggatcgagatatcagtatttttaaagttccttcccgcaagttggttccaaagtgcaaagaagctccagagccggtgacttagaacatttaaaaaggtaactgtatcaatttaagaacaggctagcagtttctgggggcggaggtaaggggagtggctccgctagggcaataaagggtgggattcggaaacagccatgaccttgtgtgaactgtggcagcctgcgtctacaaaagtcgctctgctgctattttaaggaagtgaaagagaactgaagggtgtcctgttgtaacacaactcttgcgggccccagccttcccctgctggctgtgctttggtctgctgctggccaggttcccgcagtgaccacacgtctcatatttgccagggtgggttaggttctgttcacatgtaaaattctcctgggcctactggtcatttcagaccgcgagggtaaatttggtttgaaaaagttgtgtcctgtggagtttgtcgacactccagcctgtagagaactaaaggctagggctgtggtgactcctgccagagctggggactatgccgagtccctggtgtcgctgccatctgaggcctacagggattttaaacagcttaacagcagccagtccttggaggcctgggcagggccacaacatagcagtacaaccaaaacgggttcaggccacacgctggaggtaggggctggaccagatctccagcttcagtcctccccagttcgagaacccattcctgtggtcagacattgccaacgcttttcttggacctaaggtcccagaccttggcgctgggcacagggaaatgcttcctgacctcggctcttcataagacagaacttttgtttggtgccaaccactagagggacctccaccccaggttgcgagtgcagcgcggcgggacctgggatgattcgggggctttccgacctgcttagggagggcggctcagagacaacctcaattttgcctggattgcacgcgggccgaggaagtcgggatgctccgaagggtttctgctctgggagtgcctctaatgtgggttttctatgctttctctcttcgcaattctcgacaccgtttccttcttcctcgctttcattccctgtgaccggagaacggcgctgaaggactggagaagcccaggagactgggagccggagcgccgggtacccacccgggcctccccgcaaccggagctgtgcggaggaggaggcgcggcgaacggggcggggctcccggaagggggcgcggtccgccgagagaggcggggctggggcccggacgcgcggcccagggggtggggacgaggcaggttcgaaggggcggggctgaccaggccggtcccccgggaacaggaaccctggtggacgggtcccagcaggcttcttcggtgcccgagagggagcgggtgcccaagggggtggtccctgtggcaggtcccggggtgggggcgcggcgctccgggaagagccttccgcaggtccccgccccgtcacgtgggcgccggccccggccgctgcggtcggtccgctggttggtcgggcgcttggtccggcagttggtcggtgggccagtggcccgtcgctcgcttctgggctctcatgtttgaaggtgggagggacacgggagcggcccgcacacctgagccgcccggagaggagcctcggccccgtacccaggtcagtgggctctccccacaccccgggcttgccgcgcggtcggggttgggatccccgtcgggagcattacctagggagtggagcgcccccagagctacgaaccacggggacgtgtgggtcagtgtctctgtgagccccggagcgtgtcccaggctcgaggacggggacccttctccaactccactggccagaagcctgggaggagggcagaactcctgtgggttggctgcgaatctccacccaaccctgcctgggatccgcggacagtccgcactcctgcaggtgccagcgtggccctggagatgcgcagggaggtggggtccctgagttctgtgcggcgcgtcccagccctgctcagcccggggagcagcggcgtggactagggagcctaaggaggttgcggaagctttaggtctgtcagcccaggcaattctctggtggacacagcgtgtgtctagatgcagggcctcggctaaagccagttctgtagtgtaagtgcaaaaatacagcacactttttaaaatctaaagccgccgcgtcccagtagactgcaggatggggacggtcctatttaaaagtgggctccctcctcacctcatcacatcagattccagacccgcagtttttcctcggatgaaaataagattatgtaacaagagaacagaacttccagcgtttg

SEQ ID NO: 55533 - DNA, 1868 bp, Homo sapiens
tgggttacctctttcttgcctgcttaggcaagaaagcctctatcttcaggggcaacagtttccttctcccaacacacaagtccatgttccctccaaatcaaagaggtttttacacaaataactagctcaatgctggactgcttcatggaggcagtggaggtgtagactggccccacagaaagtttcttccacaggaaaggatagagcagaacttccaactttggtggatttgacaaatggcttgtttcatgaggtcagggtagtgttattcccattttatgggaaacaggtgccagagaagtaaagacacttttgaaggttccagagtattagatttaatgtaatttattgtccgaactgaacacttttgaaagtgaaagtaggcacataaatgctaaactgggtggggactggggaagatcaggatcaggcacattgggatgtgtggtttcaaattcagtgttcaaaactccaaattctatgagcaatgggggcagaaaagggaaggggtggggtgggagagtggattggcctgagggggtggagatcgatttgggataggaatagcagattcttctaattcaacatttcaccaaggcagaggaatagttcttgactctgacacctgaccttgactggatgtcatgaaaaagtttcattacataagctcttcctgcgaccaaccagccaagacatctggttcttggatgcatgtgctcacctggtaacaacaacagccttgtgtgtctgtctgggttttcactgtgcctgctcactggtgcggcacaatgccccgggcagggattattgttctgcttgtggaaatgaggaagctgactcctcttgcctgtcctgccccctcattctatcatggcaggcaggaggttttctccagcatgaggacttggcctccctaactcctgtgggccctggtagctctagagtggagggtttgaatcagacagtcctcgattaaaatagctctacaccaattcgctattgctccgtacctctttgagctttacattcctcatctgtttaatgggaacaataataggccaattcatttggtggttgtgaaaattaaatgagatgaaatgttgactccagtgcttggcacatcataggtagtcagtaaatccttttattcccgtctcaggaagcttgagagaaatcatttatcaagagatatttagatcatccagagggcttatcctgaaatttcaggtgggaagttgcatgctctgggcttccaggtatgacacagaaagggcaaccatggtggcggtgagcagaaattccaggaggcagaagtccatgacaaggtagagaacagcccggaatcaggtggctggtcacccacgtacaggacaaaagcagcaaacagcgcagagtccaaaccagctggatgagatgtggcagggttaagtgcaaagtcctgcccttaggccctgaaaatcaattgtgtgagtgtcctacccatctatgtggaaaagcccaatacattggcttagcctggctacattaattgaagtcctgggtttagaccttggtagaggatcttttccctgcattggctgagactggccacacctggagtgtgcaaagccggtatccctgtcttacaagctttggaggggcccaaggacagtcaggaagatataggggaatgactgctattttcaggtgggcaaggtgggcagcatgttctttgttgctcagagggcagagatgaaggcctatggtagtgatgtcaaagaaaactaaagacggagcagattctactttgacataatgtaagaaattttaaagaactcaggcttgtctctagggccaaaccgctgttttagagcagatattggagtcta

SEQ ID NO: 55534 - DNA, 927 bp, Homo sapiens
catagctgtgagaaatacatttccattgtttgtgagctaccttcccaatttatggtaattttgttaaaacagcctggacagactaagacaaagcttgggctctttctgctgcatgctgctcctctctttcttcaggggaagaagcacctcacttgggaagaaaggagcctcagaaggcttgaggctgggggtatggggacccagcgtctatactaccccttctgtggccatttggagtcacatagacctctgtaattttcactttttcctttgattctgaggaactgtttgggtatcttctataggggaataaagactctgctttatggaaaggaagagctgagaaagatgggagagaggtcccaggagatcattagaccttcccactcccctggagtccagctaacaaacttccaggagcaaaaccacttgggcctgcagggaaggggctacctagtacagtgtcattctccagcaggcctgtctttggcctgcaggaacacttgtgcaagtgggggattcctagatcacttttcttgggaaagtccctaaaccactttctggcctctgaactcttaggggagggaagtgatccaagtggcaaatatcttgtgactggcaagccaaggttagggaccaacccttcccctgcctccccacatgctggagcttttgaactgagttgaagatagctgggcccagggctcttggcccttgaatgcagcttgacatctggtcaggctgcaggatcttagggtttcctctttgtagcatcctaaaatctggcctcactaaatggtctcggtccagaggtgggattcgacttagagctgacttacaaagaatacagataaaggaatattgggaactgtgcttaccttgatgtggtttaaggtctgaggatgtgaagaaagtctctcctggatt

SEQ ID NO: 55535 - DNA, 1011 bp, Homo sapiens
ctcctcggggtctcacgtgcattgggataatagctacaggatcattccctgagaatgcctgaggcagtcatcacttcagagccttcagccaaagagcaaaggggagactgagcgagtccctggcagacctctttgatggttgtcagggagggatgaaaatactatcttttctctacgtattatctctgctgctttgtcaaaggtcatttgattatatttttgtgatatatattcaggtctatttctgaactctgtattctgtttcatggatttattttttctttcaccaataccacactgtgttgattactgtagctttagtaagtcttgaagttgggtactgtcagtcctccaactttgttcttcagtgttgtgttggctaccttttgcctcttcgtataaaatttagagtcagttttttgatcacaaagtaactttctgggattttgattgcaattgcatttaacttagatcatgttgggaagaactgacactttcacaatattgaatttttgagagatgaatcagacttctaaagaaaagtagccttgtgtggggtcagtacctctttctgactcctgatttctccatacaggcattcctgaaatgacagagcctctggcaaaattcattttgtctctgagagacattatgtggctggatccttaaggccttgccttgacccaggatctgcagttgagaatctgggatgtgtgtggagagaggggccctaagtgtgggttgtgtgaaacccaggagacctaatcttctgatcttccagtacaaactgctctatccttccatttccttagtcctccatcttggaaggttctatctagaagggctcctgggcttttctgtctggaacaggtatgagagttttgtagagagaaggcattctttgcaaattggttctttgcagattggtagggaggaatacctgtagccagactacttgtttgaaaacctagctctacaacaagttacttacatggtctgtgcctcagtttc

SEQ ID NO: 55536 - DNA, 1261 bp, Homo sapiens
aacaaaagatagtcaggatacgtgtgtgttgaacatttcaattttgaaaagttacagaaggagttttgtaggtaaaccttttcctctggatcttagaggagggaaaatttggtgcttatttttcaagaaaaaaagtagagcctgtgtgagccgatttccagcatgttttcttacctcccctgtgacaggtgtgaacttgagtgagagatgagaaaggagtaggtgtgtccgtgctttctttctgcgctcagctcccaaggggctcctgggccgggctcaggtggcatcagtggtggttctttgtccctgtgcagtgctggaagaagccactaggtgggagtcagggacaaatgctgggaagtgaaatcccaaagaatgaggtcagcatgggcttcatatgagaaaacagcttttaatttttctttttcagacaaagataacataagcacctctcattattgaaactgcttaactgcacctgggtcagctggcaaagataattctttgccattttccttagaaacagtggacaaagggcagtcaagagagggctccactgtttagggtgggggagaagagacagggctggtcctgggatcatagacctgaccttcccctgtggatgtggggagacctctccagacttcttgactgcagtgccttctgctggggtgctagtaggttggccccttccattcctgcaggcatttcctagcccacagtttatgtcacgccctgccctagagaagcttcctgtcccctgggggattttgaatgcccttttcctgacacagcagccaagactgggggccttcagccactgcaaatttagcagtttcaattttcctggatcttgatccctgccccccaaagtaaatttaccctactaaattctagcaatccggctcctttcagacctgacctaaagagactatttcagcctctaagaaccaatgtttataaatgaccaagaatgtgcaaacactggtgaaagagcaaataaatccttccccactatatttcctgcttcaggcccaggggccgtggtggacagtgttgccaggttagcataacttgaggtctgagcacgtagacacccacttaccctccacctacaaaagaaaatcctgccagagatacactaccaagagccttctgccctttcagatacctgctagtgggcaggcaggctccagggaatttatgcttctaggcaagtttgtttagtaatctatgtttcgaagaatgttttgtttgtttt

SEQ ID NO: 55537 - DNA, 1339 bp, Homo sapiens
tgctgggaatacaggcatgagccaccatacctggccttgaggaacttttgaaagcggtttcctaacttcttactcctccaagtgttgtcctgggaccagtagtacgagcatcacctgggagcttgtcagcagtgcacaacagcaggccccatacccaatctactgaaccagaatctgcatttttactagaaccccctcaggtccaggcagttcattctggatggggaagcactgtcctaacccagggattagcaaaccatggcccacagttagcccactgcatatttcttacactcatcagctaagaatgatttttacatttttcaagactgaagaaaaatcacaagaatgttttgagatgggaaaataatataaaattcacattttggtgtccataaataaagttttactagtacacagccacacactggtttaggtattggctgtggctgcttttgcactgcaaataggagagttgagtatgagatagactacatggcccaccaaacccaaatatttgccatctggcgctttacaggaaaagtctgccgacctttgtactgatctattttggaggtgcattctccatgcatgtgttctgtggaggcttgagctgcagtggccaggacttcctccacagcactcttcactcccttcccccgcctccccttctcagcgggcccactgtgcaccatgtctgttgaaggacacaagtttacatctgacttatgaggatttatgagggagtgtcctggcagctgccacctatggcccagaggtgaaggctcagggctgagcggagcccaggatgcctgtaggtgataggtcagtggaacagcacgtgaccatgagattcctctcagtttacagttctgcctgataagatgctgctgatttctggtaggcagcaggagtaacacctcagggggcctcagctcctttttcagccattccctcaagtacttggaattccagccaggtaggtggcaatcctggggttctcttctagaccctaggacaggggtggagcaagctacagtgactttccccggcaaacctgaccaccctggcctcttagctgtgtttttactcccagaatgctcagcctcacagtctcctgcccttttcccacagctggctgctgcatgttgcaggcagtaatgaatctgtttgtagatgagcaaagtacttccaggaaggccttcgggactgttaggtcactgtagtgacccgtatttgtgtaccctttgtgcttcctgaggacttctgtcttcagagaggggtccagtgagtctgagacaccacctcacaggagcagtataatgggagcagcaagccc

SEQ ID NO: 55538 - DNA, 954 bp, Homo sapiens
aacatcctgccatagcacgggcagggaacctgggctgggtgggtcacactgtgctgtggagcagggccagaggtgaggagcaaggggctagagctcagcgcatgggcagcaaagcctgcttttcctttctggcctctgtctgggtgtgtctccaggaatttactcctccccttatgccagctgctggctagagctctcctccttgccgcctctgtgatctctgtgggctggcccagcctgccggggactgtgctgccaggcattgtttctccccttttgggccctgcttctggccctggtggacattgaagccatgctgaggggcatgcggcatgaggggcatgaaggactgctcttcagactgggagttccaggaaaccccggaggtgacccccaagggaactgggaaggcccaggcagtcacaagctgtgcatctgcaagtcctttgccacagcagagctcggggccttgcgtgtaaccacagttcccaccgtgtaaccacagttcccaccgcacccacatcaaaggtcactttgataatcagccatagccaaaggccacacattaagggctggggaagggagaaaagctgtttttagtggggagctctcaaaggagatgggaataggaggaggtggggggtggcatctagggagtgctggaggggccacctggagagcctgcatgtgacctgccctgaaaggaggaaaacagctgcagctccaggtctccgccagcctttccaaggcccctgtctacccagcactgctccctgagtctcatggaaatgcacgtgaagcagcctcaacctttccacctccttggtttgtaaagcaggtagcccagagtgggggacagccagagaggcaggaccctccagccctggcccctgttcagaatgtggcccccagggtgccctggctggtggccaacagtccagggccagactcccc

SEQ ID NO: 55539 - DNA, 2109 bp, Homo sapiens
ttgcacaattaagactttcctctagggtggtagacacctccctcgtgaatattgaagtgctgatttcactggaccagctcagattgtataatactcagttccacatttagcaatcagatctactttttcaaactgccaagcctctgggtggcctattgcagaccagtctgatttcagtcttccatttgcatggaggaaggaggtgttggggccagcttggtgacattagctccttctctcctgtctgcccacaaccaggtcagacacacccaagaaagtgacacctcctttctctgcttgggacatttgtaagattctgcctctcctctgacatttcacatcctctccctttcctctcttttctatagtttctggctacctgtaatttccttagcttttgctctggcatccctctggctattatttaagttcttctcaagatgttttgtcttagcttgcttctctcagctctagcactggggaaatgtgatctgccagcctggctaccaaagctcttattggagggtgggattggggtgggaagggacgtgtgaatgaagggccttgtagttgacatcctccatccttcatgctcactgtgatgttcaggatgggcctccatgcagcaaggtgtgccttggcttcaggggaccctggcatgagaattaggagataccaagatctgtgcagaagctgttcccatgtagtcccttggagaacggtgccagctctccaatctcctcaaagagcagaccctcattgtcgccatgcctctggaggctgtgcctctggctaacccagacccagcatgtcaagtcaagcactgctgggcctagagtttcacagaggccctcctggccaggagtgaggtcatccaggaggtggttgtgccaacttccagggcgcacttttcagtggcatgtgatctggttctcctcatggtagttttgaaatcttgtggtttcctgttttgatgattggttttgtacatataatcagtgaaactatcctcacaaattacatgcatcccttatttcatttagaagttggtaagatgtttttccaaccttttaagtgtattcttttttttctgtcctctttagtcccaggtaaaccaccacagtgctgctagtaatgaaacctaccaggaacgcttggcacgtctagaaggggataaggagtccctcatattgcaggtgggtactttttggtgagaatcggcttatcctgttacctcctactatgtagcttcccctaagtggaagggaagcccaagagattttctctgttggaatttttctccttccaatgcctatgtttttagaaaagacttttcctgaaataaaacattaagtaactgaggggacaatttaactctagacttggcttaggggggctgtgaattcagtcattcatttatcatgcactcccaagcacccgcttctatacactggcagccccatgaccaggctgatttccaggtgctaagaatgaacaaaatgggccctgtcccccagaagctcctgagtcttgcgagggaggggagatatatcctcatgccactaataaaacagagctgtgggtgatacaggcctaagggtgaatgctaatgaatcaagtccaaattgtctgaagctggatctagactgatccctttaatgccaaatcccctggagctggtaacaggggctaagcctttgatagctgtcttgcttgaaagagaggagctccaaaaccttttacggagaaagatcatcaagggagctttttcgctgttgaaagtttgtgtgccttggtaggacatagagttaggtattctcataagaaggctgttgaagaagcaggcccagcactttgctgtgttagctcttgaaaatataaattgattaagcaagcatttactcaaggtctggtatgcatcagatattaattagtgatttggaaaatataaaggctagtatcctaatcccagctccttaaaagcttaaagggtgatgagttagactggtggtagaatgaagggaggggttgagcggggcctggaacccaccccaggctatgggctttagcttggagcactaaggttatgaggtggcagtgtgtttgttt

SEQ ID NO: 55540 - DNA, 697 bp, Homo sapiens
gtttcaaagattcctgaacttgaccaagttatttttctgcccataagctttcattgtattctctcaaactgtcaagggtcaaatgatagcagtgtgcagtgctcctttcttaacaaattgagttcaagccataggacacatctgagcctcatcttccactcatgtgttcgctgggctgggtggcaccagagcttgagatcttttgagttcccagatctaaatccaaagttgaatgttcggccgcacatgctattgctttcctgaagtctgtttgatgctgtttgtgaagacacttgattcttgcaccacagtgctgatgcaatatctctggcttggagtatgtgtgtattctctgagctagggacaggcaaacacttgcctgatttgactgagatatcctgggctgcagggcccttggcttctggtggtaggagcaagaatgactcatggcctagaggcagagaatggaggcaaacaattgcctctttctgccagcctcagaaaccattcctgcctggagccaaggcgagcctgctgctcaaagcctctgaaggaaatcctttcactgtctcagtgtgcgcccttctaactgcctgtagataaggtgcttcctcggggtttgctgctcctgataaccctgcatgctggagacatcctgtctgaaggcagcagctgctgttctactccagttgactgc

SEQ ID NO: 55541 - DNA, 608 bp, Homo sapiens
agccagagacaaacacaagttttgccaggcagtattggaagatcagctgtaattagatagcacaaatttgtacagaaaccaactggcatcattaattgcctttcactagcaatttttaagctgtggagagtggaatcacgacaaaagactaacaaatgcacatgaggcctgttacagggatgagatcccatgaggattttctgctgtggtatgaatacaattggaatgactcacctcaaggtacagagttgataaggagaacaatgttgcttcaaggaagttgataaaccaggaaaatagagttactaagtaactagtggccgcagaagaaattagaggttgagtgagcaagtgggacagatgaaaggtcagaagattgtggccagaggagagaatttcagagctgaagattttagaagcaaagcaaacacattctggatacacgtgagatccaagtggtgactgtgctactgagaagctgaacgaaatggaaagcaaagcctgttggagctgaggtcaaagaatgtgaagccagagtggatactgaatgggaaagttaataacaaggatgtggaagctattgaggagacggagtgcgcctaaagtag

SEQ ID NO: 55542 - DNA, 2206 bp, Homo sapiens
aagtcacttaagagaaaaagggaggagagagacctatgtcacataacttgaaaagtctagtgtttgaaagaatacaatatgactagatccgggtaatctcacagtgtcactagaaattagtctcagttgtatcacctggttctgctttagccttattctcaagaaggttctccccaggtggtgacagagatagccatcagtagctccggaatgatatcctgccagccaggcaacttctgcagtcaaagaggtgctttctcaaaggttccagcaaaagcctcaagattgcatctcattgggccactttgggtcatatacctggttctacaccagtcaccgcagggatctgtgcatgaggggtgggaggtgcgaatatgaaagtcagcccgtgtgtggaagtatacagagttagcaccaagctaggataatgcagtccctttacagggacatcagaaaggaaggagagctcccacttctgggacaagaagcactaatgcagtcattttactgtttgcttttttctttcttttctgaaggactatttttaaatctgaattttttgtttttgtttttcatcagtctgttcatacataaggcgacgtagaccctgagtgtctggcctcagtcctaccagataacagcccttcccagttgctagtacaaatattaggtttccacgtggaggaattctgtaggctgttcaaacctgtgataatcagtgagcagccacatggcctgaaacaaattcctcgttcttgtaattgcacataatctttgctggtatgcacagaacttctacctctatttgtgagtgtctggagcaaccaggggtttaaaaccacagggtactgcttaagctgcactattgtcatgtgcatggagatgtttattttgagtgagacattttgctaaggtcaccagaggttgtaattgcatgaataaagggaacgctgcttcccatactatactgctgctgttttttccagtgagtgtatttagcctaagggctcattgtgtgtggtttggaacaggcaggattcttttttttttccccctcaggtgtgagatagccagatctgaaatacagtttctcagcttagctcaggctttatcctcaaattctgttttatgttttaatgaaaagaagagaatgcttgtggcaagagcattgccaccacaatgtcactagaaattagtctcagttgtatcacttggttttagttctagttctaattttagttcacactgctccttctctgattctgatcatagcccaagccagcatcttgctgcttgttttaagttgtggaaatgattaccgacagtcattctgtaagacctagggacttgcaggcgcaggttccttgatggccagccttgctcaagagtgagtagtggcccagatgagatgtgggtgaatactaggtttcctgtttaccttttctcatcagccttttgcaatgattcagggtcatatgagggtactgaagattgggtgaattagacgtattcctgaaaagtaggactacagaagagtgattgacgtggaaagtaaataccaaaatcaagaggatgaagcatgaaagaaagagatccagaggtaaaggaaaacctctgtgtggacacagatcaaagcattgcaaaggcgtgttgctcagatgggccttccccaagaaagaaatctggcttctccatgctgtggaggtgccagcaacctgcagttggaccccactgtggcaactagagggttctgtgaatagctatcagagcagcctgttaagaagggagcagggaccccagatatgctaggaaggggagtcagcccaactgatcaggggtacacgtgagcaagaagagaacagggaagaatctttaggatttcctgcagaaaatggaaacatctcacagcacaagtgatgatgccatcatttcttcttccttgtggttaggaccctgggagaaagggattctgatttctgaactgaggcaacagagtgatggacttggaacacagagtgagatctgggaagattgtgtttgctcagagatgagctggcctaataggagagtttttttattcttgtttttattttctttatttactcatttgcatcagtgtaggaaatatactcccacaattcaaaaatcaagtgttcaaaagggtatatagcaaaaggtctctttcaacacctgtcctccagtcagc

SEQ ID NO: 55543 - DNA, 638 bp, Homo sapiens
tgaagaattatttaaacaagaggtactgtgtttccatccatgacgtagggtttcagcaggtcctccgagcttgccctgagcttgagggaggatctagtcagacacgtgtcaggtgcacatcttggcaggtgaatacttaaattaatatagtgcccctcaggctgtgatggggatgggcgagcaagaggctgaggctctggcctgtgctctggttggaggcagcatggtggatactggaactttcaaggataggagttctcctttttaatcaggctcctagtttatttttatcttttttttctctggaatgtaagcatagaccaaaggtgatgtttgatttatctaccaccctttctccaaggtctgcagtaatgcccgatacccagtagaattcaacaaatatttgttgaatgaacgaacatgtcttgctcatttagaggaattaactgcaacctctgaaatgccgcattcctgcttgacagatacgcccttcagcccctatagccaggacacagattttccttctcatctatttcgtttgtttaaaatctggtcctattgtatgaatctctctagacttaagctagatacaaataaacaaataaacaagacctcaggtgaaggaggggcttcagcct

SEQ ID NO: 55544 - DNA, 900 bp, Homo sapiens
tgaggccacagctctggacttgtggcatgtatatgtgtgtatgcggacctaggacatgtgaacatgatctcaggagggccatacaggctgccccattctctaagtagcctgagatttgaaattcagatcttgtgttattaagaaaactctagggtctacctcctatgagtgtgttgtagtggaattttgttcagcagaatcccatgatggaggttgtttgttaaaaaacaggttttttgttttgttttttcttttcttttcttttgtttgtgagacatgattagattcagaacctcaggctctcccactaacaggaatatgctgttttcctgcttcccagtgacgccaatgccccctttgcccagtggagcacagagcgtgtgtgtgcatggctggaggactttggcctggctcagtatgtgatctttgccaggcagtgggtatcttctggccacaccttattgacagccacccctcaggacatggaaaaggtaagggctcagcttggggagaggaggctcccatttctccccaaagcatggggaggccagggtccgccactcctgtcacacatacacacaggaggatggatggaggaggctgagagttcctctgtagctgcaggttggcatcccagggcacggtgtggagatacactgccatactcagagcatctccacccagacacagctttctctgagggccaaattgcctgccaaaatttcacatgtggtcttcatcttttaatttcaggagctaggaattaagcacccactccacaggaagaagcttgttttagcagtgaaagccatcaacaccaaacaggaggagaagtctgcactgctagaccacatttgggtgacaagtaaggataggcatatatgtattaagaatgtctct

SEQ ID NO: 55545 - DNA, 1708 bp, Homo sapiens
tgggcagctgagatgcctgggaaaggaggtccgtttggcgctattccagcacacacacacacacacacagggcggcggggagtgaactggaggccatgagatgactgtctggatgccctgccatcccagccatcatccacttactgccttccacccacagggctgacccattacctctttctcaatcaagggcagcgggtacttggcttcagggtcctgtaaggtgattggctctctcctcctggagttcatgctcttcaggaccaacacgagcacagtgaccccagtgacggtgatggtcaggagcagggacgggtcctggcagacacaatgtgaacagagcacctcaggtcttgcccgccctggacagggcagctctcaggcgcagaacaccctccccacaccaaaggcacaggagctgagctctgcctgcaggaaataggcaaagagaacagtagtgacacagaaggcggctgggagagcctgtcgtggaccagagggtagggaggggtcagctgcaggtcacacaggaaggatgtttcaggcccctggagcaggcagcacacatggcctggggtgctcaggtcactaggcccctcctggctacagccaaaggttcatacactggaagtcccttccttgaggtgaagggggaggacatcacccctaacacacaatccggaatgaggggcccagtccctaaagacagaactagggtgcgtagctctaagaggtgccccgtgacttagggcctggggactccccaacagtctcctggacagggcgaagggggcctgggcactcaactgccagagactcgggagcctccccgcatctgtccctaccctacaaggccgccctgctcctctcccaactcaagcccgacagggaaagttgcctctcctcccgccgggtcactggagtctcagccttccggaatccgagccggcccgccccactccccgcccttcgcggtcccgcccacgacctctccccacgcctcccgctccggcccccaacctcccggtcggacgttcgttcccggctctagccggcctccgcgcctctggcctctttccttccggccgtcccgacggagatatttcttcaatactccataaatacaccccgccgcggaacccacccggagtgagacgcccaacacgtcgtcgaactggggttggccgggggccgctccccgccgcgggcccgcagactcgtggcgtcgccccgcagctccgcctggccgacggggaaccggccgagacccggacacgcacgcccgggaggacaaaagcgcgggcggaccccgcaggctgggaccccggcggctggcccgctccccgagaagggccgtggtcggggggctctcactcacgagccgctggctctgggtcagccctgcccccagggcagcgctccatcatgaggctggcggggcgctgagccgtggcgtcctcgctcctgcgctgcccctctgcatcctggccccttccctgcacacgcagagctgccacactgagcgcccctcagcttacttaagctcggcaaggctggagaaggccgtctgggtgaccgggcggagggggatgctggggaaggaagaattcaggcagctgcaaagagcgcgcgaatatattcattcgacatacctcatgggcgcctaccctgggcctggtccggggcgggtgtttgcggggtggggccg

SEQ ID NO: 55546 - DNA, 693 bp, Homo sapiens
aataaataaggaagacatgcttgtttctggaatggactaaaagtcaccaacacaaagtttttgttttgttttgttttgttttgtgttttgagagtttcgctcttgtagcccaggctggagtgcagtggcgcgatctcggctcattgcaacctccatctcccgggttcaagcaattctccagcctcccgagtagctgggattacaggcgcccgccaccgcgcccggctaattcaatacaaagattaaagcggcactttttttttttttttttttttttaaagtaaggagcacagtgccatctagtggaaaaaatgtgtagttgcaggggaaactgggcggatccattattcagcaagtatttattgacagctttgtgtgtcaggtgctgggttctaggtactgaaaacacagcagtgaataaatcagataaaacctctgacctcatggtgcttatgttagctattctgtgaatttaccatagctacgtaaggacagccaaagtcaataccttaattaggtgatgtttggaggcttgaaaaatccagtcacagttagccttgtcactgtagttttcaggatagtttagactctgtatgagaccttcttcaaaaaggacagttaagtaactgcaacctgaatctgaaacgtaagaaaaagtccaaacagatggcaccattcaaataaagaagaatt

SEQ ID NO: 55547 - DNA, 1267 bp, Homo sapiens
atctcaaaggtgacacattcagaaatgaaatcaggatcttttccccaaaacctgctctacctacagcttttgctatctcaattgatggtgacttcatcctactaatcgctcagtacaaaaaaaaaaaaaaaaaattgcagtcctccttgactcctctctttcacacctcatatacaatttctcaggaaaccctattgaaactaccttcaaaatatatccataatcttcccacttctcagaacttctactgctaccagcctggtcccagccaccatcatctctcacttagattacctagtggcctcccagcaggtctccctgcttttccctctctcgcctccctctcctcacctcccctcaccctccagtctcttctcaaagcagcaggagaaatccagctaagttctccttctcgcccattgcagcctcgagcttctgggctcaaacgatccttccgcctcggtctcccgaagtgctgagattacaggcgtgagccaccgcgcctggccttaaaatcctttttaaaggcactttgacatccattatctcatttaagtctaaaacacgaatttcgacctccgcgctgctttctggttccacctggcggcagctgcacaaagtgtttctcttcgaacgccgtcccaagttttacccggaactacttagcccagggtttcctgagtgctcctcgggccaaaagcagagcgcacaaattccagaagaaattaccaacggcgggactatttcagtgctccgagaagtatcaccagtaaccaatcagcaaaaagctctagctcacgtggtgtatattcagcctatcaagctcctgatattcatgaatgctgtcatttccgcttccgcctccttctttctcgacaagatggccacaccggcggtaccagtaagtgctcctccggccacgccaaccccagtcccggcggcggccccagcctcagttccagcgccaacgccagcaccggctgcggctccggttcccgctgcggctccagcctcatcctcagaccctgcggcagcagcggctgcaactgcggctcctggccagaccccggcctcagcgcaagctccagcgcagaccccagcgcccgctctgcctggtcctgctcttccagggcccttccccggcggccgcgtggtcaggctgcacccagtcattttggcctccattgtggacagctacgagagacgcaacgagggtgctgcccgagttatcgggaccctgttgggtgagtggtcagagaaagttaac

SEQ ID NO: 55548 - DNA, 1207 bp, Homo sapiens
ccgctgtgctgtcctgcctcgggtcccatgggcttgcctcagctgtaccactgacctcaggcccctcctgggccgcatctagctctgccctgggctattgaagagcctgctcactggtatctctaattccctctggcttcaccacagaccctgctgccagggctgcctatgatcccctcccttacaggcgggatcacttccccagcaccaccacacccctgcacccctgcaattttccattgtttacaggcagcctggccctgttccagaccaacttccccagtcccatataacctctccaagacccttcttctccctactcattccccacgtgttacagccaggcaggccgtccaccccaatgctttcctaactcccgtggcttcctcaccccgtctacctttactgagctctgtatcctttaatacccagcctcaaaggccgtctctgctgcaaagccctgcctggttccctgtcagactcctctggctctctctgctgtgcccccacgggtcttcacctctggctgggttgacttcataccacctgggattattgtttgttatctgtgtccatctgtgtcctccagtaacccatgatcttcacaggccagtgccctgtgttagtcatctctgggtccccgtgactgacggggctgggtgcagtgcgagcctcagtactgaaatgaacagggccggcctacgaggtcactccgcgatttggggcaggaaagatctgagtttctttctgcactcccgtcgagtcctgctgtagaaaccacaaatggggaatgatcgttgaatcccagaagactgagcaggaagggccgctgcaggtcatctgtgttaattctttatctttgaaatgttggagtgaggcccagaaatgagaaagacctagcccacgatcactccacagggaggagttgtggttggaattcagacccctggcttctagcccagtgtgctttctgctttgctgaaccattccatctttgctttttctctacacaaaccacctactacaataacaacaattgcttatgctgaaaatcagcccagtctcatagctctggaacctctctttgtccccttccagataaccacaggacactttattttacacttttgtcataatgattttacactctcatttttaaatttagtattctttgtattctttcggggggggggggtaattaacccta

SEQ ID NO: 55549 - DNA, 564 bp, Homo sapiens
tgcccctcaccacccgcagtcccttttccccatatcttcttcctaggctgggcctaggtgtgccccccaccccctccccatcctctctgctcactcctggcctggcacaagtcttccttccctgttctgcccctgttcctgtgtggctctgcccacctgcccagggtgagcctgtgccagaagcccaggtcctctagggggcggcagagagagcacaggctgagcagccgatgattcatttgtgtccctgaattgggacaatccaatggcctctccgggcctccgtttttacacttgcttgtgggggaggtgactcaccggcctctccctgtcagaggcactgctgcagctgagccgctgcagagaacctaagcgggaggtgggaaggactgtaggagggtgagcagtggcaaagcctggccaggcaagtgtgctggggacagccactgttcagcacccccaccccaggacggcagaccagcggctacagccaggccaggacggcatgctggtgtccggtggcctgggtcctagccctgggcacttggtcactgagaaccaggc

SEQ ID NO: 55550 - DNA, 1681 bp, Homo sapiens
ctgtaatcccagcactttgaagtccccatttttaaccagtgctataatgcctcacagagagcctagatttgtgcttcaaatcacttgggaaatactgcagagaacaaaacaaacagaaaagatcaacaacggtatttctaagtgttgccaacttatttgactttctcactgcataatttcattcaatggatattcactgtacctctgtgacatgtcctgtgctagaataataaaatgaagtgacccggttcccgtctccagtgactgcacagttcccagtgagaccgtttcctaggaaacctgacattctggaggaagacacaggctcctccctgctgggcagcagcttaaatactgaatagttcactagtcagtgtgattctattcaaaatctgttcctgactaaccctaggaggccagccattctctctctgccttggagatttagtgagtcagaacacatcctctccgtctggggaggcagccaaactttgaatcaaaacctttccaggcttcttagtctgccaccaatttaaggaaatcccaaacatgaaaagttccagcttacaaaacagatatattaggcatcaagaggattcactctgtctcacagattcccccaaagattgctttcagcaatgagtgtcccttgggcatttaaattctgattctttctacacccaaaattcagttcctatgaaacaggaagagacctgttatgtagtgggaggtgaacttgtggtgcctttgtacttaccatctgcaacagtctcatgagccttggcaatctgccctagctcctgtatcaagccctggaagcagtccttacggagcaaatgctggcaggataggagatgagagcccatacctggcaggtcctgatggcacaatgagcaggtcattaccatggcctccatctgtccactcttagggcagtgtttctggccagctagtggcagccccataaagctcatgcccatgtccacagccatgcctgtgcccaggactggggcttttccactgatatcctcaggtgagaagcagcgtgtagagcgagccagctccactccctgtaagtgaagcacaaagcagagtgatctacttattttgagcagaaaaaaatcttaggccagaggggccttcgagaacaaggcctcaaaagtccaggccatgttcctctccagagctggaggctcatgcctcagcctcagttcctcacctgggaccaaaaagagagtctagccatctctgccgtggaaaacaaagcgtggaggtgtctgctgtttgtctgaaggcgaacaaacccttcaaaagtgtcccgtacctgtgcctctccttattggtagacaagcttgacctaagtttcaattttggaaaaaggaagaaaattgcattattgacaagtttatgacaggcactttacatactgtatttcaaaggggttgagacacttttacaaattaaataaaaccaagagggacaggctgaggaaacagtgttagagaggctgggtcacgcacaaagacagatggcaaatggcagagtccaaattcaaatccaggtcagtcttctgattctggactccagtctctttttttttttttttttttgagacaggatctcactctgtggcccaggctggagtgcagtggcacaatcacagctcactgcagccttgacc

SEQ ID NO: 55551 - DNA, 811 bp, Homo sapiens
cctgtttctgcagtcaatctgttatatgttgttttgttcacagtatatgaggaaaatccagtctcacacagacatacagctggaaaagataggagtactttaatagccttatcaggtaattgtggatattctttgataccacaccaaaattcaacagtggtagtagtttcttaaatgttatttataaggtagactctgaaccaaacttttcttattctgttatattaaaatctgctgatcttgctctttgaactagtcttttccccaggcacagttttttaacaccaagcattggtcatttggaaaataccagttcaatgacttatgcagatgttccaaatatcgacacatttcattacacaataacaaaaaatcacattctttagaatcacctcgaatctcatcagaaaattcttttaagcattgagaagctgccaaattcatggaggcagcaaaaactaccagaattctaacttttgcttgaacgcttgaattttatcattggcaacaaatactgtcaattcacttttgagaaaatatcggacaaattcccaagcctgaataaccacagtttgtctgccagttattctttttttagatgcagttttgcccttgttaaccaggctggagtacaatggcgtgatcttggctcatagaaacctccacctcccaggttcaagtgattctcctgcctcagcctcccgagcagctgggattacaagcatgcaccaccacacccagctaattttgtatttttagtagagacagggtttctccatgttggttagggtgatctcaaactcccgacctc

SEQ ID NO: 55552 - DNA, 3800 bp, Homo sapiens
aattttggatattttagctaaaatatattttagctgaagggggcaagacaaagaaaaataaataaatacacgctcacacatacacacagagaataactgaggggatgggattttaaaaatttatttcatttttcccatgggatctattaatagactagcgaggggatgggatcttgaacactggttgaaggaaccgacttaagagcgaagacatgctgctattagcgaagacagggaggtgagggtaagttcatttattcactcaacaatcactagttgagtgtggattaaaaaaaacagtccttgaccacataaggaattaggtctagtagggaagacaaacgtaggtcaataaattacataagggttatactagattgtgtggtggtacaggtggggaagcgagcaactgtctgcattgtgtccaggaaagggtcacaggcgtgttatgtagattctggagaaaattcaaaaatagcatttatttttacttatttacttttgtatgtggagacgagggtctcactatgttgcccaggctggtgttgaactactcgcctcaagaaatcctcccgcctcgacctcccaaagtgttgggactacaggtgtgagccaccgcgcctggcctaaatgtggcatttagaaaaagtatttacaacatctgcattaaaaggaccataaagcaaccaggcatctaagtccctgaagcaatttaagttgctcaaacttgagaggacaaccaaatgatagcaaaagggcaaaagagaaaggaagctgcagtgcccactcagaagtgtgagagcgggagaaggcatttcgggagccgcccgagcttcaggaaaccgagcgagacaccaggtgggcacactgaggattaaagagggcctcgcggttccgcactgcggccgggagacaaaccagtagccactatcaccagccccgggcagaccactaagaactgtggaggtgcgcggggcggctcagggctggcgcatttggtgaggagctcagacaacgaggcccttagggtcggcttaggcggttccctgaccaaggcgccagaaaagggcctggctcaagcaagcacgggcggcgtgcagtacagcacacctagccccgattcttcaacagttctcgccctccgagcctagcacaacgagcctcaccgaaaccgtacaccgccaccaggacactccgtgatgggggatcaccaccctcagaaagaggaagcgactagcaggcgcgcaatcccgcgagaccaggaggccccgcccgaagcccggcctctgtgaccggaagtgaggcgttttgccccgcccccgtggccgatacctcgcgagacttggcgaaggccttcctttttcgtctgggctgccaacatggtaggtgtttcgtttcttgcctcctcttccttgccggcggagacccctaagctgtattcccattgcccctagtcatccactccctaccatggtcggggcttccaggctgcgcatggccgcctgcggggcagggtggccggcgcgggcccggggcggggctcccggagccgtgtgttaggcccgcggttcggatctctaggacacgcgggcccctgcgctaccgtggtgagacctcacggccctgagcggatcggtaccctcagctttcccaaacgctccagaagttaggtctttgacccacaggcttacaggaccatctcggctggcgggcatcgccccctgcccctaattccttaggccttaccaccaagctttttccacacagccatccagactgaggaagacccggaaacttaggggccacgtgagccacggccacggccgcataggtaagtgccggcttcccctcggggtgggccttgggctctcttcgggtgcttagctagtctggagatcggtagcctataagtgggttagaataagacctttttgtggtcaagttgcacagctgttgatttttttctgacgatcctctagtattccagttctaaggaatttcacatcagtggggtaataggaattgagcaggcacggtattgggttagttgaagacatggagtactgtgggaatgctgtgatgtggaacctgaaaagatgtttcacccggaatcctaaagtaatcgcattgctgaaaaccggcatcggtagggtgggaacagcgtaagcgggacacagaagtctgggaaacactctgcttttgtgcgaggaagtattgagatgcatgagaaggctgtgtggtgcatgtagcttttttgtgtgtgtgtgagactgatcactgtcgcccaggctggagtgcagtggcgaaatctcggctcactgcaacccctgcctgccgggctcaagcgattctcctgcctcagcctcccgagtagctgatattacaggtgtgcgccacgacgcccggctaattctttttctatttttagtagagtcgggggtttctccgtgttggccaggctggtctcgaactcctgacctcaggtgatctaccccccctcgtcctcctaaaatgctgggattacaggcatgagccatcacaccggccccacgtagctttgtattcctgcaggcaagcaccggaagcaccccggcggccgcggtaatgctggtggtctgcatcaccaccggatcaacttcgacaaatagtaagtgtccttggactgcttttattgacacagcttgggaggtaggggcagagagagggctggcttaaacaaaaagtttagaagcaagccttgcctattgctgttttttaccaagttaacacttggtgtgaactgagaacctgtcatcgaggctagagtcacgcttgggtatcggctattgcctgagtgtgctagagtcctcgaagagtaactgctgaccttattcactggctgtgggccttatggcacagtcagtcaccaggttagagacatgcttcacattcacctacccacaaactagtggatgataaattttggctattcagaagacgtttattataggagtatgtagattttccatagagtgctgttatgtgacttgaattttagtctcggccctgcctctgacattgtcggtggtttatcctggttccaggaaataagactagccttttcctcatgatagtctttggtggtttttaaaacagttgtttaagtcaacagatgtatcatatgcctgacactgctctacaccagtgaataatttacactctaatagggggtggtaactataaagatgataaacatagcatcttaattggagtgtgtatgaaggtggttgttacctcttcctagccacccaggctactttgggaaagttggtatgaagcattaccacttaaagaggaaccagagcttctgcccaactgtcaaccttgacaaattgtggactttggtcagtgaacagacacgggtgaatgctgctaaaaacaagactggggctgctcccatcattgatgtggtgcgatcggtaagttaattggatgtttttctgtacttccataccttcccttacaaaactctggcttaatctaatccacttatataatctgtacttcccagttacctaccagacattgatattcttcctgtggtagaattatcataggtagttccctatccgtagcagtgcctactgtcactgcccaggttgtatcaggtttgcatttcgtgcttgaactatagctggttttcactgagcacagctcttggcccttcatgttctccagataatagaatcctaatatgttccattgatactcagtgccatgcattatctgaagagattttcccccaaaacagatgtattatg

SEQ ID NO: 55553 - DNA, 2203 bp, Homo sapiens
ggattacaggcatgagccaccgcgcccggcccaggcacttaatttttgtgtttgacttagtaacttaagtgcaaactattacgggagcagatggagtcaattggccttcatgtgattgtcagtgggaaattggtccaagcagagggaatactggttcaggaaactggtttgggaaggttaggcaaacgggaagtgctatggtggagagaaagattactctggccgggctgtaaaggacggctacaatgggaggctgaaggcagaaccaagaaaatgggagtgagtatggaaaaggtacgattcagacggcataatggacgggacttggagactgaattgtagtgggccgaccacaaaatgataaggcatggaaggaagtagagtttggggggaaggatccctagtcccttaatggctaccttcttccccaggagttgttaggccatccgatcccctggcctgggaaagaaacactgatttcgttgctggcttgttcactcaccagaagctacagctactaacagttctaaaaactgtttcatgtgatgaggaacagacgaaaatagttttgagccctaagtccgccgattccagtgctttcttgaacccgcatttactaaaatattttcatgactgccaagctttgaatagcctgctgtgttcatggaggctcatactggcgatctctagtggctggctaaagcttgaattgcaaaagatctaatttctggtctaatgtatatatgccttaaatatagttgcgttcaaacgtgggagctgcaggtgcaacttgattttatgacaaatggctgccacataatttgcacaagcagtgctcgtcaagggcagctaaatcaggcgagctttcaatcaaaataaatgtactactaaaccctacttagcggctaactagcccaagagcagacagcccacggacggactgcaagtcggaagcgcgggcggaagctgtgcagcgcccacctggtggctccatcggccgcgttcatcagtcagcacgacccgacctcagtggcgtcctcacaacacagaccggaccttgggtcttaccccggcacctgagaaccacttccggtgagtagcttctacttccggagacgatgactcccccgcgtcccagaccggaagaagcccggcggagaccggcctcgctcggccacttccggcaagggcggagccggccagtggtgcgcgagcgcagataactcccctggagaggcgggatgttcaactccacccctggtccttgggcggccgtgggtccccttcgaagcggaggaatggccaacctcgccgcacttcgagcccctttagggtgcgtttaagaacagtgggcgtggcctttacgtaaatcttcgagatgggaacctccagaatttgtctcaattgtctaaaaggtaatgagcgtcagcgacattcaagggcactttgggctaaaaaagaaagtgcttgtacacggatggaaatattctagaagaacataaaaggaatttcctcttaggaggttagggaaatgagcacgaagtatgttttggtgcagttttttgttcaacccaatgcgtattttcatattgagaggcaatataaatggagcgaaagtatcttgagaaaaaaaaaaaaactaccagaacttgccgttgctgaaaagtaatattttctctttcgagagttttcatggccttttaaattacacccccacctccacaggcaaataaatttgttttggaatgcataccacatcatctggctctagaaacgtattttgtgtagctcccctagcaagaatataggttaaagcgtaaatttaattcctggctctattttacatcccaatttttattttcctctcattcccactttacgttgtttcaaataacctagtttgtgtatccctgtaagtcattttggtataaagtaggttataagtgtacatgcgaaaagatgtttttaacaaaaatgtaactgagctgtgactaatcccacttattttcttgggtcgtgctatggtttggatgtggtttgaaacttggcccgcagtatggcagtgttggaaggtggagcctattgggaggtgtttggatcatggaggtagatctcttacaaatagattaatgttctcctgtggggatgagtgagttctcactctgctgggaatggagagcaggttgtttaaaaggcgtctggc

SEQ ID NO: 55554 - DNA, 966 bp, Homo sapiens
gggcaacaagaatgaaactctgtctcaaaaaaaaaaaaaaaaggtgggtagctaaaggggagacatgcactgagagctcccaggcccggagcccccatgcaggctgcagtgccttctccagcaggactcagaggcctggagggcctggcaagtccgagtggggagggagcagagcagcaggtgctggcccctcgtgcaggctgctaagcaaatgcagatggggctatttcagtctccaaacctgctggccacacgtcacagatctaaagagaaggcagaatctgtttttgtccatattaggcctgaaactcactcctgtctctttccctctcccccgcctcccctaaagccccaagtgattaaatcaagtatgtgggatttggatcagaatcattgtgtccaatctgcaggaatgccgagctagtgccagcccccttggcagagacccagcccaggccctctctgagcacgccaggacaaacacgctcttccctgggggcagcagccccactacaaaggagcagctctgctccatctatgttccagcaaaggcagccttcgcaacactccttccaagcctgggaggcccaggcggccagaggcatgctggcctctgcctggctcaccacctggcatcactcctgtgcatacgccctttgcccctccatgggcattctacctccccacgccccctctccccagtccatcctctgggggtgatccaagagtacaaattggtgacaaacgacttcccttctggttctgtatgaccttgggcaagtcattctacctctgagttttgactttccaatctatggatcagggataataataacccatgggctattgtgatcattttcttttaaaagacatacttgaagcatctagcttggaatgtgacaggttctaaacaacatttattccctcttattcccttggcccttccctcctgtgttgaaagtccaa

SEQ ID NO: 55555 - DNA, 5087 bp, Homo sapiens
ccaccttggcctcccaaagtgctaggattacatgcgtgagccaccactcccagctatggggtaaatcttttataaaaacaaacaccttattccaaaggcagaagaaatcatttttatattatcattttatattatctggccaatgctatataatatccaggtccttccatttgcaaagagaattagagttacctggggaggtcagagaagcctctccacctgcctcctgacatcctggacaaggacagaaggagctgaagtccaagagcttcctttggcttttcacctttcctgtcattctgccttctccccatccattccttaaagattcatgcttactctctcccacaggactggctccaggtgtcacagacacctgtctggctctccaaatgtggtttggggacctacacctagccccctaatgccagtactgagatgacttctggcagagttgcagaatgccaagactcccactagggccctgtcttcctgtttcccacagggtgataaataatcagagaggagactgcaagggctcctggctgagttttgcagctcagagcttgtgtaggaagggaaagaagataggacaggatgcccctcagagcaggtgccaattgtccacagaggtttcaacatggtggacatccttgagtgcacagtcctttgctgaggagacctcctttatcagacgagatcgggcacgttcagggtggtatggccgtagaccctttatcaagtactagtgagggtaaaagcctgagtggaagctgggcccaagtcttggaagagcaggcccccactgtggccctcacgctaaccctacaggccgatgtcagggctgagttacctgtgtgggcgggctgttgtacttcctgtcctgaggactccacatcctgtgcaaagagtccaaggagttctcagacagttgctgggattttcgtcctgctcttcggctctttaagtccacatcctcatatggattctccttgggcagatctcctgcagaggaggaagagttagagaagggggagaagggaagaaggaaacacacgaactcacacacacacaaataaacaagcagaattcctgtgaaccaaagagaatggcttctgcctggcccctcagctcatgagtcatgcagctgcccgtctgcagtggggaggctacaaacagatcctggctccaagtccagaagcagacccacccccccaccccccccaaccccccacccccagcccagctcagcctggcctctgctttataaattcagggattgcacaagactggctcagccacccctgcctgtgcccagccagaggacaaagccagcaacaagagtctttccttggctcccttccctctgctgcaaacaccccagagataacacagttcaaggtaggaagggttttcaggtcacatggctgtcccttcacccaactctcaggggatctccctggggacctactttggagggtgggcatggaggaactcacagaaccgtagggagcagggcttcgccaggcccccttctcacctacgatgccgttcaacaagtcttttagggcagggttttgtgttgttcactgaggcaacctcggaacggaacagtgattagcaaggaggaagtgttcagtaatgatctgttcgatgactctcctactgtagtgtctattccctctaccgctgatctcagcaaaaagagaaccatcaacactccccttttggaacaaactctcctgctgtgacacaggggaggtgtgaaaggcttggaaggagtctgggccaaagggtgggggtgaggggagttcttgcttctcaggactagttctaaaatctctggcagcgggcattgtattggcattaccagaaaatctcagaaaagtccaaaacagaatccctgcccttgaagatgttgagtggcactcctttccacaagctgtatctcctgcccccacccctccaacacacacattttctaaaatagagtaacaccatgggccgggtcagtcctagctcaatcctggtggcagaatccgtggggtgaacaggtccctggggaactcagaacacagccctctctgcacccctttccctattttcctgctgcagagcaggactcactccagcacctctgctcagcagcaggattgagcctgggtgccactgagtcccacacttgttctacagatgtctgaatgtgccttacgccccagaggaactcagaccccactcctcaggaagcaggcagaagaaggagctggaggacgaggaacaaaggctgctgagagtgaagctttcctagagaggacacgggagaagagccaatccctatatgcttgcagattcctccatttccaaagtggagctccctccacattgtggcatctacttatgcagaaccacaacgaatttaggaaatgctctaacagagttagggtgtgggtgtgaaggagggatttcagtgacagctaaatagactgcagtgggagcaatataaatctctgtaaacttatgagtcaaagatgggtcactgggatttgggactggattaagtgattcccaactccaagcagagtccccagcaatggaacagaccttttcctgtaacacagtcatgctattaaaatgacttgtctccattccagagccctgactaagcggagctggcccagcagccctgtcgcaagaagccaaatagcaaacccggcaccccctgcatgttttctccagcctaccccactgtggggcacttagggaggtgttggggatggattctctacttcttgatccttccccaacatatgccctgcaggagtgaggaggtgggggaactaagaagggagaatgccaggacacagtcttctgatcccctaaaacaggaccagagcatcactgtccacatcacggcagggagaacatttatgccaagctcaacaaatcgaaactgccttggactgcatgatcagccagggcctttattgtcatccccaacctataggaagccttgtcccaatcccaggggtttctccaagccactgacatttggggttgaataattcttgttgtggtagactgtcctgtccatttttaggatgtttagtggcaaccttggcttctatccaccaggagacattagcatctccttagctataacagccaaaaatgtctccagacactgccagatgctctctgggacggacagagggaaggagggagagagagggagggaggcaggaatggagggagggaagagtgaagttgtcccccaactgagaaccactgctttagatagagctttctaaacttccaatggcttctgagtgtgacatgagtcccaagactagccctcttttttttccatccttccctccttcacctcactccctccttccttccttcttttccctacagtaagagctttgaatattgatacaaaatccaaagctccaagaaaaagacataggatactgaggcccagggaagtaatagatgtacaagcctggtgcacatcactgacaacccaggggaaaacagccagcaacatcaggttctcaagataggtcctgtctctggaaactcaatttcaggaaggcctgctcctccccagccccttgtgccagcctctcttctccagcaatgtttaacatcctgtctaatgtaacaaagccactaatcagttctccagcaaatagacggctggctgcagcccacacgctgcctccccagcctcagcttggtcccttcactgccctaactcatctctcagcttcctggaccattcctgactgccccggaggagctgtctcaaatagattctcccagtcatctctccaggtggacaggggaccaggggatggagatgtacagagacaagtggaccctgagtcctggaccactaaactgaaccagctgagagcaaataagtatcaaaggaatggctcagagttggaggagacggtaggctgggaaatggtgtgcagaacatcctagggaggacagagctaaaggagctaaggctgaatgggagattcagcaggggcatgaatgggagacagggagcctggcagactgcaaatttctacctgcattcctgcccacacagctttcttgggacagtccacatgacccttggagagggacgaagaggtggaccctcttccctgaaggcctggccctcagcaagcccagctggagaagccagaggtctcaacctttcccagcttggatgatgaaataagggacaaaaggcatcaccgagaatttctgctttgcactcttctaaaaggggattatcagagcccaaaggtgtcacacaaatcctcttaaaggaagaatccagcccctctgggccctgctcccactcctccccacaacctcccactcctccctacaacctcccactcctctccacaacctttcactcctccccataactcctttggtcttaaccacacatacagcactcccccagccccaacctaactggaaaaaccagttaggaaaggggtgtgtgtatacgcacaggcactgagaatttctccaaacacagtcctaagcttcctggaccacacccattactagggtcctgggtctgcagcttccctccccaacaacctccgtccggttccaaccagctgtttctcctggttctcagcctttttccctctctcacacaggacagaaagggccaggataagagcccaactccctggcaacagatcagactggggcctctaaggggctggctgttgcccaccctccaagccttgacaccatttctcgacagccccggcaccttccctgggctgcacctcttggctgttttgtttcccactgcaacctccatcccagtgggtgccctctgctccttactgtttcccagcctgggggcaaataagggaagcaaccagagagagtggaggctcaaaagactttgcagtccaggctgactggcccggtccccggcttgcatcccactgaagttcctggaaacgctccctcagcccaggctagctgatgggagtgggaatctgcaggaatgcagctcaggcgccgaggccactccacataattccttaaca

SEQ ID NO: 55556 - DNA, 2655 bp, Homo sapiens
gcttgagcccagcagttcaagaccagcctgggcaacatagtgagactctgtgtatggtaaaaagagggaaaaagggaccaaaaaccccaaaaccaaacaagtctgaacaaccggctctctaggggcaacagcagattggtagcacttgccaactttggtagtataaatattccaactatggctgagctaccaatgtgacgtcactggctgtggagttgagaagagatgccactaatcagctcttgtgaactggtgcaaggtggttcttgaacactactccctgaagtggcccccaaatacactcagaccctttgatctttccctttaacaagcctctgtctcccctgggacttctgctactagacataacatctcacttcttcatgttgggttctgaccagaattagaatccctgagggcctcagacaggtcagaagcgcccctcaggaaagagtcttttccactctatcattgaggaagccaatggggtggggaggccaactccttaggcagctccaccctccagcagtggcatcacatccaataattggcatctaccatgtcccagctccaaatccatatgcagatcttggcaactacaaggaacacttctgaataaatgtttttacatatgttaactcatttaatcttcctgaaaagtctatgaggttatcatgtttattatcttcattttacaaataaaaaacactaaggcacagaaaggtttaatatctcatccgaggtcactcagctggtaagtgaaaccaggacgtgaacttccactacactgggctgactctctgaagaggaagcagtgcctctgccactttctgaactgccagggccctgaggcaactcaagagaaatccccacagcactcagcacacccctgccacagcacttgtaagtatcaagggacttcttggtcttccctactagaccatggtttcttctaggcccagggacaaacaaatagtgtctggaaggtgctcggtgaatgatgaagagcaaaaggaagggaaaggtgagcttattgaagagcaccatgagcatacttcctcttgggcacacttttctacttgtctactagagtaaccactgtcaactttcagaattctttccaaacagtttcagttcaaaaacagcaggatttgccaacactgcacagcacaaggcctacctgaccctaaggccgtggccctcagctctgggctgcccagcctctcaggctccggaatgccatgctatccacaggaaggcagccagctgcccctgagccaggctgctgtcactgctcgctcacacacagaaaactggagtttgggtgagtcagggattggctgacaattccctgctgggtcacaggcctctggctgcccccaatcaacaggaaacctcaacatgcttaagttgtttttcaaagggcaagtcaaacaagagccatcccatgtgtatatgggcacagatgagagaaattcagtgccaagccaagccaatgaccaaagaggctctgctcagtgaggaggtgtgaacagagtaagcctccgcactccctggggtagggagcggcagggcaagtcgccaggcttgaggcggggggagatcccaacttcctcacagttcatggaggccttaggtctctcttattttatagaaccataaatacaaaaggtcatcagtctagcccctaagtgaatgagtgtctgtgctacacaaaggactctgttttagttctcaactgaagatgcatttgacagaggacaatttcatttgtttattcattcgacaaatacttagtgagcacctactctgtgctaggcctgttctaggtgctagatacaagaataaacaacacagacataaattcatgtcctcgtgaagcttatattctactgggagatggcaggcacctaatgagactcacaatctcttgggaagcctttttaaactatacatgcctcacctgctcaggcactttgatatgtggttccctagggctgtgtctccccagcggcccaggagagaattcaccagtccatggaaccactgttacttatggtagtgtggggcatggctccttgggataggaaaatgattcaggtcctctggtccatctgatcccagcatgctttcagaaagagtgattctataacttcccttagtggctccagcacgaataaatcctcacaggttaagaactttctctcaatgcctaccctgcttcaactgaggtttcatttctcccctctcatgcagcataaaatagagagtagactggccctttcctctgaaggtcctgtctttggtgtcactgctgacctgggacccacggcttcacgtgctacccttgccccagcctccccacacaggccaggcccagtgcactgtaccacagaggaacctgcctgtgctgacctgaagccccatatcacagagaaggcaccagtcactcattccaaggtctggtaaacaataaagataaggccctgccctcctggggtgacattctcacttgagggtagaattctctgttatctgtctgcatgtttctgattctacctcttattagcaatggactcacactctgaacatccagtttcatttcttcaaaactgttccattttacatcgcagggttgtcatattgagccaatga

SEQ ID NO: 55557 - DNA, 1038 bp, Homo sapiens
catgggaatggagcagagactcaagcatgatgagaggcttctttgctagttcccaggccctcaatggcaaagtctaggcagaaactgcatgtttagaaaaggaaattgttcaattagcatataccatccatccaaagttcctcaaaaacacagctctgacaaattatagacaactatctgaagagtaacaatccagagaaaggaatagaataaggtacctctggaacttttctacaaactgcatccagacaaacaggcacagtcgcaggccccgaggggcagtggaaaaacacctgccttgagtccagccctgcctctgacaactgctagttatgtgaccttgctccagtgagtgtcaaagactcactttgtcactataacagccataatagcaatatgacctacctcccatgattgccctgtctggcaatagaagcttaaaaaatgtttgttcttccagatcacacttccctaggtatttggaagacaacctctccattcccaagtctgagtcatctttcagactccctagtactatcattccattcactgaccctatgtgaggcactgtgcaaggtgctaggatattaacatggaagacacagtccctgccctggagaagctaactgtgaagggagacaagaaagtaaaaagtggactccaggaaggcctcatcagaaggtgacatttggattaagctttaatctgttacccacagtaaggggacctaaggaaaagcaaaggagcatttattatgagacacgctgctagacttttaaacatgtaattataacagctaaagttacaagcacttcatgtgtattaagtcatttaaccctttaacaaccctgtgaggtgggtactattaatatttcacagggttagttacactttaccaaggaaaccaagatagagagcagttaattagcttgctccaagtcacacggctagaaaggggcagggatttatgaccaggtggcctgcaccagctctgggccaggaccctgtactgcctccaactgtcttctaatttagttc

SEQ ID NO: 55558 - DNA, 5163 bp, Homo sapiens
aggatattagcagaaggtccaacgcctggcccctaaattctggttgtcaaaatcccatttttctttaagccatctagttcagaaggctctgagtcaacaacaaataagcgtaagagatgcctatcatcattcttccccatctagggaaaggggctcacacacacagaccctggtcaaacaaagaccttccccctaacaatgcagtctgctggagctgagactgcagagaaagagtctgtccatccacctgcccaactcctttaagggccatgatgatgaccgaacttgcctcttcttcctcctttaaacagagcaagtgctacttggcagtttcaggtctgtgcttctcagactgtgtgctgaggtgccccaaagccccatgatgaactcacagggatactgctaaatattttaaatctttgagggaaacagagcaacactcaacatttgttgaacaccccatgagttcacagcttcaacaacagactgcattacattcttttcgatgatgtcatttctttctgaggctgggttttcagcagttgctgtgataaaaagcaaataccatgtgaaaagcaatgtggaacaggaaataagcatggcactaatcaatctggttccaaggtctgatatgctatgcagtacctagtacatcccattagtaagtgtggttaagaatggaatataaatatttttcctttcaatttcttgtatcatttttttttcagatggctactcagttgttaggatataaatactcaattgtttaaacctacttaaggccaggcacagtggctcacccctgtaatcctagtactttgggaggccaaggcgggtagattacctgaggtcaggagttcgagaccagcctggccaacatggtgaaaccctaattttactaaaaatacaaaaaattagccagaagtggtggtgcctgcctgtagtcccagctactagggaggctgaggcaggaggatcacttgaacctgggaggcggaggatacagtgacacaactgcactccagcctgggtgacagagtgagacttcatataaaaacaaacaaaaaacctacttataaaagaaaacttaggtatttattttgggctatggacactgtaaaaaaaaaaattactgaaacactaaggcccatgaactaagaaagtttgggagtctctgcagcaggtgtttttaagtctctgttcatggagccaagaggagttcccagggcaggcccaacccagccccagaagtgggcaggagtcaacattcaggcctgtggcagcacactcaggcttcccagagtggctggtagaataacccctctgcctgaacagaagtgcctgcacaccagttatccctcagcccaggcgcctgcacatccacatcagcctcaccctaggctcccaggcacccctctgaactccctccctgaaaagctctattcagctccaacctcatgaataaaacccaaagacagcccagaagcctgccggccagcaggggtcttccacacacgctcagacttgggcaatgtccacaagccaaatcattaatccaaagagacagggagcaatgggaaccaaggagagggcttccactgacagaccatccactgaaaggccaactcaggctttctgggtgaagatctgcacgaaaataccttctttgttcccacggggtttcttgccagctatgcgccccacctccattcttccttgaagtcataatcctctgttggtgacatcacagctgttgatacaatagtcaactgttgtgatgtcacaggactcaacttttgtcattttaggtgggggtgctgggttggagaatgtgacagaggacaagaatagaatacagttatagaactggaattcgctttttcatgctaatttccctggtaatgaagggcagtgactcagaaaaggaaaggcaagcctctggcagcaaggctgtgtgtagattcgtctataccaagggaaggatggtggggaggcagggaggagacaaaagaaaagaatttcgaattccaggattggccaaatatgaagatgatctcagtctggccaagtccaggaccttctctttccctcacctatcgcctgagcccagagtaaggagaggctccaggctggaacactccctggaaattaatgcgtgggaggtggtattctgttgtggactcccaactggcagagggacagactatcagtttggactgagtcctaaggacagtgaccaggatggagagggcactcagaagcatgtcacaggagaaatgacggaaggaactgagaatgtttaccctggagaagagaaggctgtggagcggggagggtgatcattggcttgggaattcggaaaggctctcgtgtgaaaaagggattagatgtgttttctagggtcccccaaggagacctcagaaaatgagagaccctgagaggccaaaatgaagaagaagttttaattcttaaattccatttggagactatcaattctttttaattccttatttctcaattacagaatacgttccagaggacaaggactgtgttgttcatcacagtattccagaacttaaaaggaactggcacataattggagcttactaatattcgtcaaaaaaatgaacaaatgaggcaatgacagtggtcttgtgaagctgctgctatttacagggactcactcattccgcaagtattttttgcacctcctaccacactccactcagttacatgctgggaataccacagtaaaggtagataagattagtctaccccctcgcctttgagatgggcatgggtggcacctaaggtcgctttcaatactgagattcctagattcttagagttgactaaaaagtttaaaactgagaggaaagagtaccccaagggccacagattaaccctcccttctactatcaccactagagatctggtaatgaagggcagtgactcagaaaaggaatggcaagccactggcagcaagggtgtgtatagactcatctataccaaggggagttgggagaacagggagggacaaaagaaagagatctagatcgagctgttccttctttctgagctgggagaggcctctcggtgagaaagcactgccagaccggacgagagcaaccaggctgggcacttatccaagtacccctccccaccctgagacagagtgggctccctcaacccagcaataaaatctgtatggcccagttaggtaatataaggtattacatatgacctcacttccctcaaggatctttaatttatttatttatttattatttagagattaggtcttgctctgtctcccaggctggagtacagtgatatagtaatagctcactgcagcctaaaacttgggctcaagtgatcctcttgcctcagcctccagagtggctgggactacaggtgcatgtaaccatagccagctaagtttttaaattttttgtagagatacgggttttgctattttgcccaggctggtctcaaactcctggccttaagtgatcctcctgcctcccaaaacactggcattacaggtatgagcaaccgtgcctggccaaatgtgctattttctaatgtggtttgtaaactggtcaggaaacaattcccaaagaggaatcaaatctaccatcaggtgagcagacccctttagtagatgtgactagcaggctatggtcacagcttatactttctcccttttcccaaagtcctcaatctccctgtaggaagcttggggaatgtgcctcctgccctcttctggactagtcagcatgctcaccaagcacactaaagccacccaagtcacagctgactcatgccattgctctttgtaatgaggtatgacatgtttctaagctcttgtatattttcatatttgtagcctacaattaggcatttttgagggatgtagctgactaggggttctgttcagtgacctataattatacactcaggcatcatggtcaatccaggcaactctcaggcctgcaggaacctcatggaagaagccacttggctctaagaagctccagagaatactgtagtaatgtggcttagaagggccacactgcccctccttgctgctcttggaggcactccccctatgtccccttcatctcccttatcactcactgcctgactcagcaatgcctgccaagcccaagtgctgacacatttgtgtatctagtgccagcagagaaccactttgagggacacagtctccactgccaaggtaacagcaacgtaaagcaacttctttttttttttttttgagacaagagtctcactttgtcacctaggctggagtgcagtggtgcgatctcagctccccgcaacctctgcttcccaggttcaagtgattctcgtgcctcagcctcctgagtagctgggatgacaggctcccatgcctcaggtatgggaggcataccaccactcccagacaatttttgtatttttagtagagacggagtttcactatgttggccaggctggtatcgaactcctgacctcaactgatccacccgcctcggcctcccaaagtgctgggattacaggtgtgaaccactgcgcctggtcataaagcaacttctaaaaactcccataagcgtctcgtcttagaaaaaaggggtcacacacctgctgctcatgggaccctgcagtcagctgctgtgcctccgctctgagccagcctttttgccacctgttgcagtggccacactgatcctaatcctcccccatgcaaatgcctaccacccagctttaccactgttcccctggctgggaaagaaggactggtttagcacaaaaaatctgtcccttatgacatttcacatatacatttggccccaataaaactcatttcttgggccaagtgcggtggctcatgactgtagtctcagcactgtgggaggccaaggcaggcagatcacctgaacccaggagttcaagaccagcctgggtaacatagtgaggctccatctctacaaaacataaaaaagaaagaaaggggcaaaaaaagatttcttgatttttttaacagcagctcaaatcctggcatttaatcaaagagactgccagtagcccaccttgtgtagctgtgaagggcaactgtggcccatgctcagagcagcatctgcattaagtatgagcccagta

SEQ ID NO: 55559 - DNA, 1324 bp, Homo sapiens
acaataactatttttctggggcatgggtttatagaagatgctcatattctgccttacgtattccccattttgcaaaagtttttagaacacctggtgttgcttttgttattttaaaaaatgtcttaaacaaaagttagccagatagacggtttgatgcctgcctgctaatgtgaaacacagtttcagtgttacatacacagcaaggccctaaatgggcagaggtgagaagacctgagtcccagtccccactctgccaccctgagcactctgtattctcacctctcaactcccaggcacctaggactgaatccaagttcccagtgagcatccgcaaaatagacgacagctgtgtggacccacccacgtggtccttccaccccggggacagcactgaggctacaggagccccaggtgggttgtctcaggctatgtatgggtagccgtctcccttcctacattgaaacagaattctacagttgtactgaactaatgaaggaaggtaagaaaaggagagctcggggaaaacctgcgagtcatggactatgaaggaaaatgaaggccttccccgcaaagaaagaagcaagcccagaaaagaattcaagaaatgatgatgccaaggaggacagggcagctgacattgactaatgcaagtgtctcacctgaagccacaggtgctgaagtagacagcaaagggcagtgcctggagccacactgctctgtgggaaccatcccaaggtcacctgctcaggcagcaacaaggagaaaacccagcctctgtgggaagaggcactgaggcctggggaagtgaaagtcaagtgaaatccttcccctcttccaggtgttctcagcctttcggctgccaactgtggactttgcccttgaaattcaactcctggcctaaagagataatctcccaggcatgtcctgtgtaaatttggctaatcaacagaacacattctgtgcagcccctgctggctgtccctgaaacagccctgccagccagtagtagtgctgactggcggggggaagcttttcctggcagaaatgccaccaatcctaatgaaatcaagtgcccaggatgggcattttccaaaaatcagacaagcatctgtttaaagacgagcacatacctggaaatctcatccagaagtgatacggatttggtgagaagagtcattgagagcatggacctttaccaggctttgttgatgttttagagtaagccacctaagaacatctaaagtaaagctttgtagacatgaaattctgggtcagtaaaagaaagcaagccaattaacatctggccctcatacccttattggca

SEQ ID NO: 55560 - DNA, 916 bp, Homo sapiens
cagcgctcagcagttaaccaggcaactcgcgcgcagacgccaaggctgggacgcagaaggcgtgtttggccgcccagccgccccgcctcccccacttctcccgcctctcccgcctctcccgccttccgccaatggcccagctgcgccggcgccgccgggagcgctaggcctggtccctcttcctagaatagcgttgcgcgcatgcgccttgacgagtgagccgggtgagggggctccctaagtagcggaaggggtagatgaaaatggaaggggcgggcgcgctaggcctagtcctggctgggctcccgctggagtgtgcgttgggggcggaccaggagcggtggtctccagggaggtcgaggctggggctcccacccggatttggagcagggtcgccgcggcccagctgacccgccggcgtttgtacgttgtgtgcccactcagggagccatggacaactgtttggcggccgcagcgctgaatggggtggaccgacgttccctgcagcgttcagcaaggctggctctagaagtgctggagagggccaagaggagggcggtggactggcatgccctggagcgtcccaaaggctgcatgggggtccttgcccgggaggcgccccacctagagaaacagccggcagccggcccgcagcgcgttctcccgggagaggtgagggtcgctgtgccgggggccgccccagtccttcgcgccgcggtagcccgctgggagccaggggtgcgcagcgcagaagcagctgaggaaaccttcccttagcggaagctggaaaggatcagaacaatgaatggaaaagtcctttcaaaacgctttacatttgacagattcttgttgggtagctgtagaataacggtagtgttcagccctggttggttacttaaaaaaaaaaaaaaaaatt

SEQ ID NO: 55561 - DNA, 2377 bp, Homo sapiens
cccactcctacatttaaagatattataaattaaagctcttatttttaaaaacgcaatgtcattctgttttcccatcatactaatgtgaatcccttctgttctcccccaatgatgagctagctcatcaaagaggaagcacaggtatgcatggagctagggcaggtctggagagctggggcaccagagaacagtatgagggaactagaaggtcaagaaatcgaaccagggaggccacaacctcacctctcttgcagtttggttcttcccttacccactaaattatcaggaagagagaaagcaagaaaggcaccaagggactcgtggagggagttaggtgagaatatgaagcaggtgagagatgctccgtaggccctattgggagggaagtaggccaggaggggcaagttcccaccacaggaagggaagtgttcaggggtgagctgagctgagtcggcccttgacagggaaggctctgtcagatgggggcttcctatcattctggcttggggcatgcggggcctgtgaggctggcggagggcgcaggtgggctgtcaagagcttagggtggaaagttaaaggctctcggaggtgaaaaggttgtcaagtgtaagatgcgtgcagccggggctgggaagggaaatgttaaggcggtggggggctgctgtccggactgtgggcactgtcggggctggggacgaccgtggggcgctgcctgccaggctgtcggggctgagggcgagagtgccgccgggcagtcgggaggggcggggctggtggcggcgggggtctgccggagctgtgaggccaggcgtatggctgtcaggaatgggccaaggagcaggttggcagacccagtttccgcaaggccggtggtaggggaggagcttccgtcaggagcgaggctgggcgggactcaccttggcggcgtctgacagctgcgccagcagcagcacggaaagcgccaggcacgacaggctgagcaaggagccaagccgaagaaggcctccccacagggtcgccatcgctgggggcccagcggtcccacagcccggagcccccgcgaccggctcccggctcgggctcaggctcaggctcaggctcaggcacaggcttgggacccggctggggatcctccgcccgcacttccgtctggacgcgaaggcgtcaccgggcgcgccgggtcagatgcaaaaagcatccgccccggaaccggttaccagtgcgaagggccgggaggctgggcagtcctggtgcccgccttggcctagccccggccccgggacggaagggggcctctggggtggcagcctgggcccagtagagctttgcatctcttggatatctttcccgggcgcagaagctgcggggcttagggagtcgccattgcgctggaaagtcctcccgcccacggagaccccagcaaactccgagtgtcacacagtcgcctctggcgacccgtgcgggccggagccgttcgcgcacaggcagggcgggtgctgagcgtggaaacggggctggaattggccgagccatgcctttccgggatgcccaccgccagtcaaagggttgggggtggtctctgcaccttaagtactaacctgccgcccacgcgcctcctgaccacagcaccccgtcggctttctaattctgtgagctgccctcgtgggcgtggcctccctgtggagctccccatgtgcctccccttggtccagcctgcagctaggaagtgggtcacagcgacggggctgggctgggccaggccaggctccgggagatgtggaattggcgaaacaactgccccagtagtatcctccgcctaggactccaagaggtggcgaattggggcactacgcccgggtaaggcagtgcctgttcagggctgccgacctgtctccccagggctgtcattctcagcaagtactttaggagtgccttagatcggcacattctcccattgaaatatttttgttagtggagacaagggaggtaatggcaaggacacggatcatcacagcccctagggatttgttgaatgacctttggcaaatcacttcccttctctgggcctgtagttcttggctgaatatgagggaatggatttcaaattatgctccatgtaatacccgtgtttttacctctgtaaacagatttttttgttttttttgagacggagtctcgttctgtcccccgggctggagtgcagtggcgcgatctcggctcactgcaacctccgcctcccgggttgacgccattctcctgcctcagcctccctagtaggtgggactacaggcgcccgccaccacgccgcccggctaattttttttttctttttctttttctttttttttttttgtatttttagtacagacagggtctc

SEQ ID NO: 55562 - DNA, 1660 bp, Homo sapiens
aagctcaggcctaggcccacaatataaacacatacagctgagttccatgctgcccttcttgcccagccaagaatcccacttcctgctccagaggtactgcctaccttccttcccctttcctcggccttctccgagagaactaaagctctgtccgtgggctccaggcagacggctgcagtgtggcctctcaccccctctgcaggcaggacgctgcgctgcagctctctgggccctctcctcatctcttcagaagcatttaccacctgccaggcccaggggatggagacaggcaagagatcccccttttccctctgggagctcacggtgcaagggctgagcctgacacgaaagcaggcaatgacaatccagagaggagatgccagcatctaagaaaatgaaggagcacaaggatggaatgattaactgcctagggagattggggacacttcacagcaggtgactgctaaagtaaaccctgtacaacaaacacaaagtgggtgaaggggaggcattccaggcaaagggaaaatgcatgcaaaccaggaaagcataaaagagggcactgattggtctgaggtgcctgacttgatcacgttacacttcttctggagcttcctgccaaagcagcctgaagaataaaaatgaacgaagctggacctctcataaaggtctcccacctgccatccccaggaaagcaaacctttctttcaagagcttcccccgacccccagcttcccacacctggtctcccttaccctctcaagaaagggcccatcctgtctcagtcaagtgacaacctctgcacccctggccgggtcttttccctcctgtgtctcagtctcctcctctgtggagtggggaaagaaccctgtctgcatccatgtgaatcagccacataacagctaggaaggctcctagcactgcgggcagaaggacccaggagaccccaggccctcaggggcatcctgggcaggccacaaccccgagcctgctggtaaagagaggtgatgccacaagaccatcctcacagatggacccaactgcacccgcagccacccactgctcataaacctccataaaaatcagtgatccatgcagtttttgtttcaggtgttttattaagtgggccatactgtagctggtttctaagttgcaaaacataaatttaataataataacatagccagttagattgtgacaagcttttcctttccttaaaaaaagaaaatacttaaaaacacacaatggcgggttaaataaataaaacattttaaaaaagaaaaaagaaaagaaaaacctgttaaaacatgcttatgtttacttctgtgaaactgtgccaacaggaaatgtggtatttggcacgatgacacatcccggcatgtctccttcccaaacaatactgacaaaaaagaaaatacgtgggactgactcatcggtgcttgcttagaggcactactaaaaatccctttgattggagcatggggcttcccgcgcagcacacctgtgtgtggcctatgaaagccaaatatccataataatgttaatatagaaaaacattagtttaaaaatgatgtggaagggcctcattaatgcgacggggcaaggaaacataactgtcccgcacgcagtgccacaggctcagtccagggaggcctcaggc

SEQ ID NO: 55563 - DNA, 2336 bp, Homo sapiens
cctgtagtcccagctactcgggaggctgaggcaggagaatggcgtgaacccgggaagcggagcttgcagtgagccgagattgcgccactgcagtccgcagtccggcctgggcgacagagcgagactccgtctcaaaaaaaaaaaaaaaaaaaaaaagaaacactggactttttctggtgcccaaaaacaaaactgtcttgtcatcgttgaagccgagtaagattagtcaacaggataatcactttcgaaagagaaactttacagtgacagaaaagtgaaaaggagtccccctcatcaggatgacacaaccttaaagtacaacccgacaaacctccacccacttgaaacccactaactggaaactccagacaaaaacttattttcaaaactgttacaattcaaagactccaatgacagtgcagtggaaaattcacggggactgtataattttcacggccttctgcagtgagtgccaaatctggtcagggccccatctttgactcccctcatcactttccctttcaaatatgacttgaaacgcatcagaacacaccaagcctctccaactacaatgctgctacccttttattcacaaacgcctctgtcctcataaaggacataaattacttttcaaaaaaggcatggccccgggatacaagccctttccaaggctaagggagttcctactcttcttggtgccgcccaagttcactttattacttcatatcccatccagacgcgcagagctgcaatctgactcagggggcccagcccagggctggggtataacggttttgaggaactagtatcacaagcttcttgggaagtggccagataaactcaccaagtttttgttttccttttttttaagtctgggtggaacttactttcactaggacgtgggacgccttccctccctaatgggtgccagaggacaagctttcctttattttaaacgaagtcactcaacctacaccaaactgagaacacacaaccctccctctttctggtcgccgaagacgtggccactgcgcagcgggccgtaggtttggacccctcatggctcagagcccctcatccgtttcccccctccagtccaaagcccccttcgcccgcgcccgccctggtcctcccggccgacactcgcccggctcccgggacaaagcggggctgaaggaaggtttcttctggggtccccgacgacagcgggcgcgggaaagcgccccgggctcggcgcgcactcacccgacagctcgtccggctccagcccggtctccgtgtccagtccgcagatgacaaagtagtcggcgaagcgactgggcgccgagccccctccgccgccgccgccactcatggcgccggggccgagaccggccgggcagtgcggagcggcaccgagcccccgcaacccgggcgcccgcccgtccgccctcaggccgcccctcccgccgccgccgctaccgcggctcgggccgccgcccccggccctggcccggtcccctcggccgccgcggctgccgtgacggggcgggggggcaccgggccgccccgcaccgcatcctggatgccttcccctccgcgccgccgccgctgcagctagccgagagcgccgcggcccgagcgagcctggagaagggcggagagcgcgtggacagcccccaccgtgaccctcctcctaccgcgcctgcgcaggcgccgtctgggagggggcgggctcctgggggaaaggatgacgtgatgctcttcggaccccgccggccgcagcttcccgggaggtcgccgcagcgcagccggtgactgcttggtcgcccgcaactgccactcccccgggattgagactcctttagggagggctgaggaggtgcgagaagagtgggcgcagcctgcagagccgggcatttggcccatgctctgcccccaaccacccacccagcaagcagaggtccagagatcttagcgcggccttgccatgaggatggggtctcacgactgagctcggaagctcacctaatcctagctgcagcgtgtcagcctagaccccagacagggccttctccctgtcctctcttttggcaggggcggatgagccggttttatatttacccttattttacagacggggaaactgagtctcagaaagaagcaaggacttatccaaggttacgctgagtctaagagacataagcctggtctggaatcctgggcttgtggtcagctccccgttcctcgccgctcccacctcccagcctgcccttttcccacgctctctccttttttctctggaagcctccagaggcgcctgccatttgggagctcctcttcctcttcactctgtg

SEQ ID NO: 55564 - DNA, 2061 bp, Homo sapiens
ttaaagccgtgagattctgcaattatagaggcagtaggaataaagagaaaacaaaaaccaaaaataaagccgtgagaaatgtcaggatgatgtagtggggaaataaactttagaatgagtgaccttagctgtaactaagtaattgctaatatttatttagcccccacttcatatccaagcattgctctaaatcttttacgtgaattatttcgtttaacccacgcaccacctattaagtagatattattattatccccatttcacagttcagacactgagctttttttgaaagttaccaagtccaaggttccaagtaaacagtagggcagggactcaagcccaggtgtactgccacctggaagtattaagtcctcgctcctaactactacttcactgatctggctttatgactttataagtcatatacccacactgggcctcagtttcttcatctgtaaaaacaacgcagcgaatgccacagtacagctccttccagctctgcctagcgtcgttatcatcaaccttacaatctacctgagcgtcaacaagccagtgtcatcccttcttttaaatgaattctactcaaacagcatttacaacgcacctactcggcgtccggccttgtgctgcgcgagcgcccaagcccaactcccccacggtctctgctcccgccgcggcgccagcaggcccccctctttccccgcgactctccgagaatagcgggggtccttttccccacccgacacacagaagcctcgggccacccccagctctgctccccgggcccactcacccttctggtggtctctgctgccaggcgccgcgagaccccgcgtccccgctgccccgtcccccacgggggtcgtgtggtgagcgcccaactgcgatcgttcggcgactctgcctttcgccatggctgctgcaaggtgaagggagcggtgcggtgccgcgccccctaaacaacaaaactctgttgcaggctccttactacgccgaagcgccacggctagagccacttccggcgcgacctcctcacccgagacgacctcagcccagcgagtactgcaacctcctgcaaacacccgcagcgcccaccacaggctaaaccccgccccgtgccgcccccgagcctcgcgtgctcgcgccggcccagtaaccgcgagacaagtcagggtcctggaccgcccccttcagtgccccgccccggcccgcccgcgggaaagaggtggccgccgggcgctggggcgagagcatgcgcagtcgcggcactcgagtcacccggctgcgactcgctggccctggcgtctaaagcgtagccttaattacccggaagtgcggtcccagggacttcaaaccttttgtccaggccgccggaggtgcctgtgattagtcggcatttcgcggctgaggctgattcagcccattacatcaattccgcagctgctgtcttcaatttggaggcgccagagagtgcttgatctaaaagatggtgggaaatacaaaggttgagcaaaacctacctgaatttcaggaaactaaggctcagagagggctacgtacaacctgtgaagatcacaggatggcaaaaatgggcttagaatccaggttgtcctgttcccaaagctaacggttttgcattagctgctgccccttactactaaacccaagtcagctctacatttagcttatccctaagctaagcggaaacatgccttttccacaggtaactttttctgcttctacccctcagagcacattcagcttactcaccgtggttacctcttgaaagcaacttagaggccggtcgcggtggctcaagcctgtaatcccaacactttgggaggccaaggcgggcggatcatttgagaccaggagtgtgaggccagactggccaaaatggtgagatgagaccccgtctctgctaaaaatacaaaaatgagctggacatgatggcttgtaatcccagctactcgagagtgtgagtcaggagaatcgcttgaaccccggaggctgaggttgcggtgagaaattgcaccgctgcactccagcatagaccacaaa

SEQ ID NO: 55565 - DNA, 2145 bp, Homo sapiens
tctcccctcaccagagctctggagggcaggaatccgagtaccacaatacaggatgcagagcaggcctaaaatatttatgggaaggatgggagccggactatgatggatcgctttaaataccagggaaaggactttccactcaaaccaaaattcaacagagtattaaattttcttgcacagaggaatgacttgcagaatacagtgtgccataaaaatgcacccggtcattgtgtgaagttggatgggaatgtggcaaaaccagttaggaagttgctgaggtgactctgtccatggagaggaagaactacatctaaaaggcatttcaaagaaaatacaggccaggcacggtggctgtcgcctgtaatcccagcactttgggaggccaaggcaggcggatcacgaggtcaagagatcgagaccatcctagccaatattgtgaaatcctgtctctactaaaaatacaaaaatcagctgggcgtggtgtcgtgcgtctgtagtcccagctactcaggaggctgaggcaggagaatcgcttgaacccaggaggaacccaggagggggaggttgcggtgagccgagatcgcgccagcctcgtgacagagggagactccgtctcaaaaaaaaaaaaaaaaaaaaaaaggaaagaaagagaaaatacaaacaaaagctgagatttgctgagttcctaccatgtgctacgcaatgccaacaacaaggtggcatggaataatcctcatgtctgttaagtgggtgggggtaggagtgggggtaggagtaggggagtgtcacacatctgcaaacggtaacgttgaacttccaaagtaggtccatcgggctctcaggacccgcggctgtccgaggcctcagttgcctcaattagtcttaggctaacttcctccttgcgctggggggtggggaatactttcccgtgcggaggcctcagctcctcaatgtacagagaagagccttgcagggcctaaacactggagttcagggatcctttatcaagctgccaaaccttttcaggggcttggaaggacacctaagggcggaagcgggcgcgttgtggcccccgtggggcagtgggaaggcagcagggcctcgcgggcggaggccggagcgccgctgacgccggagcggaagccgctgagtcatggtgggggcaggaatgcagcgcatttggagaaggcccgggacgccggcggctccagcattactgagcagtgacttggcgtccgcaccttcactgcagtcgggaaccaccagtgacggcggtgaccggaagagctgagtcaccgcaggcgacggcgagcgacgccggcggggaggggctgacgcgcctggggccgcgcgcctgggctccagggccccgcgcgtcgccacgatcccgacgttgcaatccccgccagctcggcgggggccgcacggggctgggtctcccggatcccgcccggggattggagtctgaggctgaaatttgaaatcttgaagtggccccaagccacaaatactacagactggtttcagtgggaattaggaccttgtgaaaggagacagcagtgccccaaagactgggtagattttgaagatcaaaggcacttgcctaggaacaaaaatgatttgcctgactcagttccaaaatgcagcaaataataattaaagcgaaacacacacgcactgttttttttaaatgcaagagcaaaacttttaaaattccaaaagaaaataaatcttggtttccgagatgaattcgtcaaaggaaaatatcttggggcccccatatcactaagctaaagggaaaagtcaagctgggaactgcgtagggaaaacctgtctcccattctattcaaagttacccctctgctcactaacataaatgcgttatctgattgcctcttttggaggctgggtgcggtggctcacacctgtaatcccagcactttgggaaggagaggcgggcggatcacttgaggttaggagttccagaccagcctggccaacataacgaaatcccgtctctactaaaaatacaaaaattagccgggcatgctggtgggcgcctgtaattccagctactcgggaggctgaggcaggagaatcgcttgaactcgggaggcggaggttgcagtgagccgagctcagcca

SEQ ID NO: 55566 - DNA, 1627 bp, Homo sapiens
tgaaccaccgcgcccggcagtttaaatattttagtggctatcagaaacacatctcaaattgcttttcagaaagtttccttcaatcacgcagccattagcaatcgattgcaccacacactgtatctgactccctttatgaacattgtggatatagtatgtgaaaccttttgtaactgattgttttgcttttctttttgtggaacttgaacatttttcgtttttgaacagaaagacttgtctgtaggaacgacagctcaggcagccacgtgggctgcggactgtgtttgtggactacatctcccaaagtgctccgcaggcgcgcccacaggaagtcgccggagcatctcccgcctccacgccgaggcgaagaggttctatccggggccttggcgcttctctttcctttcgcgccggttgccgctgcggagcgcggcgggtccatgtgcgcagtgagtggcgctattcctggcccagtagcacccgagccccgggtttgaccgagtccgcgctgcgatggaccccaacaccattatcgaggccctgcggggcactatggacccagccctgcgtgaggccgcggagcgccagctcaatgaagtaaggacgcccggctagcggtggcggcgggcaggcgggtgggcagaagtggcaggccgagcccccggggcctggccggaggcgcggacgacgtcgttgagggtcccagcaggagggtggggcggacatctgacggcgacttccacgccggggcgcctcggtgtggtgtggtggtggtggctgcagccaaggctgcctttgcttcggatcctgagctgggcctctggctgcggtctaggcatgaggagccggctgaggcggggcgggcgtgacgggttggacacatggctggctcgggtggctggccgacctctggctcattcccagctggttcctcacgtccaggagggggcgaaacttactgggaggtttttcagatgtttctgagaccagtctcgccgtcgcagggtttggaagggctcctgggaatgccggctggtcctttgggggctgcgcctgtcatccttgtcactttgctgggctgatcagtggcctgcctcgggcacaacttcctcctctctggctgagttgctagggaaggctttcaaaggcaagcccgcgcctccttggcaggataggagtagtgcgggacactcacagagtctgatccctgcttttccgctgtcctaatgcttcagtcggggagctggcttatgtagtgggaaggatcaggtgaagtgcacccttctaggtatagctgcaccattgattccttgagtgaccttgggccagtcgcttaacctcttgatcctgagtttttcccattcataaaattacgccacagagttgctgtgacagacaggtgagataatgttaagtctgagtgccttggaacatgctgagctccttatcagttcagatattgcattctctgaaggttttttttttcccccatattttgtggggaccgctccttggaaaacagcttaattgcatgaatatttattgtactatctccagtgtcattctttgtttctaaacttttgcatttttacgtattaatgatcagtattttaaatccttcttaaaa

SEQ ID NO: 55567 - DNA, 3198 bp, Homo sapiens
ggcaggagaaatcgcttgaacctgggaggcggaggttgcagtgagctgagatcgtgccactgcattgcagtctgggctacagggcgagactccgtctcaaaaaacaaacaaacaaacaaaaaacagtaatccgaactgatttaaacttctttattaacagaatatatgttcaaacaaagcttaaagtcccattttctttccattggcgtctaggcccctattactcaactatccgttggttagggcctgcacctcaaggtaggcttaattgtaaatcaaaatatttactatccacacttagagggctatctgtaacatcgtttttatttatccccgtccattcgataatcgtctgaaatgcaagacattaagttgaacatcatccagctttctccctgtttttctaagcgcgatccaaatctgttacaacagggtagtctctcattctcttggtagctcaattctaccccctggccgacttaagaaattttgagtctaatacacccacctcatctttagtcggcctggtgcgccaacgcaaatttgtactgagtaccttcggaactgactagtaagtatatccaaaggtttagaaagggctgggttaagagctacaagaagcattaaccgcaacggccacaactaatttgtatccattcttagtaactttagggaaccagactgaatgcttctcccacccttttgactttcctttattagttcgcaacacaagaacatacaaaagaccgtagcgacaaccatttctgacgccttcaacttttaaatccaaattacgtgaaaccacaaagcatcagtggtgtctccccgaggaatccaagaccccccggccggttgccaagccgccggaatttcagcaggagaggaaggctcaccctcccaccgcatggcgatgcccgggagactggagaagctcaggcaggcttggaagccaatccccggcatacagcagctctcgggaatgcagagccctagagcaagaccaagggcctcggccgacactgagagcctccagggagaggtcaggtctctctttctgtcctatttctcccttcgacttccctcccagcaggctgctattgagcattcagcaatcgccagacaaagcccttctggtctgcagaacgcactccggcaagcccaccgggagaaccaaagccgcctcctcgcccctgtggggaaaatggcgctcgtcaccccggctccctcccgggtaatcacaaggaccagcctccctccctcgctacaaaatggcgcctcccgctggggccccagaatcggtatgactcgctagtcagtgaggcggggtccgtctgggataagcggttatgtcaaccagtcagacacaggagctttgattctgcactttgcgcgagccactcaggggcgggctgtaaagtcaggcttggctgacgtcagttgagtgggcgcggctagggcggttttctttcgcgtcgaccaaacgtgggccaatggaaaaccggaagcgtcctgtgagtgatgtaatgacagcccaatggaagctgggggcgggcctcagacacactatgcgggttgcggggcctgggggccggacggctgtttcctgtcctggtgcatggtggtcggacgaaggaattgttggaaaattttctcggaggttcgtatataaatgtgtttttacccagtgtgcattattctccgcctggccgccgccctcagcgcggcggcgcgggcccgcttgggcccgggctccggctcccgctgctcagcctccgccgcaggccttgccgattttatgggccggccgcggtagcggcgtctgggcagaagcggagtttattaataacccgcggccgccactctaggcggcggagcttttttcgttgaggactcaactccccccagcttgtctctgagcgatgcgccccgcctgtttccctcaggggaccgccaaggggagggagtgaaagaggggagggtggagccctcgggagccttggccgcgtttctcggcctgacctccgcgcagagcgagtccccaggcgccgccgaggcagagttccgccgcctgggacgccgggcccacgggccacaccaggccgcagcgggggcgccggggacagggctggcccaggccctcccaggacctgccggtctcacctagcgcttgcttcccatgcgtatcgtgggcagattgtttccccctcaccctttcttctattaaaaaaaaaaaaaggttactgaggtctaacatcggatattagaaatttacaattttatcctcccttttctccagttttggccaaaagagtgaacaaattcttataagtctctttgaaacgtattattgtggaacgcgaactagtttttattccttccccttttgctttggacatttgttttttccacataataacgaagttaaaaagaggaaagaagaataccattgccagcccattatttgtttaaaatcagcgtcagcctttgctttggaagtgtctaaatcagctgatataatcaagtgagaatgtggggagaaattgtaggttcgagattgtggtcggctttgtcctgaatcttaccagaagatacttgtgttttcctgtagttgacaaaaaacggtgcagtatttaatgttttttcttgctgagtatgtagatcaagtttacgtttagtaagaaaataacgtgataaggagatcactcaaaaacacccataagatgcatagctaattttgtcctggcgtattttgactgtttggaaattttttttttttaattgtcagtgtccactatttggaaattctatgagcagtcagctgtctacagatacttgagtgccttttttttttttgctttacagatgcccgcctttattttttaaaatagctttagtgatgtaattcacataccttacagttcacccatttaaaatgtgtaattaggcctgggcagcatagggagacggccctcccatgtttctacaaaaaaaattttttttaagtgaaatcagcgtgtgcctgtagtcccaggtacttggaggcagaggtgagaggatcacttgagcccaggagttccaggctgcagtgagccgtgattgtgccactgtactcccgtctgggtgacagagaccggtctcgaaaaaaaaaaaagtgataattagttgaattttagcctgggtgtggtggctcacacctgt

SEQ ID NO: 55568 - DNA, 5989 bp, Homo sapiens
tccgcctccagggttcaggtgattctctcacctcagccccccaagtagctgggattacaggcatgcaccaccacacctggctaatttttgtatttttagtacggtctgggtttcaccgtgttgatcaggctggtctagaactcctgacctaaagtgatccacctgccttggcctcccaaagtgctgggattacaggtgtgagccactgtacctggcccttttctccattatcttatagacatcttttcattttgtacatatagttccagctcattattttgcaagctatagttttttagcatttaacggaaatttgggtggtttccaatatggagtataataaacaatgccaatatttggttttctaaactttcccccagatctctctgtggctgattttctcactccattcaggttcctgctcaaatgccacttcctcagaaaagcattccttgatttcactattttaaactagcactttcctccaaccctctaccacttcttcatcccttactttactttctgatatcaatctttgtaatttttcctcttgattttagagtttaaaatacatttggattttatgatgaaacaaaaaaataaggtacaagtctgactccccctggatcccattgtccacattcacaccatcaagttgtgtgccggcatacctggaaggatgactctagacatcacactgctcaactagcctggcctcccagctgggtccagtgtgaccctgccttcatcaaatctccctgtttcacccttcaccttatgcccttcttactggggtaggaagaaccaggctttaagtcagcagcaataaagtctcagaaggctgggcatggtggcttacacctgtaatccccacattttgagaggctgaggtgggaggatcccttggagtttgagactggtctgggcaacatagtgaggccacgtctctacaaaaaaaaattgtttttaaattagccaggtatggtggcatgtgcctgtagtcccagctactcaggaggctgaggtgggaagattgcttggtcccaggaggttgaggctgcagtgagccatgattgtgccactgcactccagcctgggtgatgaagaccctgtctcaaaaaaataatactaaaataaaaaatattgataggtcattggatgggtaaatgtaaaattttttttaaattttaaaattaaaaataaagtttcagaaatatagtctcagtaatactagttctatgattgtatgatgaaggcattttttaacctgtgtttcattttcatctgtgaaatgtgaataaaaataactctcttacagagttcccgtaaagattaaataagtatgtaaagcatctgggtcagtgcctatcatatagttggcaccaaaatattctcccctctcccagctcctgcaaaggcaccccagctctttgcagcacttagggcctttctcatattctgacctgtattaagcaaatgtgcagctggtaggataagatgcttgaacgtagtagacactcaatagaggactgccaagcagagttgatttctgtagttagaaactagttcatccttaccagtaattttttttttcttgtatacactcccaatcggcttatcggcttatcatgtcacacacaactggttactctctacccaactagatactggatgaggtcatctctcaatcctgtctgagctgaacaaggccttttatggaactttaaagttgactcaccactgagtcatcaaaacacagcaatacctaaacacgctcctgttgctaacaaaagaccagcatgggatgtctgtcttacctcctttccctcccctaatgagacacggccccttgactcactggagaagagtcatcacgtcttttgtgctgcagtaatctgaacgaagccagtttaaataatcacaatgtggccagcaaacaactggcagtccctgtggtcattcaggtcatttcctgtgtatgtcactaacccaaaaggagaggcaattaatcaatcacctgaatatttaataagtgcctgcattctgttgggcactcacagttccctctgtttatgacatttctgtgaagtgaacttttcagttattgaaactcattaaaaatatagagaacagtgttgcgggaagtcagggaccccaaacggagggaccacattagaacagcaacctttgtgcctctgtaaaggaaataaaaaaaggaatattggagaaaatgggactattcagttccattccaatagaaaagaattataaaatagcaaataggaaggggttatttgctaatgttttggctaaatgcttcagagagctataattttaaaatatcttggttgagaactactctcttatctaggaatgaaatggtcagtggtattttctcttgggaaaagtcttgcgttagtaccactgcctgacctattgcagtggactatgaagtgtttcaagattagggggcctgtgtaaggctgagaactgctgagataactaggagtaggcctaagggctcctttcataaataaggctggttacagctgtttcatacatgaacagatacaacctttaagtaccctagcatggtctttcctagctggagaccccaaggaaaacctgaatgaaaatcttagatcttcagacattttatatagaatccatacaattgatatacccatatccaaaggatataatgatctacccttgatctatcttaaataaatatcagaacgatgcatggaaattgcatgttagtagtccttaaagattaatttggcacgacaagaaatgtttattttattaaaataaatacaagctcttaactggttgtttttcctgggttatgcttctcaagttcttattacatagatactgtgttctgatttgatcttcctagctggttgtgcataaacttgagcccatccatattaagtaaattaattttggggacatcaggagtcacatattgcaattactgactataaagccattaacaactatgaatttttctcaaacaacattgctataattgaaagcatacttataacttttttttttttccccagacagggtgttgctctgttgcctaggctggaatgcagtgatgtgctcacggctcactgcagcctctacctcccaggcccaagcaatcctcccacctcagcctccagagcagctgggaccacaggcgcaccatgcccggctaattttttaaattttttgtagagagggagtctccctatgttgcccaggctggtctcaaactcctgcgcccaaggaatcctcctacctcggcctcccaaagtgctgagattacaggcatgagccaccatgccaagccagaaagcacacttatatttattgaacactattcacaagagataatgctagtctcacatttaataaactgaacaattggccaggcgcggaggctcacgcctgtaatcccagcactttgggaggccgaggcgggcggatcacgaggtcaggagattgagaccatcctggctaacacggtgaaaccctgtctctactaaaaatacaaaaaattagccagggatggtggcgggcccctgtagtcccagctactcgggaggctgaggcaggagaatggcgtgaacctgggaggcggagcttgcagtgagctgagctcgtgccactgcactccagcctgggcgacagagcgagactccgtctcaaaacaaaaacaaaaacaaaaacactgaacaattagagaagaattgagtttgacggtactgtactctcagggtatgctgatgaacatgcggtgaaatggtcaaataatcacatccatcagaggttattaaggcacgtgatgaagtagagaaatctaatttatagctgggaagtcaaacaggagcaatctaggagctaccacgttctagcctgagatttgtattcctgaggccaataggcagctggtaacagagctgggttgaaataaattgagacttgctgtgagaacaagcataaggagaaaggtaaagataacaaggaaggtgaagaaagttgaactctttaagcgtattatttgtcttttaagtgaaaaactgacatttgactaatgtgtcttttttttaaagttagaaatctatcagagtagggtccttagagaaactgattatttctccagaataaagagcatattaatagaaaagattcagctttcgctaacggctgactagtcttaacgaaacattcctaaaggctttgcatcactgagaaaagttagttcctagttctgaaggatttcattcaaagtgcaaggctcatgttaataggaatatgcatgcatattcatgtgctatatgtattaaaaatacttgagaaggtgatttagaaatctcagttttaaatcttcatgggaagaatcttgcttgttttgttgccaaggaaggtgaatgggttgaaaatagttttaaagccctttacgtgcgaagtcatgaatctaaagaggataaacaggttaggtttgttatcccagaagctagaggcaagatttttactcagttctttcaacattaccacaagcatgtggattctgcaaaagttgcctagcaacattagttagaaacaacattgggtggagaaaggaactggaaatttgaattagatacggcctggggcaggcgggtgtaacccatctctccagtacagtgtgtgctttactcagaggagcgtgaaattttaaaaatcagaacagtcacttaaaatttcagttaggatgttgctacagttaaaccataatattgtgccatgttctcagcttgaagaggcagggcctgggtttctcacttttgttttgttttgttattttggcacttttgttttaaagatcactggattttcattaaattattctagaaacatttattaagcactttctcaggggccaaggcacagtgctggttgctggagctctgaagacaaacacagtttggaccctgccctgggcagtgtgaaaaccagacaagtaaacaaagtaagagtgttacatagtccgtgctgggtgcggtggaaagtctggagtagggaatggagagtcaggaaaggcttcacagaggaaatggctctagcactgagtcttggtttcaacttaaaaaaaaaattccttcagccaggtgcagtggctcacacctgtaatcccaaccctgtgagaggctgaggtaggcagatcacttgagctcaggagttcaagaccagcctgggcaacatggtgagacccggtctctacaaaaaatacaaaaattcaccaggtgtagtggcacttgcctgtagtcctggctactcaagaggctgaggtgggagaattgcttgagcccagaaggggaggttgcagtgagccgtgaacgcaccactgcactccagcctgggcaatagagcaaacccttgtctcaaggaaaaaaaaaaaaaaaattatttcccccaatcattctacacatttattgtgaacttacctcttcgattctgtgtgaggacttcaaagtcctgggtctgtggaccaagaactcttcccttcccatccacaacccaagcccttctgcctgccttagcctacttcaaagacctcccatttagggacgcagacaggtggcaaagtaggagttgacaaaacaaaacaaaacattgttaagagtgtttaccttcaggaaggggaactgggctgggatttgaagggataggtgggagaattttgtaccatttaagtttttgttactggagtggggaaaaaccatggggaaaaataggaagtgtgatggctgctacctctacaatcttgcattaaatagagtactagagtggtgatctctgttcaatttttttttttttttcctgagatagttctcggtctgctgcctaggctggagtgcagtggcacaatcacagctcactgcagccttcatctctcaggctcaagggatcctcccacttcagcctcctgagtagctgggaccacagg

SEQ ID NO: 55569 - DNA, 4553 bp, Homo sapiens
gtgtggtggcagccgcctgtaatcccagctactcgggtggctgaggcatgagaatcgcttgaactctaaaggcggaggttgcaggttgtagtgagccgagatcgtgccactgcactccagcctgggtgacagagcaagaccccgtctcagaaaaaaaaaaaaaaataaataaacaaagaaagaaaaaagaaaactggaagaaacgtgtaagtgcattaagggacagattaaatcagtttaacgaagcactagggaaattttttaaaattgcgtttgagtttgccgcgagccgggccaatcggttttgccaacgcatgcccacgtgctggcgaacaaatgtaaacacggagatcgtgtgccgggcacttggtttcgtggtgggcaactgtgctgctgtttcttttggccgcggacaaggtcggcagaggtggacccctgcttgggagagctcttctcgctgtgctgacacccgcccctaacagtcacccaccccggggaaataatggggctcggaggcctcctcccagccagtgtccagcctaagcacatcggctcccgcagttcagaaaggtcccgaggcccgagtcaccatttccggctcagacctcgaccctgaacgtggctgcccactgccacgcccactacgccccagtggctcgccccaggggacgaggggcaagaagcggcctccgagggcagcggccgaaggccattcggtccctggctcttcccagctcgcagagacccggaggcgctgcccggccgcctgcccctcttcagatcccccagcaccggaggagcagcgaggggggtgcgtccaggccggctttcgggtcggcttaggcgaatccagctctcttttgcccctcccagaaggcccagccccgtccgggcggtgttcgggcggcgccgggccgggccccccgccgccccaggctcgctcataggcccggaacaccacagcccgcccagacttggctggcgccgagccgggggtggagccagcgggttcccgccaaaatcgcgtagctggtccttcccccgcgggctacgtcgcgccctcctttttttttcaaacccggagctgcactgggattggtggactgggcactcacgtggttaacggtcgcgggaagccgcggagcccgaacctgagactggacctgaggagacctcagcctcggtgctcgggccgccccgcctctgccggaaagtccgcgccgccgctgccgccaccgtccgcagcccgagcgccccggagccgcaggccgccgccgcgcagagacgccgcggctgcgactaggcgcgcccagccgcacgtggcggacccgcccccaggcccgcagtgtcctggaccccgcaggcctccgctctcctgtcctcggccccgtccccagggccgcgatgagcttcctgagccgacagcagccgccgccaccccgccgcgccggggcggcctgcaccttgcggcagaagctgatcttctcgccctgcagcgactgtgaggaggaggaagaagaggaggaggaggagggcagcggccacagcaccggggaggactcggcctttcaagagcccgactcgccgctgccgcccgcgcggagccccacggagcccgggcccgagcgccgccgctcgcccgggccggcccccggcagccccggcgagctggaggaggacctgttgctgcccggcgcctgcccgggcgcggacgaggcgggcggtggggcggagggcgactcgtgggaggaggagggcttcggctcctcgtcgccggtcaagtcgccggcggccccctacttcctgggtagctctttctcgccggtgcgctgcggcggcccaggagatgcgtcgccgcggggttgcggggcgcgccgggcgggcgaaggccgccgctcgccgcggccggaccacccgggcaccccgccacacaagaccttccgcaagctgcgactcttcgacaccccgcacacgcccaaggtgagagcggcgggcgcgggcacccggcggccggggccgcggcgccggaggggccagcgccgctgcctgggttcggttacagaagcggccggccgctcccccctcgctttcctgcgccgccccccaaagttggcagcccttgtgtttggccctgccccgaggttgtccgttgagattatgtaactgaacaatgggcctcgtctggaacttcatcttacaaaggggccgatcggcccgtccgggtggccaaggatttgccgcccgttgagtccgggccgccccgagcgtgtcagccccgagtgcggcaccgataacgcggttcgcgaggatgctggagggtgccggcccggccacctgacactcccgagccataggatgccttttaaacgcggcgatcgggcctgtaatttgggcggcgcgggcagaaggagtttaaagaaaaataattgtcccgccctgatcgtgtcgtgtcgtgtggcgtggatgggggaaaggtctggggcatgcagggagactacgcttggacttgggagtaaaggctggccttccaagcatttacagtcctacagactcatcctaagtccaggcagtactgaggcctgtttctggacaaggtcttggcccagcatttgtttttatcgtgggtttgcggtgcccagagtttggccggcctccgtgtgattaggaacatcctaccgtagataaggtatcttaaagaaggaggtgttcagcacctgtgttttgaaaggccttcgagtactgcgcagatgaccacttttaaaactgcagattttaaagctgatacttccagagattaagacaagcctcgcatttgtaaggttaacagggaagatgcaccttttaaagtgagtttgttttgttttcaatgtactgtttgtcatcagcctaggcaatctgtgtgctttcgagctgtactgtttattggccgacttgctcaaggcaaaatccctctggaagtgaggggaggagtccagcggaggtggctatggaagccctatctagatgggggaggggagattttatggggctctcggactgctttctatttttggatgggttgaaagaatttgttaacttttagccactagaatgaacttagttttaggcagcatttatattctttttagggttagaggcagattttacttggctatttttttcaagaaaagatagttaatatccagcttcagtcttcctaaattagccacaatttattttgcttgaactctaacaaaggcttgtgtgttgctttcacctacgcattcagccctatgaaaggctcgttgaaggttaggttgagaaggctgactataggacttggatcctaaaaattgtatttgtatttttctttccctagagtttgctctccaaagctcggggaattgattccagctctgttaaactccggggtagttctctcttcatggatacagaaaaatcaggaaaaagggaatttgatgtgcgacagactcctcaagtgaatattaatccttttactccggattctttgttgcttcattcctcaggacagtgtcgtcgtagaaagagaacgtattggaatgagtaagtcgtttatttaacagtttggttctccaaataacctaagattggtttggtatacttatcaaaatttagttcctatttaatggcatggatgtatctgtcagatatattgatagaaaaataacattttttttagttcctgtggtgaagacatggaagccagtgattatgagcttgaagatgaaacaagacctgctaaggtaaatagctttttatttttatttttttgaaatttacttttctgccacttaaagcatgctatgaatatgttaataagcattaacacataaggtagaatggtttttaaatttcacacatagccctatcaccatagcaagaaataactgttttcgtatatttgtattacatatatggaaacactttttattacagagaattacaattactgaaagcaatatgaagtcccggtatacaacagaatttcatgagctagagaaaatcggctctggagaatttggttctgtatttaagtgtgtgaagaggctggatggatgcatttatgccattaagcgatcaaaaaagccattggcgggctctgttgatgagtatgtattaaacattttgtcttttgctcttttgtcccctatggtgttactaacattaaggtttcagctggtcaaacactgaattccatctctaacttttgagaagctgtaatgatttaatcaggtccttttcacttaataccatcagttcttattggacttgttgaataatatgagtctgattttggaacctaacttaaatttcttatttctagtcagcatccatgaattcacagtaaaatggagtttattcttacctgagtcctagggcaagcaacatttcttctttctgataaatctttaatggaatctgcctttggaaaaatctcttacaagtctaaaccccttctctcttaagcaagttgctttttagcataacaatagataccaaaaatttattgtatgaagtttcagataaattaa

SEQ ID NO: 55570 - DNA, 581 bp, Homo sapiens
tcgggagcagctgtaaatacagatgaagcttctctggcttgcccgctgctcacctcccgctgtgcggcccggttcctaacagggcacgaactggtaccatgggggttttgccattaattcaggggttgagaacccctgagttaaaagacagtgttcaggcagcaaaggagagtaagaaggtgcaggctgagaattaggaaaactggatggaatctgacagagaataagagaattttgaaggagaaattgattaactgtgactaatacagaaaagattgaacaatgactcaaagctctgtgaaggtatctagagttcattagaagatatttggtgagcggtgtcagtacaggggaaacagccagattacaatgggttgagatgtaaatgggagatgaggaaatagagatagcaagcacagatcatttgcaagaagcatggctgaaagagaaggggaagggaggagagagctataattagaggggaatcttctttgggttttgctggggtgttttgttttgttttgttttgctgagatagggtctcactttgtagcccagactggagtacagtggcccaattt

SEQ ID NO: 55571 - DNA, 876 bp, Homo sapiens
caaaaaaactacaaaactggataatcccactcaagactttttgcctttattgtgatgaccgtttttctgagctgtgacagtactttaattcacatgtttagatattatttagaaaaggactgagcatgctgcaaatgaagacataacatttcatgtctggcagactctagctttgagaagaggatggggtgaagcaaacttttggcaatgtcaccttccactgaggttaagtttttgtttagttaagataagaaacaggtatttgactatattgcttctgcttaatacatttcttgtgggtcttaatatgtatataaagtaagttaatttaaacatttcttccgtgttactgtgtgcatggttaaaaggcaatcagttgatgttctactacagtatgatcttgcctcaaggtcactatattttctgttccctttgcctggatcactcttcccacaggtgtgaatgaggtttgctccctcacttcattcgtgttgctctgttcaaatgtcatcttatcagggaggcttaccctgactaaccaagctgatgcaattagcacgtcccattgctcatggttctatttttcttcctaccgctaccaccaccttgcatcatgtatatttgtttctttgttgtctcttccctccattatagtgagatcttacagtagtatttaatctgcaataggaactccctaatagctgtttgttgaataaatgaagatcactatattgctattcaaaagagttgtatgggccgggcgcggtggctcacacctgtaatcccagcactttgggaggccaaggtgggtggatcacatggcgaaaccctgtctctactgaaaacataaaaattagctgggtgtgatgtcacgcg

SEQ ID NO: 55572 - DNA, 3603 bp, Homo sapiens
attccagcctgggcaacagagcagtggagtttgagaccagcctgataaatatggtaaaaccccatctctactaaaaatacaaaaattagcaaggtgtggtgacatgtgcctatagtcccagctactcaggaggctgagacaggagaatcacttgaacctgggaggcagaggttgcagtgaggcaacactgcactctagcctgtgcaacagagcaagactccgtctcaaaaaaaccagatagagttgtatgaagcaatggtgactattattttaccatgctgctaacattatgcattattttttttctgtttttctattatatttttttctatttatttttacagaaacagcgtctcactattgcccaggttggagtgcactggtgtgatcatagctcactgtaactctcaggcttaaagggatcctcccacctcagcctcccaagtagctaagactactagagcacagcaccatgctggactaatttttaaattttttgtagtgacagggtctcactctgttgcccaggctggtctccaactcctggcctcaagggaacctcctgccttggcccccagtgaactgatattacaggcatgagccactgcatccagcctgcattataattttaaaacatttttgctactttagtagatgtaaggtgttatgtcataactgttttaagtttaaagtttctgattatcaatgaacgttttccccatgcacttgggtatgacttttatttcttattgtgaattacagtgcatgtttaccttctttgtctatttagcaattggtaccttgattgtttttatatatataaacaagctttttttgggtgggggggatggaatcttgctctgtcacccaggctggagttcagtggtgcgatctcggctcactgcaacctccgcctcccgggttcaagcgattctcctgcctcagccacccaagtaactgggactacaggcgtgtgccaccacacccaactaatttttgtatttttagtagagacggggctttcaccatgttggccaggctggtctcgaactcctgacctcagttgatccacccgccttggcctcctaaagtgctgggattacaggcgtgagccactgcacctggcctataaacaagcttttatacatttcaggtagtatttgcttgtcacttggtgcagacatttttctcaatctgttgtctttttaaaattctgtccagtttttgtatttttgaacgttagtcttcctttgttgtttcttctgttgtttcaaagttttgagaacgctgacgtttatccataaatataactgccttatcctattaaatatatagtttctatggctgttctttaaaatatttagcactttaatccacttggtgtttattttgaaatacgatgtgaaacacatttttgtcctccaaattttcattcatttatctgcgcattctttacatagttcatcttttcttactgccgtgtttgggaatgttattttactatgtatcccatcaggattaatgcgtgtgtttgttcagtctcattcctttccgttgatctcagcttctatttttgtttctgctcttagtcactgcccagcagcgccaaaggaacatcccgccccctgcaggcagctggtgtccccacaacctgggaagcctggggcagggcctcaggggactcctggtgttagtcctccgagcccgggtggacgtgtcgctctgtccctgcgggaggattcggggcccctttgacaggcctccttctatgccggtttcctggggcctcgagcttcctgggttccacgtctctagtaaccagtagagacgggcctttaccctgccgttgggtggggactgtccccttctgggctcttcctttcgggcctttccacctctccgaccccagggcattcgccccaccacgttgccggcacagtgctggctccgcggcccgcggttctggcagtcagcgcggaatgccatggcaccgagcctctgtgtctagatgagttctgggcgctgattttccaggtcactcggaagctgctctctgggcccgcctgtttcccttccctttgcctccttgtcccgcttccctcgcagtataccactcactgtacccctcctaaaaaggaccactgcaggaagcgttattgaagcagacacggttcaaacacgaaaaacaaactcttctttattcaacagatgtgcacgaatctattgtgtgttagatacgggtaagtttctgataagtcgtgcactgagccagtccgggctcctagaaccgcgtttacgtgccgaagtctcaatcagattaagagcgtctggggagagcggggcggggatagaaggaggtgttggggctaggggtaggactgttctggaggcgtgggtaagggggagtgggctgtgctgtgcgcccctcccctcgctatctccccattcatccgcagacccggggccccacgcgccgctcctgggcagggccgtgcacccggaaggcgccgaggcgcgcccagcagagggagcatgcgggcagggcattccgcgggtacccgcggagcaggacggccacccacgccggggcccctggggctccacccaggacgcacacccggagagacccaatgactgcgtttcgcacctgggcgcaagctggttactgggcacgcgctgacaacccacatctggaaaacccggtcctaactggagaataaaacttaaatgcacgtgaactcaccggcagctgaacatttccgtgagaaaacccctaaaagccggcaccggctccggtggggccacagagtctctggagcgaggctctctccaatgcctgggccctgggaccgagcaactgtcccagtagaatccctttcgggctttgttgcagggataggggattctttttaacgtgttccttggcttgcacaggcatttactggtcctctggagatcacatataacaggaagtctctaaattcagtatttcttttaaatgaagttgtatttattcatcacatttctatcagtagacttgaaaaacagcgtacacgttttatacattgtatgtaggacattgtatttattcaggtccatcagagagtcttaatctggggtatggggacaactaggagtggataggattcagggagcccatgaaactcctgagattgtttcatattttagggcaaatgtgcaatttttctgggaagaagttctgtcgtttttatgattaccagggttcataaccttagtttggttaagaaatgctggtctaaggtcaatgctcagcaggtttatggattcagaactcattgcactagcactgaagcccccttgagggcccgaagcccccattctggacccctgcaggagaatttggttctccagtgaaggtcactagagcctggacttgattttctctccctacaggaaggccccccaaaactccaaggggcacagttgttttcgttttaaggccatattaggttcaagtagatttacttctgcatttctctgtcttaaatagaaataactctctggtgggtattttcccctgggttagtcatgcaaatactctatgcttcacttactacccat

SEQ ID NO: 55573 - DNA, 1609 bp, Homo sapiens
ggctgggattacaggcgtgagccaccacgcctggccgaatacgttcttttaaatggtccatctctttggattagtaaaatgggtggagtgatttggaattggcccagatctcctattctgcaagcagagaaacactacagagaggtattacccaggtcaaacccctcctaagatgtgaattgaacaacagctaggcgttaggaagaaaatgctgcctgaccctgacttctaaactccccttaaacgtcgtcgctgtgtccctagaacccaagatagagtatgcatgaataaacttttgcgaaatgaaccaacaaacttccctcgaggtccttcctgcctccccgccgccctgcatctccccgacttgggactgcgctatcatttcagtcctggtctggggacttttcggggtcttctctggccttctcagacagtgactccgttcccaggacaggaccagggatccctttttcactgcggggcgctgggaggaggcgggtaggctgctcacctaatctctcgggtttttcctcaagacgcggtcatttgtgtgaggtgttgtactcgagcacccaaaatggcccgaactggtctgggaaacattagggagatgtgtttaccgtcctggctgacactgaaggccaagcattcttgccaccaggcgtggcttgactcgcagaacccacactctggcggctgtgggcgcggcactggaccggcgccggcagcagggcggggcctggcgggggcggggcctggcgggtcaggtgactgcgcggcgggctgtggctgcggaggttgaggggcgtccgaggcgcggaggggctggctgggcaggaggggttggcggggcagcagggccgcggccatggggagcttgaaggaggagctgctcaaagccatctggcacgccttcaccgcactcgaccaggaccacagcggcaaggtctccaagtcccagctcaaggtgggcgcctcctgacccggccccccacccgaccctccccggcgcgctctgtacttcccttgggtggaagcgggacctggcgggccgtgaccgcagggcggggcgggtcggaatgcgcccggtaggcccgcttggggcggagtgggtctgagaccgggatttggtgtttactgcctcccccttgccttcgggccatgccctcggttggatgtgttagttcccgcgggtctcccagggactgggaagggtggcgggcataaggctggggtgaagtctggagggccaagtgtgattccttcttggcgttggagagcggggggcagaaagtggattctgaggcggcaatgggaagctcccttacacagccttcccagaattttcctcttactccaggagaggaagggacttgcccaaggtcgctgggcagaaccttctgcagcccacagccccacaccaggacagtcctcaaaacggctagctgccccggaggcgacagggcagtccggagacgcagaaatgccccgaagcccggcctccagggtccttctcctttgggaggctttttgacttgggaagaccttccgcccagcgtcttttaagtttggaactagtggacggggtgtactgtgtcccacagggacc

SEQ ID NO: 55574 - DNA, 595 bp, Homo sapiens
ctttccctgagaaagaagtcaacctgcatttaaacaagacccttttataccaacagatcagacagcagatggaagaacaggttgctcaaaagtcctctgaactggaacagtatttacagcgagtacgggagctggaagacatgtacctaaagctgcaggaggctcttgaagatgagagacaggcccggcaagatgaagagacagtgcggaagcttcaggccaggtgccagatttgtttgcagactttgcctttatgtactttgcctgggctaatacagtttcttggaatgactaacactctggtggagagggagaagtgtctctgctctggctgtgactgagctcgaggtgctgtccagattagaaagactgtggagactcgaccggctggagtgtttcttttcattctgaggcgctgggaaacccttgcttctggggctaaataagggcctattttagagcagtctggtaggtatgtttgatgaggtacccttagtcttattcgagaaaatccacaaacccagaattacctctgataagagcttggcatcttcaacacgctccagaccagagagggccattggtatgcaggcag

SEQ ID NO: 55575 - DNA, 3271 bp, Homo sapiens
accctaaggctgggaacccttttgccttccttttttcttaaaggaagttaatcccagcacatgtgaaagatggaccatccatcccaatgcctcatgtcctgggcttcatttctccatttctcccagggcaccctgggagtctacatgcaaacagagatactagaaagttaacttccggaaacccccttgataggccaattcgtccccttttctctctctccatgtgatttttttttttcaaaaaatatcttttgtagtttttttttccttatcaccaatacatacccaatgtggaaaactgagaaaaagcaggtttgtaaaaagaataaaatgcttcgccataatctcactctgcagacaacctacaatggcaaaaatcgcaattaattttgcaccaacctaatactaggatttcagtgcacagccttccaggcctacatttaggtttgtttgaaacaggaacatgcggttcaaccgccaacctgagcccgcgtcccctaaggccaataccaccatcctgaccctccttgggaggtcctgaaatgaccccagttccaggggcaacgaaatgcatacgctttcgagggaaggaggggaggaaacgaccctgtggcgcaggtctgcacggccaagggggttccctgagctggtggagcggcgtggcgtggcctaggaagtccctgggcgagggaggcggggcgcggcgtggtgggggcgactgggtggtgcaggcctgcgcacgcgcgcagccgtgggcgggacgggcggcctgggggcttcgccgccaggtggcaggcgtgcgccacgcccgcaggttccagccccgacccgggcgcgcggggccgactagggtcgggtccagtgtgcggtggtcgctccgctccgggccgctccgctctgggcgtcagggcgcggggagctgccccggggttctgtccaccggggaggaaagccacgagcactgagcgcctcctgagagccagccctgacgtgaactcattttatctgccacgacccagaaggtgggcgcaattttcctatgttccaggtgtgaaaagtgaggctcagggagctaggcagttgcccaaggggacacagcagtgacggctctgggacgaagcccaggtgtccagacgcgatggcctcttcccgcgttctcggcgggtacggcgcgccgcctgcctgcggcccgcggggaggtggtcgggtggccgccccggctcctcctcgggcccctgaggatttccggccgggaccccgaggagggccctgtggccttgcggcatccgtggtcacgattccagccccacacggcctcccgccagtccctgcgagtgcccaagacggggccgcccctcccgtctcctcccttctctcccctccccggcgtctcccgccgagggcgctgcaggcggcctggttgggatgagggcgggcaggcggcccacaagcaggggcctgtttcctgactcgtttgaccctggctgtccctgcggaggccccagcagacccagcaaggtcatctagggcgaaattccagtctgagccctgagcagtgacttaagttttcccgataaggctcaagaagggacacagattgtcctccccacaccccgcactctgtcagcacctccactctggtgaagcctctgctgcagacagcccggctcgagaagagacaaagatagacttgggacagataaggacagagacagccagggagagaggggcaaggagctcagaggtgaagatggggccgcgccgatggggaggcagcgggtctgcggccgccgagatgggaagtgggccctggagcgggcttgccgagcctacgaccggggctgggatgttggaggaagacgcggtcatgagggctgaaaaagaaggggtttttggtatggtagaaaaatggattgggctggcagctcgaaggccacagccctgtacctctgggcctggtctcgtgtgtgcacctgggaccggtgggtgaggggtgatgtagagtcaatgagggacgagctcgctgagtctccaggaggcaggagtggagagggcgagggagggagggtaggacctgtatacctacggtggagggggcaggcgggggacagatgctgctgggccaagactactgagtctctcctgcctgctggaggtccctagctcaggacttattccatgcacactctgatagaatatttacgcccaacactaactgtttggcttggcaaataagcaaagccataaagtcacagctggcctgtaggctcccagtcaccatgtgcagctgagtcacaaccacttcccccaccccctggggagcaagcgcctatgctcatgcctgcactcagacacatatccacacagatacccacagatgccgcgtgccactgagtcatagctacctcctcagagagcacgtgcctgcatgtacttgcacacaggtccccacagatgccatatacacctgagtgtgagtcatcatcaccactgaaccctgagggagggcacccagagtgtgttctgccatccttgcttagagatacccatatacacacatatacagatatgtgcccaccacacatcctgttgtacctgctgcatcataccagcagatcaataaatgtttgtggaatgaatgaatgagtaaacaaatgaatgaactaacaagtgaaaacgtgagtgacaaccacactgcgtggatactcagtaaaattggttggggcagccctgcggggtgggtcccaagctctgtgtccagaaggagttgtcttgctccaaatatatcctctgtgggcgggcagggagccagggctgcctcccagaccctgacttcactgggccggaggcccaacctctgaggagttgaagaaaattaacaaagaagaggccctggctttctgtagccaaggctgagctgtgagatgagttggtgggggcatgtgtactctggaaataccacttactcagagacctgagatgcaggacagagtgctctgctgaagggcccagagaggactggttctggattgggcttcttgggaactctgccccaaatgtgcagaatgtgcaggaggcctggttccacttgagatctggggcaaatacagtgcttgggctgagctggtgattgcaaaactgaggccccctattagacagttttccatctaggcctgcccttctggcttgggcttgttcccagagctgctttcctgtctctcccttgaatcttcttttctgaagcccctgtgtctctgccctaattcatcat

SEQ ID NO: 55576 - DNA, 709 bp, Homo sapiens
ataataattttccacaaattaaaaaaattaaacaatggggaatttcaatccatgaccaattagcagggaacaggcaatcataaaacatttagactagtgggcactatttattatcttacaaaatgtttactcattgtagtgcatgtctcaaacctgtgtgctgctcaaatgctgattgcaaaatataaataaaaaattctttgcaaatcacgttagagacattctaagttaattaggttgaaagagggaaaaaatttacaacaataagtctacaactattgacacagcaaccgcattccagaattgtgtggttatctgttggggaatcagtccataaatacacaatctgaagtcccctgtgctttggccaaataatagcattgtagtaataaacataccagacattttataaacttgcaaggtcttgaatactgatacatgttttattctgaactttgctttgtaatttacctttaattttcctgctacaattgaagagtgagccctgcaatcttaatttcccattatcctcaattacttcgtacttttaacctagatacctttgaactgttgttgccaacattccagtttgataaaactctggaatctctaaaaaatgttatatttaaacattaaagaaaaaactagattgaaaggaacaatgtgttacagaactgactttcctttagagtttagattagacacagct

SEQ ID NO: 55577 - DNA, 488 bp, Homo sapiens
aatttaagaattcagaatttttaatactaaaagttggcaaggatgtgaggcaatagaaactctcatatattgctgtcagagtataaatttgtaataccattttggaaaataatttgttataatctaacacagctgaagttgcacatactcttgactctgatttcattcctatgtatttatccaagagaagctcttgcacaagtgcatcaggagacatctattaggaatggtcattacaacactgtgtttagttacaacaccgttttcattgccagggcaatgaaatatccttcaatagcagaatgggcttaaacatcagtgaaaataaataagccgtaactacatgaagcaacatgtatgaatatcataagctgctgctcaatgaatacttattttatcagtgaataaacaggatgattccaatcacaagaaggtcaaaatcaggcaaaactaaactgaattatattttaagagtacatccttattgg

SEQ ID NO: 55578 - DNA, 1384 bp, Homo sapiens
gagctaactgaaaatgaaaataaaacatcaaaatttgtgtgatgtgatgaaagcagtgcttatagaaaaatttctatcattgaatgcacatattagaaaagaagaaagatctaaagtcagtaaactaagctttgacctttggaaactagaaaagaagagcaaattacatccagagtaagcaaataaagaaaataaaagttagaattgaaatcaatgatactgaaaacagaaaatcagtagagaaaaatcaataaaataaaaggctgcttctttgaaaagctcaataagcctctagccaggctaattaagaaaaaaaaaaaaaggcacaaattactaacaaatgaaatgaaagacgggatatcagtacagattgttctgggcgggagacccgcaagaggagaagaaaaggcacacacacaatacctttaaaggtaaacaagctttatcccatgtaaatggcaatgtagatataataagcaaattatataataagcaaagtaataaaataagcaaatgatataataagcaaattgcaacgcaaaggggagaagggaaaagagataaatgtctctacactcaccagactatggaggattcaccaccagactgggaagcaacagtctgggctccagagttggacactgcactcaccagactatggaggattcaccatgccagaggtggtgaattcctcttcaaagggtttaattgtgtaatgtccttggttcaaaggccccaccttcttgtactttctcatttttagcctgcaagcagccctcctgctcttgctgtgccctaacttgcccagacatgtccagacacgtcttgtgccatagcagaagaaccacttctacccgctcccttgcgaattgtgcatctaccctatttgttcagtgtgctcttgtgatcgtggctgatgcagggagcacccttctgcagaagtaaattgccttgctgagaacgctttttgcctgagtgctggtttcactttgcagcaccaagcacttgtttctaacaaccactagactgggaagcaacagcctgggctctatagtcagccacttgtctgtgcacagacaaagagaggtctcatgaagcttcagcacagtgtgggaccctagctgtttttgtaacgagttgtttggcaggaggtccagtcatgaaggcccttcgtgactggactcaaggaacacaaaaaggtcaacttgtttttgtgactatctattgcttttctttttttttttttttgagatgagtcctgctctgtcgcccaggctggagtgcagtggcacgatcttggctcactgcaacctccgcctcctgggttcaagtgattctcctgcttcagcctcctgagtagctgggattacaggtgcccgccatc

SEQ ID NO: 55579 - DNA, 652 bp, Homo sapiens
cgtgcaattcttcatgtcactacaacttggttattcactgaaacaactgatcttattacaaaacaagttaaagaaacaaacaaagcctccttcagttcctgccttgattcattattagaattcacctttcctttcacctcacccacaatcccagatatttgaaggccaaatgttgttctctctgaaagacaggacattagacaatttaaacatcagcaaattgagttcagctatccttagtcactgactgatgactctattcctatttgtacatttttaaagtaatacttatgtccttcctggaagttctttttgcattccagattacgacagggactaaagtacaacaaagaaaaaacgcaaaaagtcaagtgtcaggcagaataagatccataagcatacatatatgtaagtctgggtcaaattcaccagggtattaatctttattttaaaattacaagtaatatttatcaaattttgcccaaagtaatttaattctggcttagtatcaaattttaaaatatggtcagaggtatacatttcaaacatatgtaagcagaaaatatttacaaagaatttaaattctataataaataatatttggttgtaccatatatcctctttctaatgtcatgtgataatcagatgtaaa

SEQ ID NO: 55580 - DNA, 721 bp, Homo sapiens
tcatattgaacttctaaaaagaaatgaaacaaactagactacatgaggtttatacagcatatgacttggggcatgtattcatcaaaatgactatggcccccacaactctactataatgttcgaaagttatcctaattattaaatccataagcctatttttagtccttattatacatgacattttcagcacatttgacatttgttatttcctcctccttgaaattctatatacccagggttttccatgataccatatcatgctatcttggttcttttgcaatacctctgactactcctatttagtttccaggctgccactgctttatctaccttttgaatattgatttttctctgagtacaattctgaggccactctttttttcactcttgcacatttcctaggcaatctcacatttttcttcatatttgacaatcagctggctactgacaattgccaagttaaatctcacttttctccttacctcctgactcacatgtctaaacacctaaatgacatctctaccttgattatagaccatcacctttcactcagcatttccttccctcatccaaattcatttcttctcctgaattccctatttgtatccatagcatcatgacacatattacctctcatccactctttctactttacccctcacattcattcattactaaattttactaatctgaactttcaaatttctctagcatccatacc

SEQ ID NO: 55581 - DNA, 828 bp, Homo sapiens
tcaacaccagcctgggtaacatggtgaaaccccatctctacaaaaaataagaaaattagccaggcatggtggcgtgcacctgtagtcccagctactcggcaggctgaggtgggaagatgaactgagcctgggagatcaaggcttcagtaaactgtgattgtgcgactgccttcctgcctggtcaacagagtgagacgaaaggaaaggaaaaagagaagggaaggcaagagaaggaagagaggggagaggggaggaaaaagggagggagggacagactttctagaattagaaaaaaaaaaaatctcaataatactgaggcaggagaataggacctggtggcagggaacctaaggacttcctagaactaaatcaaacagaaaaaccccaactttctacatccaagtaaataattgtgtaatttcccttcagctatgtcaggaaacatcctctttatttgcatagggtgtacaccaagtaaataactttgtaacttcacttcatcctcttcatttacataaggcatacactgcataaccaatgggaatcctctagagggtatttaaaccccagaaaattctgtaaccagcactctcaagctgcttgctcaagcccattcccaccctgtggagtgtactttcatttcaataaatctgtaattttctgtcattgctttgtttgtgcattttgtccaattctttcttcaaaacaccaagaacctggacaccctccaccaataacagtaagaagtcaaacaacccaataaaaaagagcacaaatttgatcagacactttacaaaaaaatacacaaatggcaacaagcacccgaaa

SEQ ID NO: 55582 - DNA, 2287 bp, Homo sapiens
acaattgacctcaatcaggtcatgactggtgaaagagaaaagaacatgaaaggttcccactaaaggagaggaagttcttaggagaggaataatgaaagagagagtggaccaagagtgggtagaacaatggtattctgagctaccaatggctgtaaccatcaggaaaacacaatctcagcatctctgaaaaatgaaggggctgtagagctgatatctcaaattccttgcaaatgtgggactagaattgccctaaaatagaagtggtttcccagctcaatttgttattacattatgcttagctacatagtaatacaagagaatacaaatacagaaataaacgtgcatgaaccctgaattctcttaagttgtggaagtccgtcaattaaagtgtaaaatacaatgcatttgcccaattgttccttacgacgaaaattctgtgacaaataaaaagaacaatgaaaacacattaaagtgaaacaagatcaccttcagcggtcagctggctgtccttagttaaaagacaagtcatgtcactgtgaagtgaccgtcacatttgtcctgaaagaatagggagcatttcctagaaaggggtaaaagtgcaaagaatcctgtccccttccctggtaccacgcgttccttggggaggtcactaggcccccaacagcacaggggtgagttagcactggactctcagcacttcctttcggagaggacaaccccctgcgtcactggttactcactcaggatgcagggcagaagtttatccccgaggaacttagcacagttggctcccgccctcccagccttgcggtcctgggcccaatctcagggctctctctgccccgggtaccctgcagcctccagcgggagggtcgcgagaccccaactcgcctccggcccgcccagcgggtgcgcccaggggctgggcagacgcggcgtcttccctccccctaccgtcgtgccggcccccccacgcccaccgccaggctcagcccagccgagaaggccggacgccgaccgcccgctcctccgagactcggcctggccctccccgacgcccgtccccgacgcccggccccgcggagcccactggacagcggccggggggcggggaggcccgggggcggtgccgccccacacccttacctggcttctcgtggtcatagcctaccacgatgaagtagtcagccagccgggccatggccgccgccgccgcgctcgggaagcgggtccccgtcgccgccctcgccgccgccgcccacccggcccgggagggctcagcattttccctgcagcggcagtagcggcagcggcagcgcttcagccatgtttgacaaccgaggcgcgctctgcgcttgcgcggcgcctagtgcccgctcctcccccgcccccacccgcgctggctcggctgccccaagcccgggcggcgagcccacctccaccctccgcgggcctcgcggactgctgcgctgggggagtgggcggtcgggcgtgttcccgccacgcgccgccaccgcggcccctggaggtggttcactttgaggcctggatgctgcttcacggccccctctgcctccctatttttcctaaagcagggggtccttccttccgccttctctattctgtttggatttggaagaagggatgtggagagttgaggggtcacttggaaagctggctgcttcctctgctccccaccaccaccaaagatgaaattctcccgccctcggttggaagcaaggaatttgcatcgacagggcttttgctgcacgtttcctgtttatgttgtgtagatgggaattttagaaacatgccaccgagcagacgggggagggagaggcttttacgcaatcctccaaggagcctcgggtttcaatgccgggtgggccgggggcggtcggcctgggcttcccccggagcgcccgggagagccagattccaccgaggaacgcggcatccccgggatcctcccgaactgggctggcctctccctggggagccccgcacgcctcggcttgcttccctcgcagcggtcccagggctctcgcagcccgagcaggtggacttccaacttccctgctcaaacatgcacaaaaatgaatagatggtcccgtccttccgtctcgggattatcaaagtcgcttgcttttttgttgaacctcctattgaccatttcgaatttggctggtgtgacattcaggtgaactcactttgtcatttgttaatatctcacgaagttttagtagaatttgtacaagtggtagaccaaagttttggaaatctccgt

SEQ ID NO: 55583 - DNA, 8495 bp, Homo sapiens
tttcttgccagaaatttaaagatgtttcttccttcacttccttccttccttgtactgtccttgctcaacgtgaatctacaatcactgccacttgaatggatgcaacttatgttaataaattgccaggatcagaactcccactgcagcatttccttctccatagaaccactgaaccagaaatgcattctagtgatttttttttgtcgttaacgatgattaattaaacaaactcgagatttcacgagaaaaaacatagatgcccagatttaacaaactccttatcttttttcgacttaaacccacgaagctttggggagcactctagcccctgctactcacccatgcaagcggggtgcgcgctcgcgcacacactcactcactccaagataggggctttctaggaaaatactttgagctgccaatccaagattttacttaaagaattgacttggttctcaagtgacagatctctaagtgccagagcggcaaagtgcaccaggctgataaagtgcatgccaagactctcaggtgggaattcttgtcacagccaagaggttgctggcataggcacccgaggctggcagagcctagcctctgagtctccctacactcctgggcttgctttcctttttgaagctgcctgcagctcaaagaggagtttgaaccaagggcacttgcttcgcgatcctcctggcagagccacagctcaagtttcccccacggaatcacgagcttttgtaaagggcagcgaggaggcagcgaggtggcagcgaggtacagtcgcagagttctctggagaacgaacacccccgccgcgccccaccccccaggactggtggagactggaaggaacgagtccagaccacgggaccttccctggccgtgggccgacgcctagctgtccttgacctccccagcagtcggaggcgcgcgcgggagaaatgaaagtaaaacctgtcctggcgcggaaccaagtggaagctggcgacaagtaggtcgcatcctcagagcgactgatagccagtcctggatctgcgcgaagagcttgactcgcagaggataaagtgaaaggaaaaggaaatgggagacaagggagaagaacaatagttaggctggggaggctcctggtcaccgagcaggcgttcagtaatagctgctgtctgcggtgcagacggactagtcgcccggccaggccacttcggtgactgccctgcgcccagccgggcggccggatccagaccagtgcgccgcgctgcactcctctaaccctccgcgtcccaaccccttaccagggccagggtcagggcccggaatctgtcctccgtcctcagatggaattcaggtccgctcaggtgactccttccaggaagagtccttaaataacttccgcgcggccatttcttccccaggtgcaatgtccactgttgagtcccgagagtgaaaaggcagctaagccagcagtgcgcggcccagacagaccactctgggcaaggtccgcgcgacccactgcccagccgcctttgcaccggagctcagagccatatggcagagtaggaaggaagcttaaaggtctgctggggaccggctctaagatggggactcgagagatgggacatgactcgcccaccttcacacagcgaattgccgggaggtgaggactagaagcctgtttggctagtggtctcgcacctttggcctctccgtcgagtcgctgggcttcaggacattcgattagaggagtggttagtaggaccccagaaacccacaagcacgaagcaggaagccccgtggcttagcctttccttcccagtttggcccccaggagagaagtaagaaagagaagaagctgtgatgaaagagcacaaacgggtgacaaacgtgtctagcgtgattcatcatgaacaggcacaaattctttgggcgggggctaggactctcctttgccccttgagaagttggtgaccccagcctagaggaatccacgccgcgccccagtcggccgtgctagcgtgtcgggccgagtagggactctgctgcttcctacctgcagggtgacttcccctctctgcagatacctcccctctctgagcttgaattttctacctgctgaaatgggaaaaggaatgttaccttccttgcctgactcaagggtggctgtgaagctcaaagtagactgggatgtggccgtgcttggtaaactgtaaaatgattagcatacgtgaagcgttagtgtgctccctggcagtcagtcctcacgtttacgatggattaatgaaggcagccaggcacaatctcaggttatgaccttataaggcataataggattacaaggaggcaaaatgaaacagtatatttcctcctaattttggttattcctatgtttccaaatagaaatgaaaattctgaaatttcagataattcccccctccaaatcccaattctcaatttagcttttctgagccttgtccctaccgtgaaatcttactagctcaccccgaaacgccggggtcttggtcctctgggggactagtgagtcctgctcctctcggctttgctccgtccctgccccggcccctccgcgggagtctggggtcgcggcccggtcaggcgccaagccggcaggggggcgcggtccacttgaggccacagctccccaggtccagggctcgggccatccgcgctgtcccttccgcgggctcttgctgttcttcgccaggaggctttgcactccgggccgcatgggtcctggataaggacctcaagaggttgtagtggcgccccttcgctccggcgtactgtctgaaccctgtgcccaaagagggctgtggcagttcctgcaccaaccgcctggagcccatacctaagccctctgggcacgagggacctcctctcccccgctcccccctccccccatcccaactccagccccaaaggaagcaatgcgcgcgtccgagagcaggagcgcgcgtggctgaggaaagaaagggaaggcaaccgggcagcccaggccccgccccgccgctcccccacccgtgcgcttataaagcacaggaaccagagctggccactcagtggtttcttggtgacactggatagaacagctcaagccttgccacttcgggcttctcactgcagctgggcttggacttcggagttttgccattgccagtgggacgtctgagactttctccttcaagtacttggcagatcactctcttagcaggtaggtgccgcagaccctgcgggttaagaggtggggtggggggcagtgcttgccaaggccctaaactgggagcgctgggtgaggggaacaacccactttggagggttctctgagagatagatacaccccatatcctgggcccagctcgtgcacacagctggaggtccagagacccagtcccctctgctccgtcagccaagttccaagaagttgagcagagaccctctgggagcctggcggggtgcagcggcctcccctgcggggcctgtcacccggccggcgcgtgcaaacgcctctggcgcctctctgcgcggagggagataagcgtctgagccagggaaagcgcgggctaaacccgcctcgccggggcccctgcccgccctccgtgccccgcccgggcggtgcagctggcccgggtgctcacgctcgactctctttcttcttttccagggtctgcgcttcgcagccgggatgaagctggtttccgtcgccctgatgtacctgggttcgctcgccttcctaggcgctgacaccgctcggttggatgtcgcgtcggagtttcgaaagaagtgagtccgggcagcgccttcccccttgctggtacctggcaggcaaggggaactgaccgttggtcccgaaggtctagaagtgaatgggagcagggacaggcctgggcgtcacctgaacgcacgcgaatcgggtctgcttgtgttttccaggtggaataagtgggctctgagtcgtgggaagagggaactgcggatgtccagcagctaccccaccgggctcgctgacgtgaaggccgggcctgcccagacccttattcggccccaggacatgaagggtgcctctcgaagccccgaagacaggtaactacgccctgtgctgtccagggacgggagggaaggaaggtgtgcgggaggagttctctgtctccactcccctggcccgggggatcgtcggggctggaccgcagctcagatggcgcgagcagtttccagctccctctggctctagaatggctcccgttcccggtgttggggccaaagctctgcttgatggggtctcaagttgcctttcttccccctccccccgcccgcagcagtccggatgccgcccgcatccgagtcaagcgctaccgccagagcatgaacaacttccagggcctccggagctttggctgccgcttcgggacgtgcacggtgcagaagctggcacaccagatctaccagttcacagataaggacaaggacaacgtcgcccccaggagcaagatcagcccccagggctacggccgccggcgccggcgctccctgcccgaggccggcccgggtcggactctggtgtcttctaagccacaagcacacggggctccagcccccccgagtggaagtgctccccactttctttaggatttaggcgcccatggtacaaggaatagtcgcgcaagcatcccgctggtgcctcccgggacgaaggacttcccgagcggtgtggggaccgggctctgacagccctgcggagaccctgagtccgggaggcaccgtccggcggcgagctctggctttgcaagggcccctccttctgggggcttcgcttccttagccttgctcaggtgcaagtgccccagggggcggggtgcagaagaatccgagtgtttgccaggcttaaggagaggagaaactgagaaatgaatgctgagacccccggagcaggggtctgagccacagccgtgctcgcccacaaactgatttctcacggcgtgtcaccccaccagggcgcaagcctcactattacttgaactttccaaaacctaaagaggaaaagtgcaatgcgtgttgtacatacagaggtaactatcaatatttaagtttgttgctgtcaagattttttttgtaacttcaaatatagagatatttttgtacgttatatattgtattaagggcattttaaaagcaattatattgtcctcccctattttaagacgtgaatgtctcagcgaggtgtaaagttgttcgccgcgtggaatgtgagtgtgtttgtgtgcatgaaagagaaagactgattacctcctgtgtggaagaaggaaacaccgagtctctgtataatctatttacataaaatgggtgatatgcgaacagcaaaccaataaactgtctcaatgctgattcattctctcggctcggctctcacgtctaggaagggagggtgccctggtcccggcccgcccaggagccttggggtcccgccgccgggcttgggaaggtgggacagcggcgcgtgcaggtgctggccctactctgagcgggctgagctgtcacgagctctgttctctgtgtggggcgcgcagaacacgtgtcctgggtgcgaatcagggcttcgcggagacgcccgaggtcaccgcctggcgtggcggccggcggggggtgggtagggggagccctagtgggttggcgagcctggactctcgggttgcgcaacggagtcctagatttatagggttgctcacagaacccggcgcgaaagcgagcttcgaagagttggggtggtctctgaggccttctaagagaggcgttccccctgcctgccgcggttgttaaagttccaagccgccctagcaatgcgtggggacacctccggaaaacccagtaacccctagtaaccccgggtctgcccgggcctgagcgcccgcgggccgctggctcatgggcgaggctgtagcgccccctgcaggcagctgagacaggcccagcgccgccaagcagtacgtgcggtttaataagttctcctacgtgggagtcagcacacagccttaatgaaagaggaaagaaagaaaaaaaaaaagagagaaagaaacagtttgcagatgccaaccagggccgtcctcctacaccccccagacctgcaccgcggctccctgttctgggacagtgactcagcgcccacacgctgcgctgcgtgcagctgccggctggaggcgggcaggacggacgtgccggcggaaccgtgagcctccgacggcctgagaccttcattgttccgcctcccctagccgctcacctcttccttcctccttcccaagccttttttcatttttttcttcacttttctccagccttcctctctctctctccttccttcctccttgctttctttatatgccttatcttctgagaaggttgaccccagttccggcgatagacggacactaagccccccttgagtgactagaaaggcaggggacataggaacagttaggacataagggaagagtaaagagagggacccctgattttgatttcagggtgccctgtttgtctcatccaatatcctgaagacccaagatggagaccagctacttgtcccttccaaaaagcttccctggccttaatgtcagtgcttgtaggtgatctcagaaacctccctggtgaagaaaacctgaaggtgagtttggagaatggaaatgtttccagggtagcctacggccttctggggcttttgcacattacagggtcccctccgaggggctaggatgtttagtttcttgcagaagaggactgcatacccactgagagagaggggccctactctggggtccagagatacctcattccaaagcagtttcaatttagaagaaagtaaactcgagtacatagaatttccttaagaccatacaaaacctcagtttgggcacctggctgttgacaatgccaatctcatatagtttattgtcctgtttgatcttaataattgtgtgaggtgtgccagaattgaggaggttagaaatgcagctacagaccattcttgtcctcaagggcctttcagaaaaagattcactttgtgggaactctgtgccaggcactgagaaggtaccaggcatgtatgaatgaaagagtgactcaagattcctgtcatggaatttctgtgccagtgagtgggttctgggtggtctgaaggggctacagaaactgcagagagcagcaaacacttaagcctcgcagacagtggcgcaagattactcctttccttgagccaaggttgtcctgtagccacaaagcactccagccaaacctcaccttggcacagcgtcagccagcaaacaaagctgccaaaggcaggttgggcacaagcttcgggcggttgtgagcagggaacaggcgtctagccttgtgctgaggaagtcttatgacttgagggaatccaaggcaagtgaaggagatggttcagccctaagacaaaagaggcagctgctcagctggagtccttcccgctgagaatcctgtgactggagacatgtgcgaggagacagagaccctcctaagaccagtttggtatgagttcaggattaaccaaaggtcaccatcaaaccccgggctcttctctttgaggtgctgaagcttatcaggatagggactattgatgccaagaacacattgtttatcaacagtgatgagtcatttgtgagctgattcgacctgtccacagctgaggagtagtcacagcttttatctttagctactgttgcttgctgtgggaatgataccatacatttgtaatcaaacacggggtatcaggcaatttcttgaaaagccaacaccttggctgaacagccaagggtgaaggggagtgatggggaggaatggaaacagattccttttttagcacttgcttggtgtcagatattctctttgccactttatacaccttatctcatttaattcttacaacagccttgtgaagtaggtgttatctgtttattgataaggaaacaacctcagagacataaagtaactcagccaaggttacacagtgaataataagcggtggagcctggatttgtacccaaatgctacaggctattttgatcctctaaaggcatatggagtaaagtgggataattttaacgtttagattctccagccaaatgtccccaaatgtcctctaaaacagggatagcttgtataggtgattcacacctgtggttctgaaagatttacatgagggctggtagaatagggaaggagagctgcttcaagcagtaagctcaatgagtgcaaaataaataaatgaactgagttttaaattcttggtcttggtttgaagaagggattataaatcaacctttttcctctcctgagctaagccactgacctctttggtttgaattgccaaatatagttaaaatatacactgaagcttcaagagctggtttcgggggggaaggccttctgagctattcctggccaaatacagccccacactgtaggtctta

SEQ ID NO: 55584 - DNA, 1616 bp, Homo sapiens
gcaaaacaattcagcaaaaacttgggttccaactctggtgctacactgtgacaatggaaactttccagctacaacttggaagttgggagccaagcacaatactaagtcaaggaaggtatttgaggccaaagcagacagtggtcttggcactgcctgctcctgagcccaagctgcagcagctgtggggtggtgatgcagctttcagagatctctaaatctctaagtacaccagaaaccagattttattaactccccttttccacttttttttgcccctacatttctgccatggattatatcataatagatggtgaaaatgctgtgaggtgtatactcaattcctaggcattcttccacttaatcatactcagttttctttgagggcctccacattgtaaatgagcaacaccttgatactgggaaaatgaatatgaaactcagggccacagcctctgtgatctggtcattctggggcagtcattttcctacttggcctacagaaccaggcaggtctctggcctgggggtggcgggtgatgttgtattctcttgtcaaagtgcacagagcccactctgagaagatgctatactcttcacgttacaagacggcaatatgcccgtttctgggccaattggctgactcagagatgaggagattattccgtgacactttgttttcattccagtccaaagggcaaaaaaaaaaaaaaaaaatgtaaaactctgctgccacctgctgtttctttaggaataaattcttgaaacggttctaggttgattgtatattggttatcttagccaagtgccttggtggtgaatttgggggattttggaatataagtttatgtagttgtgtaccaactggactgtcatttcctaggatgaactgttggaccacatgggtggcttctctctttcagtccattaagtcctgcctccctcatcccttgctgagactcaagggcagactccttgatcccagacaactttccaagggagttcacgcaaggctctgaccagtgaggctccagagcaaaacccaggaggcttataggtttaagtgtcttttctttatgggccaatgatgtctgaaaactgtagcagtaggtaaattccccaagcacagactattctctgctgggtgtcagtgggtggtattggaagtgcctctcagaagtgctcttctcagcttgaggttcatttgtgatgaggttcatttgtggtgtctccagatgttttatctttgtcttccttgaggaaactgaggcagattaaggaagacgagtgtccaggaaagtaaaggctagctccatttgaatcacacccaggtgagaatacttgagctcaggttagatgatgagagggatgaggaaaacagtggctcctcggagctcaaataaagagcactggagcattaatatagtcataagcttagatgggcttgataaagcccttagtcatcttattggaggcatccagaggacagaggctgccttgccttgactatattagtggcttgttgctgctccaaatcagaaagtgggattttcctttttgccttctttgggaagatccatttgtatgtaaatgagttctttttgattgcagtcattgttg
